United States Patent Application Publication US 2023/0272434 A1 - sequence listing, part 5

SEQ ID NO: 7005 - protein, 1376 aa, Clostera curtula
MEYMENKRYSLRPLPGGRRGASGADAGCHSMRTIGGEELSRRAPTEKNATADTSSHTHSSPSSSCNSLFPSPNSSPYHPHSRPSSSSSNTSVNVVQETYVTNPEPITGKKSARKKWSHEMNIFIWRTYLTLTKLETNTRGYLPLLHEKFSHNFPEMNVSRQRVGDQRRAIVNNKLIPQTTLDKIKQEISVNLEQDDQLTSTRTEPTGRMCWSNEINETILRIYYKITDLEQNCTGYRKMLREQFIETYPDLTHLTEQRISDQRRAIVNNRMIPENRMNEIKDEVRTHLLHTRHAETQAPPRNHYTQEQRPSIDSNLENEPRLSEMYDMQQTLIQQAEHTQLSESGRDSTNIQSNFSIPEFTQTRDFSVVPEETTSIFLEALHYFKDVEPTKRTYIPKQKTSKKFAILVQYFNDMILPQHIDSSTDFNTFQTILYSAAWAISKLNGARISILPSDKPLRTVRKQKWQIRLERKIKDLRAKISRLTHYINGNRTLHLTRHVNKICEQYKIHSRHEDANSDLTQFLDTLKQKLSAASGRLRRYNTCTLRKTQNSQFKSNEKQFYRNLKDTSNNNSNMPNLTKPNPEELHRFWTAVWDVETEHNPNSVWIDNLKSNCSHIPEMEFTQVTSDILENVIKKLHNWKTPGSDQIHNYWYKKFTSIHPYLLKYINEFIANPTLIPDYITIGTTYMIPKDSNDINDPAKYRPITCLQTLYKIITSCITEITQRHVNANNILAEEQKGCRKFSQGCKEQLIIDTVTSKHALNKKKDIFTMYIDYQKAFDSVPHSWLLFVLKLYKIHPALIDFLKHTIHNWKTILKLNFDTTALENNPIHIRRGIFQGDALSPLWFCLSLNPLSHLLNSSQKGFTICCNRTEYTLSHLMYMDDIKLYGSSLQELYDLADITHTFSQDIQMTFGIDKCKTFSMRKGKIEANSYSLLNGNSIDPVDAETGYKYLGYQQTLQIHHKIIKSTLQEKFKNRLHKILNTQLNSKNTIKAINTYAIPILTYSFGIIHWSQTDLKKLQRSIHTLLTKYRKHHPRSCVQRLTLPRFEGGRGLIDVQNLHNRQITSLRTFFWNQTDRSLLHKTIVNVDTKSSPLHLSDRNTQKCEAISTFEQKLVIWSQKSLHGRHRADLLKPTVDKKASNAWLERGELFPETEGFMSAIQDQIIDTRNYRKYIIKDRNLTTDICRHCHSSSETIQHITGACKSIAQTDYKHRHDQVAAIVHQYIALKYSLIDRKEPYYKYKPQTVLESRDYKLYWDRTIITDKTIHFNRPDILLLDKINKTAYLIDIAIPNSHNISATYTEKIAKYTDLAIELKTQWRVQTVKTIPIVLSSTGIIPHTLHTSLQTLGLHKLTYTLLQKATILNTCRIVRKFLSIEQ

SEQ ID NO: 7006 - protein, 1137 aa, Clostera curtula
MLREQFIEAYPNLTYLTEQRISDQRRAIVNNKMIPAHRIEQIKDEVRCHLLHTRQAETQSSVETYTTQQQHTSMETNLEIRPITQQIYDSQTSFVQQEEHTQLPESIRDDTNTHTNTYNYALQTRDSSIVDEQASTIFLEALHYYQTVEPTKRTYIPKQKTSRKLAILVQYFNETILPNHVDSSTSFSTFQTVLYSAAWAISKLNGARISLSSCNKTHRTVRKQKWQIRLERKIKDLRTKISRLTHYIQGNRTFHLTSHVNKIFEQYKIHSKHEDSNTDLTQFLDTLKQKLSAASGRLRRYNKCTLRKTQNAHFKSNEKQFYRNLKDTSNNNSNQSNPSTPNPEELHRFWTNVWYVETEHNQNAGWLDDIKINSYNIPGMEFTQVTPDILENVIKKLHNWKTPGSDQIHNYWYKKFTYLHPYLLKYINEFITNPTLIPNYITIGTTYMIPKDNSNFNDPAKYRPITCLQNLYKIITSCIAEIIQNHINTNNILAEEQKGCRRYTQGCKEQLIIDTITSKHVLNKKKDIFTMYIDYQKAFDSVPHSWLLFVLKLYKIHPALIDFLKNTMHNWKTVLKLNTDSEALENAPIHIRRGIFQGDALSPIWFCLALNPLSHLLNISHMGYRISYDRTEYTLTHLMYMDDIKLYGSTLQDLYELADITHTFSQDIQMTFGIDKCKTYSMRKGKPESNSYTLFDGNSIDPVDAETGYKYLGYQQTLQIHHKTIKSTLQEKFKNRVHKILNTQLNSKNTIKAINSYAIPILTYSFGVIQWSQTDLKKLQRLINTLLTKYRKHHPRSCVQRLTLPRFEGGRGLIDIQNLHNRQIASLRNFFWNQIDRSLLHKTIVNADRKSSPLNLSDRNTQKNEAITTFQQKLEIWSQKSLHGRHRADLLKPTVDKKASNAWLERGELFPETEGFMCAIQDQTIDTRNYRKYIIKDRNLTTDTCRHCHSSSETIQHITGACKSIAQTDYKHRHDQVAAIVHQYLAFKYSLTSKKEPYYKYKPQTVLESRDYKLYWDRTIITDKTIHYNRPDILLHDKQNKTVHLIDIAIPNSHNITTTYTEKIAKYTDLSIELKTQWRVQTVRTIPIILSSTGIIPQNLHTSLEALGIHKLTYTLLQKATILNTCRIVRKFLAIEP

SEQ ID NO: 7007 - protein, 1376 aa, Clostera curtula
MEYMENRRYSLRPLPGGRRGASGADAGCHSMRTIGGEGLNRRAPTDKNATADKSPYHTHSSPSSSCNSLFPSPSSSPYHPQSSSPSSSSNRSVNVVQEAGATNFESITDNKSARKKWTKDMNIFIWRTYLTVTKLESNTRGYLPLLHEKFSHNFPNMNVSRQRVGDQRRSIVNNKLLPQTTLDRIKHEVSINLEQDDQTTPLNPQPTGRMCWSKEINETILRIYYKITELEQNCTGYRKMLREQFIEAYPNLTHLTEQRISDQRRAIVNNKMIPAHRIEQIKDEVRCHLLHTRQAEPQSSVETYTTQQQNTSMETNLEIRPITPQIYDSQTSFVQQEEHTQLPESIRDDTNTHTNTDNYTLQTRDFSIVDEQASTIFLETLHYYQTVEPTKRTYIPKQKTSRKLAILVQYFNETILPNHVDSSTSFSTFQTVLYSAAWAISKLNGARISLSSCYKTHHTVRKQKWQIRLERKIKDLRTKISRLTHYIHGNRTFHLTSHVNKIFEQYKIHSRHEDSNTDLTQFLDTLKQKLSAASGRLRRYNKCTLRKTQNAHFKSNEKQFYRNLKDTSNNNSNQSNPSTPNPEELHRFWTNVWDVETKHNQNAGWLDDIKINSYNIPGMEFTQVTPDILENVIKKLHNWKTPGSDQIHNYWYKKFTYLHPYLLKYINEFITNPTLIPNYITIGTTYMIPKDNSNINDPAKYRPITCLQNLYKIITSCIAEIIQNHINTNNILAEEQKGCRRYTQGCKEQLIIDTITSKHVLNKKKDIFTMYIDYQKAFDSVPHSWLLFVLKLYKIHPALIDFLKNTMHNWKTLLKLNTDSEALENAPIHIRRGIFQGDALSPIWFCLALNPLSHLLNISHMGYRISYDTTEYTLTHLMYMDDIKLYGSTLHDLYELADITHTFSQDIQMTFGIDKCKTYSMRKGKPESNSYTLFDGNSIDPVDAETGYKYLGYQQTLQIHHKTIKSTLQEKFKNRLHKILNTQLNSKITIKAINSYAIPILTYSFGVIQWSQTDLKKLQRLINTLLTKYRKHHPRSCVQRLTLPRFEGGRGLIDIQNLHNRQIARLRNFFWNQIDRSLLHKTIVNADRKSSPLNLSDRNTQKNEAITTFQQKLEIWSQKSLHGRHRADLLKPTVDKKASNAWLERGELFPETEGFMCAIQDQTIDTRNYRKYIIKDRNLTTDTCRHCHSSSETIQHITGACKSIAQTDYKHRHDQVAAIVHQYLAFKYSLTSKKEPYYKYKPQTVLESRDYKLYWDRTIITDKTIHYNRPDILLHDKQNKTVYLIDIAIPNSHNITTTYTEKIAKYTDLSIELKTQWRVQTVRTIPIILSSTGIIPQNLHTSLEALGIHKLTYTLLQKATILNTCRIVRKFLAIEP

SEQ ID NO: 7008 - protein, 1368 aa, Clostera curtula
MEYMENKRYSLRPLPGGRRGASGADAGCHSMRTIGGEELSRRAPTEKNATADTSSHNHSSPSSSCNSLFPSPNSSPYHPQSRPSSSSSNTSVNVVQETYVTNPEPITGKKSARKKWSHEMNIFIWRTYLTLTKLETNTRGYLPLLHEKFSHNFPEMKVSRQRVGDQRRAIANNKLIPQTTLDKIKQEISVNLEQDDQLTSTRTQPTGRMCWSNEINETILRIYYKITDLEQNCTGYRKMLREQFIETYPNLTHLTEQRISDQRRAIVNNRMIPENRMDEIKDEVRTHLLHTRHAETQAPPRNHYTQQQRPNIDSNLVNDMQQTLIQQAEHTQLSESGRDSTNIQSNFSIPEFTQTRDFSVVPEETTSIFLEALHYFKDVEPTKRTYIPKQKTSKKFAILVQYFNDMILPQHIDSSTDFNTFQTILYSAAWAISKLNGARISILPSDKPHRTVRKQKWQIRLERKIKDLRAKISRLTHYINGNRTLHLTRHVNKICEQYKIHSRHEDANSDLTQFLDTLKQKLSAASGRLRRYNTCTLRKTQNSQFKSNEKQFYRNLKDTSNNNSNMPNLTKPNPEELHRFWTAVWDVETEHNPNSVWIDNLKSNCSHIPEMEFTQVTSDIFENVIKKLHNWKTPGSDQIHNYWYKKFTSIHPYLLKYINEFIANPTLIPDYITIGTTYMIPKDSNDINDPAKYRPITCLQTLYKIITSCITEITQRHVNANNILAEEQKGCRKFSQGCKEQLIIDTVTSKHALNKKKDIFTMYIDYQKAFDSVPHSWLLFVLKLYKIHPALIDFLKHTIHNWKTILKLNFDTTALENNPIHIRRGIFQGDALSPLWFCLSLNPLSHLLNSSQKGFTICRNRTEYTLSHLMYMDDIKLYGSSLQELYDLADITHTFSQDIQMTFGIDKCKTFSMRKGKIEANSYSLLNGNSIDPVDAETGYKYLGYQQTLQIHHKIIKSTLQEKFKNRLHKILNTQLNSKNTIKAINTYAIPILTYSFGIIHWSQTDLKKLQRSIHTLLTKYRKHHPRSCVQRLTLPRFEGGRGLIDVQNLHNRQITSLRTFFWNQTDRSLLHKTIVNVDTKSSPLNLSDRNTQKCEAISTFEQKLVIWSQKSLHGRHRADLLKPTVDKKASNAWLERGELFPETEGFMSAIQDQIIDTRNYRKYIIKDRNLTTDICRHCHSSSETIQHITGACKSIAQTDYKHRHDQVAAIVHQYIALKYLLIDKKEPYYKYKPQTVLESRDYKLYWDRTIITDKTIHYNRPDILLLDKINKTAYLIDIAIPNSHNISTTYTEKIAKYTDLAIELKTQWRVQTVKTIPIVLSSTGIIPHTLHTSLQTLGLHKLTYTLLQKATILNTCRIVRKFLSIEQ

SEQ ID NO: 7009 - protein, 1373 aa, Clostera curtula
MEYMENRRYSLRPLPGGRRGASGADAGCHSMRTIGGEGLNRRAPTDKNATADKSPYHTHSSPSSSCNSLFPSPSSSPYHPQSSSPSSSSNRSVNVVQEAGATNFESITDNKSARKKWTKDMNIFIWRTYLTLTKLESNTRGYLPLLHEKFSHNFPNMNVSRQRVGDQRRSIVNNKLLPQTTLDRIKHEVSINLEQDDQSTPLNPQPTGRMCWSKEINETILRIYYKITDLEQNCTGYRKMLREQFIEAYPNLTHLTEQRISDQRRAIVNNKMIPAHRIEQIKDEVRCHLLHTRQAETQSSVETQQQHTSMETNLEIRPITQQIYDSQTSFVQQEEHTQLPESIRDDTNTHTNTYNYALQTRDSSIVDEQASTIFLEALHYYQTVEPTKRTYIPKQKTSRKLAILVQYFNETILPNHVDSSTSFSTFQTVLYSAAWAISKLNGARISLSSCNKTHRTVRKQKWQIRLERKIKDLRTKISRLTHYIHGNRTFHLTSHVNKIFEQYKIHSKHEDSNTDLTQFLDTLKQKLSAASGRLRRYNKCTLRKTQNAHFKSNEKQFYRNLKDTSNNNSNQSNPSTPNPEELHRFWTNVWDVETEHNQNAGWLDDIKINSYNIPGMEFTQVTPDILENVIKKLHNWKTPGSDQIHNYWYKKFTYLHPYLLKYINEFITNPTLIPNYITIGTTYMIPKDNSNFNDPAKYRPITCLQNLYKIITSCIAEIIQNHINTNNILAEEQKGCRRYTQGCKEQLIIDTITSKHVLNKKKDIFTMYIDYQKAFDSVPHSWLLFVLKLYKIHPALIDFLKNTMHNWKTVLKLNTDSEALENSPIHIRRGIFQGDALSPIWFCLALNPLSHLLNISHMGYRISYDRTEYTLTHLMYMDDIKLYGSTLQDLYELADITHTFSQDIQMTFGIDKCKTYSMRKGKPESNSYTLFDGNSIDPVDAETGYKYLGYQQTLQIHHKTIKSTLQEKFKNRVHKILNTQLNSKNTIKAINSYAIPILTYSFGVIQWSQTDLKKLQRLINTLLTKYRKHHPRSCVQRLTLPRFEGGRGLIDIQNLHNRQIASLRNFFWNQIDRSLLHKTIVNADRKSSPLNLSDRNTQKNEAITTFQQKLEIWSQKSLHGRHRADLLKPTVDKKASNAWLERGELFPETEGFMCAIQDQTIDTRNYRKYIIKDRNLTTDTCRHCHSSSETIQHITGACKSIAQTDYKHRHDQVAAIVHQYLAFKYSLTSKKEPYYKYKPQTVLESRDYKLYWDRTIITDKTIHYNRPDILLHDKQNKTVYLIDIAIPNSHNITTTYTEKIAKYTDLSIELKTQWRVQTVRTIPIILSSTGIIPQNLHTSLEALGIHKLTYTLLQKATILNTCRIVRKFLAIEP

SEQ ID NO: 7010 - protein, 1376 aa, Clostera curtula
MEYMENKRYSLRPLPGGRRGASGADAGCHSMRTIGGEELSRRAPTEKNATADTSSHTHSSPSSSCNSLFPSPNSSPYHPHSRPSSSSSNTSVNVVQETYVTNPEPITGKKSARKKWSHEMNIFIWRTYLTLTKLETNTRGYLPLLHEKFSHNFPEMNVSRQRVGDQRRAIVNNKLIPQTTLDKIKQEISVNLEQDDQLTSTRTEPTGRMCWSNEINETILRIYYKITDLEQNCTGYRKMLREQFIETYPNLTHLTEQRISDQRRAIVNNRMIPENRMNEIKDEVRTHLLHTRHAETQAPPRNHYTQQQRPSLDSNLENEPRLSEMYDMQQTLIQQAEHTQLSESGRDSTNIQSNFSIPEFTQTRDFSVVPEETTSIFLEALHYFKDVEPTKRTYIPKQKTSKKFALLVQYFNDMILPQHIDSSTDFNTFQTILYSAAWAISKLNGARISILPSDKPLRTVRKQKWQIRLERKIKDLRAKISRLTHYINGNRTLHLTRHVNKICEQYKIHSRHEDANSDLTQFLDTLKQKLSAASGRLRRYNTCTLRKTQNSQFKSNEKQFYRNLKDTSNNNSNMPNLTKPNPEELHRFWTAVWDVETEHNPNSVWIDNLKSNCSHIPEMEFTQVTSDILESVIKKLHNWKTPGSDQIHNYWYKKFTSIHPYLLKYINEFIANPTLIPDYITIGTTYMIPKYSNDINDPAKYRPITCLQTLYKIITSCITEITQRHVNANNILAEEQKGCRKFSQGCKEQLIIDTVTSKHALNKKKDIFTMYIDYQKAFDSVPHSWLLFVLKLYKIHPALIDFLKHTIHNWKTILKLNFDTTALENNPIHIRRGIFQGDALSPLWFCLSLNPLSHLLNSSQKGFTICCNRTEYTLSHLMYMDDIKLYGSSLQELYDLADITHTFSQDIQMTFGIDKCKTFSMRKGKIEANSYSLLNGNSIDPVDAETGYKYLGYQQTLQIHHKIIKSTLQEKFKNRLHKILNTQLNSKNTIKAINTYAIPILTYSFGIIHWSQTDLKKLQRSIHTLLTKYRKHHPRSCVQRLTLPRFEGGRGLIDVQNLHNRQITSLRTFFWNQTDRSLLHKTIVNVDTKSSPLNLSDRNTQKCEAISTFEQKLVIWSQKSLHGRHRADLLKPTVDKKASNAWLERGELFPETEGFMSAIQDQIIDTRNYRKYIIKDRNLTTDICRHCHSSSETIQHITGACKSIAQTDYKHRHDQVAAIVHQYIALKYSLIDRKEPYYKYKPQTVLESRDYKLYWDRTIITDKTIHFNRPDILLLDKINKTAYLIDIAIPNSHNISTTYTEKIAKYTDLAIELKTQWRVQTVKTIPIVLSSTGIIPHTLHTSLQTLGLHKLTYTLLQKATILNTCRIVRKFLSIEQ

SEQ ID NO: 7011 - protein, 1437 aa, Hestina assimilis
MENKNKRYNLRPLPGGRRGASGANAGCYSMRSVGDGGLNRRVPLEKHMTAERSSSSSSPTSMFINFPSPSSCNSPFQSPNSSSSSSPSSSHLIHNTMSAAVMREANAINSASTAGVTRARKKWSQDMNIFIWRTYLIITKCETIHKNNYLEPLHIQFTQKYPEFLTSRQRLGDQRRAILRRKLIPDNILDEIRKEVTEHIQSEKETDNTNYRQEQTLHSSLRSQTSHTRMKWTNEYNEAIMTIYYKITHLERNKTAYRKSLYQEFVNLFPHLENISEQRIADQRRAIVNNKYVPDSRLKIIKEEVARQLELTNDEVERQNDTSALLTSSRNTGPGAAIAKEPILSQNCKDLHTMTTCTLSDISRSSIHNHTQNTMPIHTQINTPALTILTSLANTHHSQEDCNEIYISNVAEPPHRNKEIDDCFGEAFQHFSNTNPPERPYIPKQKATRKLAIIVHYINKIILPEQINENTDFNSFQTIIYTSAWVAAKTNGAKLNLLPTQTKKPPNSKAKWQIRLERKIEDLRVNIGRLTMYIQGNRSSRLRKHVKNICKKYEIHARHEDVNSEFTHILDTLKQKLSAVTSRLKRYNKCTLRKLQNNQFRSNEKQFYRSFATQSHNYTTPNTPHMHPPQINLAQQNSNSTLTLEELQRFWKALWDDPVQHNANGSWSEILHAKYLDIPQMDFTDISRDTFDRVIRKLHNWKAPGSDHIHNYWFKKFTYIHSYLHSFINKFIQNPNVMPKYITTGTTFMLPKDSNDMTNPSKYRPITCLQTTYKILTSCIAETIYAHTETNNILHEEQKGCRKQSQGCKEQLTIDAVVSNQAYVQKRDIHTMYIDYQKAFDSVPHSWLTHILELYKIHPTIIHFLKTSMQSWSTKLQLVLNNTKAVTSEINIRRGIFQGDALSPLWFCLALNPLSSLLNNTSKGFEIQSNIRNHTISHLMYMDDIKLYADTLENLHHLVDVTQTFSKDICMQFGIDKCKIQSVRNGQIEFNQYTLQSSEIIDPVDTSTGYKYLGYQQTQKIHQKQTKTTLENNFITRLHKILNTQLNAKNLIKAINTYAIPALTYSFGIIQWSQTDLKRLQRKINTLLTKYRKHHPRACLQRQTLPRSEGGRGLIDIQNLHNKQITTLRTFFHNQADRSPLHTCITHADKKLTPLNLGDHHTQKNENIITIEKKLEDWIQKSLHGRHRQDLLKPNVDKNASNAWLVRGELFPETEGFMIAIQDQTIDTKNYRKYIIKDRTITSDICRHCHSSPETIQHITGACKSIAQTDYKHRHDQVAAIIHQYLAHKHSLIAQKVPYYKYTPDTVLESSEYKLYWDRTIITDKTIHFNRPDILLYDKTKSTIYLIDIAIPNTHNLTSTHTEKIAKYTDLAIELKTQWRVQTVRTIPIIISSTGIICHTLHTSLAVLGIHHLTYTLIQKATILNTCRIVRKFLSLE

SEQ ID NO: 7012 - protein, 1068 aa, Clostera curtula
MFSQLLNLPWTHTNISRPKLAKSLQPFSSFSETNEQRFIFIYRDDTNTDNYALQTRDFSIVDEQASTIFLEALHYYQTVEPTKRTYIPKQKTSRKLAILVQYFNETILPNHVDSSTSFSTFQTVLYSAAWAISKLNGARISLSSCNKTHRTVRKQKWQIRLERKIKDLRTKISRLTHYIHGNRTFHLTSHVNKIFEQYKIHSRHEDSNTDFTQFLDTLKQKLCAASGRLRRYNKCTLRKTQNAHFKSNEKQFYRNVKDTSNNNSNQSNPSTPNPEELHRFCTNVWDVETEHNQNAGWLDDIKINSYNIPGMEFTQVTPDILENVIKKLHNWKTPGSEQIHNYWYKNFTYLHPYLLKYINEFITNPTLIPNYITIGTTYMIPKDNSNINDPAKYRPITCLQNLYKIITSCIAEIIQNHINTNNILAEEQKGCRRYTQGCKEQLIIDTITSKHVLNKKKGIFTMYIDYQKAFDSVPHSWLLFVLKLYKIHPALIDFLKNTMHSWKTVLKLNTDSEALENAPIHIRRGIFQGDALSPIWFCLALNPLSHLLNISHMGYRISYDRTEYTLTHLMYMDDIKLYGSTLQDLYELADITHTFSQDIQMTFGIDKCKTYSMRKGKPESNSYTLFDGNSIDPVDAETGYKYLGYQQTLQIHHKTIKSTLQEKFKNRVHKILNTQLYSKNTIKAINSYAIPILTYSFGVIQWSQTDLKKLQRLINTLLTKYRKHHPRSCVQRLTLPRFEGGRGLIDIQNLHNRQIASLRNFFWNQIDRSLLHKTIVNADRKSSPLNLSDRSTQKNEAITTFQQKLEIWSQKSLHGRHRADLLKPTVDKKASNAWLERGELFPETEGFMCAIQDQTIDTRNYRKYIIKDRNLTTDTCRHCHSSSETIQHITGACKSIAQTDYKHRHDQVAAIVHQYLAFKYSLKSKKEPYYKYKPQTVLESRDYKLYWDRTIITDKTIHYNRPDILLHDKQNKTVYLIDIAIPNSHNITTTYTEKIAKYTDLSIELKTQWRVQTVRTIPIILSSTGIIPQNLHTSLEALGIHKLTYTLLQKATILNTCRIVRKFLAIEP

SEQ ID NO: 7013 - protein, 1372 aa, Clostera curtula
MEYMENRRYSLRPLPGGRRGASGADAGCHSMRTIGGEGLNRRAPTDKNATADKSPYHTHSSPSSSCNSLFPSPSSSPYHPQSSSPSSSSNMSVNVVQEAGATNFESITDNKSARKKWTKDMNIFIWRTYLTLTKLESNTRGYLPLLHEKFSHNFPNMNVSRQRVGDQRRSIVNNKLLPQTTLDRIKHEVSINLEQDDQSTPLNPQPTGRMCWSKEINETILRIYYKITDLEQNCTGYRKMLREQFIEAYPNLTHLTEQRISDQRRAIVNNKMIPAHRIEQIKDEVRCHLLHTRQAETQSSVETYTTQQQHTSMETNLEIRPITQQIYDSQTSFVQQEEHTQLPESIRDDTNTHTNTYNYALQTRDSSIVDEQASTIFLEALHYYQTVEPTKRTYIPKQKTSRKLAILVQYFNETILPNHVDSSTSFSTFQTVLYSAAWAISKLNGARISLSSCNKTHRTVRKQKWQIRLERKIKDLRTKISRLTHYIQGNRTFHLTSHVNKIFEQYKIHSKHEDSNTDLTQFLDTLKQKLSAASGRLRRYNKCTLRKTQNAHFKSNEKQFYRNLKDTSNNNSNQSNPSTPNPEELHRFWTNVWDVETEHNQNAGWLDDIKINSYNIPGMEFTQVTPDILENVIKKLHNWKTPGSDQIHNYWYKKFTYLHPYLLKYINEFITNPTLIPIGTTYMIPKDNSNFNDPAKYRPITCLQNLYKIITSCIAEIIQNHINTNNILAEEQKGCRRYTQGCKEQLIIDTITSKHVLNKKKDIFTMYIDYQKAFDSVPHSWLLFVLKLYKIHPALIDFLKNTMVNWKTVLKLNTDSEALENAPIHIRRGIFQGDALSPIWFCLALNPLSHLLNISHMGYRISYDRTEYTLTHLMYMDDIKLYGSTLQDLYELADITHTFSQDIQMTFGIDKCKTYSMRKGKPESNSYTLFDGNSIDPVDAETGYKYLGYQQTLQIHHKTIKSTLQEKFKNRVHKILNTQLNSKNTIKAINSYAIPILTYSFGVIQWSQTDLKKLQRLINTLLTKYRKHHPRSCVQRLTLPRFEGGRGLIDIQNLHNRQIASLRNFFWNQIDRSLLHKTIVNADRKSSPLNLSDRNTQKNEAITTFQQKLEIWSQKSLHGRHRADLLKPTVDKKASNAWLERGELFPETEGFMCAIQDQTIDTRNYRKYIIKDRNLTTDTCRHCHSSSETIQHITGACKSIAQTDYKHRHDQVAAIVHQYLAFKYSLTSKKEPYYKYKPQTVLESRDYKLYWDRTIITDKTIHYNRPDILLHDKQNKTVYLIDIAIPNSHNITTTYTEKIAKYTDLSIELKTQWRVQTVRTIPIILSSTGIIPQNLHTSLEALGIHKLTYTLLQKATILNTCRIVRKFLAIEP

SEQ ID NO: 7014 - protein, 1376 aa, Clostera curtula
MEYMENRRYSLRPLPGGRRGASGADAGCHSMRTIGGEGLNRRAPTDKNATADKSQYHTHSSPSSSCNSLFPSPSSSPYHPQSSSPSSSSNMSVNVVQEAGATNFESITDNKSARKKWTTDMNIFIWRTYLTLTKLESNTRGYLPLLHEKFSHNFPNMNVSRQRVGDQRRSIVNNKLLPQTTLDRIKHEVSINLEQDDQSTPLNPQPTGRMCWSKEINETILRIYYKITDLEQNCTGYRKMLREQFIEAYPNLTHLTEQRISDQRRAIVNNKMIPAHRIEQIKDEVRCHLLHTRQAETQSSVETYTTQQQHTSMETNLEIRPITQQIYDSQTSFVQQEEHTQLPESIRDDTNTHTNTYNYALQTRDSSIVDEQASTIFLEALHYYQTVEPTKRTYIPKQKTSRKLSILVQYFNETILPNHVDSSTSFSTFQTVLYSAAWAISKLNGARISLSSCNKTHRTVRKQKWQIRLERKIKDLRTKISRLTHYIQGNRTFHLTSHVNKIFEQYKIHSKHEDSNTDLTQFLDTLKQKLSAASGRLRRYNKCTLRKTQNAHFKSNEKQFYRNLKDTSNNNSNQSNPSTPNPEELHRFWTNVWDVETEHNQNAGWLDDIKINSYNIPGMEFTQVTPDILENVIKKLHNWKTPGSDQIHNYWYKKFTYLHPYLLKYINEFITNPTLIPNYITIGTTYMIPKDNSNFNDPAKYRPITCLQNLYKIITSCIAEIIQNHINTNNILAEEQKGCRRYTQGCKEQLIIDTITSKHVLNKKKDIFTMYIDYQKAFDSVPHSWLLFVLKLYKIHPALIDFLKNTMHNWKTVLKLNTDSEALENAPIHIRRGIFQGDALSPIWFCLALNPLSHLLNISHMGYRISYDRTEYTLTHLMYMDDIKLYGSTLQDLYELADITHTFSQDIQMTFGIDKCKTYSMRKGKPESNSYTLFDGNSIDPVDAETGYKYLGYQQTLQIHHKTIKSTLQEKFKNRVHKILNTQLNSKNTIKAINSYAIPILTYSFGVIQWSQTDLKKLQRLINTLLTKYRKHHPRSCVQRLTLPRFEGGRGLIDIQNLHNRQIASLRNFFWNQIDRSLLHKTIVNADRKSSPLNLSDRNTQKNEAITSFQQKLEIWSQKSLHGRHRADLLKPTVDKKASNAWLERGELFPETEGFMCAIQDQTIDTRNYRKYIIKDRNLTTDTCRHCHSSSETIQHITGACKSIAQTDYKHRHDQVAALVHQYLAFKYSLTSKKEPYYKYKPQTVLESRDYKLYWDRTIITDKTIHYNRPDILLHDKQNKTVYLIDIAIPNSHNITTTYTEKIAKYTDLSIELKTQWRVQTVRTIPIILSSTGIIPQNLHTSLEALGIHKLTYTLLQKATILNTCRIVRKFLAIEP

SEQ ID NO: 7015 - protein, 1372 aa, Clostera curtula
MEHMENKRYSLRPLPGGRRGASGADAGCHSMRTIGGEGLSRRTPTDKNATADITSSHTHSSPPSPCNSLFPSPSSSPYHPPSRTSSISSNMSVNVVQEAYATNSEPITVNKSARKKWTYEMNIFIWRTYLIVTKLESNTRGYLPLLHEKFSHNFPEMTVSRQRIGDQRRAIVNNKLLPQTIMDSIKNEIATNLQEDEQSTPFRTQTTGRMYWSNDINETILRIYYKITELERKCTGYRRQLHEQFIDAYPNLSHLTEQRISDQRRIIINNRMVSENRIEQIKDEVRSQLLNTPHAEIPEPVDSNSALRRHTTMDANLENDITISQTYDNQTTSIHQTENTQLPGSIRSSTNTQTNTVSSELDSHALSVVDEQVNIVFLEALNYYKDVEPTKRTYIPKQNTSKKLAILVQYFNDVILPQHIDNNTDFSTFQTILYSAAWTISKLNGSKMSLQPSNKPHRIVRKQKWQIRLERKIKDLRTKISRLTHYIKGNRTPHLTNHVNKICEQYKVHSKHEGSNADLTQFLDTLKQKLSAASARLRRYNKCTLRKNQNTQFKYNEKQFYRNLANTSNDNLNQSKPNPEELHRFWTAVWDVEAVHNSNAEWIDDVITGSSHIPLMEFMEVSSEIFENVIKKLHNWKTPGSDQIHNYWYKKFTYLHPYLLTYINRFISNPSLIPNYITIGTTYMIPKDSTDINNPAKYRPITCLQTLYKILTSCIAQLIQTHVSTNKILAEEQKGCRKYSQGCKEQLIIDSITSKHALIKKKDIFTMFIDYQKAFDSVPHTWLLFVLKLYKIHPALINFLKHTMHTWKTTLKLNFDTTSESNPIHIRRGIFQGDALSPLWFCLSLNPLSHLLNTSNKGYKISVDKTGYTLSHLMYMDDIKLYGSSLQDLHNLADITHTFSQDIQMTFGIDKCKTFSMRNGKTETISYTLSNGNSIDSIDAGAGYKYLGYQQTLQIHHKTIKSTLQEKFKNRLHKILNTQLNSKNTISAINSYAVPILTYSFGVIHWSQTDLKKLQRLINTLLTKYRKHHPRSCVQRLTLPRFEGGRGLIDIQNLHNRQIKNLRIFFWNQIDISILHNTMVNADRKSSPLNLSDRNPQKNEYISTFEQKLESWSKKSLHGRHHADLLKPIVDKKASNAWLERGELFPETEGFMIAIQDQTIDTRNYRKYIIKDRTLITDICRHCHSSSETIQHITGACKSIAQSDYKHRHDQVAAIVHQYIAFKYSLIDKKEPYYKYTPQTVIESKDFKLYWDRTIITDKTIHYNRPDILLHDKQNKTVYLIDIAIPNSHNITTTYTEKIAKYTDLSIELKTQWRVQTVRTIPIIISSTGIIPQTLQTSLEALGIHKLTYTLLQKATILNTCRIVRKFLAIEP

SEQ ID NO: 7016 - protein, 1372 aa, Clostera curtula
MEHMENKRYSLRPLPGGRRGASGADAGCHSMRTIGGEGLSRRTPTDKNATADITSSHIHSSPPSPCNSLFPSPSSSPYHPPSRTSSISSNMSVNVVQEAYATNSEPITVNKSARKKWTYEMNIFIWRTYLIVTKLESNTRGYLPLLHEKFSHNFPEMTVSRQRIGDQRRAIVNNKLLPQTIMDSIKNEIATNLQEDEQSTPFRTQTTGRMYWSNDINETILRIYYKITELERNCTGYRRQLHEQFIDAYPNLSHLTEQRISDQRRIIINNRMVSENRIEQIKDEVRSQFLNTPHAEIPEPVDSNSALRRHTTMDANLENDITISQTYDNQTTSIHQTENTQLPGSIRSSTNTQTNTVSSELDSHALSVVDEQVNIVFLEALNYYKDVEPTKRTYIPKQNTSKKLAILVQYFNDVILPQHIDNNTDFSTFQTILYSAAWTISKLNGSKMSLQPSNKPHRTVRKQKWQIRLERKIKDLRTKISRLTHYIKGNRTPHLTNHVNKICEQYKVHSKHEGSNADLTQFLDTLKQKLSAASARLRRYNKCTLRKNQNTQFKYNEKQFYRNLANTSNDNLNQSKPNPEELHRFWTAVWDVEAVHNSNAEWIDDVITGSSHIPLMEFMEVSSEIFENVIKKLHNWKTPGSDQIHNYWYKKFTYLHPYLLTYINRFISNPSLIPNYITIGTTYMIPKDSTDINNPAKYRPITCLQTLYKILTSCIAQLIQTHVSTNKILAEEQKGCRKYSQGCKEQLIIDSITSKHALIKKKDIFTMFIDYQKAFDSVPHTWLLFVLKLYKIHPALINFLKHTMHTWKTTLKLNFDTTSESNPIHIRRGIFQGDALSPLWFCLSLNPLSHLLNTSNKGYKISVDKTGYTLSHLMYMDDIKLYGSSLQDLHNLADITHTFSQDIQMTFGIDKCKTFSMRNGKTETISYTLSNGNSIDSIDAGAGYKYLGYQQTLQIHHKTIKSTLQEKFKNRLHKILNTQLNSKNTISAINSYAVPILTYSFGVIHWSQTDLKKLQRLINTLLTKYRKHHPRSCVQRLTLPRFEGGRGLIDIQNLHNRQIKNLRIFFWNQIDISILHNTMVNADRKSSPLNLSDRNPQKNEYISTFEQKLESWSKKSLHGRHHADLLKPIVDKKASNAWLERGELFPETEGFMIAIQDQTIDTRNYRKYIIKDRTLITDICRHCHSSSETIQHITGACKSIAQSDYKHRHDQVAAIVHQYIAFKYSLIDKKEPYYKYTPQTVIESKDFKLYWDRTIITDKTIHYNRPDILLHDKQNKTVYLIDIAIPNSHNITTTYTEKIAKYTDLSIELKTQWRVQTVRTIPIIISSTGIIPQTLQTSLEALGIHKLTYTLLQKATILNTCRIVRKFLAIEP

SEQ ID NO: 7017 - protein, 1199 aa, Ptilodon capucinus
MKWTNEYNEAIVRIYYKITQLESNKTAYRKYLHKEFINLFPHLAHISEQRVADQRRAIINNKYISDDRLKFIKKEVARDLNLNNITDNSNIELDSSQNYTPADMNVPSTLLVGNDESTHITFTPPIQTTTSLPISHMPNISSPITSNQRENTYSQISSQDSTIIHSNSYDIPQTHTDAEEEINTVEYNDIVDETFKDALQHFTNTDPDQRGYIPKQRASKKLAIITQYINRMVLPKHLDENTDFNTFQTILYSAAWTAAKTNGTKISLSPNTTNPKPSSKPRWQIRLERKVEDLRSKIGRLTQYISGNRNRHLARHVKLICEQYKIHSSHEESNTELTQFLDTLKQNLSATTNRLKRYKKCTLRKTQNTQFKTNEKQFYRTITNSSQAPTTHNNSSHNTSKPVPEDLHRFWAGIWDVPVEHNRQAAWAETLRVDSISLPQMEFTNVPREIFLKVLKRLHNWKAPGSDHIHNYWYKKFTHIHPHLHNFINNFIHNPNTLPTYITKGTTYMLPKDPCDTANPAKYRPITCLQTIYKILTSCLTETIYTHINTHNILLEEQKGCRKLSQGCKEQLTIDAVVSKQAYTKKDDIFTMYIDYQKAFDSVPHSWLIHVLDLYKIHPTLTNFLKNTMLKWSTVLKLTTDGTVLETEPIKIRRGIFQGDALSPLWFCLALNPLSHLLNSSLKGYKIVNDTSHQLLSHLMYMDDIKIYASSLEEIHELADIAQTFSQDIHMQFGIDKCKIQSVRKGKIEPNHYTLQTGETIDPVDNNTGYKYLGYQQTRQIHQKQTKETLEQKFRTRIHKILNSHLNSKNTIKAINTYAIPILTYSFGIINWSQTDLKRLQSIINTLLTKYRKNHPRACIQRLTLSRTEGGRGLIDIQNLHNKQITTLRTFFHNQSERSPLHKFIIYIDKKFTPLNLSDSTTQKNETITTIPQKLDTWIQKSLHGRHRQDLLKPNVDKSASNAWLERGELFPETEGFMIAIQDQIIDTKNYRKYIIKDRTLSSDLCRHCHCSPETIQHITGACKSIVQTDYKHRHDQVAAIIHQHLAHKHSLITQKTPYYKYTPQTILDSPTHKMYWDRTIITDKTIHYNRPDILLHDKNKSIIYLIDIAVPNTHNLATTYTEKIGKYTDLSIELKNQWRVQTVRTIPIVISSTGVIPHTLHTSLATLGIHKLTYTLLQKATVLNTCRIVRKFLSLDQI

SEQ ID NO: 7018 - protein, 1281 aa, Ptilodon capucinus
METDTKSYLLPLHTKFSEKFPHFQVSRQRIGDQRRAIVLNKLLPQEQINTIYSEVKTQLESIHTQVVNYSQSFNTQTEQRMKWTNEYNEAIVRIYYKITQLESNKTAYRKYLHKEFINLFPHLAHISEQRVADQRRAIINNKYISDDRLKSIKKEVARDLNLNNITDNSNIELDSSQNYTPADMNVPSTLLVGNDESTHIIFTPPIQTTTSLPISHMSNISSPITSNQSENTYSQISSQDSTIIHSNSYDIPQTHTDAEEEIDTVEYNDIVDETFKDALQHFTNTDPDQRGYIPKQRASKKLAIITQYINRMVLPKHLDENTDFNTFQTILYSAAWTAAKTNGTKISLSPNTTNPKPSSKPRWQIRLERKVEDLRSKIGRLTQYISGNRNRHLARHVKLICEQYKIHSSHEESNTELTQFLDTLKQNLSATTNRLKRYKKCTLRKTQNTQFKTNEKQFYRTITNSSQAPTTHNNSSHNTSKPVPEDLHRFWAGIRDVPVEHNRQAAWAETLQADSITLPQMEFTNLPVPREIFLKVLKRLHNWKAPGSDHIHNYWYKKFTHIHPHLHNFINNFIHNPNTLPTYITKGTTYMLPKDPCDTANPAKYRPITCLQTIYKILTSCLTETIYTHINTHNILLEEQKGCRKLSQGCKEQLTIDAVVSKQAYTKKEDIFTMYIDYQKAFDSVPHSWLIHVLDLYKIHPTLTNFLKNTMLKWSTVLKLTTDGTVLETEPIKIRRGIFQGDALSPLWFCLALNPLSHLLNSSLKGYKIVNDTSHQLLSHLMYMDDIKIYASSLEEIHELADIAQTFSQDIHMQFGIDKCKIQSVRKGKIEPNHYTLQTGETIDPVDNNTGYKYLGYQQTRQIHQKQTKETLEQKFRTRIHKILNSHLNSKNTIKAINTYAIPILTYSFGIINWSQTDLKRLQRIINTLLTKYRKNHPRACIQRLTLSRTEGGRGLIDIQNLHNKQITTLRTFFHNQSERSPLHKFIIYIDKKFTPLNLSDSTTQKNETITTIPQKLDTWIQKSLHGRHRQDLLKPNVDKSASNAWLERGELFPETEGFMIAIQDQIIDTKNYRKYIIKDRTLSSDLCRHCHCSPETIQHITGACKSIVQTDYKHRHDQVAAIIHQHLAHKHSLITQKTPYYKYTPQTILYSPTHKMYWDRTIITDKTIHYNRPDILLHDKNKSIIYLIDIAVPNTHNLATTYTEKIAKYTDLSIELKNQWRVQTVRTIPIVISSTGVIPHTLHTSLATLGIHKLTYTLLQKATVLNTCRIVRKFLSLDQI

SEQ ID NO: 7019 - protein, 1411 aa, Ptilodon capucinus
MESIKSKYNLRSLPGGRRGTSGADAGCHSMRTIGDEGLSRRAPLDKLITADHVSVMGSSSAPSLFPSISSTAPSYCVSPTPSSTNSMGLVDVAQETNSVDELVPTTSCIKTRRKWSREMNEFILRTYLHLTHMETDTKSYLLPLHTKFSEKFPHFQVSRQRIGDQRRAIVQNKLLPQEQINTIYSEVKTQLESIHTQVVNYSQSFNTQTEQRMKWTNEYNEAIVRIYYKITQLESNKTAYRKYLHKEFINLFPHLAHISEQRVADQRRAIINNKYISDDRLKFIKKEVARDLNLNNITDNSNIELDSSQNYTPADMNVPSTLLVGNDKSPHITFTPPIQTTTSLPISHMPNISSPITSNQRENTYSQISSQDSTIIHSNSYDIPQTHTDAEEEIDTIEYNDIVDETFKDALQHFTNTDPDQRGYIPKQRASKKLAIITQYINRMVLPKHLDENTDFNTFQTILYSAAWTAAKTNGTKISLSPNTTNPKPSSKPRWQIRLERKVEDLRSKIGRLTQYISGNRNRHLARHVKLICEQYKIHSSHEESNTELTQFLDTLKQNLSATTNRLKRYKKCTLRKTQNTQFKTNEKQFYRTITNSSQAPTTHNNSSHNTSKPVPEDLHRFWAGIWDVPVEHNRQAAWAETLQVDSISLPQMEFTNVPREIFLEVLKRLHNWKAPGSDHIHNYWYKKFTHIHPHLHNFINNFIHNPNTLPTYITKGTTYMLPKDPCDTANPAKYRPITCLQTIYKILTSCLTETIYTHINTHNILLEEQKGCRKLSQGCKEQLTIDAVVSKQAYTKKEDIFTMYIDYQKAFDSVPHSWLIHVLDLYKIHPTLTNFLKNTMLKWSTVLKLTTDGTVLETEPINIRRGIFQGDALSPLWFCLALNPLSHLLNSSLKGYKIVNDTSHQLLSHLMYMDDIKIYASSLEEIHELADIAQTFSQDIHMQFGIDKCKIQSVRKGKIEPNHYTLQTGETIDPVDNNTGYKYLGYQQTRQIHQKQTKETLEQKFRTRIHKILNSHLNSKNTIKAINTYAIPILTYSFGIINWSQTDLKRLQRIINTLLTKYRKNHPRACIQRLTLSRTEGGRGLIDIQNLHNKQITTLRTFFHNQSERSPLHKFIIYIDKKFTPLNLSDSTTQKNETITTIPQKLDTWIQKSLHGRHRQDLLKPNVDKSASNAWLERGELFPETEGFMIAIQDQIIDTKNYRKYIIKDRTLSSDLCRHCHCSPETIQHITGACKSIVQTDYKHRHDQVAAIIHQHLAHKHSLITQKTPYYKYTPQTILDSPTHKMYWDRTIITDKTIHYNRPDILLHDKNKSIIYLIDIAVPNTHNLATTYTEKIAKYTDLSIELKNQWRVQTVRTIPIVISSTGVIPHTLHTSLATLGIHKLTYTLLQKATVLNTCRIVRKFLSLDQI

SEQ ID NO: 7020 - protein, 940 aa, Ptilodon capucinus
MVLPKHLDENTDFNTFQTILYSAAWTAAKTNGTKISLSPNTTNPKPSSKPRWQIRLERKVEDLRSKIGRLTQYISGNRNRHLARHVKLICEQYKIHSSHEESNTELTQFLDTLKQNLSATTNRLKRYKKCTLRKTQNTQFKTNEKQFYRTITNSSQAPTTHNNSSHNTSKPVPEDLHRFWAGIWDVPVEHNRQAAWAETLQVDSISLPQMEFTNVPREIFLKVLKRLHNWKAPGSDHIHNYWYKKFTHIHPHLHNFINNFIHNPNTLPTYITKGTTYMLPKDPCDTANPAKYRPITCLQTIYKILTSCLTETIYTHINTHNILLEEQKGCRKLSQGCKEQLTIDAVVSKQAYTKKEDIFTMYIDYQKAFDSVPHSWLIHVLDLYKIHPTLTNFLKNTMLKWSTVLKLTTDGTVLETEPIKIRRGIFQGDALSPLWFCLALNPLSHLLNSSLKGYKIVNDTSHQLLSHLMYMDDIKIYASSLEEIHELADIAQTFSQDIHMQFGIDKCKIQSVRKGKIEPNHYTLQTGETIDPVDNNTGYKYLGYQQTRQIHQKQTKETLEQKFRTRIHKILNSHLNSINTIKAINTYAIPILTYSFGIINWSQTDLKRLQRIINTLLTKYRKNHPRACIQRLTLSRTEGGRGLIDIQNLHNKQITTLRTFFHNQSERSPLHKFIIYIAKKFTPLNLSDSTTQKNETITTIPQKLDTWIQKSLHGRHRQDLLKLNVDKSASNAWLERGELFPETEGFMIAIQDQIIDTKNYRKYIIKDRTLSSDLCRHCHCSPETIQHITGACKSIVQTDYKHRHDQVAAIIHQHLAHIHSLITQKTPYYKYTPQTILDSPTHKMYWDRTIITDKTIHYNRPDILLHDKNKSIIYLIDIAVPNTHNLATTYTEKIAKYTDLSIELKNQWRVQTVRTIPIVISSTGVIPHTLHNQSCNLRYP

SEQ ID NO: 7021 - protein, 1208 aa, Pyrochroa serraticornis
MPPPTRKPNTPVLVKTAKGIKTLDPDPQSNTSGQGPSIPAPTMGSFVCHCGKGYALKSSLARHQKECGTRDRTKCQFCGASYATFAGVRQHERRAHPVQYQQDLEAQLPEPENVLLAKIAKLEARSTTKYFYQSIMTSTGLTHQQVRTKRERPEYAKYLELARKEYQASPSYKPGLQLKVNAKAVNAQSAASASLNIGVDTSRVERNVRHSTRAQTTQLSSKQPGTGSTIRPPTLEAPSTSSAEPAGVRTRGATGLRLAARLSAVPASSDTAGVTSTNGPPTNRKAKAKRASPAKLLDTLDVESTPGNSNHQSLATSLSRNSPSTPNTSEAGEVMDGAESGPAAFLRRQVADGVVPPHMSDLVEAALNGPEDRALHTIDLWLQRLSARPQTSRQKRHKGNRERKGPVRQYGMTTTGSSERASLFKKTQDLYAKNRRGLAEAILSGKAIGDRSEGPSLAAVEAFYGGIFESASPSDGAPFEPILGGEEVMLPTVSELDVQRAKCRWADSAPGTDGVTVPAVKSTADIELAILFNAILSRNVQPTSWKSLKTTLIPKDGDLKDPANWRPITIGSAVQRLLHRVLHSHIKQRINLSDHQRGFVDVDGTLGNALILDTYIKDRTDKGKPYNVISLDVRKAFDTVSHESIRRALMRFGVSRPLILYIMATFQAATTIRSGTGATRPLGIRRGVRQGDPLSPLLFNIVMDELLSGLDRDHFGGTLPGGTRCAAMAFADDIILLADDDRSVPLMLAETSSFLRDRGMQVNAAKCRALASGSIGGRTVARTGFNYNIDGNPIPMVPVMNSFRYLGHEFGHKGAIKPSLCNLPLWLDNVRRAALKPDQKLQILKLYVIPRLLYGLQNPRITAKSLREADRLIRRFTKTSLHLNVHTPDALIHSRVADGGLGVLELRRTIPRIFLGRLTGLLNRTNSDALSSVLQSEPTRHLMGRLCRMAGEIPDAAFWRERVSTQVLSRGLQQAAGDPSSRQWIDNKPTGWTGRDFVRAIQLRAANLPTRAIPSAPADQRSCRGGCGVDENLSHVLQTCPVTHWERIGRHNEIVGKLARHCKSQRWAVEDEPHVRHKSGRLFKPDLAIHMQDNITVVTDVQVAWDATDLSVPYFRKRAKYNIPEFLEAATRRWPGKRLVFAPVIVGARGIWPRINNDESSILRIPPLVRRSCVYTALKWGSSIHMAFSKAVWSRQNARADGPQPLAR

SEQ ID NO: 7022 - protein, 1003 aa, Pyrochroa serraticornis
MPSSNVASRTRSTIRPTTPTPSTSGTGSPVVGKLRGGKVLRRAACCPAGGVASNAVGVTSIATPPTNRKASTTPPSHPVLPETLNVITSPVVHEHLSSAKPLTRVSVSLPNISRAGEDGADSAPVAYLRQLVAAHAIPPHMYELVEAALNESDGCVLTAVDRWLRTLCSKPPVLRRGRRKGNSERKGPAHHYAMVFTGRGERASLYKKTQDLYNKNRRGLAEAILNNKAIGDRSEGPQVAEVEAFYGGIFESASPDDNAPYEPVLGGEGIELPVVSELDIQRAKSRWADSSPGTDGVTVPAVKSTTDMELAILFNVILGRNVQPTSWRSLRTTLIPKEGDLRDPSNWRPITIGSAVQRLLHRVLHQYIKDKISLSDHQRGFVDVDGTLGNALILDTYIRDRTTKGKPYNVISLDVKKAFDTVSHGSIRRALQRFGMCPPLLRYIMSTFQAETTIRSGTKETRPLGIRRGVRQGDPLSPLLFNMVMDELLNALDSGYLGGSLPGGTRCAAMAFADDLILLSDDDRSVPLMLAKTSSFLEHRGMVVNAAKCRALASGSVGGRTVARTGFSYNIGGSPIPMVPVMNSFRYLGHEFGHKGAERPSLYNLPLWLDQVRKAALKPDQKLQLLKQFVIPRLLYGLQNPKISGKSLREADRLIRKFTKTNLHLNVHTPDALIHSRVADGGLGVMELKKSIPRIFLGRLVGLLERPNSVVLSAVLQSDPVRHLMGRLHSLAGEVPDAAFWRERVSTQVLSRGLQQAAGDPSSRKWINDKPTGWSGRDYVRAVQLCTANLPTRAIPSAPADQRSCRGGCGVDENLSHVLQTCPVTHWERIGRHNEIVGKLERHCVSKRWKVENEPHVRHSSGRLFKPDLAVHMPGNNTTVISDVQVAWDAADLSVPYVRKRAKYNIPEFREAAAKRWPGRELIFAPIIVGARGIWPRINNDQSSILQIPPQVRSSCVHTALKWGASIHMAFSKAVWSRMGHPRNGAPPGDPRCVPRVSGVTER

SEQ ID NO: 7023 - protein, 1413 aa, Cyaniris semiargus
MRLRNRVIPQAGTGALRDGESRPGPSGSGCPSYSGGGNESHQAAQSRAAAACLYPSSPISSTKSLFSSPPSSPPSYLDIRQLRSSTSSTSSSLQTCAGDVVQEAPTAKNTAPTLGSRRTRKTWTKEMNTFIMRHYFIITELETKKRAYLTHLHSLFTSEYPEMEASKQRVGDQRRAIVNCKLLSKQELLQIKEEIKDTLHNTQSLVNIHTGTPNTLTQNRLNWTDELNECILKNYYRITHLETNRTSYRKQLHEAFINNFPTLAHLSEQRISDQLRAIINNKYINDQRLNTIKQEVAEELTIINDRLCSQEITQNSFDNDTEIQNLEPDNQQVISENTHLPNRDANIDETFNLALEHFKDTNPTDRVYIPKQKTSKNLARTVNYINELIIPEHINEDTDFYYFQTVIYCAAWTAAKMNGTRLSLTISNNSYPTKNNKKPQWQKRLEKRVEDIRAKIGRVMQYIKGGRSRKLLTHVDKIKEVYKIHSIHEEPNTQIAQILDTLKQKLSILTGRLKRYNACTQRKQQNTQFNNNEKEFYRHIRTATTNTPQYTDNNTHTEIPDASDFQRFWAGIWEQPINHNFEAEWIETERIKYDKDLPEMTFAKIPLNIFQQVIRKLHNWKSPGSDYIHNYWYKKLTNIHSSLYNYLNKFIEDPNLIPPYITSGTTFMIPKDYSELKNPAKYRPITCLQTIYKILSSCMAELIYKHVNDNNILAEQQKGCRKFSQGCKEQLIIDSVILKHATKTKSDLYSIYIDYKKAYDSVPHSWLLHVLEIYKIHPKIIHLLKTTMTLWKTKLKLKTHTTSIETQPIEIQRGIFQGDALSPIWFCLAMNPLSNILNAIEAGYRIHYNDTYRHTETINHLLYMDDLKIYADNEFDLYKLTELTEQFSNDIKMDFHHLKIENIDGVDKTKINSIKAGKIYLHSYTLQSGERIEPLDEGQTYKYLGYHQSQQILYKDTKCKLKQNFQHRLNTIMKSKLYSRNTIKAINKFAIPILTYSFGIINWNKTELIGIQRKINTTMTKHRKHHPRSCIQRMTSPRKDGGRGIIDIINLHNRQILNLKQYFLARSELSTLHKAIVKNDNNFTPLNLQDIHSNKHKITDDKTKLSEWAKKALHGRHLHDLCQTNVDKEASNAWLSRGDLYPETEGFMIAIQDQTIETRNYQRYITKTLTTDSCRKCHSCPETIQHITGACRTIVQTDYKHRHDQVASIIHQRLAQQRHFITDLEPYYKYKPQNILDNAATKLYFDRTILTDRTTHYNRPDITLVDKINKTAYLIDIAIPNTHNLQTTIAEKLTKYIELKDEIARLWNLQKVTIVPIVISTTGVIPTQLFTSLDTLQLPHSLHYLMQKAVILNTCRIVRKFLQTDGELTVHDTRQTQTNSYIHTSHNILSQPRHTIHHPSPDTSSIHTHNSNI

SEQ ID NO: 7024 - protein, 1265 aa, Cyclargus thomasi
MMRLRNRVIPQAGTGAIRNGESRPGPSGPGCPSYSGGGNESHQAAQSQTAADRMYQISPISLAPESLFASPPSSSPSYLDVHQTSSSTSLNSSFSPPRTREVVQEASTAENTAPALGTRRTRKTWTKEMNTFIMRHYFIITELGLKKKAYLTQLHSLFSNEYPEMQASKQRVGDQRRAIINCNLLTKQELSHIQEEVKNSLHNPQLSTLDETHTNTHNATLSQQRLAWTDDLNEYILKSYFRITQLETNKTSYRKALHETFINKFPTLAYFSEQRISDQLRAIINNKYLTDERINTLKQEVAEELTKNSSEKTGTGSIETPPYHHRSSEQRQDLEPDSEHEITTEEHSPDRSTEINETFKLALQHFIGTDPACRVYIPKQKTSRNFAAIVKYLNKIILPEYINNNTDFNYFQTVIYCAAWTAAKVNGSRLSFDTTNKSHKLEHNKKPRWQVRLERRKDDLRAKIGRITQYINGHRSTKLINHVNKIIGDYKIHATHEEPNTEITQILDTLKQKLSIVTGRLKRYNVCTLRKQQNNQFFNNEKEFYRNIRMATANTTQNENGIQIELPDLNNLQRFWAEIWEQPTMHNCEAEWIKTEQSKSSIQVDDMFFETIPISIFKQVISKLHNWKSPGSDFIHNYWYKKFTSIHHILYNFLNSFIEDPSTIPPYITFGITFMIPKNYNESKNPAKYRPITCLQTIYKILTSCISELIYEHVSRNNILAEQQKGCRKFSQGCKEQLVIDSVILKNVVKTKSDLYSMYIDYQKAYDSVPHSWLLQVLEIYKIHPKIINLLKTTMASWKTKLKLKTATNFIETHPIQILRGIFQGDGLSPLWFCLSLNPLSNILNSKDAGYRLHYNDKQRQTETINHLLYMDDIKLYADNELDLYRLTEATEQFTNDIKMNFGIDKTRINSIKSGRSYQHIYKLQSGECIEPLDEGETYKYLGYNQSRQIDHKTTKYNLRQKFQHRLNAILKSKLYARNTTKAINTFAIPILTYSFGIINWNKSELLRIQRKINTTMTKFRKHHPRSCVQRLTLPRQDGGRGIIDITNLYNRQILNLRQYFFCKSEHSTLHKAIVKNDNKYTPLNLKDSQNDRYKATDDETKLSEWAQKSLHGRHLHDLSQTNVDKKASNAWLSRGDLFPETEGFMIAIQDQTIETRNYQRHITKTRSTDSCRKCHSCPETIQHITGACKTIVQTDYKHRHDQVASIIHQRLAKQRHFIPDIEPYYKYKPQSILDNTSTKLYFDRTILTDRTTHYNRPDITLVDK

SEQ ID NO: 7025 - protein, 1409 aa, Plebejus argus
MMRLRNRIIPQAGTGALRDGESRPGPSGSGCPSYSGGGNESQQAAQFETAAERFNFNHISPISSSKSLFSSPPSSPPSYLDIYQSRSSTSSNYSLSPPRTRDVVQKASVAENTAPTLSTRRTRKTWTKEMNTFIMRHYFIITELESKKKAYLAELHNLFTNKYPEMEASKQRIGDQRRAILNCKLLSKQELSDIQEEVKNILRNPQSNILTHTHTDTQNIQNQSRLNWTDELNEYILKSYYRITQLETNRTSYRKPLHEAFKNKFITLAHLSEQRISDQLRAIINNKYVTDERQNILKQEVADELISTTETLSTNLTQMPQTDNSSFDNLQRQDVVPGQESSNTTHLPDRNPDIDETFKHALQHFINTDPTNRVYIPKQKPSKNLFSTVNYLNKITLPDYVNDDTDFHYFQTAIYCAAWTAAKLNGTKLSLNNVSTNQYPSRNNKKPHWQLRLEKRIEELRVKIGRVTQFIKGGRSRKLVAHVNKIMELHRIHATHEEPNTQITQILDTLKQKLLILTGRLRRYNKCTLRKQQNSQFNNNEKEFYRKIKIDTTNIPQNESNAHNNIMVELPDLSDLQKFWSGIWEQPTEHRFDAEWIEAEKTKYSKDITDMPFETIPISIFQQVIRKLHNWKSPGSDFIHNYWYKKFTSIHNYLYNYLNQFIEYPNKIPPYITFGTTFMIPKDYNDPTNPEKYRPITCLQTIYKILTSCITELIYEHVTVNNILTEQQKGCRKFSRGCKEQLIIDSVILKHVAKTKSNLYSMYIDYKKAYDSVPHSWLLQILKIYKIHPKIITLLETTMTTWKTKLRLKTSTNLIETPPIQIRKGLFQGDALSPLWFCLALNPLSNTLNSIDAGYRLQDDNRHIQTETINHLLYMDDIKIYADNELDLYRLTELTEQFSNDIKMNFGVDKTKINSYKAGRSFQHTYTLESGENIEPLDEGQTYKYLGYNQAQQILQKDTKFKLKQRFQHRLNAIMKSNLYARNTIKAINTFAIPVLTYSFGIINWNKSELINLQRKINTTMTKFRKHHPRSCAQRLTLPRKEGGRGITDITNLHNSQILNLKQYFLTKSEHSSLHKVIVKNDNKFTPLNLNSSQNNQHKVTDNKTKLSEWSKKALHGRHLHDLHQTNNDKEASNAWLCLGNLFPETEGFMIAIQDQTIETRNYQRYITKTLTNDTCRKCRSCPETIQHITGACKIIVQTDYKHRHDQVASIIHQRLARQRNFITDIEPYYKYKPENVLENTSTKLYFDRTILTDRTTHYNRPDITLVDKTDKTAYLIDIAVPNTHNLQSTITEKLTKYIELKDEIARLWNLQKVTIVPIVLSTTGVIPKQLHKSLNTLQLPPNLIYLLQKAVILNTCRIVRKFLQTDDEATTLHTFRSNPHSHTSYNIMLETDHINRHSFETPSTHTNS

SEQ ID NO: 7026 - protein, 1386 aa, Plebejus argus
MQWRIPPRALGLGLPFVFWGGNESHQAAQYRTAAERTYHTSPISSAPSSLFASPPSSPPSYLAVYRTRSSTSSNSSLSPPRTGDVVQEASTAENTAPALGTRRTRKTWTKDMNTFIMRHYFIITELESKKKAYLSQLHSIFTNKYPEMQASKQRVGDQRRAIINCNLLSKQEISHIQEEVKNILYNPQSNTLLETHTDPHVTLTQSRLTWTDDLNEYILISYYRITQLETNRTSYRKPLHEAFINKFPALAHLTEQRISDQLRAIMNNKYLTDERINTLKQEVAHELIIDSTESSVAQTNIYNIENIQRQDIRPDLELETTTDAHLPDRNTYIDETFKLALQHFKNTDPTCRVYIPKQKSSRTLASTVNYLNKITLPNHVNNDTDFNDFQTVIYCAAWTAAKVNGTRLSLSTTNNLHPSDNNNNNKNKKPRWQIRLEKRIEDLRVKIGRTTQFLKGNRSRKLIEHVNKIIEQYKIHAIHEEPNTEITEILDTLKQKLSILTGRLRRYNTCTLRKQQNNQFCNNEKEFYRNIRTATANTLQSDSGTQIELPDPSDLQRFWAEIWEQPTNHNFEAEWIKAEKSKSNTVVNDMSFEVIPISIFQQVIRKLHNWKSPGSDFIHNYWYKKFTSIHNILYNFLNHFIEDPSKIPPYITFGVTFMIPKDHSEPVNPAKYRPITCLQTIYKILTSCISEIIYEHVDKNNILAEQQKGCRKFSQGCKEQLVIDSVILKNVTKTKSDLYSMYIDYKKAFDSVPHTWLLQVLEIYKIHPKIIYLLKTIMTSWKTKLKLKTPRKFVETDPIQILRGIFQGDALSPLWFCLSLNPLSNILNSTDAGYRLHYNDRHRKTETINHLMYMDDIKIYSDNEFDLYRLTELTEQFTNDIKMNFGIDKTKINSIKAGRSFQHIYKLQSGEYIEPLDEGETYKYLGFNQSHQIEHKNTKHNLRQKFQHRLNAILKSNLYARNTIKAINTFAIPILTYSFGIIKWNKSELINIQRKINTTMTKYRKHHPRSCVQRLTLPRKDGGRGLIDVTNLYNRQILNLRQYFFCKAELSTLHKAIVKTDNKFTPLNLKDSQNDRHTVVDDKTKLAEWAKKSLHGRHLHDLCQTNVDKEVSNAWLSRGDLFPETEGFMIAIQDQTIETRNYQRHITKTRTTDRCRKCQSCPETIQHITGACKTIVQTDYKHRHDQVAGIIHQRLAKQRHFITDIEPYYKYKPENVLDNASTKLYFDRTILTDRTTHYNRPDITLVDKINKAAYLIDIAVPNTHNLQSTIAEKLTKYIELKDEIARLWNLQKVTIVPIVLSTTGVIPKQLRNSLNILQLPPNLVYLLQKAVILNTCRIVRKFLQTDDEATIHTSQSNPHTHTSYNMLETDHTNPHCFDTSSTHANS

SEQ ID NO: 7027 - protein, 1403 aa, Plebejus argus
MRLRNRVLPQAGTGALRDGESRPEPSGSGCPSYSGGGNESHQAAQSRATAACLYPSSPISSTKSLFSSPPSSPPSYLDIRQLRSSTSSTSSSLPTYARDVVQEATTAKITAPTLGSRRTRKTWTKEMNTFIMRHYFIITELETKKRAYLTHLHSLFTSEYPEMEASKQRVGDQRRAIVNCNLLSKQELLQIKEEIKNTLHNTQFHVNIHKDTPSTLTQNRLNWTDELNECILKNYYRITHLETNRTSYRKQLHEAFINNFPTLAYLSEQRISDQLRAIINNKYINDQRLNTIKQEVAEELTIINDRLCSQDITQNTFNNDTQIQHLEPDNQQVISENTHLPNRDANIDETFNLALEHFKGTNPTDRVYIPKQKISKNLARTVNYINKLIIPEHINEDTDFYNFQTVIYCAAWTAAKMNGTRLSLTITNNSYPAKNNKKPQWQIRLEKRVEDIRAKIGRVMQYIKGGRSRKLIAHVDKIKEIYKIHSIHEELNTQIVQILDTLKQKLSILTGRLKRYNACTQRKQQNIQFNNNEKEFYRHIRTTTTNTTHTENDTHTEIPDASDFQRFWAGIWEQPISHNFEAEWIETERKKYDKGLPEMTFEKIPLNIFQQVIRKLHNWKSPGSDYLHNYWYKKFTNIHSNLYNYLNKFIEDPNSIPPYITSGTTYMLPKDSCELTNPAKYRPITCLQTIYKILTSCITEIIYNYVNDNNILAEQQKGCRKFSQGCKEQLIIDSVILKHTTKTKSDLYSMYIDYKKAYDSVPHSWLLQVLEIYKIHPKIIQLLKTTMTLWKTKLKFKTPTTSMETEPIQIQRGLFQGDALSPLWFCLALNPLSNILNSIEAGYRLHCDDTHIHTEIINHLLYMDDIKIYADNEFDLYKLIELTEKFSNDIKMDFGVDKTKISSMKAGKIYLHTYTLQCGEQIEPLDEGQTYKYLGYHQSQQIQYKDTKNKLKQNFQHRLNAIMKSKLYSRNTIKAINTFAIPILTYSFGIIHWNKTELISIQRKINTTMTKYRKHHPRSCVQRLTLPRNEGGRGIIDITNLHNRQILNLKQYFLVKSELSTLHKAIVKNDYNFTPLNLKDIHTNKLKIIDNKTKLSEWAKKALHGRHLHDLCQTNVDKEASNAWLSRGDLFPETEGFMIAIQDQTIETRNYQRYITKTLTTDSCRKCHGCPETIQHITGACRAIVQTDYKHRHDQVASIIHQRLAQQRRFTTDLEPYYKYKPQNILDNAAALIYFDRTILTDRTIHYNRPDITLVDKINKTAYIIDIAIPNTHNLQTTIAEKLTKYIELKDEIARLWNLQKVTIVPIVLSTTGVIPIQLFKSLDTLQLPHNLVYLMQKAVILNTCRIVRKFLQTDEELTTLHTPQTQPNSNIHTSAHIISQPDHTTHHPPPDTPSIHTNNLNI

SEQ ID NO: 7028 - protein, 1408 aa, Cyclargus thomasi
MMRLRNRIIPQAGTGTICDGESRPGPSGSGCPSYSGEGNESHQAAQHSTAAACLNLNYNSSPTSSTKSLFTSPPSSPPSYLDIRQTRSSTSSITSSLQTCAGDVVQQATTAKRTAPILGSRRTRKTWTKEMNTFIMRHYFIITELETKKRAYLTQLHSLFTNEYPLIEASKQRVGDQRRAIVNCNLLSKEEILQIKEEVKYTLHNIQPLANIYTDTQNTLSQPRLKWTDELNECILKSYYRITHLETNRTSYRKPLHEAFINNFPTLAHLSEQRISDQLRAIVNNNYINNERLNAIKQEVAEELTLGTTDRLGSQEVAESSFSFYNGNLYNIQNLEHESQENRSENIHLPERKSNIDETFRTALEYFKDTSPTERVYIPKQKTSKNLASTVNYINKIIIPEHINEDTDFDYFQTVVYCAAWTAAKVNGTKLSLKIVNNFHSTLHNKKKPHWQIRLEKRVEDIRAKIGRVIQFINGGRSRKLVAHINKIKEIYKNHSIHEEPNIQIVQILDTLKQKLSILTGRLKRYNACTLRKQQNNQFNNNEKEFYRHIKAATTNTSQNVNSTHSEIPDPGDFQKFWAGIWEQPVCHNAEAEWIDSEKSKYNEDLTEMIFHKIPLNTFQQVIRKLHNWKSPGSDYIHNYWYKKFTSIHSNLYNYLNKFIEEPDSIPPYVTLGTTFMIPKDSCQLTDPAKYRPITCLQTIYKILTSCLTELIYKHVNDNNILAEQQKGCRKFSQGCKEQLIIDSVILKHATKSKSDLYSVYIDYRKAYDSVPHSWLLHVLKIYKIHPKIIHLLKTTMALWKTKLKFKTPTISMETELIQIERGIFQGDALSPLWFCLALNPLSNILNSTEAGYRIHYNDTYRHTEIINHLLYMDDIKIYADNEFDLYKLIELTEHFSNDIKMDFGVDKTKINSIRAGKIYLHTYTLQSGERIEPLDEGETYKYLGYHQSQQIQYKDTKHKLKQNFQHRLNTIMKSKLYSRNTVKAINTFAIPILTYSFGIINWNKTELTSIQRKINTTMTKYRKHHPRSCTQRLTLPRNEGGRGIVDVTNLHNKQILNLRQYFLARSEVSTLHRAIVRNDNHFTPLNLQCNISNKLKIIDNKTKLSEWAKKTLHGRHLHDLCQTNVDKEASNAWLNRGDLFPETEGFMIAIQDQTIETRNYQRYITRTLLTDNCRKCQSCPETIQHITGACRAIVQTDYKHRHDQVANIIHQRLAQQRHFITDLEPYYKYKPQSILDDAATKIYFDRTILTDRTTHYNRPDITILDKTNKSAYLIDIAIPNTHNLQNTIAEKLTKYIELKDEIARLWNLQKVTIVPIVLSSTGVIPKQLFKSLDTVQLPHNLVYLMQKAVILNTCRIVRKFLQTDDETAPHTSHIQSHSHIHTSHTISQPDHRTHHSSPDTSHIHTDN

SEQ ID NO: 7029 - protein, 1402 aa, Lysandra bellargus
MRLRNRVLPQAGTGALRDGESRPGPSGSGCPSYSGGGNESHQTAQSRTAAACLYPASPISSTKSLFSSPPSSPPPYLDIRHLRSSTSSTSSSLPTCAGDVVQEATTAKNTAPTLGSRRTRKTWTKEMNTFIMRHYFIITELETKKRAYLTHLHSLFTSKYPEMEASKQRVGDQRRAIVNCNLLSKQELLQIKEEIKDTLQNTQSLANIHKDTPNTLTQNRLNWTDELNECILINYYRITHLETNRTSYRKQLHEAFINNFPTFAHLSEQRISDQLRAIINNKYINDQRLNAIKQEVAEELTIINDRLLCSQEITQNSFDNDTQIKHLEPDNQQVISENTHLPNRDANIDETFNSALEHFKGTNPTDRVYIPKQKTSKKLARTVNYINKLIIPEHINEDTDFYYFQTIIYCAAWTAAKMNGTRLSLTISNKSYPAKNNKKPQWQIRLEKRLEDIRAKIGRVMQYIKGGRSRKLIAHVDKIKEMYKIHSIHEEPNSQIAQILDTLKQKLSILTGRLKRYNSCTQRKQQNNQFNNNEKEFYRHIRTATTNTPHTENNTHTEIPDASDFQRFWAGIWEQPINHNFEAEWIETERKKHDKDLPEMTFEKIPLNIFQQVTRKLHNWKSPGSDYIHNYWYKKFTNIHSNLYNYLNKFIEDPNSIPPYITSGTTFMLPKDSCEITNPAKYRPITCLQTIYKILTSCITELIYNYVNDNNILAEQQKGCRKFSQGCKEQLLIDSVILKHVAKTKSDLYSMYIDYKKAYDSVPHSWLLQILEIYKIHPKIIHLLKTTMTLWKTKLKFKTPTTSIETEPIQIQRGIFQGDALSPLWFCLALNPLSNILNSVEAGYRLHYNDTCRHTEIINHLLYMDDIKIYADNEFDLYKLIELTETFSNDIKMDFGVDKTKINSIKAGKIYLHTYTLQSGEQIEPLDEGQTYKYLGYHQSQQIQFKDTKNKLKQNFQHRLNAIMKSKLYSRNTIKAINTFAIPILTYSFGIIHWNKTELISIQRKISTTMTKYRKHHPRSCVQRLTLPRNEGGRGIIDITNLHNRQILNLKLYFLTKSEFSTFHKAIVKNDYNFTPLNLQDIHTNKLKITDNKIKLSEWAKKALHGRHLHDLSQTNVDKEASNAWLSRGDLFPETEGFMIAIQDQTIETRNYQRYITKTLTTDSCRKCHSCPETIQHITGACRAIVQTDYKHRHDQVASIIHQRLAQQRHFITDLEPYYKYKPQNILDNAATKLYFDRTILTDRTIHYNRPDITLVDKINKTACLIDIAIPNTHNLQSTIAEKLTKYIEIKEEIARLWNLQKVTIVPIVLSTTGVIPIQLFKSLDTLQLPHNLVYLMQKAVILNTCRIVRKFLQTDDETTLHTPQTQPSSHIHTSHIPQPDHTTQYHPSPDTPSIHTNNLNI

SEQ ID NO: 7030 - protein, 1402 aa, Lysandra coridon
MRLRNRVLPQAGTGALRDGESRPGPSGSGCPSYSGGGNESHQAAQSRTAAACLYPASPISSTKSLFLSPPSSPPPYLDTRQLRSSTSSNSSSLPTCAGDVVQEATTAKNTAPTLGSRRTRKTWTKEMNTFIMRHYFIITELETKKRAYLTHLHSIFTSKYPEMEASKQRVGDQRRAIVNCNLLSKQELLQIKEEIKDTLQNTQSLANIHKDTPNTLTQNRLNWTDELNECILINYYRITHLETNRTSYRKQLHEAFINNFPTLAHLSEQRISDQLRAIINNKYINDQRLNAIKQEVAEELTIINDRLLCSQEITQNSFDNDTQIKHLEPDNQQVISENTHLPNRDANIDETFNSALEHFKGTNPTDRVYIPKQKTSKKLARTVNYINKLIIPEHINEDTDFYYFQTVIYCAAWTAAKMNGTRLSLTISNNSYPAKNNKKPQWQIRLEKRVEDIRAKIGRVMQYIKGGRSRKLIAHVDKIKEIYKIHSIHEEPNSQIAQILDTLKQKLSILTGRLKRYNSCTQRKQQNNQFNNNEKEFYRHIRTATTNTPHTENNTHTEIPDASDFQRFWAGIWEQPINHNFEAEWIETERKKHDKNLPEMTFEKIPLNIFQQVIRKLHNWKSPGSDYIHNYWYKKFTNIHSNLYNYLNKFIEDPNSIPPYITSGTTFMLPKDSCEITNPAKYRPITCLQTIYKILTSCITELIYNYVNDNNILAEQQKGCRKFSQGCKEQLLIDSVILKHVAKTKSDLYSMYIDYKKAYDSVPHSWLLQILEIYKIHPKIIHLLKTTMTLWKTKLKFKTPTTSIETEPIQIQRGIFQGDALSPLWFCLALNPLSNILNSVEAGYRLHYNDTCRHTEIINHLLYMDDIKIYADNEFDLYKLIELTETFSNDIKMDFGVDKTKINSIKAGKIYLHTYTLQSGEQIEPLDEGQTYKYLGYHQSQQIQFKDTKNKLKQNFQHRLNAIMKSKLYSRNTIKAINTFAIPILTYSFGIIHWNKTELISIQRKINTTMTKYRKHHPRSCVQRLTLPRNEGGRGIIDITNLHNRQILNLKQYFLTKSELSTFHKAIVKNDYNFTPLNLQDIHTNKLKITDNKIKLSEWAKKALHGRHLHDLSQTNVDKEASNAWLSRGDLFPETEGFMIAIQDQTIETRNYQRYITKTLTTDSCRKCHSCPETIQHITGACRAIVQTDYKHRHDQVASIIHQRLAQQRHFITDLEPYYKYKPQNILDNSATKLYFDRTILTDRTIHYNRPDITLVDKINKTACLIDIAIPNTHNLQSTIAEKLTKYIEIKEEIARLWNLQKVTIVPIVLSTTGVIPIQLFKSLDTLQLPHNLVYLMQKAVILNTCRIVRKFLQTDDETTLHTPQTQPSSHIHTSHIPQPDHTTQYHPSPDTPSIHTNNLNI

SEQ ID NO: 7031 - protein, 1385 aa, Lysandra bellargus
MENPAPGLRARAAPRILGGGNESHQAAQSRTAAACLYPASPISSTKSLFSSPPSSPPPYLDIRQLRSSASSTSSSLPTCAGDVVQEATTAKNTAPTLGSRRTRKTWTKEMNTFIMRHYFIITELETKKRAYLTHLHSLFTSKYPEMEASKQRVGDQRRAIVNCNLLSKQELLQIKEEIKYTLQNTQSLANIHKDTPNTLTQNRLNWTDELNECILINYYRITHLETNRTSYRKQLHEAFINNFPTLAHLSEQRISDQLRAIINNKYINDQRLNAIKQEVAEELTIINDRLLCSQEITQNSFDNDTQIKHLEPDNQQVISENTHLPNRDANIDETFNSALEHFKGTNPTDRVYIPKQKTSKKLARTVNYINKLTIPEHINEDTDFYYFQTVIYCAAWTAAKMNGTRLSLTISNNSYPAKNNKKPQWQIRLEKRVEDIRAKIGRVMQYIKGGRSRKLIAHVDKIKEIYKIHSIHEEPNSQIAQILDTLKQKLSILTGRLKRYNSCTQRKQQNNQFNNNEKEFYRHIRTATTNTPHTENNTHTEIPDASDFQRFWAGIWEQPINHNFEAEWIETERKKHDKDLPEMTFEKIPLNIFQQVIRKLHNWKSPGSDYIHNYWYKKFTNIHTNLYNYLNKFIEDPNSIPPYITSGTTFMLPKDSCEITNPAKYRPITCLQTIYKILTSCITELIYNYVNDNNILAEQQKGCRKFSQGCKEQLLIDSVILKHVAKTKSDLYSMYIDYKKAYDSVPHSWLLQILEIYKIHPKIIHLLKTTMTLWKTKLKFKTPTTSIETEPIQIQRGIFQGDALSPLWFCLALNPLSNILNSVEAGYRLHYNDTCRHTEIINHLLYMDDIKIYADNEFDLYKLIELTETFSNDIKMDFGVDKTKINSIKAGKIYLHTYTLQSGEQIEPLDEGQTYKYLGYHQSQQIQFKDTKNKLKQNFQHRLNAIMKSKLYSRNTIKAINTFAIPILTYSFGIIHWNKTELISIQRKINTTMTKYRKHHPRSCVQRLTLPRNEGGRGIIDITNLHNRQILNLKQYILTKSELSTFHKAIVKNDYNFTPLNLQDIHTNKLKITDNKIKLSEWAKKALHGRHLHDLSQTNVDKEASNAWLSRGDLFPETEGFMIAIQDQTIETRNYQRYITKTLTTDSCRKCHSCPETIQHITGACRTIVQTDYKHRHDQVASIIHQRLAQQRHFITDLEPYYKYKPQNILDNAATKLYFDRTILTDRTIHYNRPDITLVDKINKTACLIDIAIPNTHNLQSTIAEKLTKYIEIKEEIARLWNLQKVTIVPIALSTTGVIPIQLFKSLDTLQLPHNLVYLMQKAVILNTCRIVRKFLQTDDETTLHTPQTQPSSHIHTSHIPQPDHTTQYHPSPDTPSIHTNNLNI

SEQ ID NO: 7032 - protein, 1385 aa, Lysandra bellargus
MENPAPGLRARAAPRILWGGNESHQTAQSRTAAACLYPASPISSTKSLFSSPPSSPPPYLDIRHLRSSTSSTSSSLPTCAGDVVQEATTAKNTAPTLGSRRTRKTWTKEMNTFIMRHYFIITELETKKRAYLTHLHSLFTSKYPEMEASKQRVGDQRRAIVNCNLLSKQELLQIKEEIKDTLQNTQSLANIHKDTSNTLTQNRLNWTDELNECILINYYRITHLETNRTSYRKQLHEAFINNFPTFAHLSEKRISDQLRAIINNKYINDQRLNAIKQEVAEELTIINDRLLCSQEITQNSFDNDTQIKHLEPDNQQVISENTHLPNRDANIDETFNSALEHFKGTNPTDRVYIPKQKTSKKLARTVNYINKLIIPEHINEDTDFYYFQTIIYCAAWTAAKMNGTRLSLTISNNSYPAKNNKKPQWQIRLEKRLEDIRAKIGRVMQYIKGGRSRKLIAHVDKIKEMYKIHSIHEEPNSQIAQILDTLKQKLSILTGRLKRYNSCTQRKQQNNQFNNNEKEFYRHIRTATTNTPHTENNTHTEIPDASDFQRFWAGIWEQPINHNFEAEWIETERKKHDKDLPEMTFEKIPLNIFQQVIRKLHNWKSPGSDYIHNYWYKKFTNIHSNLYNYLNKFIEDPNSIPPYITSGTTFMLPKDSCEITNPAKYRPITCLQTIYKILTSCITELIYNYVNDNNILAEQQKGCRKFSQGCKEQLLIDSVILKHVAKTKSDLYSMYIDYKKAYDSVPHSWLLQILEIYKIHPKIIHLLKTTMTLWKTKLKFKTPTTSIETEPIQIQRGIFQGDALSPLWFCLALNPLSNILNSVEAGYRLHYNDTCRHTEIINHLLYMDDIKIYADNEFDLYKLTELTETFSNDIKMDFGVDKTKINSIKAGKIYLHTYTLQSGEQIEPLDEGQTYKYLGYHQSQQIQFKDTKNKLKQNFQHRLNAIMKSKLYSRNTIKAINTFAIPILTYSFGIIHWNKTELISIQRKISTTMTKYRKHHPRSCVQRLTLPRNEGGRGIIDIRNLHNRQILNLKQYFLTKSEFSTFHKAIVKNDYNFTPLNLQDIHTNKLKITDNKIKLSEWAKKALHGRHLHDLSQTNVDKEASNAWLSRGDLFPETEGFMIAIQDQTIETRNYQRYITKTLTTDSCRKCHSCPETIQHITGACRAIVQTDYKHRHDQVASIIHQRLAQQRHFITDLEPYYKYKPQNILDNAATKLYFDRTILTDRTIHYNRPDITLVDKINKTACLIDIAIPNTHNLQSTIAEKLTKYIEIKEEIARLWNLQKVTIVPIVLSTTGVIPIQLFKSLDTLQLPHNLVYLMQKAVILNTCRIVRKFLQTDDETTLHTPQTQPSSHIHTSHIPQPDHTTQYHPSPDNPSIHTNNLNI

SEQ ID NO: 7033 - protein, 1385 aa, Lysandra coridon
MENPAPGLRARAAPRILGGGNESHQAAQSRTAAACLYPASPISSTKSLFSSPPSSPPPYLDIRQLRSSTSSTSSSLPTCAGDVVQEATTAMNTAPTLGSRRTRKTWTKEMNTFIMRHYFIITELETKKRAYLTTLHSLFTSKYPEMEASKQRVGDQRRAIVKCNLLSKQELLQVKEEIKDTLQNTQSLANIHKETPNTLTQNRLNWTDELNECILINYYRITHLETNRTSYRKQLHEAFINNFPTLAHLSEQRISDQLRAIINNKYINDQRLNAIKQKVAEELTIINDRLVCSQEITQNSFDNDTQIKHLEPDNQQAISENTHLPNRDANIDETFNSALEHFKGTNPTDRVYIPKQKTSKKLARTVNYINKLIIPEHINEDTDFYYFQTVIYCAAWTAAKMNGTRLSLTISNNSYPAKNNKKPQWQIRLEKRVEDIRAKIGRVMQYIKGGRSRKLIAHVDKIKEIYKIHSIHEEPNSQITQILDTLKQKLSILTGRLKRYNSCTQRKQQNNQFNNNEKEFYRHIRTATTNTPHTENNTHTEIPDASDFQRFWAGIWEQPINHNFEAEWIETERKKHDKDLPEMTFEKIPLNIFQQVIRKLHNWKSPGSDYIHNYWYKKFTNIHSNLYNYLNKFIEDPNSIPPYITSGTTFMLPKDSCEITNPAKYRPITCLQTIYKILTSCITELIYNYVNDNNILAEQQKGCRKFSQGCKEQLLIDSVILKHVAKTKSDLYSMYIDYKKAYDSVPHSWLLQILEIYKIHPKIIHLLKTTMTLWKTKLKFKTPTTSIETEPIQIQRGIFQGDALSPLWFCLALNPLSNILNSVEAGYRLHYNDTCRHTEIINHLLYMDDIKIYADNEFDLYKLIELTETFSNDIKMDFGVDKTKINSIKSGKIYLHTYTLQSGEQIEPLDEGQTYKYLGYHQSQQIQFKDTKNKLKRNFQHRLNAIMKSKLYSRNTIKAINTFAIPILTYSFGIIHWNKTELISIQRKINTTMTKYRKHHPRSCVQRLTLPRNEGGRGIIDITNLHNRQILNLKQYFLTKSELSTFHKAIVKNDYNFTPLNLQDTHTNKLKITDNKIKLSEWAKKALHGRHLHDLSQTNVDKEASNAWLSRGDLFPETEGFMIAIQDQTIETRNYQRYITKTLTTDSCRKCHSCPETIQHITGACRAIVQTDYKHRHDQVASIIHQRLAQQRHFITDLEPYYKYKPQNILDNSATKLYFDRTILTDRTIHYNRPDITLVDKINKTACLIDIAIPNTHNLQSTIAEKLTKYIEIKEEIARLWNLQKVTIVPIVLSTTGVIPIQLFKSLDTLQLPHNLVYLMQKAVILNTCRIVRKFLQTDDETTLHTPQTQPSSHIHTSHIPQPDHTTQYHPSPDTPSIHTNNLNI

SEQ ID NO: 7034 - protein, 985 aa, Lysandra bellargus
MNGTRLSLTISNNSYPAKNNKKPQWQIRLEKRVEDIRAKIGRVMQYIKGGRSRKLIAHVDKIKEIYKINSIHEEPNSQIAQILDTLKQKLSILTGRLKRYNSCTQRKQQNNQFNNNEKEFYRHIRTATTNTPHTENNTHTEIPDASDFQRFWAGIWEQPINHNFKAEWIETERKKHDKYLPEMTFEKIPLNIFQQVIRKLHNWKSPGSDYIHNYWYKKFTNIHSNLYNYLNKFIEDPNSIPPYITSGTTFMLPKDSCEITNPAKYRPITCLQTIYKILTSCITELIYNYVNDNNILAEQQKGCRKFSQGCKEQLLIDSVILKHVAKTKSDLYSMYIDYKKAYDSVPHSWLLQILEIYKIHPKIIHLPKTTMTLWKTKLKFKTPTTSIETEPIQIQRGIFQGDALSSLWFCLALNPLSNILNSVEAGYRLHYNDTCRHTEIINHLLYMDDIKIYADNEFDLYKLIELTETFSNNIKMDFGVDKTKINSIKAGKIYLHTYTLQSGEQIEPLDEGQTYKYLGYHQSQQIQFKDTKNKLKQNFQHRLNAIMKSKLYSRNTIKAINTFAIPILTYSFGIIHWNKTELISIQRKINTTMTKYRKHHPRSCVQRLTLPRNEGGRGIIDITNLHNRQILNLKQYFLTKSELSTFHKAIVKNDYNFTPLNLQDIHTNKLKITDNKIKLFEWAKKALHGRHLHDLSQTNVDKEASNAWLSRGDLFPETEGFMIAIQDQTIETRNYQRYITKTLTTDSCRKCHSCPKTIQHITGACRAIVQTDYKHRHDQVASIIHQRLAQQRHFITDLEPYYKYKPQNILDNAAAKLYFDRTILTDRTIDYNRPDITLVDKINKTACLIDIAIPNTHNLQSTIAEILTKYIEIKEEIAHLWNLQKVTIVPIVLSTTGVIPIQLFKSLNTLQLPHNLVYLMQKAVILNTCRIVRKFLQTDDETTLHTPQTQPSSHIHTSHISQPDHTTQYHPSPDTPSIYTNNLNI

SEQ ID NO: 7035 - protein, 1402 aa, Plebejus argus
MRLRNRVLPQAGTGALRDGESRPEPSGSGCPSYSGGGNESHQAAQSRATAACLYPSSPISSTKSLFSSPPSSPPSYLDIRQLRSSTSSTSSSLPTYARDVVQEATTAKITAPTLGSRRTRKTWTKEMNTFIMRHYFIITELETKKRAYLTHLHSLFTSEYPEMEASKQRVGDQRRAIVNCNLLSKQELLQIKEEIKNTLHNTQSHVNIHKDTPSTLTQNRLNWTDELNECILKNYYRITHLETNRTSYRKQLHEAFINNFPTLAYLSEQRISDQLRAIINNKYINDQRLNTIKQEVAEELTIINDRLCSQDITQKTFNNDTQIQHLEPDNQQVISENTHLPNRDANIDETFNLALEHFKGTNPKDRVYIPKQKISKNLARTVNYINKLIIPEHINEDTDFYNFQTVIYCAAWTAAKMNGTRLSLTITNNSYPTKNNKKPQWQIRLEKRVEDIRAQIGRVMQYIKGGRSRKLIAHVDKIKEIYKIHSIHEELNTQIVQILDTLKQKLSILTGRLKRYKACTQRKQQNIQFNNNEKEFYRHIRTTTTNTTHTENDTHTEIPDASDFQRFWAGIWEQPISHNFEAEWIETERKKYDKDLPEMTFEKIPLNIFQQVIRKLHNWKSPGSDYIHNYWYKKFTNIHSNLYNYLNKFIEDPNSIPPYITSGTTYMLPKDSCELTNPAKYRPITCLQTIYKILTSCITEIIYNYVNDNNILVEQQKGCRKFSQGCKEQLIIDSVILKHTTKTKSDLYSMYIDYKKAYDSVPHSWLLQVLEIYKIHPKIIQLLKTTMTLWKTKLKFKTPTTSIETEPIQIQRGLFQGDALSPLWFCLALNPLSNILNSIEAGYRLHCNDTHIHTEIINHLLYMDDIKIYADNEFDLYKSIELTEKFSNDIKMDFGVDKTKINSMKAGKIYLHTYTLQCGEQIEPLDEGQTYKYLGYHQSQQIQYKDTKNKLKQNFQHRLNAIMKSKLYSRNTIKAINTFAIPILTYSFGIIHWNKTELISIQRKINTTMTKYRKHHPRSCVQRLTLPRNEGGRGIIDITNLHNRQILNLKQYFLVKSELSTLHKAIVKNDYNFTPLNLKDIHTNKLKIIDNKTKLSEWAKKALHGRHLHDLCQTNVDKEASNAWLSRGDLFPETEGFMIAIQDQTIETRNYQRYITKTLTTDSCRKCHGCPETIQHITGACRAIVQTDYKHRHDQVASIIHQRLAQQRRFTTDLEPYYKYKPQNILDNAATLIYFDRTILTDKTIHYNRPDITLVDKINKTAYLIDIAIPNTHNLQTTIAEKLTKYIELKDEIARLWNLQKVTIVPIVLSTTGVIPIQLFKSLDTLQLPHNLVYLMQKAVILNTCRIVRKFLQTEELTTLHTPQTQPNSNIHTSAHIISQPDHTTHHPSPDTPSIHTNNLNI

SEQ ID NO: 7036 - protein, 1402 aa, Lysandra bellargus
MRLRNRVLPQAGTGALRDGESRPGPSGSGCPSYSGGGNESHQTAQSRTAAACLYPASPISSTKSLFSSPPSSPPPYLDIRHLRSSTSSTSSSLPTCAGDVVQEATTAKNTAPTLGSRRTRKTWTKEMNTFIMRHYFIITELETKKRAYLTHLHSLFTSKYPEMEASKQRVGDQRRAIVNCNLLSKQELLQIKEEIKDTLQNTQSLANIHKDTPNTLTQNRLNWTDELNECILINYYRITHLETNRTSYRKQLHEAFINNFPTFAHLSEQRISDQLRAIINNKYINDQRLNAIKQEVAEELTIINDRLLCSQEITQNSFDNDTQIKHLEPDNQQVISENTHLPNRDANIDETFNSALEHFKGTNPTDRVYIPKQKTSKKLARTVNYINKLIIPEHINEDTDFYYFQTIIYCAAWTAAKMNGTRLSLTISNNSYPAKNNKKPQWQIRLEKRLEDIRAKIGRVMQYIKGGRSRKLIAHVDKIKEMYKIHSIHEEPNSQIAQILDTLKQKLSILTGRLKRYNSCTQRKQQNNQFNNNEKEFYRHIRTATTNTPHAENNTHTEIPDASDFQRFWAGIWEQPINHNFEAEWIETERKKHDKDLPEMTFEKIPLNIFQQVIRKLHNWKSPGSDYIHNYWYKKFTNIHSNLYNYLNKFIEDPNSIPPYITSGTTFMLPKDSCEITNPAKYRPITCLQTIYKILTSCITELIYNYVNDNNILAEQQKGCRKFSQGCKEQLLIDSVILKHVAKTKSDLYSMYIDYKKAYDSVPHSWLLQILEIYKIHPKIIHLLKTTMTLWKTKLKFKTPTTSIETEPIQIQRGIFQGDALSPLWFCLALNPLSNILNSVEAGYRLHYNDTCRHTEIINHLLYMDDIKIYADNEFDLYKLIELTETFSNDIKMDFGVDKTKINSIKAGKIYLHTYTLQSGEQIEPLDEGQTYKYLGYHQSQQIQFKDTKNKLKQNFQHRLNAIMKSKLYSRNTIKAINTFAIPILTYSFGIIHWNKTELISIQRKISTTMTKYRKHHPRSCVQRLTLPRNEGGRGIIDITNLHNRQILNLKLYFLTKSEFSTFHKAIVKNDYNFTPLNLQDIHTNKLKITDNKIKLSEWAKKALHGRHLHDLSQTNVDKEASNAWLSRGDLFPETEGFMIAIQDQTIETRNYQRYITKTLTTDSCRKCHSCPETIQHITGACRAIVQTDYKHRHDQVASIIHQRLAQQRHFITDLEPYYKYKPQNILDNAATKLYFDRTILTDRTIHYNRPDITLVDKINKTACLIDIAIPNTHNLQSTIAEKLTKYIEIKEEIARLWNLQKVTIVPIVLSTTGVIPIQLFKSLDTLQLPHNLVYLMQKAVILNTCRIVRKFLQTDDETTLHTPQTQPSSHIHTSHIPQPDHTTQYHPSPDTPSIHTNNLNI

SEQ ID NO: 7037 - protein, 1406 aa, Cyaniris semiargus
MRLRNRVIPQAGTGALRDGESRPGPSGSGCPSYSGEGNESHQAVQSRAAAACLYPSSPISSTKSLFSSPPSSPPSYLDIRQLRSSTSSTSSSLQTCAGDVVQEAPTAKNTAPTLGSRRTRKTWTKEMNTFIMRHYFIITELETKKRAYLTHLHSLFTSEYPEMEASKQRVGDQRRAIVNCNLLSKQELLQIKEEIKDTLHNTQSLVNIHTGTPNTLTQNRLNWTDELNECILKNYYRITHLETNRTSYRKQLHEAFINNFPTLAHLSEQRISDQLRAIINNKYINDQRLNTIKQEVAEELTIINDRLCSQEITQNSFDNDTEIQNLEPEPDNQQVISENTHLPNRDANIDETFNLALEHFKDTNPTDRVYIPKQKTSKNLARTVNYINELIIPEHINEDTDFYYFQTVIYCAAWTAAKMNGTRLSLTISNNSYPTKNNKKPQWQKRLEKRVEDIRAKIGRVMQYIKGGRSRKLLTHVDKIKEVYKIHSIHEEPNTQIAQILDTLKQKLSILTGRLKRYNACTQRKQQNTQFNNNEKEFYRHIRTATTNTPQYTDNNTHTEIPDASDFQRFWAGIWEQPINHNFEAEWIETERIKYDKDLPEMTFAKIPLNIFQQVIRKLHNWKSPGSDYIHNYWYKKLTNIHSSLYNYLNKFIEDPNLIPPYITSGTTFMIPKDYSELKNPAKYRPITCLQTIYKILSSCMAELIYKHVNDNNILAEQQKGCRKFSQGCKEQLIIDSVILKHATKTKSDLYSIYIDYKKAYDSVPHSWLLHVLEIYKIHPKIIHLLKTTMTLWKTKLKLKTHTTSIETQPIEIQRGIFQGDALSPIWFCLAMNPLSNILNAIEAGYRIHYNDTYRHTETINHLLYMDDLKIYADNEFDLYKLTELTEQFSNDIKMDFGVDKTKINSIKAGKIYLHSYTLQSGERIEPLDEGQTYKYLGYHQSQQILYKDTKCKLKQNFQHRLNTIMKSKLYSRNTIKAINTFAIPILTYSFGIINWNKTELIGIQRKINTTMTKHRKHHPRSCIQRMTLPRKDGGRGIIDIINLHNRQILNLKQYFLARSELSTLHKAIVKNDNNFTPLNLQDIHSNKHKITDDKTKLSEWAKKALHGRHLHDLCQTNVDKEASNAWLSRGDLFPETEGFMIAIQDQTIETRNYQRYITKTLTTDSCRKCHSCPETIQHITGACRTIVQTDYKHRHDQVASIIHQRLAQQRRFITDLEPYYKYKPQNILDNAATKLYFDRTILTDRTTHYNRPDITLIDKINKTAYLIDIAIPNTHNLQTTIAEKLTKYIELKDEIARLWNLQKVTIVPIVISTTGVIPTQLFTSLDTLQLPHSLHYLMQKAVILNTCRIVRKFLQTDGELTVHDTRQTQTNSYIHTSHNILSQPRHTIHHPSPDTSSIHTHNSNI

SEQ ID NO: 7038 - protein, 1405 aa, Aricia agestis
MRLRNRIIPQAGTGALRNGESRPGPSGSGCPSYSGGGNESQQAAQSRAAAASVHPLSPTSSTKSLFSSPSSSPPSYLDIRQLRSSSSSTSSSLPTSAGDVVQEVTTAKHTAPTLGSRRTRKTWTKEMNTFIMRHYFIITDLETKKRAYLTQLHTLFTSEYPEMDASKQRVGDQRRAIVNCNLLSKQELLQIKEEIKDTLHNSQSLLNIHKDAPDTLKHNRLNWTDELNECIIKNYYRITHLETNRTSYRKPLHEAFINNFPSLAHLSEQRISDQLRAIINNKYINDQRLNTIKQEVAEELTITDDKLGSQEVAQNSFSFENDTQIQILEPDNQQVNPDNTHLPNRNADIDETFNLALEHFKGTNPTNRIFIPKQKTSKNLAKTVNYIDKFIIPEHINEETDFDYFQTVIYCAAWTAAKMNKTRLSFTITNMSHPAKNNKKPQWQIRLEKRVQDIRAKIGRVMQYINGGRSRKLIAHVNKIKEIYKIHSIHEEPNTQIAQILDTLKQKLSILTCRLKRYNACTQRKQQNNQFNHNEKEFYRHIRTAATNLPHTENTHTEIPDAGDFQRFWAGIWEQPINHNLEAEWIKAERKKYDKDLLEMTFEKIPLNIFQQVIRKLHNWKSPGSDYIHNYWYKKLTNTHSILYKYLNKFIEDPNSIPPYITSGTTFMIPKDCNELTNPAKYRPITCLQTIYKILSSCMAELIYKHVNDNNILAEQQKGCRKFSQGCKEQLIIDSVILKHATKTKSDLYSIYIDYKKAYDSVPHSWLLHVLEIYKIHPKIIHLLKTTMTLWNTKLKLKTPTTSIETQPIKIQRGIFQGDALSPIWFCLALNPLSNILNSLEAGYRINYNDTNRHTETIINHLLYMDDLKIYADNEFDLYKLTELTEQFSNDIKMEFGVDKTKINSVRAGKIYLHSYTLQSGERIEPLDEGETYKYLGYHQSQQILSKDTKCKLKQNFQHRLNTILKSKLYSRNMIKAINTFAIPILTYSFGIINWNKTKLIGIQRKINTTMTKYRKHHPRSCIQRLTLPRKDGGRGIIDIVNLHNRQILNLKQYFLTRSELSTIHKAIVTNDNNFTPLNLQDLHSNKHKITDDKIKLSEWAKKALHGRHLHDLCQTNVDKEASNTWLSRGDLFPETEGFIIAIQDQTIETRNYQRYITKTLTTDSCRKCHSCPETIQHITGACRTIVQTDYKHRHDQVASIMHQSLAQQRNFIADLEPYYKYKPQTILDNAATKIYFDRTILTDRTIHYNRPDITVVDKINKTAYLIDIAIPNTHNLQSTIAEKFTKYIELKDEIARLWNLQKVTIVPIVLSTTGVIPIQLFKSLDTLQLPHNLVYLMQKAVILNTCRIVRKFLQTDDELTTLHTPQTQPNSHIHTSHIISQPDHTAHHPSPDTPSSIHTNNLNI

SEQ ID NO: 7039 - protein, 1400 aa, Cyclargus thomasi
MRLRNRDIPQAGTGALREGESRPGPSGSGCPSYSGGGNKSHQAAQSPTVAEGFNHLSPISSSKSLFSSPPSSPPSYLDVCQSRSDSSSSSLSPICTGDVVQEAPAAENTTPTLSTRRTRKAWTKEMNTFIMRHYFIITELGSKKRAYLTELHNLFTNKYPEMKASKQRVGDQRRAILNCKLLSKQELSHIQEEAKVILHQPHSNIFNKTNANTQITSTQARLSWTDELNEYILKSYYRITKLETNRTSYRRPLHEAFRSKFPTLAHLSEQRISDQLRAILNNTYVTDERQNILKQEVADELINTSEIFNAQSIQTPLTDSPSFNNTQTQEEVLLGQDDTDTAILLDRNPDIDETFKNALQHFIDTVPTNRAYIPKQKASKNLHYTVNYLNKITLPDHINNDTEFNFFQTVIYCAAWTAAKLNGTKLSLNTTTNLYPLKNSKKPHWQIRLEYRIENLRVKIGRVTQFIKGGRSRKLVAHVNKIIEVHRIHATHEEPNTQIIQILDTLKQKLFILTGRLKRYKKCTLRKQENNQFSNNEKEFYRKIRMATTNISQKESNAHNIDSPDPSELQKFWSGIWEQPTEHRLDAEWIEAEKIKCSKYVTEMPYENIPINTFQQVIRKLHNWKSPGSDCIHNYWYKKFTSIHKYLYSYLNQFIEDPNKIPLYITIGTTFMIPKDNSEPKNPAKYRPITCLQTIYKILTSCITELVYEHVTTNNILTEQQKGCRKFSRGCKEQLIIDSVILKHVTKTKSNLYSMYIDYQKAYDSVPHSWLQQVLKIYKINPKIITLLETTMSTWKTKLKLKTSTNFIETEPIQIKKGIFQGDALSPLWFCLALNPLSTTLNSIDAGYRLQYDNDRNIQLETINHLIYMDDIKIYADSEHDLYRLTELTEKFSNDIKMNFGVDKTKINSFKAGHTFQHTFTLQSGENIEPLDEGETYKYLGYNQAHQIQQKETKYQLKQRFQHRLNAIMKSNLYARNTIKAINTFAIPVLTYSFGIINWNRSELLNLQRKINTTLTRFRKHHPKACVQRLTLPRKQGGRGITDITNLHNSQILNLKEYFLTKSEHSRLHKAIVKNDNKFTPLNLNSSQNDQYKITDNKTKLSEWAKKALHGRHFHDLHQTNNDTEASNAWLCRGNLFPETEGFLIAIQDQTIHTRNYQRYITKTLTNDSCRKCHSCPETIQHITGACKMIVQTDYKHRHDQVANIIHQRLAEQRHFITDIEPYYKYKPENILDNPSTKLYFDRTILTDRTTHYNRPDITLVDKTNKTAFLIDIAVPNTHNLQSTIAEKLTKYIDLKDEIARLWNLQKVTIVPIVLSTTGVIPLQLHKSLKTLQLPPNLVYLLQKAVILNTCRIVRKFLQEDYESTNLNTSQANTHTHTSFTLQTDHSNHHSLQISPTHNI

SEQ ID NO: 7040 - protein, 804 aa, Aricia agestis
MTFEKIPLNIFQQVIRKLHNWKSPGSDYIHNYWYKKLTNTHSILYKYLNKFIEDPNSIPPYITSGTTFMIPKDCNELTNPAKYRPITCLQTIYKILSSCMAELIYKHVNDNNILAEQQKGCRKFSQGCKEQLIIDSVILKHATKTKSDLYSIYIDYKKAYDSVPHSWLLHVLEIYKIHPKIIHLLKTTMTLWNTKLKTPTTSIETQPIKIQRGIFQGDALSPIWFCLALNPLSNILNSLEAGYRINYNDTNRHTETIINHLLYMDDLKIYADNEFDLYKLTELTEQFSNDIKMEFGVDKTKINSVRAGKIYLHSYTLQSGERIEPLDEGETYKYLGYHQSQPILSKDTKCKLKQNFQHRLNTILKSKLYSRNMIKAINTFAIPILTYSFGIINWNKTELIGIQRKINTTMTKYRKHHPRSCIQRLTLPRKDGGRGIIDIVNLHNRQILNLKQYFLTRSELSTIHKAIVTNDNNFTPLNLQDLHSNKHKITDDKTKLSEWAKKALHGRHLHDLCQTNVDKEASTTWLSRGDLFPETEGFIIAIQDQTIETRNYQRYITKTLTTDSCRKCHSCPETIQHITGACRTIVQTDYKHRHDQVASIMHQSLAQQRNFIADLEPYYKYKPQTILDNTATKVYFDRTILTDRTIHYNRPDITVVDKINKTAYLIDIAIPNTHYLQSTIAKKFTKYIELKDEIARLWNLQKVTIVPIVLSTTGIIPIQLFKSLDTLQLPHNLVYLMQKAVILNTCRIVRKFLQTDDELTTLHTPQTQPNSHIHTSHIISQPDHTAHHPSPDTPSSIHTNNLNI

SEQ ID NO: 7041 - protein, 1405 aa, Aricia agestis
MRLRNRIIPQAGTGALRNGESRPGPSGSGCPSYSGGGNESQQAAQSRAAAASVHPLSPTSSTKSLFSSPSSSPPSYLDIRQLRSSSSSTSSSLPTSAGDVVQEVTTAKHTAPTLGSRRTRKTWTKEMNTFIMRHYFIITDLETKKRAYLTQLHTLFTSEYPEMDASKQRVGDQRRAIVNCNLLSKQELLQIKEEIKDTLHNSQSLLNIHKDAPDTLKHNRLNWTDELNECIIKNYYRITHLETNRTSYRKPLHEAFINNFPSLAHLSEQRISDQLRAIINNKYINDQRLNTIKQEVAEELTITDDKLGSQEVAQNSFSFENDTQIQILEPDNQQVNPDNTHLPNRNADIDETFNLALEHFKGTNPTDRIFIPKQKTSKNLAKTVNYIDKFIIPEHINEETDFDYFQTVIYCAAWTAAKMNKTRLSFTITNMSHPAKNNKKPQWQIRLEKRVQDIRAKIGRVMQYINGGRSRKLIAHVNKIKEIYKIHSIHEEPNTQIAQILDTLKQKLSILTCRLKRYNACTQRKQQNNQFNHNEKEFYRHIRTAATNLPHTENTHTEIPDAGDFQRFWAGIWEQPINHNLEAEWIKTERKKYDKDLLEMTFEKIPLNIFQQVIRKLHNWKSPGSDYIHNYWYKKLTNTHSILYKYLNKFIEDPNSIPPYITSGTTFMIPKDCNELTNPAKYRPITCLQTIYKILSSCMAELIYKHVNDNNILAEQQKGCRKFSQGCKEQLIIDSVILKHATKTKSDLYSIYIDYKKAYDSVPHSWLLHVLEIYKIHPKIIHLLKTTMTLWNTKLKLKTPTTSIETQPIKIQRGIFQGDALSPIWFCLALNPLSNILNSLEAGYRINYNDTNRHTETIINHLLYMDDLKIYADNEFDLYKLTELTEQFSNDIKMEFGVDKTKINSVRAGKIYLHSYTLQSGERIEPLDEGETYKYLGYHQSQQILSKDTKCKLKQNFQHRLNTILKSKLYSRNMIKAINTFAIPILTYSFGIINWNKTELIGIQRKINTTMTKYRKHHPRSCIQRLTLPRKDGGRGIIDIVNLHNRQILNLKQYFLTRSELSTIHKAIVTNDNNFTPLNLQDLHSNKHKITDDKTKLSEWAKKALHGRHLHDLCQTNVDKEASNTWLSRGDLFPETEGFIIAIQDQTIETRNYQRYITKTLTTDSCRKCHSCPETIQHITGACRTIVQTDYKHRHDQVASIMHQSLAQQRNFIADLEPYYKYKPQTILDNAATKIYFDRTILTDRTIHYNRPDITVVDKINKTAYLIDIAIPNTHNLQSTIAEKFTKYIELKDEIARLWNLQKVTIVPIVLSTTGVIPIQLFKSLDTLQLPHNLVYLMQKAVILNTCRIVRKFLQTDDELTTLHTPQTQPNSHIHTSHIISQPDHTAHHPSPDTPSSIHTNNLNI

SEQ ID NO: 7042 - protein, 1254 aa, Aricia agestis
MRLRNRIIPQAGTGALRNGESRPGPSGSGCPSYSGGGNELQQAAQSRAAAASVHPLSPTSSTKSLFSSPSSSPPSYLDIRQLRSSSSSTSSSLPTSAGDVVQEVTTAKHTAPTLGSRRTRKTWTKEMNTFIMRHYFIITDLETKKRAYLTQLHTLFTSEYPEMDASKQRVGDQRRAIVNCNLLSKQELLQINEEIKDTLHNSQSLLNIHKDAPDTLNHNRLNWTDELNECIIKNYYRITHLETNRTSYRKPLHEAFINNFPSLAHLSEQRISDQLRAIINNKYINDQRLNTIKQEVAEELTITDDKLGSQEVAQNSFSFENDTQIQILEPDNQQVNPDNTHLPNRNADIDETFNLVLEHFKGTNPTDRIFIPKQKTSKNLAKTVNYIDKFIILEHINEETDFDYFQTVIYCAAWTAAKMNKTRLSFTITNMSHPAKNNKKPQWQIRLEKRVQDIRAKIGRVMQYNNGGRSRKLIAHVNKIKEIYKIHSIHEEPNTQIAQILDTLKQKLSILTCRLKRYNACTQRKQQNNQFNHNEKEFYRHIRTAATNLPHTENTHTEIPDAGDFQRFWAGIWEQPINHNLEAEWIKAERKKYDKDLLEMTFEKIPFNIFQQVIRKLHNWKSPGSDYIHNYWYKKLTNTHSILYKYLNKFIEDPNSIPPYITSGTTLMIPKDCNELTNPAKYRPLTCLQTIYKILSSCMAELIYKHVNDNNILAEQQKGCRKFSQGCKEQLIIDSVILKHATKTKSDLYSIYIDYKKAYDSVPHSWLLHVLEIYKIHPKIIHLLKTTMTLWNTKLKLKTPTTSIETQPIKIQRGIFQGDALSPIWFCLALNPLSNILNSLEAGYRINYNDTNRHTETIINHLLYMDDLKIYADNEFDLYKLTELTEQFSNDIKMEFGVDKTKINSVRAGKIYLHSYTLQSGERIEPLDEGETYKYLGYHQSQQILSKDTKCKLKQNFQHRLNTILKSKLYSRNMIKAINTFAIPILTYSFGIINWNKTELIGIQRKINTTMTKYRKHHPRSCIQRLTLPRKDGERGIIDIVNLHNRQILNLKQYFLTRSELSTIHKAIVTNDNNFTPLNLQDLHSNKHKITDDKTKLSEWAKKALHGRHLHDQTNVDKEASNTWLSRGDLFPETEGFIIAIQDQTIETRNYQRYITKTLTTDSCRKCHSCPETIQHITGACRTIVQTDYKHRHDQVASIMHQSLAQQRNFIADLEPYYKYKPQTILDNAATKIYFGRTILTDRTIQQTRYYSSR

SEQ ID NO: 7043 - protein, 1405 aa, Celastrina argiolus
MMRLRNRVIPQAGTGAQRDGESRPGPSGSGCPSYSGEGNESHQAIQSRNAAEHFYHLSSNSSPKSSLFSSPPSSPQSYLDIVREARSSTSSNCSPRVRDVVQEASRVENTAPTLGTRRTRKTWTKDINTFIMRHYFIITKLETTKKAYLTQLHSLFTNEFPEMEASKQRIGDQRRAIINCNLLTKKELSHIQEEVKHILCNQQSSLTESHTNTEITISQTRLSWTDELNEYILKSYYHITQLERNRTSYRKPLHEAFINNFPTLSHLSEQRISDQLRAIINNKYITDERLNILKQEVADEMTIIINTDIFDINSLSTPQTNSYNVDQRQILDIEPDINQETSDNTHLPDRNTNIDETFKLALRHFIDTDPTARVYIPKQKTSRNLASIVNYLNKIILPEHINTDTDFSYFQTIIYCAAWTAAKLNGTRLSFEITISNNSYTAKNTKKPLWQIRLEKRIEDLRIKIGRITQFIKGGRSRKLIGHVNKIIEAYKIHAIHEEPNTQVIQILDTLKQKLSILTGRLRRYNTCTLRKQQNSQFNNNEREFYRKIRMASSNITQNENNNTHTEMPNPNELQNFWARIWEQPMSHNYEAGWIETERTKYNNDLTEMSFETVPLNIFQQVIRNLHNWKSPGSDYIHNYWYKKFTSTHNNLLNFLNKFIEEPTSIPSYITSGTTFMIPKDVTEPTNPAKYRPITCLQTIYKILTSCVAELMYKHVNDNNILAEQQKGCRKFSQGCKEQLIIDSVILKHVSKTKSDLYTMYIDYKKAYDSVPHSWLLQVLEIYKVHPKIINLLKTMMTQWQTKLKLKSSNTQIETLPIKIKRGIFQGDALSPLWFCIALNPLSNILNSVEAGYRINYNDINRQSQTINHLLYMDDIKLYADNEFDLYQLTELTETFTNDIKMNFGIDKTKINSIKAGRPFLHTYTLQSGERIEPLNEGETYKYLGYRQSQQIHHKDTKYKLRQKFQQRLNAIMKSKLYSRNTIKAINTFAIPILTYSFGIINWNKTELINIQRKINTTMTKFRKHHPRSCIQRLTLPRKEGGRGIIDISNLHIRQIINLRQYFFTKSESSTIHNAIVQNDNKFTPLNLLQVRNNHLKVADDKSKLSEWARKALHGRHLQDLCQTNVDKEASNAWLSRGDLFPETEGFMIAIQDQTIETRNYQRYITKTLTTDSCRKCHSCPETIQHITGACKTIVQTDYKHRHDQVASIIHQRLAKQRQFITDLEPYYKYKPQNVLDNASTKLYFDRNILTDRTTHYNRPDITVVDKVNKTAFLIDIAVPNTHNLQSTIAEKLTKYIELKDEIARLWNLQKVTIVPIVLSTTGIIPKQLHKSLDTLQLPSNLVYLMQKAVILNTCRIVRKFLQTDEEPSTFNVLPTHSNSHSTAQSEHTLNQSTLNSSTLPHTNT

SEQ ID NO: 7044 - protein, 1203 aa, Celastrina argiolus
MRHYFIITKLETTKKAYLTQLHSLFTNEFPEMEASKQRIGDQRRAIINCNLLTKKELSHIQEEVKHILCNQQSSLTESHTNTEITISQTRLSWTDELNEYILKSYYHITQLERNRTSYRKPLHEAFINNFPTLSHLSEQRISDQLRAIINNKYITDERLNILKQEVADEMTIIINTDIFDINSLSTPQTNSYNVDQRQILDIEPDINQETSDNTHLPDRNTNIDEPFKLALRHFIDTDPTARVYIPKQKTSRNLASIVNYLNKIILPEHINTDTDFSYFQTIIYCAAWTAAKLNGTRLSFEITISNNSYTAKNTKKPLWQIRLEKRIEDLRIKIGRITQFIKGGRSRKLIGHVNKIIEAYKIHAIHEEPNTQVIQILDTLKQKLSILTGRLRRYNTCTLRKQQNSQFNNNEREFYRKIRMASSNITQNENNNTHTEMPNPNELQNFWARIWEQPMSHNYEAGWIETERTKYNNDLTEMSFETVPLNIFQQVIRNLHNWKSPGDPGDFQYIHNYWYKKFTSTHNNLLNFLNKFIEDPTSIPSYITSGTTFMIPKDVTEPTNPAKYRPITCLQTIYKILTSCVAELMYKHVNDNNILAEQQKGCRKFSQGCKEQLIIDSVILKHVSKTKSDLYTMYIDYKKAYDSVPHSWLLQVLEIYKLHPKIINLLKTMMTQWQTKLKLKSSNTQIETLPIKIKRGIFQGDALSPLWFCIALNPLSNILNSVEAGYRINYNDINRQSQTINHLLYMDDIKLYADNEFDLYQLTELTETFTNDIKMNFGIDKTKINSIKAGRPFLHTYTLQSGERIEPLNEGETYKYLGYRQSQQIHHKDTKYKLRQKFQQRLNAIMKYKLYSRNTIKAINTFAIPILTYSFGIINWNKTELINIQRKINTTMTKFRKHHPRSCIQRLTLPRKEGGRGIIDINNLHIRQIINLRQYFFTKSESSTIHNAIVQNDNKFTPLNLLQVRNNHLKVADDKSKLSEWARKALHGRHLQDLCQTNVDKEASNAWLSRGDLFPETEGFMIAIQDQTIETRNYQRYITKTLTTDSCRKCHSCPETIQHITGACKTIVQTDYKHRHDQVASIIHQRLAKQRQFITDLEPYYKYKPQNVLDNASTKLYFDRTILTDRTTHYNRPDITVVDKVNKTAFLIDIAVPNTHNLQSTIAEKLTKYIELKDEIARLWNLQKVTIVPIVLSTTGVIVSHVE

SEQ ID NO: 7045 - protein, 1405 aa, Celastrina argiolus
MMRLRNRVIPQAGTGAQRDGESRPGPSGSGCPSYSGEGNESHQAIQSRNAAEHFYHLSSNSSPKSSLFSSPPSSPQSYLDIVREARSSTSSNCSPRVRDVVQEASRVENTAPTLGTRRTRKTWTKDINTFIMRHYFIITKLETTKKAYLTQLHSLFTNEFPEMEASKQRIGDQRRAIINCNLLTKKELSHIQEEVKHILCNQQSSLTESHTNTEITISQTRLSWTDELNEYILKSYYRITQLERNRTSYRKPLHEAFINNFPTLSHLSEQRISDQLRAIINNKYITDERLNILKQEVADEMTIIINTDIFDINSLSTPQTNSYNVDQRQILDIEPDINQETSDNTHLPDRNTNIDETFKLALRHFIDTDPTARVYIPKQKTSRNLASIVNYLNKIILPEHINTDTDFSYFQTIIYCAAWTAAKLNGTRLSFEITISNNSYTAKNTKKPLWQIRLEKRIEDLRIKIGRITQFIKGGRSRKLIGHVNKIIEAYKIHAIHEEPNTQVIQILDTLKQKLSILTGRLRRYNTCTLRKQQNSQFNNNEKEFYRKIRMASSNITQNENNNTHTEMPNPNELQNFWAGIWEQPMSHNYEAGWIETERTKYNNDLTEMSFETVPLNIFQQVIRNLHNWKSPGSDYIHNYWYKKFTSTHNNLLNFLNKFIEEPTSIPSYITSGTTFMIPKDVTEPTNPAKYRPITCLQTIYKILTSCVAELMYKHVNDNNILAEQQKGCRKFSQGCKEQLIIDSVILKHVSKTKSDLYTMYIDYKKAYDSVPHSWLLQVLEIYKVHPKIINLLKTMMTQWQTKLKLKSSNTQIETLPIKIKRGIFQGDALSPLWFCIALNPLSNILNSVEAGYRINYNDINRQSQTINHLLYMDDIKLYADNEFDLYQLTELTETFTNDIKMNFGIDKTKINSIKAGRPFLHTYTLQSGERIEPLDEGETYKYLGYRQSQQIHHKDTKYKLRQKFQQRLNAIMKSKLYSRNTIKAINTFAIPILTYSFGIINWNKTEIINIQRKINTTMTKFRKHHPRSCIQRLTLPRKEGGRGIIDISNLHIRQIINLRQYFFTKSESSTIHNAIVQNDNKFTPLNLLQVRNNHLKVADDKSKLSEWARKALHGRHLQDLCQTNVDKEASNAWLSRGDLFPETEGFMIAIQDQTIETRNYQRYITKTLTTDSCRKCHSCPETIQHITGACKTIVQTDYKHRHDQVASIIHQRLAKQRQFITDLEPYYKYKPQNVLDNASTKLYFDRTILTDRTTHYNRPDITVVDKVNKTAFLIDIAVPNTHNLQSTIAEKLTKYIELKDEIARLWNLQKVTILPIVLSTTGVIPKQLHKSLDTLQLPSNLVYLMQKAVILNTCRIVRKFLQTDEEPSTFNVLPTHSNSHSTAQSEHTLNQSTLNSSTLPHTNT

SEQ ID NO: 7046 - protein, 1405 aa, Celastrina argiolus
MMRLRNRVIPQAGTGAQRDGESRPGPSGSGCPSYSGEGNESHQAIQSRNAAEHFYHLSSNSSPKSSLFSSPPSSPQSYLDIVREARSSTSSNCSPRVRDVVQEASRVENTAPTLGTRRTRKTWTKDINTFIMRHYFIITKLETTKKAYLTQLHSLFTNEFPEMEASKQRIGDQRRAIINCNLLTKKELSHIQEEVKHILCNQQSSLTESHTNTEITVSQTRLSWTDELNEYILKSYYRITQLERNRTSYRKPLHEAFINNFPTLSHLSEQRISDQLRAIINNKYITDERLNILKQEVADEMTIIINTDIFDINSLSTPQTNSYNVDQRQILDIEPDINQETSDITHLPDRNTNIDETFKLALRHFIDTDPTARVYIPKQKTSRNLASIVNYLNKIILPEHINTDTDFSYFQTIIYCAAWTAAKLNGTRLSFEITISNNSYTAKNTKKPLWQIRLEKRIEDLRIKIGRITQFIKGGRSRKLIGHVNKIIEAYKIHAIHEEPNTQVIQILDTLKQKLSILTGRLRRYNTCTLRKQQNSQFNNNEKEFYRKIRMASSNITQNENSNTHTEMPNPNELQNFWAGIWEQPMSHNYEAGWIETERTKYNNDLTEMSFETVPLNIFQQVIRNLHNWKSPGSDYIHNYWYKKFTSTHNNLLNFFNKFIEEPTSIPSYITSGTTFMIPKDVTEPTNPAKYRPITCLQTIYKILTSCVAELMYKHVNDNNILAEQQKGCRKFSQGCKEQLIIDSVILKHVSKTKSDLCTMYIDYKKAYDSVPHSWLLQVLEIYKIHPKIINLLKTMMTQWQTKLKLKSSNTQIETLPIKIKRGIFQGDALSPLWFCIALNPLSNILNSVEAGYRINYNDINRQSQTINHLLYMDDIKLYADNEFDLYQLTELTETFTNDIKMNFGIDKTKINSIKAGRPFLHTYTLQSGERIEPLDEGETYKYLGYRQSQQIHHKDTKYKLRQKFQQRLNAIMKSKLYSRNTIKAINTFAIPILTYSFGIINWNKTELINIQRKINTTMTKFRKHHPRSCIQRLTLPRKEGGRGIIDISNLHIRQIINLRQYFFTKSESSTIHNAIVQNDNKFTPLNLLQVRNNHLKVADDKSKLSEWARKALHGRHLQDLCQTNVDKEASNAWLSRGDLFPETEGFMIAIQDQTIETRNYQRYITKTLTTDSCRKCHSCPETIQHITGACKTIVQTDYKHRHDQVASIIHQRLAKQRQFIPDLEPYYKYKPQNVLDNASTKLYFDRTILTDRTTHYNRPDITVVDKVNKTAFLIDIAVPNTHNLQSTIAEKLTKYIELKDEIARLWNLQKVTIVPIVLSTTGVIPKQLHKSLDTLQLPSNLVYLMQKAVILNTCRIVRKFLQTDEEPSTFNVSPTHSNSHSTAQSEHTLNQSTLNSSTLPHTNT

SEQ ID NO: 7047 - protein, 774 aa, Cyclargus thomasi
MSFEAIPISIFQQVVRKLHNWKSPGSDFIHNYWYKKFTSIHNTLYKFLNQFIEDPTQIPPYITCGITFMIPKDYSESINPSKYRPITCLQTIYKILTSCISELIYEHIDKNNILAEQQKGCRKFSQGCKEQLVIDSVILKSVAKTKADLYSIYIDYKKAFDSVPHSWLLQVLEIYKIHPKIINLLRTTMKSWKTKLKLKTPTECIETDLIQILRGIFQGDALSPLWFCLSLNPLSNILNSKDAGYRLHYKDRYRETETINHLLYMDDIKLYADNELDLYRLIEATEQFTKDIKMDFGIEKTRINSIKAGRSYQHTYTLQSDECIEPLDEAETYKYLGYHQSNQIEHKNTKHNLRQKFQHRLNSILKSNLYARNTIKAINTFAIPILTYSFGIINWNKSELINIQRKINTTMTKFRKHHPRSCVQRLTLPRKDGGRGIIDVTNLYNRQILNLRQYFFYKYERSTLHKAIVKNDNKFTPLNLKDSRNDRNKVIDDKIKLSEWAKKSLHGRHLHDLCQTNVDKKASNAWLSRGDLFPETEGFMIAIQDQTIETRNYQRYITKTRTTDSCRKCHSCPETIQHITGACKTIVQTDYKHRHDQVASIIHQRLAKQRHFIPDIEPYYKYKPESVLDNASTKLYFDRTILTDRTTHYNRPDITLVDKINKTAYLIDIAVPNTHNLQSTIAEKLAKYIELKEEITRLWNLQKVTIIPIVLSTTGVIPKQLHTSLSTLQLPANLVYLLQKAVILNTCRIVRKFLQTDDETTTLHTSQSNSHTHI

SEQ ID NO: 7048 - protein, 1404 aa, Aricia agestis
MMRLRNRVIPQAGTGAVCDGESRPGPSGSGCPSYSGGGNESHQAAQSQTAAERMYHNINSPISSAPSSLFASPPSSPPSYLTIYHTRSSTSSNSSLSPPRTRDVVQEASTAENTAPALSTRRTRKTWTKDMNTFIMRHYFIITELKSKKKAYLTQLHTLFTNKYPEMQASRQRVGDQRRAIINCNFLSKQELSHIKEEVKNILRNPRSDTLTEIHTDTHNISSTQSRLTWTDDLNEFILISYFRLTQLETNRTSYRKPLHEAFINKFTALAHLSEQRISDQLRAIINNKYVSDERINELKQEVADELNINSTERFSTRPIEISQANNYNFESTQRQDLNDDFEHDTTTDVPLPDSNTKIDETFKLALQHFLGTDPTRRVYIPKQKTSRNFASTVNYLNKITLPHYINNDTDFNYFQTVIYCAAWTAAKLNGSRLSLGTTNNPQPSDNNKKPRWQIRLEKRKDDLRVKIGRITQFISGARSRKLTEHVNKIIEQYKIHAIHEEPNTQITQILDTLKQKLSILTGRLRRYNTCTLRKQQNSQFCNNEKEFYRNIRTATANTLQSDSGTQVELPDPSDLQRFWAEIWEHHNFEAEWIKAEKSKCNTVVNNMTFEVIPISIFQKVIRKLHNWKSPGSDFIHNFWYKKFTSIHNILYSFLNHFIEDPSKIPTYITFGVTFMIPKDYSESENPAKYRPITCLQTIYKILTSCISELIYEHVDKNNILAEQQKGCRKFSQGCKEQLVIDSVILKNVTKTKSDLYSMYIDYKKAFDSVPHTWLLQVLEIYKIHPKIIYLLKTIMTSWKTKLKLKTPTKFVETDPIQILRGIFQGDALSPLWFCLSLNPLSNILNSTDAGYRLHYNDIHRKTETINHLMYMDDIKIYADNEVDLYRLTELTEQFTNDIKMNFGIDKTKINSIKSGRPFQHIFTLQSGEYIEPLDEGETYKYLGFNQSHQIEHKNTKNNLRQKFQHRLNAILKSNLYARNTIKAINTFAIPILTYSFGIVNWNKSELINIQRKINTTMTKFRKHHPRSCVQRLTLPRKDGGRGLIDVTNLYNRQILNLRQYFFCKAELSTLHKAIVKTDNKFTPLNLKYSQNDRHKVVDDKTKLAEWAKKSLHGRHLHDLCQTNVDKEASNAWLSRGDLFPETEGFMIAIQDQTIETRNYQRHITKTRTTDSCRKCQSCPETIQHITGACKTIVQTDYKHRHNTSDLDQVAGIIHQRLAKKRHFITDIEPYYKYKPENVLDNASTKLYFDRTILTDRTTHYNRPDITLVDKINKTAYLIDIAVPNTHNLQSTIAEKLTKYIELKDEIARLWNLQKVTIVPIVLSTTGVIPKQLHNSLNTLQLPLNLVYLLQKAVILNTCRIVRKFLQTDDEATTLHTSQSNLYTHTSYNMLETDHTNPQHHTNS

SEQ ID NO: 7049 - protein, 1294 aa, Aricia agestis
MMRLRNRVIPQAGTGAVCDGESRPGPSGSGCPSYSGGGNESHQAAQSQTADERMYHNINSPISSAPSSLFASPPSSPPSYLAIYHTRSSTSSNSSLSPPRTRDVVQEASTAENTAPALSTRRTRKTWTKDMNTFIMRHYFIITELESKKKAYLTQLHTLFTNKYPEMQASRQRVGDQRRAIVNCNFLSKQELSHIKEEVKNILRNPRSDTLTEIHTDTHNISSTQSRLTWTDDLNEFILISYFRLTQLETNRISYRKPLHEAFINKFTALAHLSEQRISDQLRAIINNKYVSDERINELKQEVADELNINSTERFSTRPIEISQANNYNFESTQRQDLNDDFEHDTTTDVLLPDSNTKIDETFKLALQHFLGTDPTRRVYIPKQKTSRNFASTVNYLNKITLPHYINNDTDFKYFQTVIYCAAWTAAKLNGSRLSLGTTNNPQPSDNNKKPRWQIRLEKRKDDLRVKIGRITQFISGARSRKLTEHVNKIIEQYKIHAIHEEPNTQITQILDTLKQKLSILTGRLRRYNTCTLRKQQNSQFCNNEKEFYRNIRTATANTLQSDSGTQVELPDPSDLQRFWAEIWEQPINHNFEAEWIKAEKSKCNTVVNNMTFEVIPISIFQKVIRKLHNWKSPGSDFIHNFWYKKFTSIHNILYSFLNHFIEDPSKIPTYITFGVTFMIPKDYSESENPAKYRPITCLQTIYKILTSCISELIYEHIDKNNILAEQQKGCRKFSQGCKEQLVIDSVILKNVTKTKSDLYSMYIDYKKAFDSVPHTWLLQVLEIYKIHPKIIYLLKTIMISWKTKLKLKTPTKFVETDPIQILRGIFQGDALSPLWFCLSLNPLSNILNSTDAGYRLHYNDIHRKTETINHLMYMDDIKIYADNEVDLYRLTELTEQFTNDIKMNFGIDKTKINSIKSGRPFQHIFTLQSGEYIEPLDEGETYKYLGFNQSHQIEHKNTKNNLRQKFQHRLNAILKSNLYARNTIKAINTFAIPILTYSFGIVNWNKSELINIQRKINTTMTKFRKHHPRSCVQRLTLPRKDGGRGLIDVTNLYNRQILNLRQYFFCKAELSTLHKAIVKTDKKFTPLNLKDSQNDRHKVVDDKTKLAEWAKKSLHGRHLHDLCQTNVDKEASNAWLSRGDLFPETEGFMIAIQDQTIETRNYQRHITKTRTTDSCRKCQSCPETIQHITGACKTIVQTDYKHRHDQVAGIIHQRLAKKKHFITDIEPYYKYKPENVLDNASTKLYFDRTILTDRTTHYNRPDITLVDKINKTAYLIDIAEHTQFTKYNSRETY

SEQ ID NO: 7050 - protein, 1056 aa, Celastrina argiolus
MTIIINTDIFDINSLSTPQTNSYNVDQRQILDIEPDINQETSDNTHLPDRNTNIDETFKLALRHFIDTDPTARVYIPKQKTSRNLASIVNYLNKIILPEHINTDTDFSYFQTIIYCAAWTAAKLNGTRLSFEITISNNSYTAKNTKKPLWQIRLEKRIEDLRIKIGRITQFIKGGRSRKLIGHVNKIIEAYKIHAIHEEPNTQVIQILDTLKQKLSILTGRLRRYNTCTLRKQQNSQFNNNEKEFYRKIRMASSNITQNENNNTHTEMPNPNELQNFWAGIWEQPMSHNYEAGWIETERTKYNNDLTEMSFETVPLNIFQQVIRNLHNWKSPGSDYIHNYWYKKFTSTHNNLLNCLNKFIEEPTSIPSYITSGTTFMIPKDVTEPTNPAKYRPITCLQTIYKILTSCVAELMYKHVNDNNILAEQQKGCRKFSQGCKEQLIIDSVILKHVSKTNSDLYTMYIDYKKAYDSVPHSWLSQVLEIYKVHPKIINLLKTMMTQWQTKLKLKSSNTQIETLPIKIKRGIFQGDALSPLWFCIALNPLSNILNSVEAGYRINYNDINRQSQTINHLLYMDDIKLYADNEFDLYQLTELTETFTNDIKMNFGIDKTKINSIKAGRPFLHTYTLQSGERIEPLDEGETYKYLGYRQSQQIHHKDTKYKLRQKFQQRLNAIMKSKLYSRNTIKAINTFAIPILNINWNKTELINIQRKINTTMTKFRKHHPRSCIQRLTLPRKEGGRGIIDISNLHIRQIINLRQYFFTKSESSTIHNAIVQNDNKFTPLNLLQVRNNHLKVADDKSKLSEWARKALHGRHLQDLCQTNVDKEASNAWLSRGDLFPETEGFMIAIQDQTIETRNYQRYITKTLTTDSCRKCHSCPETIQHITGACKTIVQTDYKHRHYQVASIIHQRLAKQRQFITDLEPYYKYKPQNVLDNASTKLYFDRTILTDRTTHYNRPDITVVDKVNKTAFLIDIAVPNTHNLQSTIAEKLTKYIELKDEIARLWNLQKVTIVPIVLSTTGVIPKQLHKSLDTLQLPSNLVYLMQKAVILNTCRIVRKF

SEQ ID NO: 7051 - protein, 1398 aa, Plebejus argus
MMRLRNRIIPQAGTGAVCDGESRPGPSGSGCPSYSGGGNESHQAAQSQTAAERMYHISPISSAPSSLFSSPPSSPPSYLDIRQIRSSTSSNSLSSPPRARDVVQEAAIAKNTAPALGTRRTRKTWTKEMNIFIMRHYYIITELENKTKAYLSKLHSLFSTKYPDMEASKQRVGDQRRAIINCNLLTNQELTDIKEEVKNILRSPQNIETHSNTQITKTPARLTWTDELNEYIIKSYYRVTHLETNKTAYRKPVHEAFIHKFPSLAHLSEQRISDQLRVIINKKYITEERLNTLKQEVADELILNDNNTPNTNEQDNLYTNNFENMEMHNIDSDRQQEPYCANVLLPNRDTEIDEIFKQALQNFTDTDPTSRGYIPKQKSSKKLAYTVNYINKIILPENVNKDTDFHQFQTVIYCAAWTAAKANGSRLVSTTNNSNYAKTIKKPHWQRRLEKRIEDIRKKVGRITQFIKGGRSRKLIGHVNKIMEAYKIHTVHEEPNTQINQILDTLKQKLSILTGRLRRYNLCTLRKQQNKQFNNNEKEFYRSIRLATKNEDNILTEAPDPKDLQSFWAGIWEQPVSHNLEAEWIEDETKKYHDTLTEMTFEAIPINIFQQVLRNLHNWKAPGSDCIHNYWYKKFTSIHSNMLIYLNQFIENPSSIPPYVTSGTTFMIPKDNSEPTNPAKYRPITCLQTIYKILTSCITELIYKHVNDSNVLAEQQKGCRKFSQGCKEQLIIDSVILKHVNKTKSDLYSMYIDYKKAYDSVPHSWLLHVLEIYKIHPKIINLLKTMMKSWNTKLKLKTPTTLIETDPIQILRGIFQGDALSPLWFCLALNPLSNILNSSDAGYRMNYNDRQRHTETINHLLYMDDIKIYADTESELYKLAELTEQFTNDIKMNFGVDKTKINSIKAGHTYLHTYTLGSGERIEPLDEGETYKYLGFNQSQQINYKDTKCKLRQTFQHRLNAILKSKLYSRNTVKAINTFAIPILTYSFGVINWNKTDLINMQRKINTTMTKYRKHHPRSCVQRLTLPRKEGGRGITDLTNLHNKQVTNLRHYFITKSESSTLHKTIVQNDNKFTPLDLKNTQSNQLKVTDDKTKLSEWARKSLHGRHLHDLCQTNVDKEASNAWLSRGDLFPETEGFMIAIQDQTIETRNYQRYITKTITTDSCRKCHSCPETIQHITGACKTIVQTDYKHRHDQVANIIHQRLAKQRNFITEIEPYYKYKPENVLDNASTKLYFDRTILTDRTTHYNRPDITLVDKINKTAFLIDIAVPNTHNLQTTIAEKLTKYIDLKDEIARLWNLQKVTIVPIVLSTTGVIPKQLHKSLDTLQLPLNLTYLMQKAVILNTCRIVRKFLQTEEEHTRLHTPQTQPNSHIHTSHTSQADHTLHYPSHDTFSIHTNI

SEQ ID NO: 7052 - protein, 1394 aa, Aricia agestis
MMRLRNRVIPQAGTGAVCDGESRPGPSGSGCPSYSGGGNESHQAAQSQAAAERMYHINSPISAAPSSLFSSPPSSPPSYLDIRQTRSSTSSNSLSSPPRARDVVQEATIAKNTAPALGTRRTRKAWTKEMNTFIMRHYYIITELENKTKAYLPQLHSLFSTKYPDMEASKQRVGDQRRAIINCNLLTKQELADIKEEVKNILRFPQNIEIHTNTEITKTQARLTWTDELNEYIIKSYYRVTHLETNKTAYRKPVHEAFIHKFPILAHLSEQRISDQLRVIINNKYITEERLNILKQEVAEELIVDVIDRPNTNEHDVPYDINNFQDIDIQNIEPDRQQEPYADVLLLDRDTDIDEIFKQSLQHFADTDPTSRVYIPKQKSSKKLAYTVNYINKITLPENINKDTDFHHFQTVLYCAAWTAAKVNGSRLSASINHSNYAKNIKKPQWQRRLEKRIEDIRAKIGRITQFIKGGRSRKLIRHVNKIIEVYKIHTIHEEPNTQIAQILDTLKQKLSILTGRLKRYNICTLRKQQNKQFNNSEKEFYRGIRLATQNKDNILTETPDPKDLQSFWAGIWEQPVSHNIEAEWIEDETKRYHGNLTEMTFQTIPISIFQQVIRNLHNWKAPGSDCIHNYWYKKFTSIHNNMLIYLNQFIEDPSSIPPYVTSGTTFMIPKDYSDPLNPAKYRPITCLQTIYKILTSCVTELIYKHVTDNNILAEQQKGCRKFSQGCKEQLIIDSVILKHVNKTKSNLHSMYIDYKKAYDSVPHSWLLHVLKIYKIHPKIINLLKTMMTSWKTKLKLKTSTTLIETDPIQILRGIFQGDALSPLWFCLALNPLSNILNSTDAGYRIHYNDRQIQTQTINHLLYMDDIKLYAATESELYKLTELTEQFTIDIKMNFGVDKTKINSIKAGNTYLHSYTLGTGERIEPLDEGETYKYLGVNQSQQINYKDTKYKLRQTFQHRLNAIMKSKLYSRNTVKAINTFAIPILTYSFGVINWNKTDLINIQRNINTTMTKYRKHHPRSCIQRITLPRKEGGRGIIDITNLHNKQVINLRHYFTTKSESSTLHKAIAQNDNKFTPLDLKNTQNNQLKVTDDKTKLSEWARKSLHGRHLHDLCQTNVDKEASNAWLSRGDLFPETEGFMIAIQDQTIETRNYQKYITKTLTTDSCRKCHSCSETIQHITGACKTIVQTDYKHRHDQVASIIHQRLAKQRNFINEIEPYYKYKPENVLDNASTKLYFDRTILTDRTTHYNRPDITLVDKINKTAFLIDIAVPNTHNLQTTIAEKLTKYIDLKDEITRLWNLQKVTIVPIVLSTTGIIPKQLHKSLDTLQLPPNLTYLMQKAVILNTCRIVRKFLQTDEERTTLHTPQTHPNSHVHTSHTLQTDHAPAAHFTRTNT

SEQ ID NO: 7053 - protein, 1405 aa, Celastrina argiolus
MMRLRNRVIPQAGTGALRDGESRPGPSGSGCPSYSGEGKKSHQAVQHGTAREHCYHLSPISSPISSLFSSAPSSPQSYLDIRQARSSTSSNSSSSTSTGNVVQEATAAEDTAPTLSTRRTRKTWSKQMNTFIMRHYFIITQLETKRKAYLTELYALFTNKYPEMQASKQRVGDQRRAIINCNLLSKQELSDIKEEVKSIISNPQSSNLTEIQTETQNITLTQTRLSWTDEQNEYILKSYYRITQMETNRTAYRKPLHEAFINNFPTLAHLSEQRISDQLRAIINNKYITDERLTTLKQEISDELTIINANRLNTNTLIEEANSCNVDNIQIQDLDPAIQQHNTENLYLPDRNASIDETFKLALQHFINTDPSDRVYIPKQKTSRNLACTVNYLNKITLPDYINEDTNFDYFQTVIYCAAWTAAKVNGTRLSLNITNKSYPPKSNKKPHWQIRLERRIEDIRVKIGRITQFIKGGRSRKLIGHVNKITELYKIHAIHEEPNTQITQILDTLKQKLSILTGRLRRYNACTLRKQQNSQFINNEKEFYRQIREATSNTSQNESTMHIDTPDPRNLQSFWAGIWEQPINHNFEAEWIQTEINKYSKDLIDMSFETIPINIFQQVIRKLHNWKSPGSDFIHNYWYKKFTSIHKNLYNYLNNFFEDPSKIPPYITFGTTFMIPKDYSQPTNPAKYRPITCLQTIYKILTSCITELIYEHVTKNKILSEQQKGCRKFSQGCKEQLIIDSVILKHVTKTKSDLYSMYIDYKKAYDSVPHSWLLHVLEIYKIHPKIINLLKATMTSWKTKLKLKTSTNLIETQPIQIQRGIFQGDALSPLWFCLALNPLSNILNSTEAGYCLQYNDQHRQIETINHLLYMDDIKLYADNEFDLYQLTEQTEQFSNDIKMNFGIDKTKINSIKNGSTFQHTYTLQSGERIEPLDEGETYKYLGYNQSHQIQYKDTKYMLRQKFQHRLKAIMKSKLYSRNTIKAINTFAIPILTYSFGIIKWNKSELIGIQRKIITTMTKYRKHHPRSCIQRLTLPRKEGGRGIIDITNLHNRQILNLRQYFFARLEFSTLHKAIVENDSKFTPLNLKDSQNNEHKVTDDKSKLSEWAKKALHGRHLHDLCQTNVDKEASNAWLSRGDLFPETEGFMIAIQDQTIETRNYQRYITKTLPIDSCRKCHSCSETIQHITGVCKTIVQTDYKHRHDQVASIIHQRLAKQRDFIIEIEPYYKYKPQNVLDNTATKLYFDRTILTDRTTHYNRPDITLVDKLNKTAYLIDIAIPNTHNLQSTISEKLTKYIELKEEIARLWHLQKVTIVPIVLSTTGVIPKQLHKSLNTLQLPPNLVYLMQKAVILNTCRIVRKFLQTDEKVSTHIQQTQSNSHIHTLLQDEHPIIHHPSSITSSIIHSNR

SEQ ID NO: 7054 - protein, 799 aa, Plebejus argus
MTFEAIPINIFQQVLRNLHNWKAPGSDCIHNYWYKKFTSIHSNMLIYLNQFIENPSSIPPYVTSGTTFMIPKDNSEPTNPAKYRPITCLQTIYKILTSCITELIYKHVNNSNVLAEQQKGCRKFSQGCKEQLIIDSVILKHVNKTKSDLYSMYIDYKKAYDSVPHSWLLHVLEIYKIHPKIINLLKTMMKSWNTKLKLKTPTTLIETDPIQILRGIFQGDALSPLWFCLALNPLSNILNSSDAGYRMNYNDRQRHTETINHLLYMDDIKIYADTESELYKLTELTEQFTNDIKMNFGVDKTKINSIKAGHTYLHTYTLGSGERIEPLDEGETYKYLGFNQSQQINYKDTKCKLRQTFQHRLNAILKSKLYSRNTVKAINTFAIPILTYSFGVINWNKTDLINMQRKINTTMTKYRKHHPRSCVQRLTLPRKEGGRGITDLTNLHNKQVTNLRHYFITKSESSTLHKTIVQNDNKFTPLDLKNTQSNQLKVTDDKTKLSEWARKSLHGRHLHDLCQTNVDKEASNAWLSRGDLFPETEGFMIAIQDQTIETRNYQRYITKTITTDSCRKCHSCPETIQHITGACKTIVQTDYKHRHDQVANIIHQRLAKQRNFITEIEPYYKYKPENVLDNASTKLYFDRTILTDRTTHYNRPDITLVDKINKTAFLIDIAVPNTHNLQNTIAEKLTKYIDLKDEIARLWNLQKVTIVPIVLSTTGVIPKQLHKSLDTLQLPLNLTYLMQKAVILNTCRIVRKFLQTEEEHTRLHTPQTQPNSHIHTSHTSQADHTLHYPSHDTFSIHVY

SEQ ID NO: 7055 - protein, 1404 aa, Plebejus argus
MMRLRNRVIPQAGTGAICDGESRPGPSGSGCPSYSGGGNESHQAAQYRTAAERTYHTSPISSAPSSLFASPPSSPPSYLAVYRTRSSTSSNSSLSPPRTGDVVQEASTAENTAPALGTRRTRKTWTKDMNTFIMRHYFIITELESKKKAYLSQLHSIFTNKYPEMQASKQRVGDQRRAIINCNLLSKQEISHIQEEVKNILYNPQSNTLLETHTDPHVTLTQSRLTWTDDLNEYILISYYRITQLETNRTSYRKPLHEAFINKFPALAHLTEQRISDQLRAIINNKYLTDERINTLKQEVAHELIIDSTESSVAQTNIYNIENIQRQDIGPDLELETTTDAHLPDRNTYIDETFKLALQHFKNTDPTCRVYIPKQKSSRTLASTVNYLNKITLPNHVNNDTDFNDFQTVIYCAAWTAAKVNGTRLSLSTTNNLHPSDNNNNNNNKNKKPRWQIRLEKRIEDLRVKIGRTTQFLKGNRSRKLIEHVNKIIEQYKIHAIHEEPNTEITEILDTLKQKLSILTGRLRRYNTCTLRKQQNNQFCNNEKEFYRNIRTATANTLQSDSGTQIELPDPSDLQRFWAEIWEQPTNHNFEAEWIKAEKSKSNTVVNDMSFEVIPISIFQQVIRKLHNWKSPGSDFIHNYWYKKFTSIHNILYNFLNHFIEDPSKIPPYITFGVTFMIPKDHSEPVNPAKYRPITCLQTIYKILTSCISEIIYEHVDKNNILAEQQKGCRKFSQGCKEQLVIDSVILKNVTKTKSDLYSMYIDYKKAFDSVPHTWLLQVLEIYKIHPKIIYLLKTIMTSWKTKLKLKTPRKFVETDPIQILRGIFQGDALSPLWFCLSLNPLSNILNSTDAGYRLHYNDRHRKTETINHLMYMDDIKIYADNEFDLYRLTELTEQFTNDIKMNFGIDKTKINSIKAGRSFQHIYKLQSGEYIEPLDEGETYKYLGFNQSHQIEHKNTKHNLRQKFQHRLNAILKSNLYARNTIKAINTFAIPILTYSFGIIKWNKSELINIQRKINTTMTKYRKHHPRSCVQRLTLPRKDGGRGLIDVTNLYNRQILNLRQYFFCKAELSTLHKAIVKTDNKFTPLNLKDSQNDRHTVVDDKTKLAEWAKKSLHGRHLHDLCQTNVDKEVSNAWLSRGDLFPETEGFMIAIQDQTIETRNYQRHITKTRTTDRCRKCQSCPETIQHITGACKTIVQTDYKHRHDQVAGIIHQRLAKQRHFITDIEPYYKYKPENVLDNASTKLYFDRTILTDRTTHYNRPDITLVDKINKAAYLIDIAVPNTHNLQSTIAEKLTKYIELKDEIARLWNLQKVTIVPIVLSTTGVIPKQLRNSLNILQLPPNLVYLLQKAVILNTCRIVRKFLQTDDEATIHTSQSNPHTHTSYMLETDHTNPHCFDTSSTHANS

SEQ ID NO: 7056 - protein, 1091 aa, Plebejus argus
MPQTDNSSFDNLQRQDVVPGQESSNTTHLPDRNPDIDETFKHALQHFINTDPTNRVYIPKQKPSKNLFSTVNYLNKITLPDHVNDDTDFHYFQTAIYCAAWTAAKLNGTKLSLNNVSTNQYPSRNNKKPHWQLRLEKRIEELRVKIGRVTQFIKGGRSRKLVAHVNKIMELHRIHATHEEPNTQITQILDTLKQKLLILTGRLRRYNKCTLRKQQNSQFNNNEKEFYRKIKIDTTNIPQNESNAHNNIMVELPDLSDLQKFWSGIWEQPTEHRFDAEWIEAEKTKYSKDITDMPFETIPISIFQQVIRKLHNWKSPGSDFIHNYWYKKFTSIHNYLYNYLNQFIEYPNKIPPYITFGTTFMIPKDYNDPTNPEKYRPITCLQTIYKILTSCITELIYEHVTVNNILTEQQKGCRKFSRGCKEQLIIDSVILKHVAKTKSNLYSMYIDYKKAYDSVPHSWLLQILKIYKIHPKIITLLETTMTTWKTKLRLKTSTNLIETPPIQIRKGLFQGDALSPLWFCLALNPLSNTLNSIDAGYRLQDDNRHIQTETINHLLYMDDIKIYADNELDLYRLTELTEQFSNDIKMNFGVDKTKINSYKAGRSFQHTYTLESGENIEPLDEGQTYKYLGYNQAQQILQKDTKFKLKQRFQHRLNAIMKSNLYARNTIKAINTFAIPVLTYSFGIINWNKSELINLQRKINTTMTKFRKHHPRSCVQRLTLPRKEGGRGITDITNLHNSQILNLKQYFLTKSEHSSLHKVIVKNDNKFTPLNLNSSQNNQHKVTDNKTKLSEWSKKALHGRHLHDLHQTNNDKEASNAWLCQGNLFPETEGFMIAIQDQTIETRNYQRYITKTLTNDTCRKCRSCPETIQHITGACKIIAQTDYKHRHDQVASIIHQRLARQRNFITDIEPYYKYKPENVLENTSTKLYFDRTILTDRTTHYNRPDITLVDKTDKTAYLIDIAVPNTHNLQSTITEKLTKYIELKDEIARLWNLQKVTIVPIVLSTTGVIPKQLHKSLNTLQLPPNLIYLLQKAVILNTCRIVRKFLQTDDEATTLHTFRSNPHSHTSYNIMLETDHINRHSFETPSTHTNS

SEQ ID NO: 7057 - protein, 1408 aa, Plebejus argus
MMRLRNRIIPQAGTGALRDGESRPGPSGSGCPSYSGGGNESQQAAQFETAAERFNFNHISPISSSKSLFSSPPSSPPSYLDIYQSRSSTSSNYSLSPPRTRDVVQKASVAENTAPTLSTRRTRKTWTKEMNTFIMRHYFIITELESKKKAYLAELHNLFTNKYPEMEASKQRIGDQRRAILNCKLLSKQELSDIQEEVKNILRNPQSNILTHTHTDTQNILNQSRLNWTDELNEYILKSYYRITQLETNRTSYRKPLHEAFKNKFITLAHFSEQRISDQLRAIINNKYVTDERQNILKQEVADELISTTETLSTNLTQMPQTDNSSFDNLQRQDVVPGQESSNTTHLPDRNPDIDETFKHALQHFINTDPTNRVYIPKQKPSKNLFSTVNYLNKITLPDHVNDDTDFHYFQTAIYCAAWTAAKLNGTKLSLNNVSTNQYPSRNNKKPHWQLRLEKRIEELRVKIGRVTQFIKGGRSRKLVSHVNKIMELHRIHATHEEPNTQITQILDTLKQKLLILTGRLRRYNKCTLRKQQNSQFNNNEKEFYRKIKIDTTNIPQNESNAHNNIMVELPDLSDLQKFWSGIWEQPTEHRFDAEWIEAEKTKYSKDITDMPFETIPISIFQQVIRKLHNWKSPGSDFIHNYWYKKFTSIHNYLYNYLNQFIEYPNKIPPYITFGTTFMIPKDYNDPTNPEKYRPITCLQTIYKILTSCITELIYEHVTVNNILTEQQKGCRKFSRGCKEQLIIDSVILKHVAKTKSNLYSMYIDYKKAYDSVPHSWLLQILKIYKIHPKIITLLETTMTTWKTKLRLKTSTNLIETPPIQIRKGLFQGDALSPLWFCLALNPLSNTLNSIDAGYRLQDDNRHIQTETINHLLYMDDIKIYADNELDLYRLTELTEQFSNDIKMNFGVDKTKINSYKAGRSFQHTYTLESGENIEPLDEGQTYKYLGYNQAQQILQKDTKFKLKQRFQHRLNAIMKSNLYARNTIKAINTFAIPVLTYSFGIINWNKSELINLQRKINTTMTKFRKHHPRSCVQRLTLPRKEGGRGITDITNLHNSQILNLKQYFLTKSEHSSLHKVIVKNDNKFTPLNLNSSQNNQHKVTDNKTKLSEWSKKALHGRHLHDLHQTNNDKEASNAWLCQGNLFPETEGFMIAIQDQTIETRNYQRYITKTLTNDTCRKCRSCPETIQHITGACKIIVQTDYKHRHDQVASIIHQRLARQRNFITDIEPYYKYKPENVLENTSTKLYFDRTILTDRTTHYNRPDITLVDKTDKTAYLIDIAVPNTHNLQSTITEKLTKYIELKDEIARLWNLQKVTIVPIVLSTTGVIPKQLHKSLNTLQLPPNLIYLLQKAVILNTCRIVRKFLQTDDEATTLHTFRSNPHSHTYNIMLETDHTNRHSFETPSTHTNS

SEQ ID NO: 7058 - protein, 1407 aa, Glaucopsyche alexis
MMRLRNRVIPQAGTGALRDGESRPGPSGSGCPSYSGEGNESHQAAQSRTAAECFHHLSPIPSSKSSLFSSPPSSPQSYLNIRKLRSSTSSNSSSSSSLRAGDVVQEATTAVDTAPALGTRRTRKTWTKEMNIFIMRQYFMITELENKTKAYLTQLHSLFSNKYPEMEASKQRVGDQRRAIINCNLLTKQELSHIKEEVKNILSSQLLSLTETHTNTQITQTRTRLNWTDDLNECIIKNYYRITHLETNRTSYRKPLHEAFIHTFPTFAHLSEQRISDQLRAILNNKYITKDRLNALKKEVAEELTITNIDEQNTNSVDITYSNNDNSEDVEIQNLEPDSEQLESSANTRLPDRDKNIDEIFKQTLLHFRDTDPTNRVYIPKQKTSKKLACTVYYLNKIILPEYINRDTDFHDFQTVIYCAAWTAAKINGTRLSLDVINNSYPAKNNKKPQWQMRLEKRIQDVRAKIGRITQFIKGGRSRKLVGHVNRIMELYKIHAVHEEPNTKITQILDTLKQKLSILTGRLRRYNACTLRKQQNSQFISNEKEFYRNIKLATANTLQNNDSTRTEIPDPSDLQSFWAGIWEQRVSHNFEAEWIETERTKYNKNLTEMTFETIPLNIFQQVIRNLHNWKSPGSDYIHNYWYKKFTSIHNNMYNYLNQFIENPSSIPPYITYGTTFMIPKDYSEATNPAKYRPITCLQTIYKILTSCITELIYKHVNDNNVLAEQQKGCRKFSQGCKEQLIIDSVILKHVTKTKSDLYSMYIDYKKAYDSVPHSWLLHVLEIYKIHPKIINLLKTTMTLWKTKLKLKTSYTLIETQPIQIQRGIFQGDALSPLWFCLALNPLSNILNSTEAGYRIQYNDRHRQTETINHLLYMDDIKLYADNEFDLYQLTKLTEQFTNDIKMNFGVDKTKINSIKAGRTYLHTYTMESGERIEPLDEGETYKYLGFNQSQQIHYKDTKYKLRQTFQHRLNAVMKSKLYSRNTIKAINTFAIPILTYSFGIINWNKTELINIQRKINTTMTKYRKHHPRSCIQRLTLPRKEGGRGIIDIINLHNKQIFNLRQYFFSKSESSTLHKAIVKNDNKFTPLNLQNIRNNQQKVTDDKAKLSEWARKTLHGRHLQDICQTNVDKEASNAWLSRGDLFPETEGFMIAIQDQTIETRNYQRYITKTLNTDSCRKCHSCPETIQHITGGCKTIVQTDYKHRHDQVASIIHQRLAKLRHFITDIEPYYKYKPQNVLDNASTKLYFDRTILTDRTTHYNRPDITLVDKINKTAYLIDIAVPNTHNLQSTIAEKLTKYIDLRDEIARLWHLQKVTIVPIVLSTTGVIPKQLHKSLNTLQLPPNLVYLLQKAVILNTCRIVRKFLQTDEEASTLHTRQTLPNSHTHTILQAEHTIHHPSLDTSPIIHTNS

SEQ ID NO: 7059 - protein, 1409 aa, Plebejus argus
MMRLRNRIIPQAGTGALRDGESRPGPSGSGCPSYSGGGNESQQAAQFETAAERFNFNHISPISSSKSLFSSPPSSPPSYLDIYQSRSSTSSNYSLSPPRTRDVVQKASVAENTAPTLSTRRTRKTWTKEMNTFIMRHYFIITELESKKKAYLAELHNLFTNKYPEMEASKQRIGDQRRAILNCKLLSKQELSDIQEEVKNILRNPQSNILTHTHTDTQNIQNQSRLNWTDELNEYILKSYYRITQLETNRTSYRKPLHEAFKNKFITLAHLSEQRISDQLRAIINNKYVTDERQNILKQEVADELISTTETLSTNLTQMPQTDNSSLDNLQRQDVVPGQESSNTTHLPDRNPDIDETFKHALQHFINTDPTNRVYIPKQKPSKNLFSTVNYLNKITLPDHVNDDTDFHYFQTAIYCAAWTAAKLNGTKLSLNNVSTNQYPSRNNKKPHWQLRLEKRIEELRVKIGRVTQFIKGGRSRKLVAHVNKIMELHRIHATHEEPNTQITQILDTLKQKLLILTGRLRRYNKCTLRKQQNSQFNNNEKEFYRKIKIDTTNIPQNESNAHNNIMVELPDLSDLQKFWSGIWEQPTEHRFDAEWIEAEKTKYSKDITDMPFETIPISIFQQVIRKLHNWKSPGSDFIHNYWYKKFTSIHNYLYNYLNQFIEYPNKIPPYITFGTTFMIPKDYNDPTNPEKYRPITCLQTIYKILTSCITELIYEHVTVNNILTEQQKGCRKFSRGCKEQLIIDSVILKHVAKTKSNLYSMYIDYKKAYDSVPHSWLLQILKIYKIHPKIITLLETTMTTWKTKLRLKTSTNLIETPPIQIRKGLFQGDALSPLWFCLALNPLSNTLNSIDAGYRLQDDNRHIQTETINHLLYMDDIKIYADNELDLYRLTELTEQFSNDIKMNFGVDKTKINSYKAGRSFQHTYTLESGENIEPLDEGQTYKYLGYNQAQQILQKDTKFKLKQRFQHRLNAIMKSNLYARNTIKAINTFAIPVLTYSFGIINWNKSELINLQRKINTTMTKFRKHHPRSCVQRLTLPRKEGGRGITDITNLHNRQILNLKQYFLTKSEHSSLHKVIVKNDNKFTPLNLNSSQNNQHKVTDNKTKLSEWSKKALHGRHLHDLHQTNNDKEASNAWLCQGNLFPETEGFMIAIQDQTIETRNYQRYITKTLTNDTCRKCRSCPETIQHITGACKIIVQTDYKHRHDQVASIIHQRLARQRNFITDIEPYYKYKPENVLENTSTKLYFDRTILTDRTTHYNRPDITLVDKTDKTAYLIDIAVPNTHNLQSTITEKLTKYIELKDEIARLWNLQKVTIVPIVLSTTGVIPKQLHKSLNTLQLPPNLIYLLQKAVILNTCRIVRKFLQTDDEATTLHTFRSNPHSHTSYNIMLETDHINRHSFETPSTHTNS

SEQ ID NO: 7060 - protein, 1405 aa, Celastrina argiolus
MMRLRNRVIPQAGTGALRDGESRPGPSGSGCPSYSGEGKKSHQAVQHGTAREHCYHLSPISSPISSLFSSAPSSPQSYLDIRQARSSTSSNSSSSTSTGNVVQEATAAEDTAPTLSTRRTRKTWSKQMNTFIMRHYFIITQLETKRKAYLTELYALFTNKYPEMQASKQRVGDQRRAIINCNLLSKQELSDIKEEVKSIISNPQSSNLTEIQTETQNITLTQTRLSWTDEQNEYILKSYYRITQMETNRTAYRKPLHEAFINNFPTLAHLSEQRISDQLRAIISNKYITDERLTTLKQEISDELTIINANRLNTNTLIEEANSCNVDNIQIQDLDPAIQQHNTENLYLPDRNASIDETFKLALQHFINTDPSDRVYIPKQKTSRNLACTVNYLNKITLPDYINEDTNFDYFQTVIYCAAWTAAKVNGTRLSLNITNNSYPPKSKKKPQWQIRLERRIEDIRVKIGRITQFIKGGRSRKLIGHVNKITELYKIHAIHEEPNTQITQILDTLKQKLSILTGRSRRYNACTLRKQQNSQFINNEKEFYRQIREATSNTSQNESTMHIDTPDPRNLQSFWAGIWEQPINHNFEAEWIQTEINKYSKDLKDMSFETIPINTFQQVIRKLHNWKSPGSDFIHNYWYKKFTSIHKNLYNYLNNFFEDPSKIPSYITFGTTFMIPKDYSQPTNPAKYRPITCLQTIYKILTSCITELIYEHVTKNKILSEQQKGCRKFSQGCKEQLIIDSVILKHVTKTKSDLYSMYIDYKKAYDSVPHSWLLHVLEIYKIHPKIINLLKATMTSWKTKLKLKTSTNLIETQPIQIQRGIFQGDALSPLWFCLALNPLSNILNSTEAGYCLQYNDQHRQTETINHLLYMDDIKLYADNEFDLYQLTELTEQFSNDIKMNFGIDKTKINSIKNGSTFQHTYTLQSGERIEPLDEGETYKYLGYNQSHQIQYKDTKYMLRQKFQHRLNAIMKSKLYSRNTIKAINTFAIPILTYSFGIIKWNKSELIGIQRKINTTMTKYRKHHPRSCIQRLTLPRKEGGRGIIDITNLHNRQILNLRQYFFARLEFSTLHKAIVENDSKFTPLNLKDSQNNEHKVTDDKSKLSEWAKKALHGRHLHDLCQTNVDKEASNAWLSRGDLFPETEGFMIAIQDQTIETRNYQRYITKTLPIDSCRKCHSCSETIQHITGACKTIVQTDYKHRHDQVASIIHQRLAKQRDFIIEIEPYYKYKPQNVLDNTATKLYFDRTILTDRTTHYNRPDITLVDKLNKTAYLIDIAIPNTHNLQSTISEKLTKYIELKEEIARLWHLQKVTIVPIVLSTTGVIPKQLHKSLNTLQLPPNLVYLMQKAVILNTCRIVRKFLQTDEEVSTHRQQNQSNSHIHILLQDEHPIIHHPSSITSSIIHSNR

SEQ ID NO: 7061 - protein, 1394 aa, Aricia agestis
MMRLRNRVIPQAGTGAVCDGESRPGPSGSSCPSYSGGGNESHQAAQSQAAAERMYHINSPISSAPSSLFSSPPSSPPSYLDIRQTRSSTSSNSLSSPPRARDVVQEATIAKNTAPALGTRRTCKAWTKEMNTFIMRHYYIITELENKTKAYLPQLHSLFSTKYPDMEASKQRVGDQRRAIINCNLLTKQELADIKEEVKNILRFPQNIEIHTNTEITKTQARLTWTDELNEYIIKSYYRVTHLETNKTAYRKPVHEAFIHKFPILAHLSVQRISDQLRVIINNKYITEERVNILKQEVAEELIVDVIDRPNTNEHDVPYDINNFQDIDIQNIEPDRQQEPYADVLLPDRDTDIDEIFKQSLQHFADTDPTSRVYIPKQKSSKKLAYTVNYINKIILPENINKDTDFHHFQTVLYCAAWTAAKVNGSRLSASINHSNYAKNIKKPQWQRRLEKRIEDIRAKIGRITQFIKGGRSRKLIRHVNKIIEVYKIHTIHEEPNTQIAQILDTLKQKLSILTGRLKRYNICTLRKQQNKQFNNSEKEFYRSIRLATQNKDNILTETPDPKDLQSFWAGIWEQPVSHNIEAEWIEDETKRYHGNLTEMTFQTIPISIFQQVIRNLHNWKAPGSDCIHNYWYKKFTSIHNNMLIYLNQFIEDPSSIPPYVTSGTTFMIPKDYSDPLNPAKYRPITCLQTIYKILTSCVTELIYKHFTDNNILAEQQKGCRKFSQGCKEQLIIDSVILKHVNKTKSNLHSMYIDYKKAYDSVPHSWLLHVLKIYKIHPKIINLLKTMMTSWKTKLKLKTSTTLIETDPIQILRGIFQGDALSPLWFCLALNPLSNILNSTDAGYRIHYNDRQIQTQTINHLLYMDDIKLYAATESELYKLTELTEQFTIDIKMNFGVDKTKINSIKAGNTYLHSYTLGTGERIEPLDEGDTYKYLGVNQSQQINYKDTKYKLRQTFQHRLNAIMKSKLYSRNTVKVINTFAIPILTYSFGVINWNKTDLINIQRNINTTMTKYRKHHPRSCIQRITLPRKEGGRGIIDITNLHNKQVINLRHYFTTKSESSTLHKAIAQNDNKFTPLDLKNTQNNQLKVTDDKTKLSEWARKSLHGRHLHDLCQTNVDKEASNVWLSRGDLFPETEGFMIAIQDQTIETRNYQKYITKTLTTDSCRKCHSCSETIQHITGACKTIVQTDYKHRHDQVASIIHQRLAKQRNFINEIEPYYKYKPENVLDNASTKLYFDRTILTDRTTHYNRPDITLVDKINKTAFLIDIAVPNTHNLQTTIAEKLTKYIDLKDEITRLWNLQKVTIVPIVLSTTGIIPKQLHKSLDTLQLPPNLTYLMQKAVILNTCRIVRKFLQTDEERTTLHTPQTHPNSHVHTSHTLQTDHAPAAHFTRTNT

SEQ ID NO: 7062 - protein, 1391 aa, Cyaniris semiargus
MSYMMRLRNRIIPQAGTGAVCDGESRPGPSGSGCPSYSGGGNESHQAAQSQTAAERMYHISPISSAPSSLFSSSPSSPPSYLDIRQTRSSTSSNSLSSPPRARDVVQEATIAKNTAPALGTRRTRKTWTKEMNIFIMRHYYIKTEIENKTKAYLSQLHSLFSTKYPDMDASKQRVGDQRRAIINCNLLTNQELTDIKEEVKNILRSPQNIETHTNTQITKTPARLTWTDELNEYIIKSYYRVTHLETNKTAYRKKVHEAFIHKFPSLAHLSEQRISDQLRVIINNKYITEERLNTLKQEVADEFILNDNNTPNTNEHDVPYTNNFQDMEMHNIESPRQQEPYTNVLLPNRDTDIDEIFKQSLQHFTDTDPTSRVYIPKQKSSKKLAYTVNYINKIILPENVNRDTDFHQFQTVIYCAAWTAAKVNGSRLSVSTTNNSNYAKNIKKPHWQRRLEKRIKDIRAKVGRITQFIKGGRSRKLIGHVNKIMEAYKTHTVHEEPNTQITQILDTLKQKLSILTGRLRRYNVCTLRKQQNKQFNNNEKEFYRSIRLATKNEDNILTEAPDPKDLQSFWAGIWEQPVSHNLEAKWIEDETKKYHDTLTEMTFQAIPINIFQQVIRNLHNWKAPGSDCIHNYWYKKFTSIHSNMLIYLNQFIEDPSSIPPYVTSGTTFMILKDHSEPTNPAKYRPITCLQTIYKILTCCITELIYKHVNDSNVLAEQQKGCRKFSQGCKEQLIIDSVILKHVNKTKSDLYSMYIDYKKAYDSVPHSWLLHVLEIYKIHPKIINLLKTMMRSWNTKLKLKTPTTLIETDPIKILRGIFQGDALSPLWFCLALNPLSNILNSTDAGYRMNYNDRQRHTETINHLLYMDDIKIYADTESELYKLTELTEQFTNDIKMNFGVDKTKINSIKAGHTYLHTYTLGSGERIEPLDEGETYKYLGFNQSQQINYKDTKCKLRQTFQHRLNAIMKSKLYSRNTIKAINTFAIPILTYSFGVINWNKTDLINIQRKINTTMTKYRKHHPRSCIQRLTLPRKEGGRGITDITNLHNKQVINLRHYFLNKSETSTLHKTIVKNDNKFTPLDLKNTQSNQLKLTDDKTKLSEWARKSLHGRHLHDLCQTNVDKEASNAWLSRGDLFPETEGFMIAIQDQTIETRNYQRYITKTLTTDSCRKCHSCPETIQHITGACKTIVQTDYKHRHDQVANIIHQRLAKQQNFITEIDPYYKYKPENVLDNASTKLYFDRTILTDRTTHYNRPDITLVDKINKTAFLIDIAVPNTHNLQTTIAEKLTKYIDLKDEIARLWNLQKVTIVPIVLSTTGVIPKQLHKSLDTLQLPLNLTYLMQKAVILNTCRIVRKFLQTEEEHTRLHTPQTQPNSHIHTSHTLQDDHTLHYIT

SEQ ID NO: 7063 - protein, 1278 aa, Glaucopsyche alexis
MNIFIMRQYFMITELENKTKAYLTQLHSLFSNKYPEMEASKQRVGDQRRAIINCNLLTKQELSHIKEEVKNILSSQLLSLTETHTNTQITQTRTRLNWTDDRNECIIKNYYRITHLETNRTSYRKPLHEAFIHTFPTFAHLSEQRISDQLRAILNNKYITKDRLNALKKEVAEELTITNIDEQNTNSVDITYSNNDNSEDVEIQNLEPDSEQLESSANTRLPDRDKNIDEIFKQTLLHFRDTDPTNRVYIPKQKTSKKLACTVYYLNKIILPECINRDTDFHDFQTVIYCAAWTAAKINGTRLSLDVINNSYPAKNNKKPQWQMRLEKRIQDVRAKIGRITQFIKGGRSRKLVGHVNRIMELYKIHAIHEEPNTKITQILDTLKQKLSILTGRLRRYNACTLRKQQNSQFISNEKEFYRNIKLATANTLQNNDSTRTEIPDPSDLQSFWAGIWEQRVSHNFEAEWIETERTKYNKNLTEMTFETIPLNIFQQVIRNLHNWKSPGSDYIHNYWYKKFTSIHNNMYNYLNQFIEDPSSIPPYITYGTTFMIPKDYSEPTNPAKYRPITSLQTIYKILTSCITELIYKHVNDNNVLAEQQKGCRKFSQGCKEQLIIDSVILKHVTKTKSDLYSMYIDYKKAYDSVPHSWLLHVLEIYKIHPKIINLLKTTMTLWKTKLKLKTSNTLIETQPIQIQRGIFQGDALSPLWFCLALNPLSNILNSTEAGYRIQYNDRHRQTETINHLLYMDDIKLYADNEFDLYQLTKLTEQFTNDIKMNFGVDKTKINSIKAGRTYLHTYTMESGERIEPLDEGETYKYLGFNQSQQIHYKDTKYKLRQTFQHRLNAVMKSKLYSRNTIKAINTFAIPILTYSFGIINWNKTELINIQRKINTTMTKYRKHHPRSCIQRLTLPRKEGGRGIIDIINLHNKQILNLRQYFFSKSESSTLHKAIVKNDNKFTPLNLQNIRNNQQKVTDDKAKLSEWARKTLHGRHLQDLCQTNVDKEASNAWLSRGDLFPETEGFMIAIQDQTIETRNYQRYITKTLTTDSCRKCHSCPETIQHITGGCKTIVQTDYKHRHDQVASIIHQRLAKLRHFITDIEPYYKYKPQNVLDNASTKLYFDRTILTDRTTHYNRPDITLVDKINKTAYLIDIAVPNTHNLQSTIAEKLTKYIDLRDEIARLWHLQKVTIVPIVLSTTGVIPKQLHKSLNTLQLPPNLVYLLQKADILNTCRIVRKFLQTDEEASTLHTRQTLPNSHTHTILQAEHTIHHPSLDTSPIIHTNS

SEQ ID NO: 7064 - protein, 1402 aa, Aricia agestis
MMRLRNRVIPQAGTGAVCDGESRPGPSGSGCPSYSGGGNESHQAAQSQTAAERMYHNINSPISSAPSSLFASPPSSPPSYLTIYHTRSSTSSNSSLSPPRTRDVVQEASTAENTAPALSTRCTRKTWTKDMNTFIMRHYFIITELESKKKAYLTQLHTLFTNKYPEMQASRQRVGDQRRAIINCNFLSKQELSHIKEEVKNILRNPRSDTLTEIHTDTHNISSTQSRLTWTDDLNEFILISYFRLTQLETNRTSYRKPLHEAFINKFTALAHLSEQRISDQLRAIINNKYVSDERINELKQEVADELNINSTERFSTRPIEISQANNYNFESTQRQDLNDDFEHDTTTDVLLPDSNTKIDETFKLALQHFLGTDPTRRVYIPKQKTSRNFASTVNYLNKITLPHYINNDTDFNYFQTVIYCAAWTAAKLNGSRLSLGTTNNPQPSDNNKKPRWQIRLEKRKDDLRVKIGRITQFISGARSRKLTEHVNKIIEQYKIHAIHEEPNTQITQILDTLKQKLSILTGRLRRYNTCTLRKQQNSQFCNNEKEFYRNIRTATANTLQSDSGTQVELPDPSDLQRFWAEIWEQPINHNFGAEWIKAEKSKCNTVVNNMTFEVIPISIFQKVIRKLHNWKSPGSDFIHNFWYKKFTSIHNILYSFLNHFIEDPSKIPTYITFGVTFMIPKDYSESENPAKYRPITCLQTIYKILTSCISELIYEHVDKNNILAEQQKGCRKFSQGCKEQLVIDSVILKNVTKTKSDLYSMYIDYKKAFDSVPHTWLLQVLEIYKIHPKIIYLLKTIMTSWKTKLKLKTPTKFVETDPIQILRGIFQGDALSPLWFCLSLNPLSNILNSTDAGYRLHYNDIHRKTETINHLMYMDDIKIYADNEVDLYRLTELTEQFTNDIKMNFGIDKTKINSIKSGRPFQHIFILQSGEYIEPLDEGETYKYLGFNQSHQIEHKNTKNNLRQKFQHRLNAILKSNLYARNTIKAINTFAIPILTYSFGIVNWNKSELINIQRKVNTTMTKFRKHHPRSCVQRLTLPRKDGGRGLIDVTNLYNRQILNLRQYFFCKAELSTLHKAIVKTDNKFTPLNLKYSQNDRHKVVDDKTKLAEWAKKSLHGRHLHDLCQTNVDKEASNAWLSRGDLFPETEGFMIAIQDQTIETRNYQRHITKTRTTDSCRKCQSCPETIQHITGACKTIVQTDYKHRHDQVAGIIHQRLAKKRHFITDIEPYYKYKPENVLDNASTKLYFDRTILTDRTTHYNRPDITLVDKINKTAYLIDIAVPNTHNLQSTIAEKLTKYIELKDEIARLWNLQKVTIVPIVLSTTAVIPKQLHNSLNTLQLPLNLVYLLQKAVILNTCRIVRKFLQTDDEATTLHTSQSNLYTHTSYNMLETDHTNPQHHTNS

SEQ ID NO: 7065 - protein, 1405 aa, Celastrina argiolus
MMRLRNRVIPQAGTGALRDGESRPGPSGSGCPSYSGEGKKSHQAVQHGTAREHCYHLSPISSPISSLFSSAPSSPQSYLDIRQARSSTSSNSSSSTSTGNVVQEATAAEDTAPTLSTRRTRKTWSKQMNTFIMRHYFIITQLETKRKAYLTELYALFTNKYPEMQASKQRVGDQRRAIINCNLLSKQELSDIKEEVKSIISNPQSSNLTEIQTETQNITLTQTRLSWTDEQNEYILKSYYRITQMETNRTAYRKPLHEAFINNFPTLAHLSEQRISDQLRAIINNKYITDERLTTLKQEISDELTIINANRLNTNTLIEEANSCNVDNIQIQDLDPAIQQHNTENLYLPDRNASIDETFKLALQHFINTDPSDRVYIPKQKTSRNLACTVNYLNKITLPDYINEDTNFDYFQTVIYCAAWTAAKVNGTRLSLNITNNSYPPKSNKKPQWEIRLERRIEDIRVKIGRITQFIKGGRSRKLIGHVNKITELYKIHAIHEEPNTQITQILDTLKQKLSILTGRSRRYNACTLRKQQNSQFINNEKEFYRQIREATSNTSQNESTMHIDTPDPRNLQSFWAGIWEQPINHNFEAESIQTEINKYSKDLKDMSFETIPINTFQQVIRKLHNWKSPGSDFIHNYWYKKFTSIHKNLYNYLNNFFEDPSKIPSYITFGTTFMIPKDYSQPTNPAKYRPITCLQTIYKILTSCITELIYEHVTKNKILSEQQKGCRKFSQGCKEQLIIDSVILKHVTKTKSDLYSMYIDYKKAYDSVPHSWLLHVLEIYKIHPKIINLLKATMTSWKTKLKLKTSTNLIETQPIQIQRGIFQGDALSPLWFCLALNPLSNILNSTEAGYCLQDNDQHRQTETINHLLYMDDIKLYADNEFDLYQLTELTEQFSNDIKMNFGIDKTKINSIKNGSTFQHTYTLQSGERIEPLDEGETYKYLGYNQSHQIQYKDTKYMLRQKFQHRLNAIMKSKLYSRNTIKAINTFAIPILTYSFGIIKWNKSELIGIQRKINTTMTKYRKHHPRSCIQRLTLPRKEGGRGIIDITNLHNRQILNLRQYFFARLEFSTLHKAIVENDSKFTPLNLKDSQNNEHKVTDDKSKLSEWAKKALHGRHLHDLCQTNVDKEASNAWLSRGDLFPETEGFMIAIQDQTIETRNYQRYITKTLPIDSCRKCHSCSETIQHITGACKTIVQTDYKHRHDQVASIIHQRLAKQRDFIIEIEPYYKYKPQNVLDNTATKLYFDRTILTDRTTHYNRPDITLVDKLNKTAYLIDIAIPNTHNLQSTISEKLTKYIELKEEIARLWHLQKVTIVPIVLSTTGVIPKQLHKSLNTLQLPPNLVYLMQKAVILNTCRIVRKFLQTDEEVSTHRQQTQSNSHIHILLQDEHPIIHHPSSITSSIIHSNR

SEQ ID NO: 7066 - protein, 790 aa, Cyaniris semiargus
MTFQAIPIKIFQQVIRNLHNWKAPGSNCIHNYWYKKFTSIHSNMLIYLNQFIEDPSSIPPYVTSGTTFMILKDHSEPTNPAKYRPITCLQTIYKILTCCITDLIYKHVNDSNVLAEQQKGCRKFSQGCKEQLIIDSVILKHVNKTKSDLYSMYIDYKKAYDSVPHSWLLHVLEIYKIHPKIINLLKTMMKSWNTKLKLKTPTTLIETDPIKILRGIFQGDALSPLWFCLALNPLSNILNSTDAGYRMNYNDRQRHTETINHLLYMDDIKMYADTESELYKLTELTEQFTNDIKMNFGVDKTKINSIKAGHTYLHTYTLGSGERIEPLDEGETYKYLGFNQSQQINYKDTKCKLRQTFQHRLNAIMKSKLYSRNTIKAINTFAIPILTYSFGVINWNKTDLINIQRKINTTMTKYRKHHPRSCIQRLTLPRKEGGRGITDITNLHNKQVINLRHYFLNKSETSTLHKTIVQNDNKFTPLDLKNTQSNQLKLTDDKTKLSEWARKSLHGRHLHDLCQTNVDKEASNAWLSRGDLFPETEGFMIAIQDQTIETRNYQRYITKTLTTDSCRKCHSCPETIQHITGACKTIVQTDYKHRHDQVANIIHQRLAKQQNFITEIDPYYKYKPENVLDNASTKLYFDRTILTDRTTHYNRPDITLVNKINKTAFLIDIDVPNTHNLQTTIAEKLTKYIDLKDEIARLWNLQKVTIVPIVLSTTGVIPKQLHKSLDTLQLPLNLTYLMQKAVILNTCRIVRKFLQTEEEHTRLHTPQTQPNSHIHTSHTLQDDHTLHYIT

SEQ ID NO: 7067 - protein, 1403 aa, Plebejus argus
MMRLRNRVIPQAGTGAICDGESRPGPSGSGCPSYSGGGNESHQAAQYRTAAAERTYHTSPISSAPSSLFASPPSSPPSYLAVYRTRSSTSSNSSLSPPRTGDVVQEASTAENTAPALGTRRTRKTWTKDMNTFIMRHYFIITELESKKKAYLSQLHSIFTNKYPEMQASKQRVGDQRRAIINCNLLSKQEISHIQEEVKNILHNPQSNTLLETHTDPHVTLTQSRLTWTDDLNEYILISYYRITQLETNRTSYRKPLHEAFINKFPALAHLTEQRISDQLRAIINNKYLTDERINTLKQEVAHELIIDSTESSVAQTNSYNFENIQRQDIGPDLELETTTDAHLPDRNTYIDETFKLALQHFKNTDPTCRVYIPKQKSSRTLASTVNYLNKITLPNHVNNDTDFNDFQTVIYCAAWTAAKVNGTRLSLSTTNNLHPSDNNNNNNNKKPRWQIRLEKRIEDLRVKIGRTTQFLKGNRSRKLIEHVNKIIEQYKIHAIHEEPNTEITEILDTLKQKLSILTGRLRRYNTCTLRKQQNNQFCNNEKEFYRNIRTATANTLQSDSGTQIELPDPSDLQRFWAEIWEQPTNHNFEAEWIKAEKSKSNTVVNDMSFEVIPISIFQQVIRKLHNWKSPGSDFIHNYWYKKFTSIHNILYNFLNHFIEDPSKIPPYITFGVTFMIPKDHSEPVNPAKYRPITCLQTIYKILTSCISEIIYEHVDKNNILAEQQKGCRKFSQGCKEQLVIDSVILKNVTKTKSDLYSMYIDYKKAFDSVPHTWLLQVLEIYKIHPKIIYLLKTIMTSWKTKLKLKTPRKFVETDPIQILRGIFQGDALSPLWFCLSLNPLSNILNSTDAGYRLHYNDRHRKTETINHLMYMDDIKIYADNEFDLYRLTELTEQFTNDIKMNFGIDKTKINSIKAGRSFQHIYKLQSGEYIEPLDEGETYKYLGFNQSHQIEHKNTKHNLRQKFQHRLNAILKSNLYARNTIKAINTFAIPILTYSFGIIKWNKSELINIQRKINTTMTKYRKHHPRSCVQRLTLPRKDGGRGLIDVTNLYNRQILNLRQYFFCKAELSTLHKAIVKTDNKFTPLNLKDSQNDRHTVVDDKTKLAEWAKKSLHGRHLHDLCQTNVDKEVSNAWLSRGDLFPETEGFMIAIQDQTIETRNYQRHITKTRTTDRCRKCQSCPETIQHITGACKTIVQTDYKHRHDQVAGIIHQRLAKQRYFITDIEPYYKYKPENVLDNASTKLYFDRTILTDRTTHYNRPDITLVDKINKAAYLIDIAVPNTHNLQSTIAEKLTKYIELKDEIARLWNLQKVTIVPIVLSTTGVIPKQLRNSLNILQLPPNLVYLLQKAVILNTCRIVRKFLQTDDEATIHTSQSNPHTHTSYMLETDHTNPHCFDTSSTHANS

SEQ ID NO: 7068 - protein, 945 aa, Cyaniris semiargus
MQYIKGGRSRKLLTHVDKIKEVYKINSIHEEPNTQIAQILDTLKQKLSILAGRLKRYNACTQRKQQNTQFNNNEKEFYRHIRTATTNTPQYTDNNTHTEIPDASDFQRFWAGIWEQPINHNFEAEWIETERKKYDKDLPEMTFAKIPFNIFQQVIRKLHNWKSPGSDYIHNYWYKKLTNIHSSLYNYLNKFIEDPNLIPPYITSGTTFMIPKDYSELKNPAKYRPITCLQTIYKILSSCMAELIYKHVNDNNILAEQQKGCRKFSQGCKEQLIIDSVILKHATKTKSDLYSIYIDYKKAYDSVPHSWLLHVLEIYKIHPKIIHLLKTTMTLWKTKLKLKTHTTSIETQPIEIQRGIFQGDALSPIWFCLAMNPLSNILNAIEAGYRIHYNDTYRHTETINHLLYMDDLKIYTDNEFDLYKLTELTEQFSNDIKMDFGVDKTKINSIKAGKIYLHSYTLQSGERIEPLDEGQTYKYLGYHQSQQILYKDTKCKLKQNFQHRLNTIMKSKLYSRNTIKAINTFAIPILTYSFGIINWNKTELIGIQRRINTTMTKHRKHHPRSCIQRMTLPRKDGGRGIIDIMNLHNRQILNLKQYFLARSELSTLHKAIVKNDNNFTPLNLQDIHSNKHKITDDKTKLSEWAKKALHGRHLHDLCQTNVDKEASNAWLSRGDLFPETEGFMIAIQDQTIETRNYQRYITKTLTTDSCRKCHSCPETIQHITGACRTIVQTDYKHRHDQVASIIHQRLAQQRHFITDLEPYYKYKPQNILDNAATKLYFDRTILTDRTTHYNRPDITLVDKINKTAYLIDIAIPNTHNLQTTIAEKLTKYIELKDEIARLWNLQKVTIVPIVISTTGVIPTQLFTSLDTLQLPHSLHYLMQKAVILNTCRIVRKFLQTDGELTVHDTRQTQTNSYIHTSHNILSQPRHTIHHPSPDTSSIHTHNSNI

SEQ ID NO: 7069 - protein, 1589 aa, Trachurus trachurus
MMQLSSSCDIEKLENFSSSLGQIVYHYYLLYLQLKGKGRKFPLVIKAVANFVRKFVSFYQSSLENFDFIMATPNGVEILKVVFSTYFPERIPDTCSASSIDVSSSINSLKADGKLTLRTLWLVISRSTKKCPKILLERRDRYKLALEEFKKCLVDELITLHSHNCHSVDAPQPTMVPPLTSKSIANNVDTSFPALLIPPGGVITITEAVSIHPDEYLPQSVNLSSNSPILNMNPIISSPIELNLKNSPTKIDNNEIIKELDLAEMQLNINLVEIAMKMAKDSHESNVPSIEKLPLPIPYQPSNIPQILHESIHNSTNNSTPHSKSTYYNESPKQIQMDRQTSPQSKSEQIDILNEATLQPLDSSEPFPISAFPPYSQEYEYVELDLADFLAKVSDHRMDETQHIVNVSNQTVTTISSNSSSNSLDIIEVDPTNENITNLDQAFLDLLDDDVVFIDPPTNTNSNSFQKEDQDQSVSSISIEEMDATAYYSCLDETKFNVSIIPKLKPISNYETTKIKTTSTKTPSITSQDVADFISKLKPVKTLNSKPKSKSKPNSNKNPIIIKAKPLSPLNIKPKPIIKQIPKSTSKTPPLIIKAKPLITTKTSKINTRPKTPPTTTIKGYSETLSPKISNSQVPGPSRLHFKNTQSPVSSQSKNQNKDDVISKHHSNSNPISNIQTQDETISTYAEKQKMRKQERKSLFEKASNELIQLLNQNNTNISTDDLYKQFVAKAKAHAQTLNLYYVPSFKSNSKSNSNSTTNVKPINNPKELDKNGIKRLRAMYRTNPKRCFREVTEVTPKWCTSTAQQIFDTLNKSPPQRPPTSTLVSNSQQPQCPNLQTSTNSTQQSQPNPYHRAEGDNPLFCVDTEEVAVAINRAKSDTSAGTDGISIKFWKYLPLGDHILASIFNKILQTSEVPSEWLESRLVLIPKSTNPNQKDPNEFRPISITQTIYRLFMATLNIKIRPFVELSPSQKGFTSRDGCSEHTFVLQEILDTTRRSSKNMCVVWLDLRKAFDTVPHYAIYDNLDRFSFPPNLQQIIRSLYDGSYNVVNDSYGDSKQLPLNQQGVRQGCPLSPLLFNMVIDDLLDKLNNSSIGYTLHNQQISVQAFADDLVLFSHSQSDMQKLLSICEDHLSALQMKVNIAKCSKLTVTYNRNKKRFINDETLDVAAPLILNSEPIPPMTDHYQYLGCTSDLNSFKNLPSTFTEFNNKLEKLAVSPLLPFMKTELLKTYLYPTLDFSLKNHSLRVEQLKKVDSKILGSVRTWIDIHHTSSTHFFHTPVPLGGLGLRNVREDYAALRLSAGLNVLHSPDDKVRNIANQSLSKIVDSRTKFTKTVVEYVNLKKETQIIHDVRSLLSSIRLHRNALGVNLIQLNNTNHPEINSNSNSYIDLDPASLKSPHYPNPQQQHHQLSKQPTRIRLLRKHLKQSHLESWKNQPEQGKLVDCFSWFPPSNKWLQSCNMRITTHRFAIRARLNILPTKPHLLRMKRATDVICRHCPCGVETLGHVLGGCKRGEALRTLRHNHVVQLISDQINQRFLNKTNKKQWKLSLDKTMPLTNSTRRPDIVLWNEKKKLVHVVDVAVSYENGMDRLD

SEQ ID NO: 7070 - protein, 1193 aa, Lethenteron reissneri
MKLLFVSVSTQTENEDVYRTSESAEPKLTRNKIPSITFVNSALNKEEEVNCDYYEQISSLFETEEMSDDENTHESILDTSVEEPVLERYPPERDSVTVILPNLKTVCEICQEHLGKVSEMVKHFIIKHRDISLVFKCSKCDKTNSNFRSISCHVPKCGGRKLPNESLTWGCDCCQLRFGSATGLSQHKRHAHPAARNKERISALTKNTSLRGAHLSCWSLEEETQLAQLEVQFQGKKNINMLIATKLGTKTNKQISDKRRCLAKKKVALKQQTLNTVSGYLETVSPPPDITSGARAKLVLATELLMLKPSKKREGPAIEVMKTWLQGEGQQDAQVDNATKSMLRIMRVVRTRGGRSKTAEDVIKPRTMPARTWMKRRAEKRGNFMKHQKLFFRNRSRLASLVLDGKDRQECQIPIKEVHDFYRNKWEEVIPFNGLGQFTSLTVANNDHFEALITVEEVVAGIRAIKPSSAPGPDGVTKAAIIVADPEGKTLAALFNAWLVTGIIPKDLKKNKSVLIPKVTSEDLLKDLGNWRPITISSIVLRLFSRILTARLERACALNPRQRGFIAAPGCSENLKVLQDIMNQAKKARKSLAVVFIDVAKAFDSVSHAHIMWVLRQKRVDEHMVNIIQNAYDHCTTSFKNKDATSPEINIRVGVKQGDPMSPLLFSLAMDPLLCALEKHGVGYTVEAECVTSLAFADDLVLMSESWEGMNTNIAILESFCKLSGLKVQANKCQGFMLNPTKDSYTVNNCDPWAIAEVKVQMVGPEDSAKYLGMRISPWTGIVQPDLNVQLKKWISNIDEAPLKPTQKVEILNAYALPRLLYPGDHADCRPTTLRILDQAIRNAVKGWLHLPPSTCNGLLYARACDGGLAIMKLESMIPSAQLRRLQRIANSSDAMIRNIVSSQGVDEKFRNLWVRAGGDCQVIPSVFSTDLASKEPVYSKPCNWRQLEFKRWCEKPVQGVGVENFAHDKVSNTWLGTRGGLKQRHYIAALQVRSNLYPTRESLNRGREGALRSCRKCSSRLESLSHILGQCPAVQKARIARHNKIGDILANEATRLGWWVHKEPRLRSEDGELRKPDLVFVKGEKALVVDVTVRFEVSCKTLSQAAADKVTYYSPLRDQISELTKTNNVTFFGFPVGARGKWHLENNELLTSLGLTDTQISTLAKMISRRTLLFSLDILRMFCGNSAVYDRS

SEQ ID NO: 7071 - protein, 1147 aa, Lethenteron reissneri
MDEKTKFSSQLARGLAKQRAMDGTRVGDPSITVRPSILDLSGTESSWRHRPMKLLFVSVSTQTEDEDVYRTSESAEPKLTRTRITSITFFNSALNKEEVNCDYYEQISSLFETEEMSDDDNTHESILDMSVEEPVLERYPVDTKKESVTVILPNLKTVCEICQEHLGKVSELVKHFITKHRDIPLVFKCSKCDKTNSNFRSISCHVPKCGGRKLTDESLTWGCECCQLRFGSSTGLSQHKRHAHPSARNEERIKAFTKDTSRRGAHLSCWSLEEETQLAQLEVQFQGKKNINMLIATKLVTKTNKQISDKRRCLTKKKIAPKLQTLNTVSGFLETVSPPPGITSGARAKLVLATELLMLKSSKKREGPAVEVMKAWLQGEGQQDVQVDNATKSMLRLMRVVKTRGGCSKTKEDVIKPRTMPARTWMKKRAEKRGKYMKHQKLFFRNRSQLASLVLDGKDRQECLIPIKEVYDFYRSKWEEVLPFNGLGQFTSPTVANNDHFESLISVEEVVAGICAIKPSSAPGPDGVTMAAIIVADPEGKTLAALFNAWLVTGIIPKDLKRNKSVLIPKVMSEDLLKDLGNWRPITISSIVLRLFSRILTARLERACSLNPRQRGFIAAPGCSENLKELQDIMNQAKKDHKSLAVVFIDVAKAFDSVSHAHIMWVLRQKKVDEHMINIIQNAYDQCTTSFKSKDTSSPEINIRVGVKQGDPMSPLLFNLAMDPLLCALEAHGVGYTIEAECETSLAFADDLVLMSDSWEGMTTNIAILESFCKLSGLKIQASKCQGFMLNPTKDSYTVNNCDPWAIAEVRVQMVGPEESAKYLGMKISPWTGIVQPDLNVQLKKWISNIDGAPLKPTQKVELLNAYAVPRLLYPGDHADCRPTTLRILDQAIRSAVKGWLHLPPSTCNGLLYARACDGGLAIMKLESMIPSTQLRRLQRIANSSDVMIRNIVSSQGVDEKFRNLWIRAGGDCQVIPSVLSTDLALKEPVYPKPCNWRQLEFKRWCEKPVQSVGVENFAHDKVSNTWLGTRGGLKQRYYIAALQVRSNLYPTRENLNRGREGTLHSCRKCSSRLEPLSHILGQCPAVQKARIARHNKIGDILANEATRLGWWVYKEPRLRSEDGELRKPDRVREGGRSISCRCHHPV

SEQ ID NO: 7072 - protein, 1147 aa, Lethenteron camtschaticum
MDEKTKFSSQLARGLAKQRAMDGTRVGDPSITVRPSILDLSGTESSWRHRPMKLLFVSVSTQTEDEDVYRTSESAEPKLTRTRITSITFFNSALNKEEVNCDYYEQISSLFETEEMSDDDNTHESILDMSVEEPVLERYPVDTKKESVTVILPNLKTVCEICQEHLGKVSELVKHFITKHRDIPLVFKCSKCDKTNSNFRSISCHVPKCGGRKLTDESLTWGCECCQLRFGSSTGLSQHKRHAHPSARNEERIKAFTKDTSRRGAHLSCWSLEEETQLAQLEVQFQGKKNINMLIATKLVTKTNKQISDKRRCLTKKKIAPKLQTLNTVSGFLETVSPPPGITSGARAKLVLATELLMLKSSKKREGPAVEVMKAWLQGEGQQDVQVDNATKSMLRLMRVVKTRGGCSKTKEDVIKPRTMPAMTWMKKRAEKRGKYMKHQKLFFRNRSQLASLVLDGKDRQECLIPIKEVYDFYRSKWEEVLPFNGLGQFTSPTVANNDHFESLISVEEVVAGICAIKPSSAPGPDGVTMAAIIVADPEGKTLAALFNAWLVTGIIPKDLKRNKSVLIPKVMSEDLLKDLGNWRPITISSIVLRLFSRILTARLERACSLNPRQRGFIAAPGCSENLKELQDIMNQAKKDHKSLAVVFIDVAKAFDSVSHAHIMWVLRQKKVDEHMINIIQNAYDQCTTSFKSKDTSSPEINIRVGVKQGDPMSPLLFNLAMDPLLCALEAHGVGYTIEAECETSLAFADDLVLMSDSWEGMTTNIAILESFCKLSGLKIQASKCQGFMLNPTKDSYTVNNCDPWAIAEVRVQMVGPEESAKYLGMKISPWTGIVQPDLNVQLKKWISNIDGAPLKPTQKVELLNAYAVPRLLYPGDHADCRPTTLRILDQAIRSAVKGWLHLPPSTCNGLLYARACDGGLAIMKLESMIPSTQLRRLQRIANSSDVMIRNIVSSQGVDEKFRNLWIRAGGDCQVIPSVLSTDLALKEPVYPKPCNWRQLEFKRWCEKPVQSVGVENFAHDKVSNTWLGTRGGLKQRYYIAALQVRSNLYPTRENLNRGREGTLHSCRKCSSRLETLSHILGQCPAVQKARIARHNKIGDILANEATRLGWWVYKEPRLRSEDGELRKPDRVREGGRSISCRCHHPV

SEQ ID NO: 7073 - protein, 1244 aa, Callorhinchus milii
MDEKIKFSSQLARGLAKQRAMDGARVGDPSITVRPSTLDLSGTESSWRHRPMKLLFVSVSTQTENEDVYRTSESAEPKLTRNKIPSITFVNSALNKEEEVNCEYYEQISSLFETEEMSDDENTHESILDTSVEEPVLERYPPERDSVTVILPNLKTVCEICQEHLGKVSEMVKHFIIKHRDISLVFKCSKCDKTNSNFRSISCHVPKCGGRKLPNESLTWGCDCCQLRFGSATGLSQHKRHAHPAARNKERISALTKNTSLRGAHLSCWSLEEETQLAQLEVQFQGKKNINMLIATKLGTKTNKQISDKRRCLAKKKVALKQQTLNTVSGYLETVSPPPDITSGARAKLVLATELLMLKPSKKREGPAIEVMKTWLQGEGQQDVQVDNATKSMLRIMRVVRTRGGRSKTAEDVIKPRTMPARTWMKRRAEKRGNFMKHQKLFFRNRSRLASLVLDGKDRQECQIPIKEVHDFYRNKWEEVIPFNGLGQFTSLTVANNDHFEALITVEEVVAGIRAIKPSSAPGPDGVTKAAIIVADPEGKTLAALFNAWLVTGIIPKDLKKNKSVLIPKVTSEDLLKDLGNWRPITISSIVLRLFSRILTARLERACALNPRQRGFIAAPGCSENLKVLQDIMNQAKKARKSLAVVFIDVAKAFDSVSHAHIMWVLRQKRVDEHMVNIIQNAYDHCTTSFKNKDATSPEINIRVGVKQGDPMSPLLFSLAMDPLLCALETHGVGYTVETECVTSLAFADDLVLMSESWEGMNTNIAILESFCKLSGLKVQANKCQGFMLNPTKDSYTVNNCDPWAIAEVKVQMVGPEDSAKYLGMRISPWTGIVQPDLNVQLKKWISNIDEAPLKPTQKVEILNAYALPRLLYPGDHADCRPTTLRILDQAIRNAVKGWLHLPPSTCNGLLYARACDGGLAIMKLESMIPSAQLRRLQRIANSSDAMIRNIVSSQGVDEKFRNLWVRAGGDCQVIPSVFSTDLASKEPVYSKPCNWRQLEFKRWCEKPVQGVGVENFAHDKVSNTWLGTRGGFKQRHYIAALQVRSNLYPTRESLNRGREGALRSCRKCSSRLESLSHILGQCPAVQKARIARHNKIGDILANEATRLGWWVHKEPRLRSEDGELRKPDLVFVKGEKALVVDVTVRFEVSCKTLSQAAADKVTYYSPLRDQISELTKTNNVTFFGFPVGARGKWHLENNELLTSLGLTDTQISTLAKMISRRTLLFSLDILRMFCGNSAVYDRS

SEQ ID NO: 7074 - protein, 1244 aa, Lethenteron reissneri
MDEKIKFSSQLARGLAKQRAMDGARVGDPSITVRPSTLDLSGTESSWRHRPMKLLFVSVSTQTENEDVYRTSESAEPKLTRNKIPSITFVNSALNKEEEVNCEYYEQISSLFETEEMSDDENTHESILDTSVEEPVLERYPPERDSVTVILPNLKTVCEICQEHLGKVSEMVKHFIIKHRDISLVFKCSKCDKTNSNFRSISCHVPKCGGRKLPNESLTWGCDCCQLRFGSATGLSQHKRHAHPAARNKERISALTKNTSLRGAHLSCWSLEEETQLAQLEVQFQGKKNINMLIATKLGTKTNKQISDKRRCLAKKKVALKQQTLNTVSGYLETVSPPPDITSGARAKLVLATELLMLKPSKKREGPAIEVMKTWLQGEGQQDAQVDNATKSMLRIMRVVRTRGGRSKTAEDVIKPRTMPARTWMKRRAEKRGNFMKHQKLFFRNRSRLASLVLDGKDRQECQIPIKEVHDFYRNKWEEVIPFNGLGQFTSLTVANNDHFEALITVEEVVAGIRAIKPSSAPGPDGVTKAAIIVADPEGKTLAALFNAWLVTGIIPKDLKKNKSVLIPKVTSEDLLKDLGNWRPITISSIVLRLFSRILTARLERACALNPRQRGFIAAPGCSENLKVLQDIMNQAKKARKSLAVVFIDVAKAFDSVSHAHIMWVLRQKRVDEHMVNIIQNAYDHCTTSFKNKDATSPEINIRVGVKQGDPMSPLLFSLAMDPLLCALEKHGVGYTVEAECVTSLAFADDLVLMSESWEGMNTNIAILESFCKLSGLKVQANKCQGFMLNPTKDSYTVNNCDPWAIAEVKVQMVGPEDSAKYLGMRISPWTGIVQPDLNVQLKKWISNIDEAPLKPTQKVEILNAYALPRLLYPGDHADCRPTTLRILDQAIRNAVKGWLHLPPSTCNGLLYARACDGGLAIMKLESMIPSAQLRRLQRIANSSDAMIRNIVSSQGVDEKFRNLWVRAGGDCQVIPSVFSTDLASKEPVYSKPCNWRQLEFKRWCEKPVQGVGVENFAHDKVSNTWLGTRGGLKQRHYIAALQVRSNLYPTRESLNRGREGALRSCRKCSSRLESLSHILGQCPAVQKARIARHNKIGDILANEATRLGWWVHKEPRLRSEDGELRKPDLVFVKGEKALVVDVTVRFEVSCKTLSQAAADKVTYYSPLRDQISELTKTNNVTFFGFPVGARGKWHLENNELLTSLGLTDTQISTLAKMISRRTLLFSLDILRMFCGNSAVYDRS

SEQ ID NO: 7075 - protein, 1251 aa, Lethenteron reissneri
MIEKQTFSSQLARGLAKQRAMGGARVGDPSITARPANVDVSNTEGSWRRRPTKLLFVSISTQTQYEDAYGAFKVEKPTMSRPSQEMIIMHSITFHNSLLIREEDNYDGYAQISKLFEDDDPYEDDDRVDEPLLEYSVEEPVLQKCHLDTRKDIVTVELPCSETLCDICKEHLGKASNVSAHFIIKHREIPLVFKCSKCDKTSSNYRSISCHAPKCGGRKVNQESLPWGCECCLSRFESLRGLSQHKRHAHPVVRNEERIKAATKGISKRGAHRSCWSLEEEEQLALLELQYQGERTINKLIAAGLGSKTNKQVADKRRCLSKKQGDNRTPITNNVSGFLETSSTPPSITTGARAKLVQVAEQLSSGAGCRLEKTAVDAIRAWLRDDGKLDALIETATVSTLQQMRSRKIKIPCKKTQKEIYRPRTMPARPWMKRRAEKKGIYMKHQKLFYKNRSHLTSLILDGTDRHICRIPASEIYGFYRQKWETVFAFKGLGQFKSSGSANNEHFETMISVEEVKAGINAIKQASAPGPDGVTKASICTADPEGWVLASLFNVWLVTGVIPADMKKNRTILIPKVMNEELLKDLGNWRPITIGSMVVRLFSRILTVRLGRACPLNPRQRGFITASGCSENLRVLQDLIKHAKRSHKPLAVVFIDVAKAFDSVSHAHILWVLRQRKVDEHIVNIIQNAYMTCTTSFKINEISTPDINIQVGVKQGDPMSPLLFNLAMDPLICALETHGVGYCIDADSVTSLAFADDLVLVSESWEGMASNIAILESFCKLSGLEFQPKKCQGFMLRPTKDSYTVNNCDPWKISSAHVNMVQPDESAKYLGLKISPWTGILQPELIVQLNSWISKIDEAPLKPTQKVELLNVYTLPRLLYPADHSDCIKSTLRLLDQAIRNVIKKWLHLPASTCDGLLYSRTQDGGLGIMKLESMIPSIQVRRLHRIANSTDAITRNLVSQLGAEEDFRSLWVSAGGEIDAVPAFILTELESKHPVEPRPCDWRQHEFQRWCEKPVQGVGIANFAGDKVSNVWLGRCSGMKQCYYIAALQLRSNIYPTRESINRGRVGALRSCRKCSARLESISHILGQCPAVQKARIARHNKICDILATEATRLGWTVHKEPRFRTEVGELRKPDLIFARGEDALVIDVTIRFERTCSTLTEAASHKVEYYTPLRDQVKDLTRTSNTKIYGFPVGARGKWPPQNNEVLTAMGLTSLRVTTLAKLISRKTLLYSLDILRMFGGNYAVYEQS

SEQ ID NO: 7076 - protein, 848 aa, Callorhinchus milii
MRSRKIKIPCKKPQKEIYRPRTMPARPWMKRRAEKKGIYMKHQKLFYKNRSHLTSLILDGTDRHICRIPASEIYGFYRQKWETVFAFKGLGQFKSSGSANNEHFETMISVEEVKAGINAIKQASAPGPDGVTKASICTADPEGWVLASLFNVWLVTGVIPADMKKNRTILIPKVMNEELLKDLGNWRPITIGSMVVRLFSRILTVRLGRACPLNPRQRGFITASGCSENLRVLQDLIKHAKRSHKPLAVVFIDVAKAFDSVSHAHILWVLRQRKVDEHIVNIIQNAYMTCTTSFKINEISTPDINIQVGVKQGDPMSPLLFNLAMDPLICALETHGVGYCIDADSVTSLAFADDLVLVSESWEGMASNIAILESFCKLSGLEFQPKKCQGFMLRPTKDSYTVNNCDPWKISSAHVNMVQPDESAKYLGLKISPWTGILQPELIVQLNSWISKIDEAPLKPTQKVELLNVYTLPRLLYPADHSDCIKSTLRLLDQAIRNVIKKWLHLPASTCDGLLYSRTQDGGLGIMKLESMIPSIQVRRLHRIANSTDAITRNLVSQLGAEEDFRSLWVSAGGEIDAVPAFILTELESKHPVEPRPCDWRQHEFQRWCEKPVQGVGIANFAGDKVSNVWLGRCSGMKQCYYIAALQLRSNIYPTRESINRGRVGALRSCRKCSARLESISHILGQCPAIQKARIARHNKICDILATEATRLGWTVHKEPRFRTEVGELRKPDLIFARGEDALVIDVTIRFERTCSTLTEAASHKVEYYTPLRDQVKDLTRTSNTKIYGFPVGARGKWPPQNNEVLTAMGLTSLRVTTLAKLISRKTLLYSLDILRMFGGNYAVYEQS

SEQ ID NO: 7077 - protein, 1255 aa, Petromyzon marinus
MTDKLKFSSQLARGLAKQRAMDGARVGDPPITVRPTETDLCNTEGSWGRRPMKLLFVSVSTQTQNEDALWASDVAKPMASRSALKMTSIPSMTFHNSSLEKEEEMNYDFYEQIKSLVESDDSSDDFTEDDEDVEESFLDISAEEPVLGKFPIDTKGTITVVLPSLEYICVICKQHMGKASELVAHFNIKHRDIPLVFKCAKCDKTNSNHRSIACHAPKCGGIKLTEESLPMVCECCQARFATLSGLSQHKRHAHPVTRNEERIKDGIKGTSQRGVHRSCWSLKEVEQLALLELQFQGKKNINKIIAEALGTKTNKQVSDKRRDLSKKTGAPMSDSLHFSSRPLETLSPPPNVTTGTSSILAQAAERLTNENSGTLEKPAMEAIKAWLNGEGQHDALVETATALMLCPMRLVKNKGKRSKPENDIIKPRILPTRSWMKKRAEKRGSFMKHQKLFFKNRSLLASLVLDGTERHECRIPNADVYRFYCEKWEKVLPFNGLGQFKSSGVANNEYFEPLISVEEVQTAIRAIKPTSAAGPDGLTRAAICAADPEGRTLTALFNAWMITGIIPKELKKNRTILIPKVMDDEKLKELGNWRPITIGSMILRLFSRIMTARLARACPLNPRQRGFIAASGCSENLKVLQDLMRHAKKLHRPLAVMFIDIAKAFDSVSHAHILWVLRHKKVDEHVVGIIQNAYDRCTTSFKSNGESTREISIRVGVKQGDPMSPLLFNLAMDPLICTLESHGVGYSIDTDHVTALAFADDLVLVSESWVGMAANLAILESFCGLSGLEVQARKCQGFMISPTKDSYTVNNCDPWTIKNKDVHMIQPDESTKYLGLKIGPWTGTIQPDLHCQLKTWISKIDEAPLKPTQKVELLNAYALPRLLYPADHSDCKQSTLRGLDQEIRKAVKGWLHLPASTCDGLLYARARDGGLAILKLEKTIPSVQVRRLQRIANSSDAITRNIVSSQGMEEEYRNLWVRAGGDSDAIPTFVLRDSVSKEPVYPRPCDWREHEFQRWCEKPVQGRGIVNFAHDRISNAWLRPWCGFKQCFFIAALQLRANIYPTRESLNRGRDGALRSCRKCSARLESLSHILGQCPAVQKARIARHNKISNILADEAARLGWSVYKEPRFISETGEMRKPDLVFAKDEEAVVIDVTVRFELSKNTLSDAASHKVSYYTPLGDQVKVLTKASKVTFFGFPVGARGKWPLENNEVLTSLGLTKPRTTSLAKMISRRTLLFSLDILRMFCGNYAVYEQS

SEQ ID NO: 7078 - protein, 1251 aa, Petromyzon marinus
MTDKLKFSSQLARGLAKQRAMDGARVGDPPITVRPTETDLCNTEGSWGRRPMKLLFVSVSTQTQNEDALWASDVAKPMASRSALKMTSIPSMTFHNSSLEKEEEMNYDFYEQIKSLVESDDSSDDFTEDDEDVEESFLDISAEEPVLGKFPIDTKGTITVVLPSLEYICVICKQHMGKASELVAHFNIKHRDIPLVFKCAKCDKTNSNHRSIACHAPKCGGIKLTEESLPMVCECCQARFATLSGLSQHKRHAHPVTRNEERIKDGIKGTSQRGVHRSCWSLKEVEQLALLELQFQGKKNINKIIAEALGTKTNKQVSDKRRDLSKKTGAPMSDSLHFSSRPLETLSPPPNVTTGTSSILAQAAERLTNENSGTLEKPAMEAIKAWLNGEGQHDALVETATALMLCPMRLVKNKGKRSKPENDIIKPRILPTRSWMKKRAEKRGSFMKHQKLFFKNRSLLASLVLDGTERHECRIPNADVYRFYCEKWEKVLPFNGLGQFKSSGVANNEYFEPLISVEEVQTAIRAIKPTSAAGPDGLTRAAICAADPEGRTLTALFNAWMITGIIPKELKKNRTILIPKVMDDEKLKELGNWRPITIGSMILRLFSRIMTARLARACPLNPRQRGFIAASGCSENLKVLQDLMRHAKKLHRPLAVMFIDIAKAFDSVSHAHILWVLRHKKVDEHVVGIIQNAYDRCTTSFKSNGESTREISIRVGVKQGDPMSPLLFNLAMDPLICTLESHGVGYSIDTDHVTALAFADDLVLVSESWVGMAANLAILESFCGLSGLEVQARKCQGFMISPTKDSYTVNNCDPWTIKNKDVHMIQPDESTKYLGLKIGPWTGTIQPDLHCQLKTWISKIDEAPLKPTQKVELLNAYALPRLLYPADHSDCKQSTLRGLDQEIRKAVKGWLHLPASTCDGLLYARARDGGLAILKLEKTIPSVQVRRLQRIANSSDAITRNIVSSQGMEEEYRNLWVRAGGDSDAIPTFVLRDSVSKEPVYPRPCDWREHEFQRWCEKPVQGRGIVNFAHDRISNAWLRPWCGFKQCFFIAALQLRANIYPTRESLNRGRDGALRSCRKCSARLESLSHILGQCPAVQKAIIARHNKISNILADEAARLGWSVYKEPRFISETGEMRKPDLVFAKDEEAVVIDVTVRFELSKNTLSDAASHKVSYYTPLGDQVKVLTKASKVTFFGFPVGARGKWPLENNEVLTSLGLTKPRTTSLAKMISRRTLLFSLDILSVLWKLCGL

SEQ ID NO: 7079 - protein, 1225 aa, Asbolus verrucosus
MSPPLKLKAMGLTTNSSDTKMTYSGVREPLTTLAPAGVQGFICACGREYSSKATLARHAKECGQRDTSKCQFCGAEFNTFAGVRQHERRRHPELYHREMEARLPAPESELLEKIAMVEAESTDGVFYARMVAETGLTKGQIRYRREKAEYGQYLERARAKLVQNSVSNAQQPAPGPSSSGRSEAVVPGRRRLPPRKTTKARAVDSTQTVSNCQSPQPGSSTRPGTGPHSTKDVSPTYIRRRDRVSRSPLPSVNPSPRRVDVEVIVEEESVIGNLSEVGASPPSASRTSARASPGAILHHAPLVMEPGKSPTFTLGKSHCHSPGPSEPQGAVAAVGVETTGNEEDNNAIEHFLRPVAGRADLTSLVSAAATESRESVLAQVDLWLETTFRPPVSRRRPNKSRNNNIRPEHVPSQKPREGLPGKTRKGLPGPHNTERRAARPQDYKKAQDLYTKNKKGLTEAILSGSSYGGNRVLPTLSDVESLYGGIFESPSPPDNSSYVPKAASMPSEVLPITEDDIQRAKNGWRVSAPGPDGIGVLAVKRHSNKELSVLFNILLSRNIQPTKWRTLSTTLVPKDGDLTDPGNWRPITVGSAVQRLFHRVLVNRLKSQINLSDHQRGFVDTDGTLGNALVFDQYIRHRVEQGKAYNVVALDIRKAFDTVSQESIRRSLERFCVPKMYLDYIMSTFAATTSIKVGSEVTRAIRITRGVRQGDPLSPLLFNLVVDELLEGLNERFQGGSLPGGASCAAMAFADDLILLSDSNIETPLMLDDVETFLRQRGMSVNPAKCRALVAGSVGGQSVARTRSFFKINNSPIPAVPFMNAFRYLGHEFGHSGAEKPGLFNLPGWLSNIRKSPLKPDQKLTLLKTYVIPRLLYGLQNPKIVSKTLRDADRLIRKHVRAILHLNAHTPDAFIHGSIRDGGLGVTELRTAIPRIFLGRLVRLVERSSDPLLSSVLRSNYTSQLMGRLTKMAGDVPESTMWRAKIANGALSRGLEQVSQDTASRSWVDNKPAGWSGRDYVRAVHLRTANLPTKAIPSAPVEQRRCRGGCGVDENLSHVLQTCPVTHWERIRRHDEIVDKVARHCKSRGWKVETEPHIRHRSGQLFKPDLAVHQSDGTVVVADVQVSWEAVDLAVPYERKRAKYDVPYFRDAAARRWPGKTLAFAPIIVGARGIWPRINNDRSDVLQIPPSVRRSCVNSALKWGSSIHRAFMKAVWAKNNGLRAPHHTG

SEQ ID NO: 7080 - protein, 861 aa, Protaetia brevitarsis
MEQNKKFYLKPSSFLREDDRSDQVLEMGDVERFWRSIYEQDQHLNEDDSILNAFTSYCRSTIHHQYTAQRVSATDIVNALNSKPNYSAPGPDNINNFWWKKLSAVHEQLANAFNRVLYENETPEDWLCEGRTILIYKKGDPRQPSNYRPITCLNTIYKIFTSIMLHRIAQATEPLWDTIDEQRGSRKGMAGVQENVLIDSCITKDATTYKRNLSMAWIDFQKAFDSTSHDLILRLLREVNVPPEITGALAKILPKWKTRVLLTKGRTLTLSAPISIRRGVFQGDSLSPYLFCLSLLPLTIALRNHSGYMAGPPNNRSFRVTHLLYVDDLKIYAGSQAELQSMIGTVRKVADCVGMKIGTDKCATFHLKRGKPAEEGDDIDLIDGTAIKYLAPGEDYTYLGIPQRSMNNVEKVKTSVKEQYFKRLKQIWNSHLNAKNKVSATNILALPIIAHTFTCFKWNVDEILQIDRQTRSTMTAARSLHPRSSVPRIYLPRAKGGRGLLSVEDMHCRRIIAVACKVYNTKDPLLRLVRTHELTGKAAFLFHCAERSSEKHGLKLKFTRTPNTVSTTLYNMRPRDLNVAVRESMEKNHMHQHMSKPMHSLYYKLIDDLQLSSKLTFGFLGSPGLYSETEGYIIACQDGVYPSLAYRREVMGLPIPDTRCRACGKSPETLMHLLSACGRYAPTLYIARHDSALKVLYYHIRYINGIDNNLQMPYAAAEVPPVVENERIKIYWNFPFSTSTQISANKPDMVVLCRESKTIRVVEMSCPGDNNIISKELEKIEKYRDLLFQLKLTYPGFRIAFAPLIIGVLGGISCNFNKHLKNTGIPTSDTQKVTYSMQKYVILGSLRILRAHETNHPPPEG

SEQ ID NO: 7081 - protein, 1239 aa, Montipora capitata
MRLTLLFRLLLWIYYTSDITTPKHRRQHAQVGRNTSRGVYDMSDVTNQRGRRTKWTDKMCVDLQTCQMKAVELNNSPDCPLKPNGKKEGIMNLTLKFWNEMGYEYLGKTAQNLRDKIAHIDKSSKTTSSRIANEISNQREQREDQSSNTIQRNREQRNPSPEIDLDEQHKEIKQKALETYNYIKQDEGNWKNRDLKTFSKKKPNNLQLKQLNKIASETTTRDPCQDPAGCLWDLNCLLYSLARAWSLVMERNVKRKDGQQKERKPRWLDLMDKRLSKTRKEISQVTAEIDRTKRNGKLTKTLWKNRKWMKKELKTRKLGLKELTSLKERKLNIIRVQKREKQNKIRAFERRKINSWFDQNERSFYKHLRNLTANEIDPDKVEFSNKTVNRGLDSPNTTREEYENFWGPIWQEPANENLEVEWIHEVRDALDHSIPDNENLTVPITDQKVYQCLKSKRNWAAPGNDKITNFWLKKITSIHNKLAITINRFINDGIHIPRWLAEGRTVLIPKTDNPGAADHRPITCLNTMYKLITSIVNSELQHHESVHKYMQLDQRGGMPGSMGCIDNLLIDKAILEDATKNNKNLSCTWIDVKKAFDSVSHVWLIEVLKMHKINEKLVDFVENVMRNWTITLHVRTSAGNQEIGPLIIKRGILQGDAFCVKLFTLCLNPIAWYVRGTEGYILSHAKNTKITHCLFVDDLKTYHKSSAKATTLTNRLEGMFSDIGLDWGIRKCAAIHIKGGKLQNTENLPLTSGSQIPVLGEGDHYKFLGKVQNVNQLDKQVFEQASQEYLRRLAAIWTSPLSIPRKVKATNTFAYPVLQYYMWSSEWAIEDLQELDRKTRAVIAQNKGKHNSESNPTLYLSPDLGGRGFKEIEIQYKVTKIKTAHYTTTSRDPHIEVVRTFQDVKEAKKSRSVIKDAKTYAQQLNVDVTFDEQHKSTSVTMGEKETLFKISSPKYIQQTLKEATDTKYKQKVSEQLWLGNYVTQRWKDNDISKDNFNPIMKWKNIPDVVLSVHTSILQQLVPTKVYRVKKQKEQGLDLVCTLCHSAEETVPHLLCGCSAIAQTIYKARHDRMLRPIYHLLLSVYNMENDDSKAWYKQAIPKASTENDEAKILWDTPLYIDRAPENGANKPDMTIFDKKNKVIILVEGTVCNIGQINDRNDYKKRKYLDLRLGLRKLYPDYEIKQTNIVFNFLGDFNTTLKKELSDLAHKKDVTKVLTNCQKWIISQNCEITKKFYSLRQ

SEQ ID NO: 7082 - protein, 1220 aa, Triplophysa tibetana
MMVAIWQTLLSMNVGRNKSRMAGRPVKQAAMRKRRGCATSSLQDSLHAPPARGYGADGGQPGNDNFGFDGRLRECSVVLTRIRERAGATVGELSTTAIGLDTTGDARETAVAVQTAVEPGSGPAMVAPQISHVDAAGGMIICLPFEAHRCVLCGQSVGTLPQLKSHSSVRHPTVLVRFMCVSCGKTASRSQSIACHVPKCRGHPVTRPPGPVRCEACDATFETRRGCSIHEMHAHPGVRNRKRAADLLARFGPMMEPVEAGTAEISDDSDPGASTSSKRQRVDVSVDGVTPPEPEAGTSDPLLVIRGQESQLRERLRELVRVMVGEVEAEAEGEGGVHIPVLKAWLEGSDQIPALVTAATSQMLLELIEEARVSPATSRRRRRAVPRSVLRRRRKSQIRKEAYRRCQHLYSTDPTRLAAEILEGRVLKRCPISPQSIHQTFKRKWEDRPVFRGLGQFRAGEPANNEHLAGLISEGEVLASLQQVKRNSGPGPDGITKQAIQEWDPECETLTRMFNMWWVTGIVPTRLKNCRSILLPKSADPGERMEVGNWRPITIGSMVLRVFTRILSKRLAQACPLHPSQRGFRPTPGCSENIEVLRGLIRHCKSECSSPLAVVSIDFSQAFDTVSHEHVVAALRGIGVDHHMVEMVQNLYENSVTRVEIGGGVTPAIALRVGVKQGDPLSPLLFNLSMDPLIHKVEGGGNGYRFQGHSVASLAFADDLVLVSGSWTGMAKHLAVLDSFCRVTGLKVNQRKCFGFLIRPCGGSYVINNCPPWVLGGTALQLSGLEDSFKYLGAQCNPWVGIVQPEQASILDNWVRRLAAAPLKPSQKVTLLNRHAIPRLHYLADHAELGSDKLDRLDGIVRNAVKAWLRLPPSTCDGLLYARNRDGGLGICKLARQAPITQARRWLRLSVSSHGVVKTLATSDWAKDHFRRIWLRAGGGEDDIPQLGLWNANANGDEPCPLTPACPWPCDWRAEEFRRWTELPVQGKGIASFKGCPVSNSWLRAHKGFTERCFIAALQLRANVYPTAESALRGRSKESGSCRLCPSRLESASHILGQCPGVQSMRLVRHHKICRLLAAEAEGLGWEVHQEWSFVTASGESRRLDLVLVRGPEALAIDVTVRFEFDSNSLRDAAKEKVRYYSPHKSTIARTLGVSGVQVLGFPLGARGLWYGANERVLETLGMGRHRVRAFARLVSRRVLLYSLDILRAFGKARAQQPGR

SEQ ID NO: 7083 - protein, 1220 aa, Triplophysa tibetana
MMVAIWQTLLSMNVGRNKSRMAGRPVKQAAMRKRRGCATSSLQDSLHAPPARGYGADGGQPGNDNFGFDGRLRECSVVLTRIRERAGATVGELSTTAIGLDTTGDARETAVAVQTAVEPGSGPAMVAPQISHVDAAGGMIICLPFEAHRCVLCGQSVGTLPQLKSHSSVRHPTVLVRFMCVSCGKTASRSQSIACHVPKCRGHPVTRPPGPVRCEACDATFETRRGCSIHEMHAHPGVRNRKRAADLLARFGPMMEPVEAGTAEISDDSDPGASTSSKRQRVDVSVDGVTPPEPEAGTSDPLLVIRGQESQLRERLRELVRVMVGEVEAEAEGEGGVHIPVLKAWLEGSDQIPALVTAATSQMLLELIEEARVSPATSRRRRRAVPRSVLRRRRKSQIRKEAYRRCQHLYSTDPTRLAAEILEGRVLKRCPISPQSIHQTFKRKWEDRPVFRGLGQFRAGEPANNEHLAGLISEGEVLASLQQVKRNSGPGPDGITKQAIQEWDPECETLTRMFNMWWVTGIVPTRLKNCRSILLPKSADPGERMEVGNWRPITIGSMVLRVFTRILSKRLAQACPLHPSQRGFRPTPGCSENIEVLRGLIRHCKSECSSPLAVVSIDFSQAFDTVSHEHVVAALRGIGVDHHMVEMVQNLYENSVTRVEIGGGVTPAIALRVGVKQGDPLSPLLFNLSMDPLIHKVEGGGNGYRFQGHSVASLAFADDLVLVSGSWTGMAKHLAVLDSFCRVTGLKVNQRKCFGFLIRPCGGSYVINNCPPWVLGGTALQLSGLEDSFKYLGAQCNPWVGIVQPEQASVLDNWVRRLAAAPLKPSQKVTLLNRHAIPRLHYLADHAELGSDKLDRLDGIVRNAVKAWLRLPPSTCDGLLYARNRDGGLGICKLARQAPITQARRWLRLSVSSHGVVKTLATSDWAKDHFRRIWLRAGGGEDDIPQLGLWNANANGDEPCPLTPACPWPCDWRAEEFRRWTELPVQGKGIASFKGCPVSNSWLRAHKGFTERCFIAALQLRANVYPTAESALRGRSKESGSCRLCPSRLESASHILGQCPGVQSMRLVRHHKICRLLAAEAEGLGWEVHQEWSFVTASGESRRLDLVLVRGPEALAIDVTVRFEFDSNSLRDAAKEKVRYYSPHKSTIARTLGVSGVQVLGFPLGARGLWYGANERVLETLGMGRHRVRAFARLVSRRVLLYSLDILRAFGKARAQQPGR

SEQ ID NO: 7084 - protein, 1174 aa, Triplophysa tibetana
MPPRPGGMVPTVANLVMTTLDLTDDYESARWSSRASGRGLARRWGELSTTAIGLDTTGDARETAVAVQTAVEPGSGPAMVAPQISHVDAAGGMIICLPFEAHRCVLCGQSVGTLPQLKSHSSVRHPTVLVRFMCVSCGKTASRSQSIACHVPKCRGHPVTRPPGPVRCEACDATFETRRGCSIHEMHAHPGVRNRKRAADLLARFGPMMEPVEAGTAEISDDSDPGASTSSKRQRVDVSVDGVTPPEPEAGTSDPLLVIRGQESQLRERLRELVRVMVGEVEAEAEGEGGVHIPVLKAWLEGSDQIPALVTAATSQMLLELIEEARVSPATSRRRRRAVPRSVLRRRRKSQIRKEAYRRCQHLYSTDPTRLAAEILEGRVLKRCPISPQSIHQTFKRKWEDRPVFRGLGQFRAGEPANNEHLAGLISEGEVLASLQQVKRNSGPGPDGITKQAIQEWDPECETLTRMFNMWWVTGIVPTRLKNCRSILLPKSADPGERMEVGNWRPITIGSMVLRVFTRILSKRLAQACPLHPSQRGFRPTPGCSENIEVLRGLIRHCKSECSSPLAVVSIDFSQAFDTVSHEHVVAALRGIGVDHHMVEMVQNLYENSVTRVEIGGGVTPAIALRVGVKQGDPLSPLLFNLSMDPLIHKVEGGGNGYRFQGHSVASLAFADDLVLVSGSWTGMAKHLAVLDSFCRVTGLKVNQRKCFGFLIRPCGGSYVINNCPPWVLGGTALQLSGLEDSFKYLGAQCNPWVGIVQPEQASILDNWVRRLAAAPLKPSQKVTLLNRHAIPRLHYLADHAELGSDKLDRLDGIVRNAVKAWLRLPPSTCDGLLYARNRDGGLGICKLARQAPITQARRWLRLSVSSHGVVKTLATSDWAKDHFRRIWLRAGGGEDDIPQLGLWNANANGDEPCPLTPACPWPCDWRAEEFRRWTELPVQGKGIASFKGCPVSNSWLRAHKGFTERCFIAALQLRANVYPTAESALRGRSKESGSCRLCPSRLESASHILGQCPGVQSMRLVRHHKICRLLAAEAEGLGWEVHQEWSFVTASGESRRLDLVLVRGLEALAIDVTVRFEFDSNSLRDAAKEKVRYYSPHKSTIARTLGVSGVQVLGFPLGAQGLWYGANERVLETLGMGRHRVRAFARLVSRRVLLYSLDILRAFGKARAQQPGR

SEQ ID NO: 7085 - protein, 846 aa, Strongyloides papillosus
MPSIKKVSMLQKRLESDIDISTKNCVLEPSKAREFFIKLYSTKRKTVNDRKFKEFITIGKNQLKDKSPIITREILDHAIVTAAPFKKVGNDKVPAAMFKYVPAIKEFLIDMLLESLSTGKLPYKNFAASNTILLEKPGDPTKPESYRPISILNHSYKILTKAYTIVLEETTRNSVFRPTEQYACRKKISGCLSANLVDGLISSSTASFETTWVDFKKAYDSLLSPRIRSVIQCFNLPATQKNLLLNIIKNWKVSLKVGEKVQKPFKQLNGLLQGCSLSPLLYICVSAYISYRLNAAVSKISFTTLNNSFHFNTNHIAYMDDMKLFCSSQKQLAYAINILKKSAKRIGLSTNNKKSFTLNKTSTCFPFLLPNESFKYLGLEQRVCTNFPKTISNVENKIINTINSAYKIEIGENDRAKAFKMIISPIMRYIDSNISFDCSEKPKDVINISNHLNAKIKNQLILNKGWQLSLTAERFYMDRKDSGKGIPNVKLEFIKGMIEQVCALYNNAHKDLAPLFSIVKESLQLQKIKESGLLHILVEIGKELKIFNDLKLDKNSILIDEVEFTCDNKMASDINKMLHYRFQENLVVESSRKFWPKKRKEYIESLDINLSNKAYINLNSKAAVETICLAISEKQVYLPNFKNKLKSGKTTYCRHGCQEPEDLLHILQHCQFSLKKSIYSRHQDVCNIILNHLKKSPNEYTIREDELFQAKNTKLRNCRPDLVVLDFKKRVGFILDVAISAPGLMVKSYNLKYHKYAHNSLIKLDYTTNLNEVKKDINLEEELSKQSKCKIKTIPIIIGNCGEILKSTYEELSKAFPELNIKMLLNQCQRKAMLGSYYILKRHLNS

SEQ ID NO: 7086 - protein, 1052 aa, Eriocheir sinensis
MPTPGSQQSSCVVCEVGPTPTPRNGVPTCRSCREFFRRHSLANQPAAPCSRSGNCRVIRKSRNSCASCRLRRCVDAGMRIVNPGSSSQDADDDEVCAACNQINRAKHTIVCAERSRASHLTCVGITRRQAEQLPTWHCDGCLRSAALEGAADDIQAVASATPPLDMAATLANLKATKGVLRHVPRGQRHRVASGLASAITAALEQRSPTAWWRLFSYAYHSPLACTSTPATPTLEQRRAQRPSGSTETDTDEALARRITRKCADGDIRAALRLLTTSDSVAPPSADTLAALQTKHPPGDSDEPLPHPSDTDPGHLEVSKEDVLAAIHAFSPCSAAGLDGIRPMHLQQLVTKNKAEAGQRLLGAITELCNAALAGIIPEPARQVFFSANLFALKKKDGGLRPIAVGTIYRRLASKLLSKSISSALSPELCPAQPGAGTRLGCEAAFHAVREFADTHAQETDAVIKLDVANAFNTIHRSAVLREMFRRFPMAAPLVTQAYSQPSPLHFETACIPSCRGVQQGDPLGPLIFTLAVDPIIQSLGSPLNVWYLDDGTLAGSVATVAADLQRIIPAFRAIGLEVNPLKCEITHLGPRGDDTGTGIIGDVASSTSNDNAGGLITFDAFLNRVRSTHINSLSFLGAPIHPDSAGDALDNIRHLTETLIQRTSPISSHMALFFLTRYASVPRATHLMRAAPVYLAGDNLRTIDQQLWDATSRICNVALDDMAWTQASLPLRLGGLGLRRLADVALPAYIASVDATRDLVCTINRRPTDDRPAPLASAIDTFTATQCPSFNPEEPLQQRHLDEAASEHRLSNLLSHANQVDRARLLAAWAPHSGAWLSALPVERLGLLLPDEAVRPGVALRLGFPTQQPHRCRCGAMADRLGHHNLSCKRDPGRLPRHAALNDVVYRALSSAGVAAILEPRGLDRGDGRRPDGITIYPFTQGKMLAWDATCVNTFVSTHLIDCATTAGAAARSAEARKRRRYADLGQRYDFMPLTVETTGVLGPAFSDLIKTLGRRIRERTGEKRETEWLRQRVSLAVIRGNAAALCQQRHT

SEQ ID NO: 7087 - protein, 1047 aa, Ancistrocerus nigricornis
MTLLRPVPASIPSQRAGPAARVLPQPPERVQHTCPLCDRPFATAIGLGQHRRQAHKEAYNEAINVERARRGWSEEELRLMARAEADAFREGIRFINQHLVSIVPNRTLDAIKGARKKVAYRSLVEQLLREAPVGRVSDSSDGDDGSDAYLSASEAHDSPPNSSRDATPVAVGVPSTDPGVPAPRDQIPQLIQQAEDIRGWNSIQLCRLADQHLAGVDVKAGVSKWIEDVFPPIPPLDRPAAPPFRPVNPSNKLRRRLEYARVQRMFRQNMSRTAREILDGTGAKGYEPNVADMAAHWGPLVSAPSIAMPPGVRSRAARADLAVIWAAITIPEVMSMIMPLSAAPGLDGITPRLWRSVPPPLKALLFNIILDVGGWSSLFASRTVFIPKGDQQHGPADFRPISVTSVILRHLHGILARRIMKAGLVGNLQRCFSDGCAENVAVLATILQDARSRLREAHIASLDVSKAFDTVSHSAVEQALEHLGLPAGFRRYVHCLHEDSLTTFEVRTQRSQFYRLGRGVRQGDPLSPVLFCMVVDRVLETIPQAVGYEVGGERINCIAYADDMMLFATTKWGLQSALDAIVEAAGVRGLALNATKCMVLSLVPSGREKKIKVVTTPTFQLRGGDFLPQLSSTASWRYLGVEFRPEGPRPTRQDLHMHLESITRAPLKPPQRLLILRAFLLPRLYHGIVLGRTTVGALRALDRDTRGAIRRWLRLPADVPVGYFHAPVREGGLGIPAMATAVPGLILSRFQHLGQSSSPAVRACATQRWVTTRLRWAASALARTGDNLTTKYRRGKWWSRKLHASTDGWELRESAGSALSTHWIAGSAGVPGRDFVQYCHVHINSLPTLMRTSRGERRAGRDVQCRAGCGVRETAAHIIQSCHRTHGGRVRRHDAVCNTLAAGLRDKGWIVHQEPQFDTAQGRRKPDIVAKRADDLCVIDAQIVSGSAALDGAHERKVQYYSRNNDLRAALRQTYAVEEANITFRSCTLSWRGVWSAASARGLGNLGLPRSLLRGITTRVVQGSHTNWSRWNKMTTMAPPIPREGVG

SEQ ID NO: 7088 - protein, 954 aa, Ancistrocerus nigricornis
MARAEADAFREGIRFINQHLVSIVPNRTLDAIKGARKKVAYRSLVEQLLREAPVGRVSDSSDGDDGSNAYLSASEAHDSPPNSSRDATPVAAGVPSTDPGVPAPRDQIPQLIQQAEDIRGWNSIQLCRLADQHLAGVDVKAGVSKWIEDVFPPIPPLDRPAAPPFRPVNPSNKVRRRLEYARVQRMFRQNMSRTAREILDGTGAKGYEPNVADMAAHWGPLVSAPSIAMPPGVRSRAARADLAGIWAAITIPEVMSMIMPLSAAPGLDGITPRLWRSVPPPLKALLFNIILDVGGWSSLFASRTVFIPKGDQQHGPADFRPISVTSVILRHLHGILAGRIMKAGLVGNLQRCFSDGCAENVAVLATILQDARSRLREAHIASLDVSKAFDTVSHSAVEQALEHLGLPAGFRRYVHCLHEDSLTTFEVRTQRSQFYRLGRGVRQGDPLSPVLFCMVVDRVLETIPQAVGYEVGGERINCIAYADDMMLFATTKWGLQSALDAIVEAAGVRGLALNASKCMVLSLVPSGREKKIKVVTTPTFQLRGGDFLPQLSSTASWRYLGVEFRPEGPRPTRQDLHMHLESITRAPLKPPQRLLILRAFLLPRLYHGIVLGRTTVGALRALDRDTRGAIRRWLRLPADVPVGYFHAPVREGGLGIPAMATAVPGLILSRFQHLGKSSSPAVRACATQRWVTTRLRWAASALARTGDNLTTKYRRGKWWSRKLHASTDGWELRESAGSVLSTHRIAGSAGVPGRDFVQYCHVHINSLPTLMRTSRGERRAGRDVQCRAGCGVRETAAHIIQSCHRTHGGRVRRHDAICNTLAAGLRDKGWIVHQEPQFDTAQGRRKPDIVAKRADDLCVIDAQVVSGSAALDGAHERKVQYYSRNNDLRAALRQTYAVEEANITFRSCTLSWRGVWSAASARGWEIWACPGRSYAELQRAYCRGAIPTGQSGIK

SEQ ID NO: 7089 - protein, 968 aa, Ancistrocerus nigricornis
MARAEADAFREGIRFINQHLVSIVPNRTLDAIKGARKKVAYRSLVEQLLREAPVGRVSDSSDGDDGSDAYLSASEAHDSPPNSSRDATPVAVGVPSTDPGVPAPRDQIPQLIQQAEDIRGWNSIQLCRLADQHLAGVDVKAGVSKWIEDVFPPIPPLDRPAAPPFRPVNPSNKLRRRLEYARVQRMFRQNMSRTAREILDGTGAKGYEPNVADMAAHWGPLVSAPSIAMPPGVRSRAARADLAVIWAAITIPEVMSMIMPLSAAPGLDGITPRLWRSVPPPLKALLFNIILDVGGWSSLFASRTVFIPKGDQQHGPADFRPISVTSVILRHLHGILARRIMKAGLVGNLQRCFSDGCAENVAVLATILQDARSRLREAHIASLDVSKAFDTVSHSAVEQALEHLGLPAGFRRYVHCLHEDSLTTFEVRTQRSQFYRLGRGVRQGDPLSPVLFCMVVDRVLETIPQAVGYEVGGERINCIAYADDMMLFATTKWGLQSALDAIVEAAGVRGLALNATKCMVLSLVPSGREKKIKVVTTPTFQLRGGDFLPQLSSTASWRYLGVEFRPEGPRPTRQDLHMHLESITRAPLKPPQRLLILRAFLLPRLYHGIVLGRTTVGALRALDRDTRGAIRRWLRLPADVPVGYFHAPVREGGLGIPAMATAVPGLILSRFQHLGQSSSPAVRACATQRWVTTRLRWAASALARTGDNLTTKYRRGKWWSRKLHASTDGWELRESAGSALSTHWIAGSAGVPGRDFVQYCHVHINSLPTLMRTSRGERRAGRDVQCRAGCGVRETAAHIIQSCHRTHGGRVRRHDAVCNTLAAGLRDKGWIVHQEPQFDTAQGRRKPDIVAKRADDLCVIDAQIVSGSAALDGAHERKVQYYSRNNDLRAALRQTYAVEEANITFRSCTLSWRGVWSAASARGLGNLGLPRSLLRGITTRVVQGSHTNWSRWNKMTTMAPPIPREGVG

SEQ ID NO: 7090 - protein, 1165 aa, Emmelina monodactyla
MTQSSQEGETLNNTQPSTSVLCNILPATTIAGKNRQRMKWTDEINKQLLRCYYIVTCNETNTTAYRPQLRRKFITIFPELHFIGEQRLADQIRVIHNNNRISLSEREALKRTVLDELHSELTNSLANTHDTTGAHQNINEQSFEINLSSEVISTLSSSSTQNQLTIYTSDSDVLPRQQRSEDNTTTSINSESRETEINFAEMLIKYEGTDPTQRPSIPKLAITKNTMKTINQINTIIHKYLQQSPTHTLEELQTIIYCAGITATHIHNEIKKTNSSITKNSHKTNKNKIPIWQKRIEMKIFYLRQEIGRMTKCLSGELSQRKVNKFNLNKPKDEIVNDLDTKKQKLQAQAKRLRRYKKRQQRQNENKLFYHNQKIFYRNLNSNTQKISQAPDITDVESFWEDIWSNPVSHDENALWAELEQYEMQKVNEMPQIKIKKDDVQLAIRKTLNWKAPGPDKIQNFWLKYLDSTHEHIAEAFNKIIESPETAPSFLTQGTTYLKPKDADTTNPSKYRPITCLPTFYKLLTSIITQKINLHIEKYNIIPEEQKGCRKGSRGCKEQLVIDTEIHNHVIKKHKNLHFAYIDYQKAFDSVPHSWLIHILSIYKIDHTIINFLKTIMNKWTTTLNITTDNANIQSKPIQILRGIFQGDSLSPLWFCLAMNPLSRILNNTGYGYLIDSINKTKLTHLLYMDDIKLYAPNKQELHYLIKLTEDFSKDIKMNFGTDKCRINSINKGRFEKTDSYTLTNQNEMINSMELTENYKYLGYKQTTAINHKSTKQELINSYKQRLIKIYRTQLSARNKVKAVNTFAIPVLTYSFGIIKWTETDLDNLNTMTRTIAYKNNIHHIHSAVERFTLPRKLGGRGFIDIKNLHYSQVANLKSFFNTKANNSAIHKAIINFSTSGTALQLNNNQYHPDEKIVKPKSKLETWKKKALHGKYPHHLDQQHVDKESSFTWLTKGNIFAETEGFMVAIQDNIIKTRNYSKYIIKDRNVTDDRCRLCHHNHETIEHITGGCGMLAKKEYVRRHDNVAKQVHQKLAIKYKLTTSDEPYYKYQPAGVLENEIAKLYWDRDIITDKTIACNRPDITLTLKNNKTTYLIDISIPNTENLHNKYIEKIQKYIPLADEMKDMWRQDQIKIIPIIISSTGIIPKNLHDSIDQLELPKYLYM

SEQ ID NO: 7091 - protein, 1358 aa, Emmelina monodactyla
MSPTSASSEPDSEDAYTPTEEEQPTCSVLQEVTPTTTRAGNGRQRMKWSYEINKQLLCCYYSVTNNEKDLSGYRPLLRQKFITIFPDLNNISEQRLADQIRIIHKNNRIPPNEREALKFEIANSTQNENTENSSFNNSLEHNPQNTNLQNTQSHITTQSSQAGETLTNPQPSTSVLYNMLPATTIAGKSRQRMKWTDEINKQLLRCYYIVTCNETNKTAYRPQLRHKFITIFPELHFIGEQRLADQIRVIHNNNRISLPEREALKRTVLDELHSERTNTIANTHDTTETHQDINAQSLEIHVSSEVVSTLSLSITQNPLPTYTSDSDMLPRPQRTDDNSITCTDFDSRETEIIFAEMLIKYEGTDPTQRPSIPKLAITKNTMKTINIINTIIHKYLQQSATHTLEELQAIIYCAGITATHIHNEIKKTNRNNTTNSNNTKNCNKTNKNKKPIWQKRIETKIFYLRQEIGRMTKYLSGELSQRKVNKLNLNKPREVIVNDLDNKKQKLQAQAKRLRRYKKRQQRQNENKLFYNNQKIFYRNLNSNIQNISQPPNINDVESFWEDIWSNPVSHDENALWAELEKYEMQQVNEMPQIKIEKDDVQLAIRKTLNWKAPGPDKIQNFWLKYLDSTHEHIAAAFNKIIEDPETAPSFLTQGTTYLKPKDADTTNPSKYRPITCLPTFYKLLTSIITQKINLHIEKHNIIPEEQKGCRKGSRGCKEQLVIDTEIHNHVIKKHKNLHFAYIDYQKAFDSVPHSWLIKILSIYKIDNKLINFLKTIMSKWTTTLNIATDNTNIQSKPIQILRGIFQGDSLSPLWFCLAMNPLSRILNNSGYGYLIDPINKTKLTHLLYMDDIKLYAPNKQELHYLIKLTEDFSKDIKMNFGTDKCRITSIHKGRFEKTESYTLTNQNEMINSMDLTENYKYLGYKQSTAINHKTTKQELINSYKQRLIKIYKTQLSARNKVKAVNTYAVPVLTYSFGIIKWTETDLDNLNTMTRTIAYKNNIHHIHSAVERFTLPRKLGGRGFIDIKNLHYSQVANLKSYLNTKSNTSAIHKAIIHFPTSGTALQLNNNQYQPDEKIVKPESKLETWKKKALHGKYLHQLDQQHVDKESSFTWLTKGNIFAETEGFMVAIQDHIIKTRNYSKYIIKDRNVTDDRCRLCHHSHETIEHITGGCGMLAKKEYVRRHDNVAKQVHQKLAIKYKLTTSDEPYYNYQPASVLENEIAKLYWDRDIITDKTIACNRPDITLTLKNNKTTYLIDVSIPNTENLHNKYIEKVQKYIPLADEMKDMWRQDQIKIIPIIISSTGIIPKNLHDSISQLELPKHLYMQLQKSTILDTCSLVRRFLNSTSLVPTSVALNI

SEQ ID NO: 7092 - protein, 1015 aa, Lasioglossum morio
MNIHNLAGEPTGSPGPTSQTGDEVVNSNSVKEIFKCEAPGCDRTFPNARGRGVHQQRAHKDWYDERQLETHQSKKAPWTTEEAALLARQEARITLEGKERFMNQALLPLFPNRTLEAIKGQRRSARHKARVLELIQEMGMEQQGNEPSPTTPTEVNDEGTNLVKKIADYFGKLKPIVGTDFRVEHLNDICGNIQTWTVDRIFEELKIYLLQVFPLPTEKQRPVRQENSTGKRLTKRQERRADYARTQRAWKKNPCKCLNVILDTKNGAEVPGKESMTSFWDTVMTSEDKSSPGIGQKAEEVLAWEPIVAEELRESYPAMTTSPGPDGLTARQIKAIPPGILLRILNLFLICGKLPQHLLESRTTLIPKKDEAKEPGDFRPITVSSVLTRTFHKVLAKRLGRLVVLDERQRAFMPIDGCSKNIFELDMLLRYHRQHFRPMFMASVDIAKAFDSVTHNTIRDTLVNKGIPDPMIRYIIYTYEQGITRLKCDGWVSEPIHPTCGVKQGDPLSPIIFNMVIDRLMQLLPAEVGLEIAGRRVNAFAFADDLVLMAQTQQGLQQIIDAATDYLSKCGLMINTGKSFTVALRNVPHMKKSVVDKRTVFTCRGRQLPAIKRDDQWTYLGVPFTPEGRLLCKPEVQLQEAIRKLTKAPLKPQQRLFALRVVVLPGLYHQLNLGSTNLSRLKKVDTLVRAAVKKWLDLPHDVVNAYIHANFRDGGLSIPSMRWLMPLQRRQRLKSLLKEGVEPAPYHAQEIAIAERRLNDSGVQITSNVELYKRWAKHLHSSSDGMALRESDNIPQQHQWVIEGTRFLSGRDYLNAIKLRINALPTRSRTTRGRIQDRMCRAGCNEIETLNHVLQRCHRTHAARVERHNAVAAYIKRALQKKHDLVEEEPHIMTTDGLRKPDLIAVKGKAATILDAQVVSEQTGLDIAHDKKVKYYENIKEAVKTKYKVDEVSLSSITLSCRGIWSGKSAQDLTDRRIIKKQELKILSTRAIIGGLNAFWKFNKSTSMRRRTGIG

SEQ ID NO: 7093 - protein, 1016 aa, Lasioglossum lativentre
MNNYNLAGGPSGSPGPTSQTGDEVVNSNSVIAIFKCGAPGCDRTFPNSRGRGVHQQRAHKDWYDERQLETHPSKKAPWTTEEAALLARQEARITLEGKERFMNQALLPLFPNRTLEAIKGQRKSARHKAKVLELIQEMGLKSQGNEPIQTTATDLNDEGIDLVQKIADYFGKLRPIEGTDFRAEHLNAICGNIQRWTVDRIFEELEIYLLQVFPLPTEKERPVRQKDRAGKRLTKRQERRADYARTQRAWKKNPCKCLNVILDSKSGAKIPQKESMTSFWRTVMTNKDKSSPGIGQKANEVLAWEPIEVRELQESYPEMTTSPGPDGLTARQIKAVPIGIMLRIVNLFLICGKLPQHLLESRTTLIPKKDEAKEPGDFRPITVSSVLTRTFHKVLARRLGRLVVLDERQRAFVPIDGCSRNIFELDMLLRYHRQHFKPMFMASVDIAKAFDSVTHNTIRDTLVNKGLPDPMIRYIIYTYEQGVTRLKCDQWISEPIHPTCGVKQGDPLSPIIFNMVIDRLMHLLPAEVGVEIAGRRINAFAFADDLVLVAQTQQGLQQIIDEATNYLSKCGLMINTGKSFTVALRNVPHMKKSVVDKRTVFTCLGRQLPAVKRDDQWTYLGVPFTPEGRLLCKPEEQLQEAINKLTKAPLKPQQRLFALRVIVLPGRYHQLNLGSTNLSRLKKVDTLVRAAVKKWLDLPHDVVNAYIHANFKDGGLSIPSMRWLMPLQRRMRLKSLLEEGVEPGPYHAQEIAITERRLNDNGVQITNNVEMYKRWARLLHSSCDGMALRESDKIPQQHQWVIEGTRFLSGRDYLNAIKMRINALPTRSRTTRGRIEDRLCRAGCNEVETLNHVLQRCHRTHAARVERHNAVAAYIKRALQRKHDLVEEEPHIMIPQGLRKPDLIAVKGKAAVIIDAQVVSEQTGLDVAHDKKVKYYENIRDAVRSKYKVDEVSLTSITLSCRGIWSEKSAQDLVDRRIIKKQELKIISTRAIIGGLNAFWKFSKSTSMRRRRTGIG

SEQ ID NO: 7094 - protein, 1193 aa, Dreissena rostriformis
MTTENRSVTLERQMTTRNRLDRGIRGSIPKCSLRERTPNQQATDSTNERHPQSLPRGGEDDRLKWTDFMVSTQPAQSTTNRDGTITCSCGKVCKNQRGLRIHQGKSGCQRVRSQRQRLAGTASETQEYPSLDSTHSTGELSVNETTHDVFREPEVEDDPLLELLQTQGTPDADQVTVQDRPMKDTAIRTRKERIKWPNASDNKSWKQLDEDLDIILEASLQGPVDRKLTTLATLIYSVGRERFGFEEGIARKEPPKPNRRQTRIQNLRHELRQLTSRYRTSSPTERAGLTQLRQTLRLELMSLRKAENTRRKARERAKKRAAFTANPYKFARSLLDKERSGRLEAPLEEVERYLQSTHSDPNREEPLGNCERIDPAKEPEKPLDVSEPTLREVKDTIRKARSASAPGPNAIPYKVYKMCPLLLKRLWRLLRVVWRKGEIPDAWKEAEGVFTPKERNSKTVNQFRTISLLNVEGKIFFAILARRLTSFLTENKFIDTSVQKGGVPGFSGCVEHTSAITQLIREAKEGRKDLTIVWLDLANAYGSIPHQLIYTALQHYHVDCHVQKIITSYIDGIRLRFAVGDQLTGWHKLEKGIVTGCTVSVVLFIMGMNLLINAAQRETRGPKTESGIYLPSSRGFMDDLTLSTTTHVQARWMLTALTDVASWGRMQFKAVKSRALVIKKGQTTERFKLYIQNEEIPSIVQSPIKCLGKWFDSSLRDRDNAKKLKQQVEDGLKKIDRCGLPGKFKAWLYQHALLPRLLWPLMLYEVASTTVEALERTTSRHLRKWLGVPPSFTSIGLYGKTNKLQLPLSSLVEEFKIAKTRLVLTLRDSPDECIRGAGIETRTSKKWSATESVSQAESNLKHKDIVGVTAVGRQGIGATKTVLWSRSDQKERRAMIQSEVRREEESARQARAVEMGAQGTWTTWNTTDRKLTWGEIWKYEPLRFSFLLRSVYDLLPSPANLCRWGLTTDPKCSLCDRTGTLEHVLSSCPTALTQGRYRWRHDSVLRELADWLERERKKERGNHPAHKYISFVKTGETNKAQKTHRSSILDGTTGWNMEVDLGKRLVFPDVVQTTLRPDVVLWSETGKKLIVIELTVPWETRCEEAYERKKAKYTELLDLCKQRGWRTWLFPVEVGARGFCSQSVCRLMTAVGANGRDRRGAIQRLSQAAERASSWLWLRREEKSWKHQPTHSA

SEQ ID NO: 7095 - protein, 1195 aa, Sinonovacula constricta
MATRNRLVTLERQLTPGTDWNRGTRGSIPTCSLREKTPTDKLQTPRMKDTPRVFREGGEDERLTWTDFMESTRPAQSTMNPAPGTATCPCGKVCKNQRGLRIHQGKSGCQRVRPLEQRIASMASETREYSSQETTHSTVELSAQETARDATRDPVMDEDDPLLELLNYSQDTSSQPPEQEAIPDRPRPMPTTRTPKIKWPKASEKAPWKQFDEDLDIILESSMQGPVHRKLHTLTTLVYSVAKERFGIEEAKKRKEAPKPNRRQHRIENLRKEIRQLKKQYRDSSPMQRLGLSQLRDTLRTQLKSLRQAENTRRKARERTRKRAAFTANPFKFAKTLLDKERSGTLETPLEEVEKYLHDMHSDVNREDALGDCDRIDPALPPKTPLVITEPTLGEVKDVIKKARWGSAPGPNAIPYKVYKMCPLLLKRLWRLLKVVWRKGDVPEAWKEAEGIFTPKERNSKTVNQFRTISLLNVEGKIFFAILARRLTSFLTTNAYIDTSVQKGGVPGFSGCVEHTSAISQLIQEAKTGKKDLTVVWLDLANAYGSIPHQLIYTALQHYHVDNHVQKIITNYLDGIKLRFSVGDQLTKWQKLEKGIVTGCTVSVVLFVMGMNLLINAAIRETRGPKTESGIYLPSSRGFMDDLTLTTPTHVQARWMLTVLTDVASWARMKFKAVKSRSLIIKKGKTTDRFVLRVQNEEIPSITKNPIKCLGKWFDASLADKDNVKKLENQVEDGLKKIDRSNLPGKFKAWLYQHALLPRLIWPMMLYEVPSSTIEALERITSRHLRKWLGIPPSFSSVGLYGKTNKLQLPLSSLVEEFKTAKTRLVLTLRDSPDEQIREAGIVTRTGRKWSATETVSQAESSLMHKDIVGVTAVGRQGIGATKTLLWSQANQTERRALIQSEVRKEEENKRQARAVEMGAQGAWTTWETMDRKLTWEDIWKYEPLRLSFLLRSVHDLLPSPANLCRWGLITDPTCSLCKKPGTLEHVLSSCSTALTQGRYRWRHDNVLREVADWLEGERKKPRKSNLQAGHTNFVRPGETAKTEAPQKKSILDGATGWNMAVDLGKKLVFPGIVQTNLRPDIVLWSETGKKLVVIELTVPWETRCEEAYERKKAKYTDLLEQCRHRGWRTWLFPIEVGARGFCAQSVCRLMTAVGTTGRDRRRAIQKLSQAAERASSWLWLRREETSWMRSTSTP

SEQ ID NO: 7096 - protein, 1127 aa, Sinonovacula constricta
MESTRPAQPTMNPAPGTATCPCGKVCKNQRGLRIHQGKSGCQCVRPLEQRIASMASETREYSSQETTHSTVELSAQETARDATRDPVMDEDDPLLELLNYSQDTSSQPPEQEAIPDRPRPMPTTRTPKIKWPKASEKAPWKQFDEDLDIILESSMQGPVHRKLHTLTTLVYSVAKERFGIEEAKKRKEAPKPNRRQHRIENLRKEIRQLKKQYRDSSPMQRLGLSQLRDTLRTQLKSLRQAENTRRKARERTRKRAAFTANPFKFAKTLLDKERSGTLETPLEEVEKYLHDTHSDVNREDALGDCDRIDPALPPKTPLVITEPTLGEVKDVIKKARWGSAPGPNAIPYKVYKMCPLLLKRLWRLLKVVWRKGDVPEAWKEAEGIFTPKERNSKTVNQFRTISLLNVEGKIFFAILARRLTSFLTTNAYIDTSVQKGGVPGFSGCVEHTSAISQLIQEAKTGKKDLTVVWLDLANAYGSIPHQLIYTALQHYHVDNHVQKIITNYLDGIKLRFSVGDQLTKWQKLEKGIVTGCTVSVVLFVMGMNLLINAAIRETRGPKTESGIYLPSSRGFMDDLTLTTPTHVQARWMLTALTDVASWARMKFKAVKSRSLIIKKGKTTDRFVLRVQNEEIPSITKNPIKCLGKWFDTSLADKDNVKKLENQVEDGLKKIDRSNLPGKFKAWLYQHALLPRLIWPMMLYEVPSSTIEALERITSRHLRKWLGIPPSFSSVGLYRKTNKLQLPLSSQVEEFKTAKTRLVLTLRDSPDEQIREAGIVTRTGRKWSATETVSQAESSLMHKDIVGVTAVGRQGIGATKTLLWSQANQTERRALIQSEVRKEEENKRQARAVEMGAQGAWTTWETMDRKLTWEDIWKYEPLRLSFLLRSVHDLLPSPANLCRWGLITDPTCSLCKKPGTLEHVLSSCSTALTQGRYRWRHDNVLREVVDWLEGERKKPRKSNLQAGHINFVRPGETAKTEASQKKSILDGATGWNMAVDLGKKLVFPGIVQTNLRPDIVLWSETGKKLVVIELTVPWETRCEEAYERKKAKYTDLLEQCRHRGWRTWLFPIEVGARGFCAQPVCRLMTAVGTTGRDRRRAIQKLSQAAERASSWLWLRREETSWMRSTSTP

SEQ ID NO: 7097 - protein, 1007 aa, Sinonovacula constricta
MPTTRTPKIKWPKASEKAPWKQFDEDLDIILESSMQGPVHRKLHTLTTLVYSVAKERFGIEEAKKRKEAPKPNRRQHRIENLRKEIRQLKKQYRDSSPMQRLGLSQLRDTLRTQLKSLRQAENTRRKARERTRKRAAFTANPFKFAKTLLDKERSGTLETPLEEVEKYLHDTHSDVNREDALGDCDRIDPALPPKTPLVITEPTLGEVKDVIKKARWGSAPGPNAIPYKVYKMCPLLLKRLWRLLKVVWRKGDVPEAWKEAEGIFTPKERNSKTVNQFRTISLLNVEGKIFFAILARRLTSFLTTNAYIDTSVQKGGVPGFSGCVEHTSAISQLIQEAKTGKKDLTVVWLDLANAYGSIPHQLIYTALQHYHVDNHVQKIITNYLDGIKLRFSVGDQLTKWQKLEKGIVTGCTVSVVLFVMGMNLLINAAIRETRGPKTESGIYLPSSRGFMDDLTLTTPTHVQARWMLTALTDVASWARMKFKAVKSRSLIIKKGKTTDKFVLRVQNEEIPSITKNPIKCLGKWFDASLADKDNVKKLENQVEDGLKKIDRSNLPGKFKAWLYQHALLPRLIWPMMLYEVPSSTIEALERITSRHLRKWLGIPPSFSSVGLYGKTNKLQLPLSSLVEEFKTAKTRLVLTLRDSPDEQIREAGIVTRTGRKWSATETVSQAESSLMHKDIVGVTAVGRQGIGATKTLLWSQANQTERRALIQSEVRKEEENKRQARAVEMGAQGAWTTWETMDRKLTWEDIWKYEPLRLSFLLRSVHDLLPSPANLCRWGLITDPTCSLCKKPGTLEHVLSSCSTALTQGRYRWRHDNVLREVADWLEGERKKPRKSNLQAGHTNFVRPGETAKTEAPQKKSILDGATGWNMAVDLGKKLVFPGIVQTNLRPDIVLWSETGKKLVVIELTVPWETRCEEAYERKKAKYTDLLEQCRHRGWRTWLFPIEVGARGFCAQSVCRLMTAVGTTGRDRRRAIQKLSQAAERASSWLWLRREETSWMRSTSTP

SEQ ID NO: 7098 - protein, 1127 aa, Sinonovacula constricta
MESTRPAQSTMNPAPGTATCPCGKVCKNQRGLRIHQGKSGCQRVRPLEQRIASMASETREYSSQETTHSTVELSAQETERDATRDPVMDEDDPLLELLNYSQDTSSQPPEQEAIPDRPRPMPTTRTPKIKWPKASEKAPWKQFDEDLDIILESSMQGPVHRKLHTLTTLVYSVAKERFGIEEAKKRKEAPKPNRRQHRIENLRKEIRQLKKQYRDSSPMQRLGLSQLRDTLRTQLKSLRQAENTRRKARERTRKRAAFTANPFKFAKTLLDKERSGTLETPLEEVEKYLHDTHSDVNREDALGDCDRIDPALPPKTPLVITEPTLGEVKDVIKKARWGSAPGPNAIPYKVYKMCPLLLKRLWRLLKVVWRKGDVPEAWKEAEGIFTPKERNSKTVNQFRTISLLNVEGKIFFAILARRLTSFLTTNAYIDTSVQKGGVPGFSGCVEHTSAISQLIQEAKTGKKDLTVVWLDLANAYGSIPHQLIYTALQHYHVDNHVQKIITNYLDGIKLRFSVGDQLTKWQKLEKGIVTGCTVSVVLFVMGMNLLINAAIRETRGPKTESGIYLPSSRGFMDDLTLTTPTHVQARWMLTALTDVASWARMKFKAVKSRSLIIKKGKTTDRFVLRVQNEEIPSITKNPIKCLGKWFDASLADKDNVKKLENQVEDGLKKIDRSNLPGKFKAWLYQHALLPRLIWPMMLYEVPSSTIEALERITSRHLRKWLGIPPSFSSVGLYGKTNKLQLPLSSLVEEFKTAKTRLVLTLRDSPDEQIREAGIVTRTGRKWSATETVSQAEGSLMHKDIVGVTAVGRQGIGATKTLLWSQANQTERRALIQSEVRKEEENKRQARAVEMGAQGAWTTWETMDRKLTWEDIWKYEPLRLSFLLRSVHDLLPSPANLCRWGLITDPTCSLCKKPGTLEHVLSSCSTALTQGRYRWRHDNVLREVADWLEGERKKPRKSNLQAGHTNFVRPGETAKTEAPQKKSILDGATGWNMAVDLGKKLVFPGIVQTNLRPDIVLWSETGKKLVVIELTVPWETRCEEAYERKKAKYTDLLEQCRHRGWRTWLFPIEVGARGFCAQSVCRLMTAVGTTGRDRRRAIQKLSQAAERASSWLWLRREETSWMRSTSTP

SEQ ID NO: 7099 - protein, 1127 aa, Sinonovacula constricta
MESTRPAQSTMNPAPGTATCPCGKVCKNQRGLRIHQGKSGCQRVRPLEQRIASMASETREYSSQETTHSTVELSAQETARDATRDPVMDEDDPLLELLNYSQDTSSQPPEQEAIPDRPRPMPTTRTPKIKWPKASEKAPWKQFDEDLDIILESSMQGPVHRKLHTLTTLVYSVAKERFGIEEAKKRKEAPKPNRRQHRIENLRKEIRQLKKQYRDSSPMQRLGLSQLRDTLRTQLKSLRQAENTRRKARERTRKRAAFTANPFKFAKTLLDKERSGTLETPLEEVEKYLHDTHSDVNREDALGDCDRIDPALPPKTPLVITEPTLGEVKDVIKKARWGSAPGPNAIPYKVYKMCPLLLKRLWRLLKVVWRKGDVPEAWKEAEGIFTPKERNSKTVNQFRTISLLNVEGKIFFAILARRLTSFLTTNAYIDTSVQKGGVPGFSGCVEHTSAISQLIQEAKTGKKDLTVVWLDLANAYGSIPHQLIYTALQHYHVDNHVQKIITNYLDGIKLRFSVGDQLTKWQKLEKGIVTGCTVSVVLFVMGMNLLINAAIRETRGPKTESGIYLPSSRGFMDDLTLTTPTHVQARWMLTALTDVASWARMKFKAVKSRSLIIKKGKTTDRFVLRVQNEEIPSITKNPIKCLGKWFDASLADKDNVKKLENQVEDGLKKIDRSNLPGKFKAWLYQHALLPRLIWPMMLYEVPSSTIEALERITSRHLRKWLGIPPSFSSVGLYGKTNKLQLPLSSLVEEFKTAKTRLVLTLRDSPDEQIREAGIVTRTGRKWSATETVSQAESSLMHKDIVGVTAVGRQGIGATKTLLWSQANQTERRALIQSEVRKEEENKRQARAVEMGAQGAWTTWETMDRKLTWEDIWKYEPLRLSFLLRSVHDLLPSPANLCRWGLITDPTCSLCKKPGTLEHVLSSCSTALTQGRYRWRHDNVLREVADWLEGERKKPRKSNLQAGHTNFVRPGETAKTEAPQKKSILDGATGWNMAVDLGKKLVFPGIVQTNLRPDIVLWSETGKKLVVIELTVPWETRCEEAYERKKAKYTDLLEQCRHRGWRTWLFPIEVGARGFCAQSVCRLMTAVGTTGRDRRRAIQKLSQAAERASSWLWLRREETSWMRSTSTP

SEQ ID NO: 7100 - protein, 1195 aa, Sinonovacula constricta
MATRNRLVTLERQLTPGTDWNRGTRGSIPTCSLREKTPTDKLQTPRMKDTPRVFREGGEDERLTWTDFMESTRPAQSTMNPAPGTATCPCGKVCKNQRGLRIHQGKSGCQRVRPLEQRIASMASETREYSSQETTHSTVELSAQETARDATRDPVMDEDDPLLELLNYSQDTSSQPPEQEAIPDRPRPMPTTRTPKIKWPKASEKAPWKQFDEDLDIILESSMQGPVHRKLHTLTTLVYSVAKERFGIEEAKKRKEAPKPNRRQHRIENLRKEIRQLKKQYRDSSPMQRLGLSQLRDTLRTQLKSLRQAENTRRKARERTRKRAAFTANPFKFAKTLLDKERSGTLETPLEEVEKYLHDTHSDVNREDALGDCDRIDPALPPKTPLVFTEPTLGEVKDVIKKARWGSAPGPNAIPYKVYKMCPLLLKRLWRLLKVVWRKGDVPEAWKEAEGIFTPKERNSKTVNQFRTISLLNVEGKIFFAILARRLTSFLTTNAYIDTSVQKGGVPGFSGCVEHTSAISQLIQEAKTGKKDLTVVWLDLANAYGSIPHQLIYTALQHYHVDNHVQKIITNYLDGIKLRFSVGDQLTKWQKLEKGIVTGCTVSVVLFVMGMNLLINAAIRETRGPKTESGIYLPSSRGFMDDLTLTTPTHVQARWMLTALTDVASWARMKFKAVKSRSLIIKKGKTTDRFVLRVQNEEIPSITKNPIKCLGKWFDASLADKDNVKKLENQVEDGLKKIDRSNLPGKFKAWLYQHALLPRLIWPMMLYEVPSSTIEALERITSRHLRKWLGIPPSFSSVGLYGKTNKLQCPLSSLVEEFKTAKTRLVLTLRDSPDEQIREAGIVTRTGRKWSATETVSQAESSLMHKDIVGVTAVGRQGIGATKTLLWSQANQTERRALIQSEVRKEEENKRQARAVEMGAQGAWTTWETMDRKLTWEDIWKYEPLRLSFLLRSVHDLLPSPANLCRWGLITDPTCSLCKKPGTLEHVLSSCSTALTQGRYRWRHDNVLREVADWLEGERKKPRKSNLQAGRINFVRPGETAKTEAPQKKSILDGATGWNMAVDLGKKLVFPGIVQTNLRPDIVLWSETGKKLVVIELTVPWETRCEEAYERKKAKYTDLLEQCRHRGWRTWLFPIEVGARGFCAQSVCRLMTAVGTTGRDRRRAIQKLSQAAERASSWLWLRREETSWMRSTSTP

SEQ ID NO: 7101 - protein, 1127 aa, Sinonovacula constricta
MESTRPAQSTMNPAPGTATCPCGKVCKNQRGLRIHQGKSGCQRVRPLEQRIASMASETREYSSQETTHSTVELSAQETARDATWDPVMDEDDPLLELLNYSQDTSSQPPEQEAIPDRPRPMPTTRTPKIKWPKASEKAPWKQFDEDLDIILESSMQGPVHRKLHTLTTLVYSVAKERFGIEEAKKRKEAPKPNRRQHRIENLRKEIRQLKKQYRDSSPMQRLGLSQLRDTLRTQLKSLRQAENTRRKARERTRKRAAFTANPFKFAKTLLDKERSGTLETPLEEVEKYLHDTHSDVNREDALGDCDRIDPALPPKTPLVITEPTLGEVKDVIKKARWGSAPGPNAIPYKVYKMCPLLLKRLWRLLKVVWRKGDVPEAWKEAEGIFTPKERNSKTVNQFRTISLLNVEGKIFFAILARRLTSFLTTNAYIDTSVQKGGVPGFSGCVEHTSAISQLIQEAKTGKKDLTVVWLDLANAYGSIPHQLIYTALQHYHVDNHVQKIITNYLDGIKLRFSVGDQLTKWQKLEKGIVTGCTVSVVLFVMGMNLLINAAIRETRGPKTESGIYLPSSRGFMDDLTLTTPTHVQARWMLTALTDVASWARMKFKAVKSRSLIIKKGKTTDRFVLRVQNEEIPSITKNPIKCLGKWFDASLADKDNVKKLENQVEDGLKKIDRSNLPGKFKAWLYQHALLPRLIWPMMLYEVPSSTIEALERITSRHLRKWLGIPPSFSSVGLYGKTNKLQLPLSSLVEEFKTAKTRLVLTLRDSPDEQIREAGIVTRTGRKWSATETVSQAESSLMHKDIVGVTAVGRQGIGATKTLLWSQANQTERRALIQSEVRKEEENKRQARAVEMGAQGAWTTWETMDRKLTWEDIWKYEPLRLSFLLRSVHDLLPSPANLCRWGLITDPTCSLCKKPGTLEHVLSSCSTALTQGRYRWRHDNVLREVADWLEGERKKPRKSNLQAGHINFVRPGETAKTEASQKKSILDGATGWNMAVDLGKKLVFPGIVQTNLRPDIVLWSETGKKLVVIELTVPWETRCEEAYERKKAKYTDLLEQCRHRGWRTWLFPIEVGARGFCAQSVCRLMTAVGTTGRDRRRAIQKLSQAAERASSWLWLRREETSWMRSTSTP

SEQ ID NO: 7102 - protein, 919 aa, Cyclina sinensis
MKKQYRDSSPVQRLGLSQLRDTLRTQLKSLRRAENTRRKARERTRKRAAFTANPYKFAKTLLDKERSGTLETPLEEVEKFLHDTHSDVNREDALGDCDRIDPALPPETPLVTTEPTLGEVKDVVKKARWGSTPGPNAIPYKVYKMCPLLLKRLWRLLKVVWRKGEVPEAWKEAEGIFTPKERNSKTVNQFRTISLLNVEGKIFFAILARRLTSFLTTNAYIDTSVQKGGVPGFSGCVEHTSAITQLIQEAKTGKKDLTVVWLDLANAYGSIPHQLIYTALQHYHVDNHVQKIITSYLDGIKLRFSVGDQLTKWQKLEKGIVTGCTVSVVLFVMGMNLLINAAIRETCGPKTESGIYLPSSRGFMDDLTLTTPTHVQARWMLTALTDVALWARMKFKAVKSRSLIIKKGKTTDRFVLRVQNEEIPSITKNPIKCLGKWFDASLVDKDNVKKLENQVEDGLKKIDRSNLPGKFKAWLYQHALLPRLIWPMMLYEVPSSTIEALERITSRHLRKWLGIPPSFSSVGLYGKTNKLQLPLSSLVEEFKTAKTRLVLTLRDSPDEQIREAGIVTRTGRKWSATETVSQAESSLMHKDIVGVTAVGRQGIGATKTLLWSQANQTERRALIQSEVRKEEENKRQARAVEMGAQGAWTTWETMERKLTWEDIWKYEPLRLSFLLRSVHDLLPSPANLCRWGLITDPTCSLCKKPGTLEHVLSSCSTALTQGRYRWRHDNVLREVANWLEGEKKKPRRSNSQAGHINFVRPGETAKTEASQKKSILDGATGWNMSVDLGKKLVFPGIVQTNLRPDIVLWSETGKKLVVIELTVPWETRCEEAYERKKAKYTELLEQCRHQGWRTWLFPIEVGARGFCAQSVCRLMTAVGTTGRDRRRAIQKLSQAAERASSWLWLRREETNWMRSTSTP

SEQ ID NO: 7103 - protein, 1127 aa, Sinonovacula constricta
MESTRPAQSTMNPAPGTATCPCGKVCKNQRGLRIHQGKSGCQRVRPLEQRIASMASETREYSSQETTHSTVELSAQETARDATRDPVMDEDDPLLELLNYSQDTSSQPPEQEAIPDRPRPMPTTRTPKIKWPKASEKAPWKQFDEDLDIILESSMQGPVHRKLHTLTTLVYSVAKERFGIEEAKKRKEAPKPNRRQHRIENLRKEIRQLKKQYRDSSPMQRLGLSQLRDTLRTQLKSLRQAENTRRKARERTRKRAAFTANPFKFAKTLLDKERSGTLETPLEEVEKYLHDTHSDVNREDALGDCDRIDPALPPKTPLVITEPTLGEVKDVIKKARWGSAPGPNAIPYKVYKMCPLLLKRLWRLLKVVWRKGDVPEAWKEAEGIFTPKERNSKTVNQFRTISLLNVEGKIFFAILARRLTSFLTTNAYIDTSVQKGGVPGFSGCVEHTSAISQLIQEAKTGKKDLTVVWLDLANAYGSIPHQLIYTALQHYHVDNHVQKIITNYLDGIKLRFSVGDQLTKWQKLEKGIVTGCTVSVVLFVMGMNLLINAAIRETRGPKTESGIYLPSSRGFMDDLTLTTPTHVQARWMLTALTDVASWARMKFKAVKSRSLIIKKGKTTDRFVLRVQNEEIPSITKNPIKCLGKWFDASLADKDNVKKLENQVEDGLKKIDRSNLPGKFKAWLYQHALLPRLIWPMMLYEVPSSTIEALERITSRHLRKWLGIPPSFSSVGLYGKTNKLQLPLSSLVEEFKTAKTRLVLTLRDSPDEQIREAGIVTRTGRKWSATETVSQAESSLMHKDIVGVTAVGRQGIGATKTLLWSQANQTERRALIQSEVRKEEENKRQARAVEMGAQGAWTTWETMDRKLTWEDIWKYEPLRLSFLLRSVHDLLPSPANLCRWGLITDPTCSLCKKPGTLEHVLSSCSTALTQGRYRWRHDNVLREVADWLEGERKKPRKSNLQAGHINFVRPGETAKTEASQKKSILDGATGWNMAVDLGKKLVFPGIVQTNLRPDIVLWSETGKKLVVIELTVPWETRCEEAYERKKAKYTDLLEQCRHRGWRTWLFPIEVGARGFCAQSVCRLMTAVGTTGRDRRRAIQKLSQAAERASSWLWLRREETSWMRSTSTP

SEQ ID NO: 7104 - protein, 1124 aa, Dreissena rostriformis
MESTRPAQPTTNRDGSVTCNCGKVCKNQRGLRIHQGKSDCQRVRSQGQRIASLASETQEYSSLDSTHSTEELSVQETSQDVFRNPEEDDDPLLELLQTQSSPEASEATDPDRPQQDTATRTRKPRIKWPKASDKTSWTQLDEDLENILEASMQGPVDRKLNTLTTLIYAVGKERFGLEEERVRKEPPRPNRRQVRIQNLRRELKQLRRRYCASSPTERIGLAQLRDTVRTQLTSLRKAENSRRKTRERAKKRAAFTANPYKFARSLLDKERSGKLETPLEEIENFLHVTHSDPNREDVLGDCDRIDPAEEPEKQLNATEPTLGEVKEAVKKARAASAPGPNAIPYKVYKMCPLLLKRLWRLLKVVWRKGDVPEAWKEAEGIFTPKERNSKTVNQFRTISLLNVEGKIFFAILARRLTSFLTGNAYINTSVQKGGVPGFSGCIEHTSAITQLISEAKKGRKDLTVVWLDLANAYGSIPHQLIYTALRHYHVDGHIQKIITSYLDGIRLRFTVGDQLTRWQKLEKGIVTGCTVSVVLFIMGMNLLINAAQRETRGPKTESGIYLPSSRGFMDDLTLTTTTHVQARWMLTALTDVASWARMKFKAAKSRSLVIKKGQTTERFKLYVQNEEIPSIVTSPIKCLGKWFDASLQDRDNVKNLKQQVEEGLKKIDRCGLPGKFKAWLYQHALLPRLIWPLMLYEVPSTTVEALERITSRHLRKWLGVPPSFTSIGLYGKSNKLQLPLSSLVEEFKTAKARLVLTLRDSPDEFIREAGIQTRTSRKWSATESVSQAENALKHKDIVGVTAVGREGIGARKVVLWSRSDQKERRAMIQSEVRRAEENARQARAVEMGAQGAWTTWNTADRKLTWGDIWKYEPFRFSFLLRSVYDLLPSPANLCRWGLTAEPKCSLCDRVGTLEHVLSSCSTALTQGRYRWRHDLVLRELADWLEKERKKEHGNHPRHGHIAFVKSGETVKTQKPTKASILDGSRDWKMEVDLDRRLVFPNVVQTTLRPDIVLWSETGKKLVTIELTVPWEARCEEAYERKKAKYTELMDLCKQQGWRTWLFPVEVGVRGFCSQSVHRLMTALGTTGRERRVAIQRLSQAAERASSWLWLRREEKSWRQSTNTQ

SEQ ID NO: 7105 - protein, 1130 aa, Sinonovacula constricta
MDLTESTRTAQTTTNAAPGTVTCSCGKVCKNQHGLRIHQGKSGCQRARPRAQRIAGLASETQEYPSLDSNHSTEELSVHETTQNVFQDPEVEEEDPLLDLLKSPGDGSQEAEQEAVLDRRQDPATSQRKPRIKWPKAQDKKSWKLLDEELDIILEAAIQGPVNQKLQTLTTIAYSVAKERFGIDEAKVHREPPKPNRRQSRIENLRRELRQLKRRYRQSPPTERPGLSQLRDTVRTQLKSLRKAENTRNKARQRTKKRLAFTANPYKFARNLLDKERSGTLETPVEEVERYLQETHSDPSREVVLGDCERIEPAAPPETELLTSEPTFGEVKEVIKKARFGSAPGPNAIPYKVYKMCPLLQKRLWRLLKVVWRKGEVPEAWKEAEGIFTPKERNSKNVNQFRTISLLNVEGKIFFAILARRLTSFLTANKYINTSVQKGGVPGFSGCVEHTSAITQLIREAKAGKKDLTVVWLDLANAYGSIPHQLIYTALQHYHVPNHVQKIISNYLDGIKLRFSVGDQLTGWQKLEKGIVTGCTVSVVLFIMGMNLMINAALRETRGPKTETWIRLPSSRGFMDDLTLTTTTHVQARWMLTALTDVASWARMKFKAAKSRSLIIKKGKTTDGFTLRVQNEEIPSITKSPIKCLGKWFDASLQDRDNVKRLVTQVEDGLKKIDRSNLPGKYKAWLYQHALLPRLVWPMMLYEVPSSTIESLERITSRHLRKWLGVPPSFSSIGLYGKSNQLQLPLSSLVEEFKTSKTRLVLTLRDSPDEQIREAGIVTRTGRKWSATEAVSQAESALKHKDIVGMTAVGRQGIGATKTLLWSQAAQNERRTMIQQEVRRTEENKRQARAVEMGAQGAWTTWDTIDRKLTWEDIWKYEPLRLSFLLRSVHDLLPSPANLCRWGLSTDPTCKLCDRPGTLEHVLSSCSTALTQGRFRWRHDNVLREVADWLEIERKKDRRSNPQQHHINFVKPGEATKPQSTKKTSILDGTTGWNMEVDLGKKLVFPGIVQTNLRPDIILWSETGKKLIMIELTVPWETRCEEAYERKKAKYTELLIQCRERGYRTWLFPIEVGARGFCSQSVCRLMAEIGTTGRDRRRTVQRLSQAAERASSWLWLRREEKSWKLSTSTP

SEQ ID NO: 7106 - protein, 1127 aa, Cyclina sinensis
MESTRPAQSTTNSAPGTVTCPCGKVCKNQRGLRIHQGKSGCQRVRPLEQRIASMASETREYSSQETTHSTDELSAQETAHDATQDPMMDEDDPLLELLNYSQDTSSQPQEQEAVPDRPRPMPTTRTPKIKWPKASEKAPWKQFDEDLEIILESSMQGPVHRKLHTLSTLVYSVARERFGIEETKKRKEAPKPNRRQHRIENLRKEIRQLKKQYRDSSPVQRLGLSQLRDTLRTQLKSLRRAENTRRKARERTRKRAAFTANPYKFAKTLLDKERSGTLETPLEEVEKFLHDTHSDVNREDALGDCDRIDPALPPETPLVTTEPTLGEVKDVVKKARWGSTPGPNAIPYKVYKMCPLLLKRLWRLLKVVWRKGEVPEAWKEAEGIFTPKERNSKTVNQFRTISLLNVEGKIFFAILARRLTSFLTTNAYIDTSVQKGGVPGFSGCVEHTSAITQLIQEAKTGKKDLTVVWLDLANAYGSIPHQLIYTALQHYHVDNHVQKIITSYLDGIKLRFSVGDQLTKWQKLEKGIVTGCTVSVVLFVMGMNLLINAAIRETRGPKTESGIYLPSSRGFMDDLTLTTPTHVQARWMLTALTDVALWARMKFKAAKSRSLIIKKGKTTDRFVLRVQNEEIPSITKNPIKCLGKWFDASLADKDNVKKLENQVEDGLKKIDRSNLPGKFKAWLYQHALLPRLIWPMMLYEVPSSTIEALERITSRHLRKWLGIPPSFSSVGLYGKTNKLQLPLSSLVEEFKTAKTRLVLTLRNSPDEQIREAGIVTRTGRKWSATETVSQAESSLMHKDIVGVTAVGRQGIGATKTLLWSQANQTERRALIQSEVRKEEENKRQARAVEMGAQGAWTTWETMERKLTWEDIWKYEPLRLSFLLRSVHDLLPSPANLCRWGLITDPTCSLCKKPGTLEHVLSSCSTALTQGRYRWRHDNVLREVANWLEGEKKKPRRSNSQAGHINFVRPGETAKTEASQKKSILDGATGWNMSVDLGKKLVFPGIVQTNLRPDIVLWSETGKKLVVIELTVPWETRCEEAYERKKAKYTELLEQCRHQGWRTWLFPIEVGARGFCAQSVCRLMTAVGTTGRDRRRAIQKLSQAAERASSWLWLRREETNWMRSTSTP

SEQ ID NO: 7107 - protein, 1130 aa, Sinonovacula constricta
MDLTESTRTAQTTTNAAPGTVTCSCGKVCKNQHGLRIHQGKSGCQRARPRAQRIAGLASETQEYPSLDSNHSTEELSVHETTQNVFQDPEVEEEDPLLDLLKSPGDGSQEAEQEAVLDRRQDPATSQRKPRIKWPKAQDKKSWKLLDEELDIILEAAMQGPVNQKLQTLTTIAYSVAKERFGIDEAKVHREPPKPNRRQSRIENLRRELRQLKRRYRQSPPTERPGLSQLRDTVRTQLKSLRKAENTRNKARQRTKKRLAFTANPYKFARNLLDKERSGTLETPVEEVERYLQETHSDPSREVVLGDCERIEPAAPPETELLTSEPTFGEVKEVIKKARFGSAPGPNAIPYKVYKMCPLLQKRLWRLLKVVWRKGEVPEAWKEAEGIFTPKERNSKNVNQFRTISLLNVEGKIFFAILARRLTSFLTANKYINTSVQKGGVPGFSGCVEHTSAITQLIREAKAGKKDLTVVWLDLANAYGSIPHQLIYTALQHYHVPNHVQKIISNYLDGIKLRFSVGDQLTGWQKLEKGIVTGCTVSVVLFIMGMNLMINAALRETRGPKTETWIRLPSSRGFMDDLTLTTTTHVQARWMLTALTDVASWARMKFKAAKSRSLIIKKGKTTDGFTLRVQNEEIPSITKSPIKCLGKWFDASLQDRDNVKRLVTQVEDGLKKIDRSNLPGKYKAWLYQHALLPRLVWPMMLYEVPSSTIESLERITSRHLRKWLGVPPSFSSIGLYGKSNQLQLPLSSLVEEFKTSKTRLVLTLRDSPDEQIREAGIVTRTGRKWSATEAVSQAESALKHKDIVGMTAVGRQGIGATKTLLWSQAAQNERRTMIQQEVRRTEENKRQARAVEMGAQGAWTTWDTIDRKLTWEDIWKYEPLRLSFLLRSVHDLLPSPANLCRWGLSTDPTCKLCDRPGTLEHVLSSCSTALTQGRFRWRHDNVLREVADWLEIERKKDRRSNPQQHHINFVKPGEATKPQSTKKTSILDGTTGWNMEVDLGKKLVFPGIVQTNLRPDIILWSETGKKLIMIELTVPWETRCEEAYERKKAKYTELLIQCRERGYRTWLFPIEVGARGFCSQSVCRLMAEIGTTGRDRRRTVQRLSQAAERASSWLWLRREEKSWKLSTSTP

SEQ ID NO: 7108 - protein, 1012 aa, Dreissena rostriformis
MKDTAIRTRKDRIKWPNASDKKSWKKLNEDLDIILETSLQGPVDRKLTNLAALIYSVGRERFGLGEGISRKEPPKPNRRQTRIQNLRHELRQLTSRYRTSSPTERTGLTQLRQTLRSELMSLRKAENTRRKARERAKKRAAFTANPYKFARSLLDKERSGRLEAPLEEVERYLQSTHSDPNREEPLGNCERIDPAKEPEKPLDVSEPTLREVKDTIRKARSASAPGPNAIPYKVYKMCPLLLKRLWRLLRVVWRKGEIPDAWKEAEGVFTPKERNSKTVNQFRTISLLNVEGKIFFAILARRLTSFLTENKFIDTSVQKGGVPGFSGCVEHTSAITQLIREAKEGRKDLTIVWLDLANAYGSIPHQLIYTALQHYHVDCHVQKIITSYIDGIRLRFAVGDQLTGWHKLEKGIVTGCTVSVVLFIMGMNLLINAAQRETRGPKTESGIYLPSSRGFMDDLTLSTTTHVQARWMLTALTDVASWGRMQFKAVKSRALVIKKGQTTERFKLYIQNEEIPSIVQSPIKCLGKWFDSSLRDRDNAKKLKQQVEDGLKKIDRCGLPGKFKAWLYQHALLPRLLWPLMLYEVASTTVEALERTTSRHLRKWLGVPPSFTRIGLYGKTNKLQLPLSSLVEEFKIAKTRLVLTLRDSPDECIRGAGIETRTSKKWSATESVSQAESNLKHKDIVGVTAVGRQGIGATKTVLWSRSDQKERRAMIQSEVRREEESARQARAVEMGAQGTWTTWNTTDRKLTWGEIWKYEPLRFSFLLRSVYDLLPSPANLCRWGLTTDPKCSLCDRTGTLEHVLSSCPTALTQGRYRWRHDSVLRELADWLERERKKERGNHPAHKYISFVKTGETNKAQKTHRSSILDGTTGWNMEVDLGKRLVFPDVVQTTLRPDVVLWSETGKKLIVIELTVPWETRCEEAYERKKAKYTELLDLCKQRGWRTWLFPVEVGARGFCSQSVCRLMTAVGANGRDRRGAIQRLSQAAERASSWLWLRREEKSWKHQPTHSA

SEQ ID NO: 7109 - protein, 1127 aa, Sinonovacula constricta
MESTRPAQSTMNPAPGTATCPCGKVCKNQRGLRIHQGKSGCQRVRPLEQRIASMASETREYSSQETTHSTVELSAQETARDATRNPVMDEDDPLLELLNYSQDTSSQPPEQEAIPDRPRPMPTTRTPKIKWPKASEKAPWKQFDEDLDIILESSMQGPVHRKLHTLTTLVYSVAKERFGIEEVKKRKEAPKPNRRQHRIENLRKEIRQLKKQYRDSSPMQRLGLSQLRDTLRTQLKSLRQAENTRRKARERTRKRAAFTANPFKFAKTLLDKERSGTLETPLEEVEKYLHDTHSDVNREDALGDCDRIDPALPPKTPLVITEPTLGEVKDVIKKARWGSAPGPNAILYKVYKMCPLLLKRLWRLLKVVWRKGDVPEAWKEAEGIFTPKERNSKTVNQFRTISLLNVEGKIFFAILARRLTSFLTTNAYIDTSVQKGGVPGFSGCVEHTSAISQLIQEAKTGKKDLTVVWLDLANAYGSIPHQLIYTALQHYHVDNHVQKIITNYLDGIKLRFSVGDQLTKWQKLEKGIVTGCTVSVVLFVMGMNLLINAAIRETRGPKTESGIYLPSSRGFMDDLTLTTPTHVQARWMLTALTDVASWARMKFKAVKSRSLIIKKGKTTDRFVLRVQNEEIPSITKNPIKCLGKWFDASLADKDNVKKLENQVEDGLKKIDRSNLPGKFKAWLYQHALLPRLIWPMMLYEVPSSTIEALERITSRHLRKWLGIPPSFSSVGLYGKTNKLQLPLSSLVEEFKTAKTRLVLTLRDSPDEQIREAGIVTRTGRKWSATETVSQAESSLMHKDIVGVTAVGRQGIGATKTLLWSQANQTERRALIQSEVRKEEENKRQARAVEMGAQGAWTTWETMDRKLTWEDIWKYEPLRLSFLLRSVHDLLPSPANLCRWGLITDPTCSLCKKPGTLEHVLSSCSTALTQGRYRWRHDNVLREVADWLEGERKKPRKSNLQAGHINFVRPGETAKTEASQKKSILDGATGWNMAVDLGKKLVFPGIVQTNLRPDIVLWSETGKKLVVIELTVPWEMRCEEAYERKKAKYTDLLEQCRHRGWRTWLFPIEVGARGFCAQSVCRLMTAVGTTGRDRRRAIQKLSQAAERASSWLWLRREETSWMRSTSTP

SEQ ID NO: 7110 - protein, 1127 aa, Sinonovacula constricta
MESTRPAQSTMNPAPGTATCPCGKVCKNQRGLRIHQGKSGCQRVRPLEQRIASMASETREYSSQETTHSTVELSAQETARDATRDPVMDEDDPLLELLNYSQDTSSQPPEQEAIPDRPRPMPTTRTPKIKWPKASEKAPWKQFDEDLDIILEPSMQGPVHRKLHTLTTLVYSVAKERFGIEEAKKRKEAPKPNRRQHRIENLRKEIRQLKKQYRDSSPMQRLGLSQLRDTLRTQLKSLRQAENTRRKARERTRKRAAFTANPFKFAKTLLDKERSGTLETPLEEVEKYLHDTHSDVNREDALGDCDRIDPALPPKTPLVITEPTLGEVKDVIKKARWGSAPGPNAIPYKVYKMCPLLLKRLWRLLKVVWRKGDVPEAWKEAEGIFTPKERNSKTVNQFRTISLLNVEGKIFFAILARRLTSFLTTNAYIDTSVQKGGVPGFSGCVEHTSAISQLIQEAKTGKKDLTVVWLDLANAYGSIPHQLIYTALQHYHVDNHVQKIITNYLDGIKLRFSVGDQLTKWQKLEKGIVTGCTVSVVLFIMGMNLLINAAIRETRGPKTESGIYLPSSRGFMDDLTLTTPTHVQARWMLTALTDVASWARMKFKAVKSRSLIIKKGKTTDRFVLRVQNEEIPSITKNPIKCLGKWFDASLADKDNVKKLENQVEDGLKKIDRSNLPGKFKAWLYQHALLPRLIWPMMLYEVPSSTIEALERITSRHLRKWLGIPPSFSSVGLYGKTNKLQLPLSSLVEEFKTAKTRLVLTLRDSPDEQIREAGIVTRTGRKWSATETVSQAESSLMHKDIVGVTAVGRQGIGATKTLLWSQANQTERRALIQSEVRKEEENKRQARAVEMGAQGAWTTWETMDRKLTWEDIWKYEPLRLSFLLRSVHDLLPSPANLCRWGLITDPTCSLCKKPGTLEHVLSSCSTALTQGRYRWRHDNVLREVADWLEGERKKPRKSNLQAGHINFVRPGETAKTEASQKKSILDGATGWNMAVDLGKKLVFPGIVQTNLRPDIVLWSETDKKLVVIELTVPWETRCEEAYERKKAKYTDLLEQCRHRGWRTWLFPIEVGARGFCAQSVCRLMTAVGTTGRDRRRAIQKLSQAAERASSWLWLRREETSWMRSTSTP

SEQ ID NO: 7111 - protein, 1041 aa, Sinonovacula constricta
MESTRPAQSTMNPAPGTATCPCGKVCKNQRGLRIHQGKSGCQRVRPLEQRIASMASETREYSSQETTHSTVELSAQETARDATRDPVMDEDDPLLELLNYSQDTSSQPPEQEAIPDRPRPMPTTRTPKIKWPKASEKAPWKQFDEDLDIILESSMQGPVHRKLHTLTTLVYSVAKERFGIEEAKKRKEAPKSNRRQHRIENLRKEIRQLKKQYRDSSPMQRLGLSQLRDTLRTQLKSLRQAENTRRKARERTRKRAAFTANPFKFAKTLLDKERSGTLETPLEEVEKYLHDTHPDVNREDALGDCDRIDPALPPKTPLVITEPTLGEVKDVIKKARWGSAPGPNAIPYKVYKMCPLLLKRLWRLLKVVWRKGDVPEAWKEAEGIFTPKERNSKTVNQFRTISLLNVEGKIFFAILARRLTSFLTTNAYIDTSVQKGGVPGFSGCVEHTSAISRLIQEAKTGKKDLTVVWLDLANAYGSIPHQLIYTALQHYHVDNHVQKIITNYLDSIKLRFSVGDQLTKWQKLEKGIVTGCTVSVVLFVMGMNLLINAAIRETRGPKTESGIYLPSSRGFMDDLTLTTPTHVQARWMLTALTDVASWARMKFKAVKSRSLIIKKGKTTDRFVLRVQNEEIPSITKNPIKCLGKWFDASLADKDNVKKLENQVEDGLKKIDRSNLPGKFKAWLYQHALLPRLIWPMMLYEVPSSTIEALERITSRHLRKWLGIPPSFSSVGLYGKTNKLQLPLSSLVEEFKTAKTRLVLTLRDSPDEQIREAGIVTRTGRKWSATETVSQAESSLMHKDIVGVTAVGRQGIGATKTLLWSQANQTERRALIQSEVRKEEENKRQARAVEMGAQGAWTTWETMDRKLTWEDIWKYEPLRLSFLLRSVHDLLPSPANLCRWGLITDPTCSLCKKPGTLEHVLSSCSTALTQGRYRWRHDNVLREVADWLEGERKKPRKSNLQAGHTNFVRPGETAKTEAPQKKSILDGATGWNMAVDLGKKLVFPGIVQTNLRPDIVLWSETGKKLVVIELTVPWETRCEEAY

SEQ ID NO: 7112 - protein, 1127 aa, Cyclina sinensis
MESTRPAQSTTNSAPGTVTCPCGKVCKNQRGLRIHQGKSGCQRVRPLEQRIASMASETREYSSQETTHSTDELSAQETAHDATQDPMMDEDDPLLELLNYSQDTGSQPQEQEAIPDRPRPMPTTRTPKIKWPKASEKAPWKQFDEDLEIILESSTQGPVYRKLHTLSTLVYSVARERFGIEETKKRKEAPKPNRRQHRIENLRKEIRQLKKQYRDSSPVQRLGLSQLRDTLRTQLKSLRRAENTRRKARERTRKRAAFTANPYKFAKTLLDKERSGTLETPLEEVEKFLHDTHSDVNREDALGDCDRIDPALPPETPLVTTEPTLGEVKDVVKKARWGSTPGPNAIPYKVYKMCPLLLKRLWRLLKVVWRKGEVPEAWKEAEGIFTPKERNSKTVNQFRTISLLNVEGKIFFAILARRLTSFLTTNAYIDTSVQKGGVPGFSGCVEHTSAITQLIQEAKTGKKDLTVVWLDLANAYGSIPHQLIYTALQHYHVDNHVQKIITSYLDGIKLRFSVGDQLTKWQKLEKGIVTGCTVSVVLFVMGMNLLINAAIRETRGPKTESGIYLPSSRGFMDDLTLTTPTHVQARWMLTALTDVALWARMKFKAAKSRSLIIKKGKTTDRFVLRVQNEEIPSITKNPIKCLGKWFDASLVDKDNVKKLENQVEDGLKKIDRSNLPGKFKAWLYQHALLPRLIWPMMLYEVPSSTIEALERITSRHLRKWLGIPPSFSSVGLYGKTNKLQLPLSSLVEEFKTAKTRLVLTLRDSPDEQIREAGIVTRTGRKWSATETVSQAESSLMHKDIVGVTAVGRQGIGATKTLLWSQANQTERRALIQSEVRKEEENKRQARAVEMGAQGAWTTWETMERKLTWEDIWKYEPLRLSFLLRSVHDLLPSPANLCRWGLITDPTCSLCKKPGTLEHVLSSCSTALTQGRYRWRHDNVLREVANWLEGEKKKPRRSNSQAGHINFVRPGETAKTEASQKKSILDGATGWNMSVDLGKKLVFPGIVQTNLRPDIVLWSETGKKLVVIELTVPWETRCEEAYERKKAKYTELLEQCRHQGWRTWLFPIEVGARGFCAQSVCRLMTAVGTTGRDRRRAIQKLSQAAERASSWLWLRREETNWMRSTSTP

SEQ ID NO: 7113 - protein, 1130 aa, Sinonovacula constricta
MDLTESTRTAQTTTNAAPGTVTCSCGKVCKNQHGLRIHQGKSGCQCARPRAQRIAGLASETQEYPSLDSNHSTEELSVHETTQNVFQDPEVEEEDPLLDLLKSPGDGSQEAEQEAVLDRPQDPATSQRKPRIKWPKAQDKKSWKLLDEELDIILEAAMQEPVNRKLQTLTTIAYSVAKERFGIDEAKVHREPPKPNRRQSRIENLRRELRQLKRRYRQSPPTERPGLSQLRDTVRTQLKSLRKAENTRNKARQRTKKRLAFTANPYKFARNLLDKERSGTLETPVEEVERYLQETHSDPSREVVLGDCERIEPAAPPETELLTSEPTFGEVKEVIKKARFGSAPGPNAIPYKVYKMCLLLQKRLWRLLKVVWRKGEVPEAWKEAEGIFTPKERNSKNVNQFRTISLLNVEGKIFFAILARRLTSFLTANKYINTSVQKGGVPGFSGCVEHTSAITQLIREAKAGKKDLTVVWLDLANAYGSIPHQLIYTALQHYHVPNHVQKIISNYLDGIKLRFSVGDQLTGWQKLEKGIVTGCTVSVVLFIMGMNLMINAALRETRGPKTETGIRLPSSRGFMDDLTLTTTTHVQARWMLTALTDVASWARMKFKAAKSRSLIIKKGKTTDGFTLRVQNEEIPSITKSPIKCLGKWFDASLQDRDNVKRLVTQVEDGLKKIDRSNLPGKYKAWLYQHALLPRLVWPMMLYEVPSSTIESLERITSRHLRKWLGVPPSFSSIGLYGKSNQLQLPLSSLVEEFKTSKTRLVLTLRDSPDEQIREAGIVTRTGRKWSATETVSQAESALKHKDIVGMTAVGRQGIGATKTLLWSQAAQNERRTMIQQEVRRTEENKRQARAVEMGAQGAWTTWDTIDRKLTWEDIWKYEPLRLSFLLRSVHDLLPSPANLCLWGLSTDPTCKLCDRPGTLEHVLSSCSTALTQGRFRWRHDNVLREVADWLEIERKKDRRSNPQQHHINFVKPGEATKPQSTKKTSILDGTTGWNMEVDLGKKLVFPGIVQTNLRPDIILWSETGKKLIMIELTVPWETRCEEAYERKKAKYTELLIQCRERGYRTWLFPIEVGARGFCSQSVCQLMAEIGTTGRDRRRTVQRLSQAAERASSWLWLRREEKSWKLSTSTP

SEQ ID NO: 7114 - protein, 1127 aa, Sinonovacula constricta
MESTRPAQSTMNPAPGTATCPCGKVCKNQRGLRIHQGKSGCQRVRPLEQRIASMASETREYSSQETTHSTVELSAQETARDATRDPVMDEDDPLLELLNYSQDTSSQPPEQEAIPDRPRPMPTTRTPKIKWPKASEKAPWKQFDEDLDIILESSMQGPVHRKLHTLTTLVYSVAKERFGIEEAKKRKEAPKPNRRQHRIENLRKEIRQLKKQYRDSSPMQRLGLSQLRDTLRTQLKSLRQAENTRRKARERTRKRAAFTANPFKFAKTLLDKERSGTLETPLEEVEKYLHDTHSDVNREDALGDCDRIDPALLPKTPLVITEPTLGEVKDVIKKARWGSAPGPNAIPYKVYKMCPLLLKRLWRLLKVVWRKGDVPEAWKEAEGIFTPKERNSKTVNQFRTISLLNVEGKIFFAILARRLTSFLTTNAYIDTSVQKGGVPGFSGCVEHTSAISQLIQEAKTGKKDLTVVWLDLANAYGSIPHQLIYTALQHYHVDNHVQKIITNYLDGIKLRFSVGDQLTKWQKLEKGIVTGCTVSVVLFVMGMNLLINAAIRETRGPKTESGIYLPSSRGFMDDLTLTTPTHVQARWMLTALTDVASWARMKFKAVKSRSLIIKKGKTTDRFVLRVQNEEIPSITKNPIKCLGKWFDASLADKDNVKKLENQVEDGLKKIDRSNLPGKFKAWLYQHALLPRLIWPMMLYEVPSSTIEALERITSRHLRKWLGIPPSFSSVGLYGKTNKLQLPLSSLVEEFKTAKTRLVLTLRDSPDEQIREAGIVTRTGRKWSATETVSQAESSLMHKDIVGVTAVGRQGIGATKTLLWSQANQTERRALIQSEVRKEEENKRQARAVEMGAQGAWTTWETMDRKLTWEDIWKYEPLRLSFLLRSVHDLLPSPANLCRWGLITDPTCSLCKKPGTLEHVLSSCSTALTQGRYRWRHDNVLREVADWLEGERKKPRKSNLQAGHTNFVRPGETAKTEAPQKKSILDGATGWNMAVDLGKKLVFPGIVQTNLRPDIVLWSETGKKLVVIELTVPWETRCEEAYERKKAKYTDLLEQCRHRGWRTWLFPIEVGARGFCAQSVCRLMTAVGTTGRDRRRAIQKLSQAAERASSWLWLRREETSWMRSTSTP

SEQ ID NO: 7115 - protein, 1124 aa, Dreissena rostriformis
MESTRPAQPTTNRDGSVTCNCGKVCKNQRGLRIHQGKSDCQRVRSQGQRIASLASETQEYSSLDSTHSTEELSVQETSQDVFRNPEEDDDPLLELLQTQSSPEASEATDPDRPQQDTATRTRKPRIKWPKASDKTSWTQLDEDLENILEASMQGPVDRKLNTLTTLIYSVGKERFGLEEERVRKEPPRPNRRQVRIQNLRRELKQLRRRYCASSPTERIGLAQLRDTVRTQLTSLRKAENSRRKTRERAKKRAAFTANPYKFARSLLDKERSGKLETPLEEIENFLHVTHSDPNREDVLGDCDRIDPAEEPEKQLNATEPTLGEVKEAVKKARAASAPGPNAIPYKVYKMCPLLLKRLWRLLKVVWRKGDVPEAWKEAEGIFTPKERNSKTVNQFRTISLLNVEGKIFFAILARRLTSFLTGNAYINTSVQKGGVPGFSGCIEHTSAITQLISEAKKGRKDLTVVWLDLANAYGSIPHQLIYTALRHYHVDGHIQKIITSYLDGIRLRFTVGDQLTRWQKLEKGIVTGCTVSVVLFIMGMNLLINAAQRETRGPKTESGIYLPSSRGFMDDLTLTTTTHVQARWMLTALTDVASWARMKFKAAKSRSLVIKKGQTTERFKLYVQNEEIPSIVTSPIKCLGKWFDASLQDRDNVKNLKQQVEEGLKKIDRCGLPGKFKAWLYQHALLPRLIWPLMLYEVPSTTVEALERITSRHLRKWLGVPPSFTSIGLYGKSNKLQLPLSSLVEEFKTAKARLVLTLRDSPDEFIREAGIQTRTSRKWSATESVSQAENALKHKDIVGVTAVGREGIGARKVVLWSRSDQKERRAMIQSEVRRAEENARQARAVEMGAQGAWTTWNTADRKLTWGDIWKYEPFRFSFLLRSVYDLLPSPANLCRWGLTAEPKCSLCDRVGTLEHVLSSCSTALTQGRYRWRHDLVLRELADWLEKERKKEHGNHPRHGHIAFVKSGETVKTQKPTKASILDGSRDWKMEVDLDRRLVFPNVVQTTLRPDIVLWSETGKKLVTIELTVPWEARCEEAYERKKAKYTELMDLCKQQGWRTWLFPVEVGVRGFCSQSVHRLMTALGTTGRERRVAIQRLSQAAERASSWLWLRREEKSWRQSTNTQ

SEQ ID NO: 7116 - protein, 1007 aa, Sinonovacula constricta
MPTTRTPKIKWPKASEKAPWKQFDEDLDIILESSMQGPVHRKLHTLTTLVYSVAKERFGIEEAKKRKEAPKPNRRQHRIENLRKEIRQLKKQYRDSSPMQRLGLSQLRDTLRTQLKSLRQAENTRRKARERTRKRAAFTANPFKFAKTLLDKERSGTLETPLEEVEKYLHDTHSDGNREDALGDCDRIDPALPPKTPLVITEPTLGEVKDVIKKARWGSAPGPNAIPYKVYKMCPLLLKRLWRLLKVVWRKGDVPEAWKEAEGIFTPKERNSKTVNQFRTISLLNVEGKIFFAILARRLTSFLTINAYIDTSVQKGGVPGFSGCVEHTSAISQLIQEAKTGKKDLTVVWLDLANAYGSIPHQLIYTALQHYHVDNHVQKIITNYLDGIKLRFSVGDQLTKWQKLEKGIVTGCTVSVVLFVMGMNLLINAAIRETRGPKTESGIYLPSSRGFMDDLTLTTPTHVQARWMLTALTDVASWARMKFKAVKSRSLIIKKGKTTDRFVLRVQNEEIPSITKNPIKCLGKWFDASLADKDNVKKLENQVEDGLKKIDRSNLPGKFKAWLYQHALLPRLIWPMMLYEVPSSTIEALERITSRHLRKWLGIPPSFSSVGLYGKTNKLQLPLSSLVEEFKTAKTRLVLTLRDSPDEQIREAGIVTRTGRKWSATETVSQAESSLMHKDIVGVTAVGRQGIGATKTLLWSQANQTERRALIQSEVRKEEENKRQARAVEMGAQGAWTTWETMDRKLTWEDIWKYEPLRLSFLLRSVHDLLPSPANLCRWGLITDPTCSLCKKPGTLEHVLSSCSTALTQGRYRWRHDNVLREVADWLEGERKKPRKSNLQAGHTNFVRPGETAKTEAPQKKSILDGATGWNMAVDLGKKLVFPGIVQTNLRPDIVLWSETGKKLVVIELTVPWETRCEEAYERKKAKYTDLLEQCRHRGWRTWLFPIEVGARGFCAQSVCRLMTAVGTTGRDRRRAIQKLSQAAERASSWLWLRREETSWMRSTSTP

SEQ ID NO: 7117 - protein, 1124 aa, Dreissena rostriformis
MESTRPAQPTTNRDGSVTCNCGKVCKNQRGLRIHQGKSDCQRVRSQGQRIASLASETQEYSSLDSTHSTEELSVQETSQDVFRNPEEDDDPLLELLQTQSSPEASEATDPDRPQQDTATRTRKPRIKWPKASDKTSWTQLDEDLENILEASMQGPVDRKLTTLTTLIYSVGKERFGLEEERVRKEPPRPNRRQVRIQNLRRELKQLRRRYCASSPTERIGLAQLRDTVRTQLTSLRKAENSRRKTRERAKKRAAFTANPYKFARSLLDKERSGKLETPLEEIENFLHVTHSDPNREDVLGDCDRIDPAEEPEKQLNATEPTLGEVKEAVKKARAASAPGPNAIPYKVYKMCPLLLKRLWRLLKVVWRKGDVPEAWKEAEGIFTPKERNSKTVNQFRTISLLNVEGKIFFAILARRLTSFLTGNAYINTSVQKGGVPGFSGCIEHTSAITQLISEAKKGRKDLTVVWLDLANAYGSIPHQLIYTALRHYHVDGHIQKIITSYLDGIRLRFTVGDQLTRWQKLEKGIVTGCTVSVVLFIMGMNLLINAAQRETRGPKTESGIYLPSSRGFMDDLTLTTTTHVQARWMLTALTDVASWARMKFKAAKSRSLVIKKGQTTERFKLYVQNEEIPSIVTSPIKCLGKWFDASLQDRDNVKNLKQQVEEGLKKIDRCGLPGKFKAWLYQHALLPRLIWPLMLYEVPSTTVEALERITSRHLRKWLGVPPSFTSIGLYGKSNKLQLPLSSLVEEFKTAKARLVLTLRDSPDEFIREAGIQTRTSRKWSATESVSQAENALKHKDIVGVTAVGREGIGARKVVLWSRSDQKERRAMIQSEVRRAEENARQARAVEMGAQGAWTTWNTADRKLTWGDIWKYEPFRFSFLLRSVYDLLPSPANLCRWGLTAEPKCSLCDRVGTLEHVLSSCSTALTQGRYRWRHDLVLRELADWLEKERKKEHGNHPRHGHIAFVKSGETAKTQKPTKASILDGSRDWKMEVDLDRRLVFPNVVQTTLRPDIVLWSETGKKLVTIELTVPWEARCEEAYERKKAKYTELMDLCKQQGWRTWLFPVEVGVRGFCSQSVHRLMTALGTTGRERRVAIQRLSQAAERASSWLWLRREEKSWRQSTNTQ

SEQ ID NO: 7118 - protein, 827 aa, Sinonovacula constricta
MNVLTNFIDPALPPKTPLVITEPTLGEVKDVIKKARWGSAPGPNAIPYKVYKMCPLLLKRLWRLLKVVWRKGDVPEAWKEAEGIFTPKERNSKTVNQFRTISLLNVEGKIFFAILARRLTSFLTTNAYIDTSVQKGGVPGFSGCVEHTSAISQLIQEAKTGKKDLTVVWLDLANAYGSIPHQLIYTALQHYHVDNHVQKIITNYLDGIKLRFSVGDQLTKWQKLEKGIVTGCTVSVVLFVMGMNLLINAAIRETRGPKTESGIYLPSSRGFMDDLTLTTPTHVQARWMLTALTDVASWARMKFKAVKSRSLIIKKGKTTDRFVLRVENEEIPSITKNPIKCLGKWFDASLADKDNVKKLENQVEDGLKKIDRSNLPGKFKAWLYQHALLPRLIWPMMLYEVPSSTIEALERITSRHLRKWLGIPPSFSSVGLYGKTNKLQLPLSSLVEEFKTAKTRLVLTLRDSPDEQIREAGIVTRTGRKWSATETVSQAESSLMHKDIVGVTAVGRQGIGATKTLLWSQANQTERRALIQSEVRKEEENKRQARAVEMGAQGAWTTWETMDRKLTWEDIWKYEPLRLSFLLRSVHDLLPSPANLCRWGLITDPTCSLCKKPGTLEHVLSSCSTALTQGRYRWRHDNVLREVADWLEGERKKPRKSNLQAGHTNFVRPGETAKTEAPQKKSILDGATGWNMAVDLGKKLVFPGIVQTNLRPDIVLWSETGKKLVVIELTVPWETRCEEAYERKKAKYTDLLEQCRHRGWRTWLFPIEVGARGFCAQSVCRLMTAVGTTGRDRRRAIQKLSQAAERASSWLWLRREETSWMRSTSTP

SEQ ID NO: 7119 - protein, 1127 aa, Sinonovacula constricta
MESTRPAQSTMNPAPGTATCPCGKVCKNQRGLRIHQGKSGCQRVRPLEQRIASMASETREYSSQETTHSTVELSVQETARDATRDPVMDEDDPLLELLNYLQDTSSQPPEQEAIPDRPRPMPTTRTPKIKWPKASEKAPWKQFDEDLDIILESSMQGPVHRKLHTLTTLVYSVAKERFGIEEAKKRKEAPKPNRRQHRIENLRKEIRQLKKQYRDSSPMQRLGLSQLRDTLRTQLKSLRQAENTRRKARERTRKRAAFTANPFKFAKTLLDKERSGTLETPLEEVEKYLHDTHSDVNREDALGDCDRIDPALPPKTPLVITEPTLGEVKDVIKKARWGSAPGPNAIPYKVYKMCPLLLKRLWRLLKVVWGKGDVPEAWKEAEGIFTPKERNSKTVNQFRTISLLNVEGKIFFAILARRLTSFLTTNAYIDTSVQKGGVPGFSGCVEHTSAISQLIQEAKTGKKDLTVVWLDLANAYGSIPHQLIYTALQHYHVDNHVQKIITNYLDGIKLRFSVGDQLTKWQKLEKGIVTGCTVSVVLFVMGMNLLINAAIRETRGPKTESGIYLPSSRGFMDDLTLTTPTHVQARWMLTALTDVASWARMKFKAVKSRSLIIKKGKTTDRFVLRVQNEEIPSITKNPIKCLGKWFDASLADKDNVKKLENQVEDGLKKIDRSNLPGKFKAWLYQHALLPRLIWPMMLYEVPSSTIEALERITSRHLRKWLGIPPSFSSVGLYGKTNKLQLPLSSLVEEFKTAKTRLVLTLRDSPDEQIREAGIVTRTGRKWSATETVSQAESSLMHKDIVGVTAVGRQGIGATKTLLWSQANQTERRALIQSEVRKEEENKRQARAVEMGAQGAWTTWETMDRKLTWEDIWKYEPLRLSFLLRSVHDLLPSPANLCRWGLITDPTCSLCKKPGTLEHVLSSCSTALTQGRYRWRHDNVLREVADWLEGERKKPRKSNLQAGHTNFVRPGETAKTEAPQKKSILDGATGWNMAVDLGKKLVFPGIVQTNLRPDIVLWSETGKKLVVIELTVPWETRCEEAYERKKAKYTDLLEQCRHRGWRTWLFPIEVGARGFCAQSVCRLMTAVGTTGRDRRRAIQKLSQAAERASSWLWLRREETSWMRSTSTP

SEQ ID NO: 7120 - protein, 1092 aa, Sinonovacula constricta
MDGFYGIDTACPIDYEPSTRDSNLPLWQSLQKPSTVELSAQETARDATRDPVMDEDDPLLELLNYSQDTSSQPPEQEAIPDRPRPMPTTRTPKIKWPKASEKAPWKQFDEDLDIILESSMQGPVHRKLHTLTTLVYSVAKERFGIEEAKKRKEAPKPNRRQHRIENLRKEIRQLKKQYRDSSPMQRLGLSQLRDTLRTQLKSLRQAENTRRKARERTRKRAAFTANPFKFAKTLLDKERSGTLETPLEEVEKYLHDTHSDVNREDALGDCDRIDPALPPKTPLVITEPTLGEVKDVIKKARWGSAPGPNAIPYKVYKMCPLLLKRLWRLLKVVWRKGDVPEAWKEAEGIFTPKERNSKTVNQFRTISLLNVEGKIFFAILARRLTSFLTTNAYIDTSVQKGGVPGFSGCVEHTSAISQLIQEAKTGKKDLTVVWLDLANAYGSIPHQLIYTALQHYHVDNHVQKIITNYLDGIKLRFSVGDQLTKWQKLEKGIVTGCTVSVVLFVMGMNLLINAAIRETRGPKTESGIYLPSSRGFMDDLTLTTPTHVQARWMLTALTDVASWARMKFKAVKSRSLIIKKGKTTDRFVLRVQNEEIPSIKKNPIKCLGKWFDASLADKDNVKKLENQVEDGLKKIDRSNLPGKFKAWLYQHALLPRLIWPMMLYEVPSSTIEALERITSRHLRKWLGIPPSFSSVGLYGKTNKLQLPLSSLVEEFKTAKTRLVLTLRDSPDEQIREAGIVTRTGRKWSATETVSQAESSLMHKDIVGVTAVGRQGIGATKTLLWSQANQTERRALIQSEVRKEEENKRQARAVEMGAQGAWTTWETMDRKLTWEDIWKYEPLRLSFLLRSVHDLLPSPANLCRWGLITDPTCSLCKKPGTLEHVLSSCSTALTQGRYRWRHDNVLREVADWLEGERKKPRKSNLQAGHTNFVRPGETAKTEAPQKKSILDGATGWNMAVDLGKKLVFPGIVQTNLRPDIVLWSETGKKLVVIELTVPWETRCEEAYERKKAKYTDLLEQCRHRGWRTWLFPIEVGARGFCAQSVCRLMTAVGTTGRDRRRAIQKLSQAAERASSWLWLRREETSWMRSTSTP

SEQ ID NO: 7121 - protein, 1101 aa, Sinonovacula constricta
MESTRPAQSTMNPAPGTATCPCGKVCKNQRGLRIHQGKSGCQRVRPLEQRIASMASETREYSSQETTHSTVELSAQETARDATRDPVMDEDDPLLELLNYSQDTSSQPPEQEAIPDRPRPMPTTRTPKIKWPKASEKAPWKQFDEDLDIILESSMQGPVHRKLHTLTTLVYSVAKERFGIEEAKKRKEAPKPNRRQHRIENLRKEIRQLKKQYRDSSPMQRLGLSQLRDTLRTQLKSLRQAENTRRKARERTRKRAAFTANPFKFAKTLLDKERSGTLETPLEEVEKYLHDTHSDVNREDALGDCDRIDPALPPKTPLVITEPTLGEVKDVIKKARWGSAPGPNAIPYKVYKMCPLLLKRLWRLLKVVWRKGDVPEAWKEADGIFTPKERNSKTVNQFRTISLLNVEGKIFFAILARRLTSFLTTNAYIDTSVQKGGVPGFSGCVEHTSAISQLIQEAKTGKKDPTVVWLDLANAYGSIPHQLIYTALQHYHVDNHVQKIITNYLDGIKLRFSVGDQLTKWQKLEKGIVTGCTVSVVLFVMGMNLLINAAIRETRGPKTESGIYLPSSRGFMDDLTLTTPTHVQARWMLTALTDVASWARMKFKAVKSRSLIIKKGKTTDRFVLRVQNEEIPSITKNPIKCLGKWFDASLADKDNVKKLENQVEDGLKKIDRSNLPGKFKAWLYQHALLPRLIWPMMLYEVPSSTIEALERITSRHLRKWLGIPPSFSSVGLYGKTNKLQLPLSSLVEEFKTAKTRLVLTLRDSPDEQIREAGIVTRTGRKWSATETVSQAESSLMHKDIVGVTAVGRQGIGATKTLLWSQANQTERRALIQSEVRKEEENKRQARAVEMGAQGAWTTWETMDRKLTWEDIWKYEPLRLSFLLRSVHDLLPSPANLCRWGLITDPTCSLCKKPGTLEHVLSSCSTALTQGRYRWRHDNVLREVADWLEGERKKPRKSNLQAGHTNFVRPGETAKTEAPQKKSILDGATGWNMAVDLGKKLVFPGIVQTNLRPDIVLWSETGKKLVVIELTVPWETRCEEAYERKKAKYTDLLEQCRHRGWRTWLFPIEVGARGFCAQSVCRLMTAVGTTGRDRRRAIQKLS

SEQ ID NO: 7122 - protein, 1127 aa, Sinonovacula constricta
MESTRPAQSTMNPAPGTATCPCGKVCKNQRGLRIHQGKSGCQRVRPLEQRIASMASETREYSSQETTHSTVELSAQETARDATRDPVMDEDDPLLELLNYSQDTSSQPPEQEAIPDRPRPMPTTRTPKIKWPKASEKAPWKQFDEDLDIILESSMQGPVHRKLHTLTTLVYSVAKERFGIEEAKKRKEAPKPDRRQHRIENLRKEIRQLKKQYRDSSPMQRLGLSQLRDTLRTQLKSLRQAENTRRKARERTRKRAAFTANPFKFAKTLLDKERSGTLETPLEEVEKYLHDTHSDVNREDALGDCDRIDPALPPKTPLVITEPTLGEVKDVIKKARWGSAPGPNAIPYKVYKMCPLLLKRLWRLLKVVWRKGDVPEAWKEAEGIFTPKERNSKTVNQFRTISLLNVEGKIFFAILARRLTSFLTTNAYIDTSVQKGGVPGFSGCVEHTSAISQLIQEAKTGKKDLTVVWLDLANAYGSIPHQLIYTALQHYHVDNHVQKIITNYLDGIKLRFSVGDQLTKWQKLEKGIVTGCTVSVVLFVMGMNLLINAAIRETRGPKTESGIYLPSSRGFMDDLTLTTPTHVQARWMLTALTDVASWARMKFKAVKSRSLIIKKGKTTDRFVLRVQNEEIPSITKNPIKCLGKWFDASLADKDNVKKLENQVEDGLKKIDRSNLPGKFKAWLYQHALLPRLIWPMMLYEVPSSTIEALERITSRHLRKWLGIPPSFSSVGLYGKTNKLQLPLSSLVEEFKTAKTRLVLTLRDSPDEQIREAGIVTHTGRKWSATETVSQAESSLMHKDIVGVTAVGRQGIGATKTLLWSQANQTERRALIQSEVRKEEENKRQARAVEMGAQGAWTTWETMDRKLTWEDIWKYEPLRLSFLLRSVHDLLPSPANLCRWGLITDPTCSLCKKPGTLEHVLSSCSTALTQGRYRWRHDNVLREVADWLEGERKKPRKSNLQAGHTNFVRPGETAKTEAPQKKSILDGATGWNMAVDLGKKLVFPGIVQTNLRPDIVLWSETGKKLVVIELTVPWETRCEEAYERKKAKYTDLLEQCRHRGWRTWLFPIEVGARGFCAQSVCRLMTAVGTTGRDRRRAIQKLSQAAERASSWLWLRREETSWMRSTSTP

SEQ ID NO: 7123 - protein, 1127 aa, Cyclina sinensis
MESTRPAQSTTNSAPGTVTCPCGKVCKNQRGLRIHQGKSGCQRVRPLEQRIASMASETREYSSQETTHSTDELSAQETAHDATQDPMMDEDDPLLELPNYSQYTSSQPQEQEAVPDRPRPMPTTRTHKIKWPKASEKAPWKQFDEDLEIILESSMQGPVHRKLHTLSTLVYSVARERFGIKETKKRKEAPKPNRRQHRIEKLRKEIRQLKKQYRDSSPVQRLGLSQLRDTLRTQLKSLRRAENTRRKARERTRKRAAFTANPYKFAKTLLDKERSGTLETPLEEVEKFLHDTHSDVNREDALGDCDRIDPALPPETPLVTTEPTLGEVKDVVKKARWGSTPGPNAIPYKVYKMCPLLLKRLWRLLKVVWRKGEVPEAWKEAEGIFMPKERNSKTVNQFRTISLLNVEGKIFFAILARRLTSFLTTNAYIDTSVQKGGVPGFSGCVEHTSAITQLIQEAKTGKKDLTVVWLDLANAYGSIPHQLIYTALQHYHVDNHVQKIITSYLDGIKLRFSVGDQLTKWQKLEKGIVTGCTVSVVLFVMGMNLLINAAIRETRGPKTESGIYLPSSRGFMDYLTLTTPTHVQARWMLTALTDVALWARMKFKAVKSRSLIIKKGKTTDRFVLRVQNEEIPSITKNPIKCFGKWFDASLVDKDNVKKLENQVEDGLKKIDRSNLPGKFKAWLYQHALLPRLIWPMMLYEVPSSTIEALERITSRHLRKWLGIPPSFSSVGLYGKTNKLQLPLSSLVEEFKTAKTRLVLTLRDSPDEQIREAGIVTRTGRKWSATETVSQAESSLMHKDIVGVTAVGRQGIGATKTLLWSQTNQTERRALIQSEVRKEEENKRQARAVEMGAQGAWTTWETMERKLTWEDIWKYEPLRLSFLLRSVHDLLPSPANLCRLGLITDPTCSLCKKPGTLEHVLSSCSTALTQGRYCWRHDNVLREVANWLEGEKKKPRRSNSQAGHINFVRPGETAKTEASQKKSILDGATGWNMSVDLGKKLVFPGIVQTNLRPDIVLWTETGKKLVVIELTVPWETRCEEAYERKKAKYTELLEQCRHQGWRTWLFPIEVGARGFCAQSVCRLMTAVGTTGRDRRRAIQKLSQAAERASSWLWLRREETNWMRSTSTP

SEQ ID NO: 7124 - protein, 1127 aa, Sinonovacula constricta
MESTRPAQSTMNPAPGTATCPCGKVCKNQRGLRIHQGKSGCQRVRPLEQRIASMASETREYSSQETTHSTVELSAQETARDATRDPVMDEDDPLLELLNYSQDTSSQPTEQEAIPDRPRPMPTTRTPKIKWPKASEKAPWKQFDEDLDIILESSMQGPVHRKLHTLTTLVYSVAKERFGIEEAKKRKEAPKPNRRQHRIENLRKEIRQLKKQYRDSSPMQRLGLSQLRDTLRTQLKSLRQAENTRRKARERTRKRAAFTANPFKFAKTLLDKERSGTLETPLEEVEKYLHDTHSDVNREDALGDCDRIDPALPPKTPLVITEPTLGEVKDVIKKARWGSAPGPNAIPYKVYKMCPLLLKRLWRLLKVVWRKGDVPEAWKEAEGIFTPKERNSKTVNQFRTISLLNVEGKIFFAILARRLTSFLTTNAYIDTSVQKGGVPGFSGCVEHTSAISQLIQEAKTGKKDLTVVWLDLANAYGSIPHQLIYTALQHYHVDNHVQKIITNYLDGIKLRFSVGDQLTKWQKLEKGIVTGCTVSVVLFVMGMNLLINAAIRETRGPKTESGIYLPSSRGFMDDLTLTTPTHVQARWMLTALTDVASWARMKFKAVKSRSLIIKKGKTTDRFVLRVQNEEIPSITKNPIKCLGKWFDASLADKDNVKKLENQVEDGLKKIDRSNLPGKFKAWLYQHALLPRLIWPMMLYEVPSSTIEALERITSRHLRKWLGIPPSFSSVGLYGKTNKLQLPLSSLVEEFKTAKTRLVLTLRDSPDEQIREAGIVTRTGRKWSATETVSQAESSLMHKDIVGVTAVGRQGIGATKTLLWSQANQTERRALIQSEVRKEEENKRQARAVEMGAQGAWTTWETMDRKLTWEDIWKYEPLRLSFLLRSVHDLLPSPANLCRWGLITDPTCSLCKKPGTLEHVLSSCSTALTQGRYRWRHDNVLREVADWLEGERKKPRKSNLQVGHTNFVRPGETAKTEAPQKKSILDGATGWNMAVDLGKKLVFPGIVQTNLRPDIVLWSETGKKLVVIELTVPWETRCEEAYERKKAKYTDLLEQCRHRGWRTWLFPIEVGARGFCAQSVCRLMTAVGTTGRDRRRAIQKLSQAAERASSWLWLRREETSWMRSTSTP

SEQ ID NO: 7125 - protein, 1127 aa, Sinonovacula constricta
MESTRPAQSTMNPAPGTATCSCGKVCKNQRGLRIHQGKSGCQRVRPLEQRIASMASETREYSSQETTHSTVELSAQETARDATRDPVMDEDDPLLELLNYSQDTSSQPPEQEAIPDRPRPMPTTRTPKIKWPKASEKAPWKQFDEDLDIILESSMQGPVHRKLHTLTTLVNSVAKERFGIEEAKKRKEAPKPDPRQHRIENLRKEIRQLKKQYRDSSPMQRLGLSQLRDTLRTQLKSLRQAENTRRKARERTRKRAAFTANPFKFAKTLLDKERSGTLETPLEEVEKYLHDTHSDVNREDALGDCDRIDPALPPKTPLVITEPTLGEVKDVIKKARWGSAPGPNAIPYKVYKMCPLLLKRLWRLLKVVWRKGDVPEAWKEAEGIFTPKERNSKTVNQFRTISLLNVEGKIFFAILARRLTSFLTTNAYIDTSVQKGGVPGFSGCVKHTSAISQLIQEAKTGKKDLTVVWLDLANAYGSIPHQLIYTALQHYHVDNHVQKIITNYLDGIKLRFSVGDQLTKWQKLEKGIVTGCTVSVVLFVMGMNLLINAAIRETRGPKTESGIYLPSSRGFMDDLTLTTPTHVQARWMLTALTDVASWARMKFKAVKSRSLIIKKGKTTDRFVLRVQNEEIPSITKNPIKCLGKWFDASLADKDNVKKLENQVEDGLKKIDRSNLPGKFKAWLYQHALLPRLIWPMMLYEVPSSTIEALERITSRHLRKWLGIPPSFSSVGLYGKTNKLQLPLSSLVEEFKTAKTRLVLTLRDSPDEQIREAGIVTHTGRKWSATETVSQAESSLMHKDIVGVTAVGRQGIGATKTLLWSQANQTERRALIQSEVRKEEENKRQARAVEMGAQGAWTTWETMDRKLTWEDIWKYEPLRLSFLLRSVHDLLPSPANLCRWGLITDSTCSLCKKPGTLEHVLSSCSTALTQGRYRWRHDNVLREVADWLEGERKKPRKSNLQAGHTNFVRPGETAKTEAPQKKSILDGATGWNMAVDLGKKLVFPGIVQTNLRPDIVLWSETGKKLVVIELTVPWETRCEEAYERKKAKYTDLLEQCRHRGWRTWLFPIEVGARGFCAQSVCRLMTAVGTTGRDRRRAIQKLSQAAERASSWLWLRREETSWMRSTSTP

SEQ ID NO: 7126 - protein, 1127 aa, Sinonovacula constricta
MESTRPAQSTMNPAPGTATCPCGKVCKNQRGLRIHQGKSGCQRVRPLEQRIVSMASETREYSSQETTHSTVELSAQETARDATWDPVMDEDDPLLELLNYSQDTSSQPPEQEAIPDRPRPMPTTRTPKIKWPKASEKAPWKQFDEDLDIILESSMQGPVHRKLHTLTTLVYSVAKERFGIEEAKKRKEAPKPNRRQHRIENLRKEIRQLKKQYRDSSPMQRLGLSQLRDTLRTQLKSLRQAENTRRKARERTRKRAAFTANPFKFAKTLLDKERSGTLETPLEEVEKYLHDTHSDVNREDALGDCDRIDPALPPKTPLVITEPTLGEVKDVIKKARWGSAPGPNAIPYKVYKMCPLLLKRLWRLLKVVWRKGDVPEAWKEAEGIFTPKERNSKTVNQFRTISLLNVEGKIFFAILARRLTSFLTTNAYIDTSVQKGGVPGFSGCVEHTSAISQLIQEAKSGKKDLTVVWLDLANAYGSIPHQLIYTALQHYHVDNHVQKIIINYLDGIKLRFSVGDQLTKWQKLEKGIVTGCTVSVVLFVMGMNLLINAAIRETRGPKTESGIYLPSSRGFMDDLTLTTPTHVQARWMLTALTDVASWARMKFKAVKSRSLIIKKGKTTDRFVLRVQNEEIPSITKNPIKCLGKWFDASLADKDNVKKLENQVEDGLKKIDRSNLPGKFKAWLYQHALLPRLIWPMMLYEVPSSTIEALERITSRHLRKWLGIPPSFSSVGLYGKTNKLQLPLSSLVEEFKTAKTRLVLTLRDSPDEQIREAGIVTRTGRKWSATETVSQAESSLMHKDIVGVTAVGRQGIGATKTLLWSQANQTERRALIQSEVRKEEENKRQARAVEMGAQGAWTTWETMDRKLTWEDIWKYEPLRLSFLLRSVHDLLPSPANLCRWGLITDPTCSLCKKPGTLEHVLSSCSTALMQGRYRWRHDNVLREVADWLEGERKKPRKSNLQAGHTNFVRPGETAKTEAPQKKSILDGATGWNMAVDLGKKLVFPGIVQTNLRPDIVLWSETGKKLVVIELTVPWETRCEEAYERKKAKYTDLLEQCRHRGWRTWLFPIEVGARGFCAQSVCRLMTAVGTTGRDRRRAIQKLSQAAERASSWLWLRREETSWMRSTSTP

SEQ ID NO: 7127 - protein, 1127 aa, Sinonovacula constricta
MESTRPAQSTMNPAPGTATCPCGKVCKNQRGLRIHQGKSGCQRVRPLEQRIASMASETREYSSQETTHSTVELSAQETARDATRDPVMDEDDPLLELLNYSQDTSSQPPEQEAIPDRPRPMPTTRTPKIKWPKASEKAPWKQFDEDLDIILESSMQGPVHRKLHTLTTLVYSVAKERFGIEEAKKRKEAPKPNRRQHRIENLRKEIRQLKKQYRDSSPMQRLGLSQLRDTLRTQLKSLRQAENTRRKARERTRKRAAFTANPFKFAKTLLDKERSGTLETPLEEVEKYLHDTHSDVNREDALGDCDRIDPALPPKTPLVITEPTLGEVKDVIKKARWGSAPGPNAIPYKVYKMCPLLLKRLWRLLKVVWRKGDVPEAWKEAEGIFTPKERNSKTVNQFRTISLLNVEGKIFFAILARRLTSFLTTNAYIDTSVQKGGVPGFSGCVEHTSAISQLIQEAKTGKKDLTVVWLDLANAYGSIPHQLIYTALQHYHVDNHVQKIITNYLDGIKLRFSVGDQLTKWQKLEKGIVTGCTVSVVLFVMGMNLLINAAIRETRGPKTESGIYLPSSRGFMDDLTLTTPTHVQARWMLTALTDVASWARMKFKAVKSRSLIIKKGKTTDRFVLRVQNEEIPSITKNPIKCLGKWFDASLADKDNVKKLENQVEDGLKKIDRSNLPGKFKAWLYQHALLPRLIWPMMLYEVPSSTIEALERITSRHLRKWLGIPPSFSSVGLYGKTNKLQLPLSSLVEEFKTAKTRLVLTLRDSPDEQIREAGIVTRTGRKWSATETVSQAESSLMHKDIVGVTAVGRQGIGATKTLLWSQANQTERRALIQSEVRKEEENKRQARAVEMGAQGAWTTWETMDRKLTWEDIWKYEPLRLSFLLRSVHDLLPSPANLCRWGLITDPTCSLCKKPGTLEHVLSSCSTALTQGRYRWRHDNVLREVADWLEGERKKPRKSNLQAGHINFVRPGETAKTEASQKKSFLDGATGWNMAVDLGKKLVFPGIVQTNLRSDIVLWSETGKKLVVIELTVPWETRCEEAYERKKAKYTDLLEQCRHRGWRTWLFPIEVGARGFCAQSVCRLMTAVGTTGRDRRRAIQKLSQAAERASSWLWLRREETSWMRSTSTP

SEQ ID NO: 7128 - protein, 1127 aa, Sinonovacula constricta
MESTRPAQSTMNPAPGTATCPCGKVCKNQRGLRIHQGKSGCQRVRPLEQRIASMASETREYSSQETTHSTVELSAQETARDATRDPVMDEDDPLLELLNYSQDTSSQPPEQEAIPDRPRPMPTTRTPKIKWPKASEKAPWKQFDEDLDIILESSMQGPVHRKLHTLTTLVYSVAKERFGIEEAKKRKEAPKPNRRQHRIENLRKEIRQLKKQYRDSSPMQRLGLSQLRDTLRTQLKSLRQAENTRRKARERTRKRAAFTANPFKFAKTLLDKERSGTLETPLEEVEKYLHDTHSDVNREDALGDCDRIDPALPPKTPLVITEPTLGEVKDVIKKARWGSAPGPNAIPYKVYKMCPLLLKRLWRLLKVVWRKGDVPEAWKEAEGIFTPKERNSKTVNQFRTISLLNVEGKIFFAILARRLTSFLTTNAYIDTSVQKGGVPGFSGCVEHTSAISQLIQEAKTGKKDLTVVWLDLANAYGSIPHQLIYTALQHYHVDNHVQKIITNYLDGIKLRFSVGDQLTKWQKLEKGIVTGCTVSVVLFVMGMNLLINAAIRETRGPKTESGIYLPSSRGFMDDLTLTTPTHVQARWMLTALTDVASWARMKFKAVKSRSLIIKKGKTTDRFVLRVQNEEIPSITKNPIKCLGKWFDASLADKDNVKKLENQVEDGLKKIDRSNLPGKFKAWLYQHALLPRLIWPMMLYEVPSSTIEALERITSRHLRNWLGIPPSFSSVGLYGKTNKLQLPLSSLVEEFKTAKTRLVLTLRDSSDEQIREAGIVTRTGRKWSATETVSQAESSLMHKDIVGVTAVGRQGIGATKTLLWSQANQTERRALIQSEVRKEEENKRQARAVEMGAQGAWTTWETMDRKLTWEDIWKYEPLRLSFLLRSVHDLLPSPANLCRWGLITDPTCSLCKKPGTLEHVLSSCSTALTQGRYRWRHDNVLREVADWLEGERKKPRKSNLQAGHINFVRPGETAKTEASQKKSILDGATGWNMAVDLGKKLVFPGIVQTNLRPDIVLWSETGKKLVVIELTVPWETRCEEAYERKKAKYTDLLEQCRHRGWRTWLFPIEVGARGFCAQSVCRLMTAVGTTGRDRRRAIQKLSQAAERASSWLWLRREETSWMRSTSTP

SEQ ID NO: 7129 - protein, 1195 aa, Sinonovacula constricta
MATRNRLVTLETRLTPGTDWNRGTRGSIPTCSLREKTPTDKLQTPRMKDTPRVFREGGEDERLTWTDFMESTRPAQSTMNPAPGTATCPCGKVCKNQRGLRIHQGKSGCQRVRPLEQRIASMASETREYSSQETTHSTVELSAQETARDATRDPVMDEDDPLLELLNYSQDTSSQPPEQEAIPDRPRPMPTTRTPKIKWPKASEKAPWKQFDEDLDIILESSMQGPVHRKLHTLTTLVYSVAKERFGIEEAKKRKEAPKPNRRQHRIENLRKEIRQLKKQYRDSSPMQRLGLSQLRDTLRTQLKSLRQAENTRRKARERTRKRAAFTANPFKFAKTLLDKERSGTLETPLEEVEKYLHDTHSDVNREDALGDCDRIDPALPPKTPLVITEPTLGEVKDVIKKARWGSAPGPNAIPYKVYKMCPLLLKRLWRLLKVVWRKGDVPEAWKEAEGIFTPKERNSKTVNQFRTISLLNVEGKIFFAILARRLTSFLTTNAYIDTSVQKGGVPGFSGCVEHTSAISQLIQEAKTGKKDLTVVWLDLANAYGSIPHQLIYTALQHYHVDNHVQKIITNYLDGIKLRFSVGDQLTKWQKLEKGIVTGCTVSVVLFVMGMNLLINAAIRETRGPKTESGIYLPSSRGFMDDLTLTTPTHVQARWMLTALTDVASWARMKFKAVKSRSLIIKKGKTTDRFVLRVQNEEIPSITKNPIKCLGKWFDASLADKDNVKKLENQVEDGLKKIDRSNLPGKFKAWLYQHALLPRLIWPMMLYEVPSSTIEALERITSRHLRKWLGIPPSFSSVGLYGKTNKLQLPLSSLVEEFKTAKTRLVLTLRDSPDEQIREAGIVTRTGRKWSATETVSQAESSLMRKDIVGVTAVGRQGIGATKTLLWSQANQTERRALIQSEVRKEEENKRQARAVEMGAQGAWTTWETMDRKLTWEDIWKYEPLRLSFLLRSVHDLLPSPANLCRWGLITDPTCSLCKKPGTLEHVLSSCSTALTQGRYRWRHDNVLREVADWLEGERKKPRKSNLQAGHTNFVRPGETAKTEAPQKKSILDGATGWNMAVDLGKKLVFPGIVQTNLRPDIVLWSETGKKLVVIELTVPWETRCEEAYERKKAKYTDLLEQCRHRGWRTWLFPIEVGARGFCAQSVCRLMTAVGTTGRDRRRAIQKLSQAAERASSWLWLRREETSWMRSTSTP

SEQ ID NO: 7130 - protein, 1127 aa, Sinonovacula constricta
MESTRPAQSTMNPAPGTATCPCGKVCKNQRGLRIHQGKSGCQRVRPLEQRIASMASETREYSSQETTHSTVELSAQETARDATRDPVMDEDDPLLELLNYSQDTSSQPPEQEAIPDRPRPMPTTRTPKIKWPKASEKAPWKQFDEDLDIILESSMQGPVHRKLHTLTTLVYSVAKEMFGIEEAKKRKEAPKPNRRQHRIENLRKEIRQLKKQYRDSSPMQRLGLSQLRDTLRTQLKSLRQAENTRRKARERTRKRAAFTANPFKFAKTLLDKERSGTLETPLEEVEKYLHDTHSDVNREDALGDCDRIDPALPPKTPLVITEPTLGEVKDVIKKARWGSAPGPNAIPYKVYKMCPLLLKRLWRLLKVVWRKGDVPEAWKEAEGIFTPKERNSKTVNQFRTISLLNVEGKIFFAILARRLTSFLTTNAYIDTSVQKGGVPGFSGCVEHTSAISQLIQEAKTGKKDLTVVWLDLANAYGSIPHQLIYTALQHYHVDNHVQKIITNYLDGIKLRFSVGDQLTKWQKLEKGIVTGCTVSVVLFVMGMNLVINAAIRETRGPKTESGIYLPSSRGFMDDLTLTTPTHVQARWMLTALTDVASWARMKFKAVKSRSLIIKKGKTTDRFVLRVQNEEIPSITKNPIKCLGKWFDASLADKDNVKKLENQVEDGLKKIDRSNLPGKFKAWLYQHALLPRLIWPMMLYEVPSSTIEALERITSRHLRKWLGIPPSFSSVGLYGKTNKLQLPLSSLVEEFKTAKTRLVLTLRDSPDEQIREAGIVTRTGRKWSATETVSQAESSLMHKDIVGVTAVGRQGIGATKTLLWSQANQTERRALIQSEVRKEEENKRQARAVEMGAQGAWTTWETMDRKLTWEDIWKYEPLRLSFLLRSVHDLLPSPANLCRWGLITDPTCSLCKKPGTLEHVLSSCSTALTQGRYRWRHDNVLREVADWLEGERKKPRKSNLQAGHTNFVRPGETAKTEAPQKKSILDGATGWNMAVDLGKKLVFPGIVQTNLRPDIVLWSETGKKLVVIELTVPWETRCEEAYERKKAKYTDLLEQCRHRGWRTWLFPIEVGARGFCAQSVCRLMTAVGTTGRDRRRAIQKLSQAAERASSWLWLRREETSWMRSTSTP

SEQ ID NO: 7131 - protein, 1127 aa, Sinonovacula constricta
MESTRPAQSTMNPAPGTATCPCGKVCKNQRGLRIHQGKSGCQRVRPLEQRIASMASETREYSSQETTHSTVELSAQETARDATRDPVMDEDDPLLELLNYSQDTSSQPPEQEAIPDRPRPMPTTRTPKIKWPKASEKAPWKQFDEDLDIILESSMQGPVHRKLHTLTTLVYSVAKERFGIEEAKKRKEAPKPNRRQHRIENLRKEIRQLKKQYRDSSPMQRLGLSQLRDTLRTQLKSLRQAENTRRKARERTRKRAAFTANPFKFAKTLLDKERSGTLETPLEEVEKYLHDTHSDVNREDALGDCDRIDPALLPKTPLVITEPTLGEVKDVIKKARWGSAPGPNAIPYKVYKMCPLLLKRLWRLLKVVWRKGDVPEAWKEAEGIFTPKERNSKTVNQFRTISLLNVEGKIFFAILARRLTSFLTTNAYIDTSVQKGGVPGFSGCVEHTSAISQLIQEAKTGKKDLTVVWLDLANAYGSIPHQLIYTALQHYHVDNHVHKIITNYLDGIKLRFSVGDQLTKWQKLEKGIVTGCTVSVVLFVMGMNLLINAAIRETRGPKTESGIYLPSSRGFMDDLTLTTPTHVQARWMLTALTDVASWARMKFKAVKSRSLIIKKGKTTDRFVLRVQNEEIPSITKNPIKCLGKWFDASLADKDNVKKLENQVEDGLKKIDRSNLPGKFKAWLYQHALLPRLIWPMMLYEVPSSTIEALERITSRHLRKWLGIPPSFSSVGLYGKTNKLQLPLSSLVEEFKTAKTRLVLTLRDSPDEQIREAGIVTRTGRKWSATETVSQAESSLMHKDIVGVTAVGRQGIGATKTLLWSQANQTERRALIQSEVRKEEENKRQARAVEMGAQGAWTTWETMDRKLTWEDIWKYEPLRLSFLLRSVHDLLPSPANLCRWGLITDPTCSLCKKPGTLEHVLSSCSTALTQGRYRWRHDNVLREVADWLEGERKKPRKSNLQAGHTNFVRPGETAKTEAPQKKSILDGATGWNMAVDLGKKLVFPGIVQTNLRPDIVLWSETGKKLVVIELTVPWETRCEEAYERKKAKYTDLLEQCRHRGWRTWLFPIEVGARGFCAQSVCRLMTAVGTTGRDRRRAIQKLSQAAERASSWLWLRREETSWMRSTSTP

SEQ ID NO: 7132 - protein, 958 aa, Bradysia coprophila
MTSSFSINDQVTRLTSTVVEYSCSNCPADKRKSFASIRGLKIHNSKCHQDSPPLIIPDFTSGVFNDAVIAEDNFTTIFSLKSKIGVLRRIPKGARPLAAKTLVQLIRNCISFNDLSSWHNLLTFSYKAFHIPKQDKTKKARSLVALVKDNIVSAQLPTDQSSKIKSADFYKRVDSKLSDFDIRGAVRLLSSEDSFAPLDANTLNLLREKHPQPMTPVPTALSPKATDECLQVTPNQVKKAIMSFASGSAAGPDGFRPQYFKDILSISAGNAGTDALPAVTDLVNFMLRGEVNEIVSKYLYGASLCALCKKCGGIRPVAIGVAIRRLTSKLAVSHAKEVISDHFGHRQLGFGVRCGCEAAVHATRSHVLRSRKSGKVTLKIDYVNAYNTINREHMLIVVKARIPLLYKYLWQCYAKPTVLIYDSNIIFSAAGVQQGDPCGAFLFPLAIQHIINDMESELNVWYQDDGTLNDNPNIVLEDFAHLIQLSEEIGLKINPSKCELHFSSGTVDSNIVRKFNDLAPSIRVVNDEAFNLLGAPILASGLESMASAVFDKVFTMFDRLKNLKVHSAFFLLKNCFAVPKLNYLIRSSPFCLNESVIKRYDDKLKETLQGILNLSLLNNSWTQATLPIANGGFGIRKLHDISLPAFLSSSYGTIGIVSQILNSSDESIISYMHEALDAWLNVNPSNPSFLHNQSSWDKINVDRIVNNELHFSNPTDIARFLALQRPESNAWLNAIPSRHIGTFLDDHHIRICFALRVGAEICRPHICTCGTFVSEYGLHGLSCQRSAGRLPRHIELNTILCQSLSAIHKNSTLEPPGLFRDDGKKPDGLTLVPWARGRYLVWDATCWDTLAPSHLNVSRKQAGRVAELASNAKHEKYVELKRGNYIFNAFAVETLGPWSSDALHLISKIGPKLNEVSGDPRSHEYLVQRISLAIQRANASSILSTIPASTRLDQIFYL

SEQ ID NO: 7133 - protein, 1122 aa, Bemisia tabaci
MTWTREMNIDVMRCFYRATRLDTNASGYRFHLRQLFLAAYPDLTNVTEQRLVDQKRIIINNKKLIVQEIEEIKREVAHELHIASTPTEADIIFTPSSVDEFSRHARDGVVSPRAYPIHRFVDSADSVPSFEDTMELETREKIRFFRDKWRGSNPNLRPAIPKLWMNRMCKDRIKIINNKIINELISEEADLEEIHLVVYACACTVTVLNGQKLRSQGEQCPKRRRKPAWQLRLEKKIERLRKEIGRTTQYLRGVRTKKLEKEISLIIRDKSKTVAETQEISKMKLAVYAARLRRYNESNDRKNQNALFNRNEKAFYRNLTSKEIPVTPPKKEEVTAFWKNLWSNPVQHREGGEWIEKEIARQEAVPEQTNHVITVNELAETIRGTHNWKCPGVDNVQNFWYKNFPVLHAHLTQQANRIVQHPELAPEFLTEGRTFIKPKDEDTKNPANYRPITCLPTIYKIITATLCRKIDRHLISNDVLTEEQKGCRKQSKGCKEQLIVDSVILKQTEKNRRNLNTTFIDYRKAFDMVPHSWLLRVLEIYKIHPVLRHFLASVMKNWKTKISLKTEDGQLETEFIYIKRGIFQGDALSALWFCLSLNPLSNALKDTELGFHIKERRQTLYILSHLMFIDDIKIYSSSPGELKILLGVVESVSADICMEFGLEKCRVLNIYRGKVAEEEEDQTLYGTIVEQMDENDSYKYLGFQQNRRLNHSDIKHMVQQHYEQRLRVLLRSRLNSRNLFKAINTFAVPVLTYSFGIIKWTTTDLENINIKTRVLLTKSRKLHPKSCKERVTLGREVGGRGLLDIHELCNRQVHDLRTYFTNREHPLHPAIVCTDRNFTPLNLASQGAAYPPFHTDEQKETIWASKELHGRHYSQVHQDHISKSLSYKFLQSGQLFPETEGFILAIQDQVICTRNYRKFVIKDGTVDDSCRKCHLCPETIDHITAGCRLLAGTEYTRRHNSVAKIIHQGLSLHRNLLDSVPPYYEYNPESVLENDAYKLYWDFTIYTDKTIPHNRPDMVLLDKNQGIAHLMDISVPADANVDAKYRDKIEKYLPLATEIQRLWKLKEVIIVPFIISVTGITPHSFLRHLKQLHLGENVHTQSQKAVILHTCNITRSFLSSGQ

SEQ ID NO: 7134 - protein, 1204 aa, Kudoa iwatai
MPAKLIKYDTGDFNNNLINFNNTSCNLTLKADESTEVDESNFIESLNNSIDEFNKKQSLILNTSIPAPETNINKNNNQQEQVSANISDNNAENMRDKLNHYQRRAAEFRKKQASLLDSVSNELQGILNANLNDNLNNLYIKFINAAYKGAEQLKLVFKARKNNPKNSQCNANENSSQELSNNKSDNNAISSQGTQTTSQPKNNYEVNATKRLRSLFRYNQKRCFREITEEAPKWCQASAQEIVNTFSYSANVGPVTSQDILCGSNTEDLSPNHIPVLDNSTPSTTANSQQSEETVDINAENRLSPTQCNHSTGSNNINESESANSSQNNIISQQYSAEAVYQTGNRYSDFYIAVEEVMAAVERAKKDTAPGPDGIHMAFWKKVPSVEFILSALFNKILREGKVPDDWLTSRLVLLPKSSDPNVLNATDYRPISITQTIYRLFMSIVSRKLSALVTLSPSQKGFVLGDGCVEHAFVLQEILDDVRRAQKPLSAVWIDLRKAFDSVPHSEILTQLNDHHAPSNLISLITHMYANCHSIVNDKDGNTDLLYHNGRGVRQGCPLSPLLFNIVIDPFLKSVDESDYGFKLHDQKFGALAYADDIILMGESDEQMNRLINMFERYLKSLKLEVNHSKCASLQVIYKNRKRIVNNPEARKFNIMGGDIPILEDFYKYLGTNKNLQSFKELPPCFPKFTENLRKVSDSSLLHFMKLSLVKTYLFPSLDYAMKNNILRIEDLKKVDRDVKSKVRQWLGMPESTTKALLYTPSASGGLGLRNLRLDFSALRLASAINLIHSRDERIQTLSTESIRKIISQRTDCSMLPEDYFNRDFELIVSRDVRSLFSSIRLNAKSLKVKIKEVDEENPAKVDLDRDYLIPPSHIPQYQQRGVTRIRQLRWHIQGMFLNDWKSQRMQGRSVECFIGSSIANSWITQGDVSPYVYRFAILGRVNALPTKCVLQTRKLSSDAMCRRCYRATEHLGHVLGGCVHGERARSARHNHVVEYIVEQIKPAKDWVLFLDNKLPQIESHRRPDIVLLNCKTKEVRICDVSVTFESNHSRLEEVYHHKVNKYTEEQRQFMRAGFSCSLHALVFGSLGAHYSANHETYKSLFIKNKRKVKALSKSITRSILLDSATIWRNHVVGTRSTSHSTTRVGSNNQINSSEYSLSQPAQVVPVALKTRKTKYSKSQPSSKIPTKQPKPSISIKKDQNQQ

SEQ ID NO: 7135 - protein, 1073 aa, Ceratina calcarata
MSEYDSPSLMSNIQTLFVDDTAAAAAAADDGRIGAVRRQDMDLEQPRFRCEICLRGFTSKIGLGVHRKSQHPVQANDMLETGRSKYRWTREEIEIMAAVEAELDAGLVNINQVLQQRLQTTRSLEAIKGMRKKATYKALVAEKREAATYLQAREEQVTEGNVRNEAAEELVRAQLLANIEALTEDSERVEALREAIRAAVDGQVEQSTNHLAGWLALIPREGGRMLSGSGSANPVCEGLRRHRNARPGDSTPAGNGRSKKQERRSDYRRIQRLWRKHMSKAAKIVLNGDADKVEHPTLQEQEAFWKPIFTGHVACSGGDPVVLPGHEANGVEGLWDPITTEEIRCAKPPNGTAAGPDGITTADWNKIPLLEKVAAFNTIMYNERAPWSMLDSRTILIPKEEGTMDPAKFRPLSISSVTMRHFHKILGARMNRCEILDRRQRAFIVSDGVAENIFTLASVIEDARRELKPLHLAVLDVRKAFDTVTHGAINKVLRKKGLPLAMRRYINNVYQDSRTRIQVGRTAGGWLHPDQGVRQGDPLSPLIFNAVMDEGLEAVSECIGYTLNDCRINALAFADDLVLIASTAEGLQGSINTVSEALKKHGLRLMPAKCACLSLTPDGRKKCMKVDTHLKFEADSQCVPQLGVMDTWRYLGITFSHRGIRPTEVKIEPLLEKITRAPLKPQQRMRILKTFLLPRYTHSLVLGKITYGELRRLDGMVRREVRKWLRLPHDTPVAYFHAPVSEGGLGVLALEAKIPELLRRRLTKMGSSSAPAARAVAMSLWAQGKLRWCSQSRVTSGHWAPKLHATTDGFELRESSKAVSSYTWVNDDFVAIPAADWIHYHHVRINALPSRVRTTRGRRNTENPSCRAGCARTETTAHIIQMCERTHGGRILRHDSVANTIALKLVEQGWSVERETLYRTGEGARKPDIVAERAGQLVGMDIQVVSAAADLSRTNEIKRRYYEDNEDLNRLIRRRWGVIDSPIRWEGITISWRGIWCSASETFLRHCGLTRATISGITTRVLMGSYLNFIRFQKCTFRTRVQLGQASGISRSQIHRDSVRGRNGQAACGSYMG

SEQ ID NO: 7136 - protein, 1481 aa, Hemaris fuciformis
MEQENKGYSLRPLPGGRRGASGANAGCHSIRSVGDGGLNRRAPLDKSTTAEKSPSPSSSISSLFADIPSSDSFHKSPNSSSSNSPTSSCVSQITSASTESRYELRSIGRRRRVESDIVKDFRKCNRGVHESIINPNKPVTQEGHIPPTNVMDVAQTTNFVGNSVPTMNIQSKRMKWSNEINEFILRTYLEITCLETNTKAYLEPLYIRVTEAFPNITVSRQRIGDQRRAISRNKLIPQNRISEIYNEVRAKLSSPNNLHVTIDPTNTENATLSSSNKRMKWTNEQNEIIIRSYLKVTHLETNLTSYRKQMYREFITHFPHLEHISEQRVADQRRAIINNRYLSEERIQAIRQEVSENLELENRPEYRKCNKNKIAEPYIVDREDQIIHSTINPNNDHQLISNDPKNSINIPNTSTDTYNLPTVDLEISSHVLINTDKTDPNMNTNLANLSNTNRNKILDSMFNESLIEFRNTGPTKRPYIPKQRASKKLALALKYINDVILPENLNSSTDFSTLQLVIYCSAVTAAKFNGSKIIHHKSNKSGSTRQRKPAWQIRIEKRIEKLRACIGKLTQYINGNRSNRLLKHLTKILNQYTKHATHEPENSQPAHVLDTLKQKLAVATHRLKRYKECTLRKTQNSKFSSNERQFYRSLNRSNVEIHQSTMPPVDELRDFWANIWENPIEHKDKAEWIIEEEIRSNNIPDMYFIKISLETFKNTLSKLQNWKAPGSDNIHNYWYKKLTSTHSFLLDYINKFILQPETVPKYITEGITYMLPKDPNETRNPAKYRPITCLQNLYKIITSCIAEEIYNHIDINSILSEEQKGCRKFSQGCKEQLTIDSVVLKQVLNKKNNIFTMYIDYKKAYDSIPHSWLFKVLHIYKVNPYLIKFLQSISNNWTTSLKIKTVDGCVQTDTIQIKRGIFQGDALSPLWFCLALNPLSNILNTKNIGYPLTYKTAQNTDELRKLTHLLYMDDIKLYASTQNDINILAETTEKFSKDICMEFGIDKCKINCIKAGQVHKHYHTLTTGQQIDSLDEYSTYKYLGYNQCKQILSKETKTALTQQFKHRLNLILKTQLDSKNMIKAINTYAIPVLTYSFGILNWTKTDLKNTQRIINVSMTKYRKHHPRSCLQRITLPRSDGGRGLIDIANLHNKQITTLRKYFHNKSLTSELHNAIVQNDFRYTPLNLADPSVQVNEKIVDRQSKLAAWTQKSLHGRHLQDLSKPDVDKIASNDWLRRGELFPETEGFMIAIQDQVIETRNYQKYIIKKLASDLCRKCNSAPETIQHITGACKAIVQTDYKHRHDQIANIIHQKLAQKYKLIEYNQLEPYYKYKPETVLENDFYKLYYDRTILTDKTVHYNRPDITLIDKHNKTAKIIDIAIPNTHNLQSTISEKLSKYVDLKDEIARMWKLHQVSIVPIVISTTGVVPKYLQKGIEMIDLPSTTYSLMQKATILNTCRLVRKFLNTDSNGPIEHGHDLSVVSNNP

SEQ ID NO: 7137 - protein, 1479 aa, Hemaris fuciformis
MEQETNGYSLRPLPGGRRGASGANAGCHSIRSVGDGGLNRRAPLDKSTTAEKSPSPSSSISSLFADIPSSDSFHKSPNSSSSNSPTSSCVSQITSASIESRYELRSIGRRRRVESDIVKDFRKCNRDVHESIINPNKPVTQEGHIPPTNVMDVAQTTNFVGNSVPTMNIQSKRMKWSNEINEFILRTYLEITCLETNTKAYLEPLYIRVTEAFPNITVSRQRIGDQRRAISRNKLIPQNRISEIYNEVRAKLSSPNNLHVPIDPTNTENAILSSSNKRMKWTNEQNEIIIRSYLKVTHLETNLTSYRKQMYREFIAHFPHLEHISEQRVADQRRAIINNRYLSEERIQEIRQEVSENLELENRPEYPKCNKNKIAEPYIVDREDQIIHSIINPNNDHQVISNDPKNSKNIPITSTDTYNLPTVDLEISSHVLINNDKTDPNMNTDLANLSNTNRNKILDSMFNESLIEFRNTEPTKRPYIPKQRASKKLALALKYINDVILPENLNSSTDFSTLQLVIYCSAVTAAKFNGSKIIHHKSNKSESTRQRKPAWQIRIEKRIEKLRAYIGKLTQYINGNRSNRLLKHLTKILNQYTKHATHEPENSQPAHVLDTLKQKLAVATHRLKRYKECTLRKTQNSKFSSNERQFYRSLNRSNVEIHQSTMPPVDELRDFWANIWENPIEHNDKAEWIIEEENRSNNIPDMYFIKISLETFKNTLTKLQNWKAPGSDNVHNYWYKKLTSTHSFLLDYINNFILQPETVPKYITEGITYMLPKDPNETRNPAKYRPITCLQNLYKIITSCIAEEIYNHIDINSILSEEQKGCRKFSQGCKEQLTIDSVVLKQVLNKKKNIFTMYIDYKKAYDSIPHSWLFKVLHIYKVNPYLIKFLQSISKNWTTSLKIKTVEGCLQTDTIQIKRGIFQGDALSPLWFCLALNPLSNILNTKNIGYPLTYKTAQNTDEFRKLTHLLYMDDIKLYASTQNDINILAETTENFSKDICMEFGIDKCKINCIKAGQVHKHYHTLTTGQQIDSLDEYSTYKYLGYNQCKQILFKETKTALTQQFKHRLNLILKTQLDSKNMIKAINTYAIPVLTYSFGIVNWTKTDLKNTQRIINVSMTKHRKHHPRSCLQRITLPRSDGGRGLIDIANLHNKQITTLRKYFHNKSLTSELHNAIVQNDFRYTPLNLADRSVQVNEKIVDRQSKLAAWTQKSLHGRHLQDLSKPDVDKIASNDWLRRGELFPETEGFMIAIQDQVIETRNYQKYIIKKLASDLCRKCNSAPETIQHITGACKAIVQTEYKHRHDQIANIIHQKLAQKYKLIEYNQLEPYYKYKPETVLENDSYKLYYDRTILTDKTVHYNRPDITLIDKHNKTAKIIDIAIPNTHNLQNTISEKLSKYVDLKDEIARMWKLHQVSIVPIVISTTGVVPKHLQKAIEMIDLPSTTYSLMQKATILNTCRLVRKFLNTDSNGHDLSVVLNNPSTQ

SEQ ID NO: 7138 - protein, 1481 aa, Hemaris fuciformis
MEQENKGYSLRPLPGGRRGASGANAGCHSIRSVGDGGLNRRAPLDKSTTAEKSPSPSSSISSLFADIPSSDSFHKSPNSSSSNSPTSSCVSQITSASTESRYELRSIGRRRRVESDIVKDFRKCNRGVHESIINPNKPVTQEGHIPPTNVMDVAQTTNFVGNSVPTMNIQSKRMKWSNEINEFILRTYLEITCLETNIKAYLEPLYIRVTEAFPNITVSRQRIGDQRRAISRNKLIPQNRISEIYNEVRAKLSSPNNLHVTIDPTNTENATLSSSNKRMKWTNEQNEIIIRSYLKVTHLETNLTSYRKQMYREFITHFPHLEHISEQRVADQRRAIINNRYLSEERIQAIRQEVSENLELENRPEYRKCNKNKIAEPYIVDREDQIIHSTINPNNDHQLISNDPKNSINIPNTSTDTYNLPTVDLEISSHVLINTDKTDPNMNTNLANLSNTNRNKILDSMFNESLIEFRNTGPTKRPYIPKQRASKKLALALKYINDVILPENLNSSTDFSTLQLVIYCSAVTAAKFNGSKIIHHKSNKSGSTRQRKPAWQIRIEKRIEKLRACIGKLTQYINGNRSNRLLKHLTKILNQYTKHATHEPENSQPAHVLDTLKQKLAVATHRLKRYKECTLRKTQNSKFSSNERQFYRSLNRSNVEIHQSTMPPVDELRDFWANIWENPIEHKDKAEWIIEEEIRSNNIPDMYFIKISLETFKNTLSKLQNWKAPGSDNIHNYWYKKLTSTHSFLLDYINKFILQPETVPKYITEGITYMLPKDPNETRNPAKYRPITCLQNLYKIITSCIAEEIYNHIDINSILSEEQKGCRKFSQGCKEQLTIDSVVLKQVLNKKNNIFTMYIDYKKAYDSIPHSWLFKVLHIYKVNPYLIKFLQSISKNWTTSLKIKTVDGCVQTDTIQIKRGIFQGDALSPLWFCLALNPLSNILNTKNIGYPLTYKTAQNTDELRKLTHLLYMDDIKLYASTQNDINILAETTEKFSKDICMEFGIDKCKINCIKAGQVHKHYHTLTTGQQIDSLDEYSTYKYLGYNQCKQILSKETKTALTQQFKHRLNLILKTQLDSKNMIKAINTYAIPVLTYSFGILNWTKTDLKNTQRIINVSMTKYRKHHPRSCLQRITLPRSDGGRGLIDIANLHNKQITTLRKYFHNKSLTSELHNAIVQNDFRYTPLNLADSSVQVNEKIVDRQSKLAAWTQKSLHGRHLQDLSKPDVDKIASNDWLRRGELFPETEGFMIAIQDQVIETRNYQKYIIKKLASDLCRKCNSAPETIQHITGACKAIVQTDYKHRHDQIANIIHQKLAQKYKLIEYNQLEPYYKYKPETVLENDFYKLYYDRTILTDKTVHYNRPDITLIDKHNKTAKIIDIAIPNTHNLQSTISEKLSKYVDLKDEIARMWKLHQVSIVPIVISTTGVVPKYLQKGIEMIDLPSTTYRLMQKATILNTCRLVRKFLNTDSNGPIEHGHDLSVVSNNP

SEQ ID NO: 7139 - protein, 1481 aa, Hemaris fuciformis
MEQENKGYSLRPLPGGRRGASGANAGCHSIRSVGDGGLNRRAPLDKSTTAEKSPSPSSSISSLFADIPSSDSFHKSPNSSSSNSPTSSCVSQITSASTESRYELRSIGRRRRVESDIVKDFRKCNRGVHESIINPNKPVTQEGHIPPTNVMDVAQTTNFVGNSVPTMNIQSKRMKWSNEINEFILRTYLEITCLETNTKAYLEPLYIRVTEAFPNITVSRQRIGDQRRAISRNKLIPQNRISEIYNEVRAKLSSPNNLHVTIDPTNTENATLSSSNKRMKWTNEQNEIIIRSYLKVTHLETNLTSYRKQMYREFITHFPHLEHISEQRVADQRRAIINNRYLSEERIQAIRQEVSENLELENRPEYRKCNKNKIAEPYIVDREDQIIHSTINPNNDHQLISNDPKNSINIPNTSTDTYNLPTVDLEISSHVLINTDKTDPNMNTNLANLSNTNRNKILDSMFNESLIEFRNTGPTKRPYIPKQRASKKLALALKYINDVILPENLNSSTDFSTLQLVIYCSAVTAAKFNGSKIIHHKSNKSGSTRQRKPAWQIRIEKRIEKLRACIGKLTQYINGNRSNRLLKHLTKILNQYTKHATHEPENSQPAHVLDTLKQKLAVANHRLKRYKECTLRKTQNSKFSSNERQFYRSLNRSNVEIHQSTMPPVDELRDFWANIWENPIEHKDKAEWIIEEEIRSNNIPDMYFIKISLETFKNTLSKLQNWKAPGSDNIHNYWYKKLTSTHSFLLDYINKFILQPETVPKYITEGITYMLPKDPNETRNPAKYRPITCLQNLYKIITSCIAEEIYNHIDINSILSEEQKGCRKFSQGCKEQLTIDSVVLKQVLNKKNNIFTMYIDYKKAYDSIPHSWLFKVLHIYKVNPYLIKFLQSISKNWTTSLKIKTVDGCVQTDTIQIKRGIFQGDALSPLWFCLALNPLSNILNTKNIGYPLTYKTAQNTDELRKLTHLLYMDDIKLYASTQNNINILAETTEKFSKDICMEFGIDKCKINCIKAGQVHKHYHTLTTGQQIDSLDEYSTYKYLGYNQCKQILSKETKTALTQQFKHRLNLILKTQLDSKNMIKAINTYAIPVLTYSFGILNWTKTDLKNTQRIINVSMTKYRKHHPRSCLQRITLPRSDGGRGLIDIANLHNKQITTLRKYFHNKSLTSELHNAIVQNDFRYTPLNLADSSVQVNEKIVDRQSKLAAWTQKSLHGRHLQDLSKPDVDKIASNDWLRRGELFPETEGFMIAIQDQVIETRNYQKYIIKKLASDLCRKCNSAPETIQHITGACKAIVQTDYKHRHDQIANIIHQKLAQKYKLIEYNQLEPYYKYKPETVLENDFYKLYYDRTILTDKTVHYNRPDITLIDKHNKTAKIIDIAIPNTHNLQSTISEKLSKYVDLKDEIARMWKLHQVSIVPIVISTTGVVPKYLQKGIEMIDLPSTTYRLMQKATILNTCRLVRKFLNTDSNGPIEHGHDLSVVSNNP

SEQ ID NO: 7140 - protein, 1481 aa, Hemaris fuciformis
MEQENKGYSLRPLPGGRRGASGANAGCHSIRSVGDGGLNRRAPLDKSTTAEKSPSPSSSISSLFADIPSSDSFHKSPNSSSSNSPTSSCVSQITSASTESRYELRSIGRRRRVESDIVKDFRKCNRGVHESIINPNKPVTQEGHIPPTNVMDVAQTTNFVGNSVPTMNIQSKRMKWSNEINEFILRTYLEITCLETNTKAYLEPLYIRVTEAFPNITVSRQRIGDQRRAISRNKLIPQNRISEIYNEVRAKLSSPNNLHVTIDPTNTENATLSSSNKRMKWTNEQNEIIIRSYLNVTHLETNLTSYRKQMYREFITHFPHLEHISEQRVADQRRAIINNRYLSEERIQAIRQEVSENLELENRPEYRKCNKNKIAEPYIVDREDQIIHSTINPNNDHQLISNDPKNSINIPNTSTDTYNLPTVDLEISSHVLINTDKTDPNMNTNLANLSNTNRNKILDSMFNESLIEFRNTGPTKRPYIPKQRASKKLALALKYINDVILPENLNSSTDFSTLQLVIYCSAVTAAKFNGAKIIHHKSNKSGSTRQRKPAWQIRIEKRIEKLRACIGKLTQYINGNRSNRLLKHLTKILNQYTKHATHEPENSQPAHVLDTLKQKLAVATHRLKRYKECTLRKTQNSKFSSNERQFYRSLNRSNVEIHQSTMPPVDELRDFWANIWENPIEHKDKAEWIIEEEIRSNNIPDMYFIKISLETFKNTLSKLQNWKAPGSDNIHNYWYKKLTSTHSFLLDYINKFILQPETVPKYITEGITYMLPKDPNETRNPAKYRPITCLQNLYKIITSCIAEEIYNHIDINSILSEEQKGCRKFSQGCKEQLTIDSVVLKQVLNKKNNIFTMYIDYKKAYDSIPHSWLFKVLHIYKVNPYLIKFLQSISKNWTTSLKIKTVDGCVQTDTIQIKRGIFQGDALSPLWFCLALNPLSNILNTKNIGYPLTYKTAQNTDELRKLTHLLYMDDIKLYASTQNDINILAETTEKFSKDICMEFGIDKCKINCIKAGQVHKHYHTLTTGQQIDSLDEYSTYKYLGYNQCKQILSKETKTALTQQFKHRLNLILKTQLDSKNMIKAINTYAIPVLTYSFGILNWTKTDLKNTQRIINVSMTKYRKHHPRSCLQRITLPRSDGGRGLIDIANLHNKQITTLRKYFHNKSLTSELHNAIVQNDFRYTPLNLADPSVQVNEKIVDRQSKLAAWTQKSLHGRHLQDLSKPDVDKIASNDWLRRGELFPETEGFMIAIQDQVIETRNYQKYIIKKLASDLCRKCNSAPETIQHITGACKAIVQTDYKHRHDQIANIIHQKLAQKYKLIEYNQLEPYYKYKPETVLENDFYKLYYDRTILTDKTVHYNRPDITLIDKHNKTTKIIDIAIPNTHNLQSTISEKLSKYVDLKDEIARMWKLHQVSIVPIVISTTGVVPKYLQKGIEMIDLPSTTFSLMQKATILNTCRLVRKFLNTDSNGPIEHGHDLSVVSNNP

SEQ ID NO: 7141 - protein, 971 aa, Hyles vespertilio
MLIYCSAVTAAKYNGSKINTSMPNEVRSPEKDRKPTWQKRIEKRIDELRINIGRLTQFINGNRSNKVIQESNQILYRYTKHATHEPDNSQPSHVLDTLKQKLAVASHRLKRYKECSLRKTQNSQFSCNEKQFYRNIYNPNPGSYQYIIPQVDVLQDFWTNIWENPVEHNDQAEWIKNEENRFINIQEMPFTNISSETYKNTLSRLQNWKAPGSDNIHNYWYKKLTFTHPVILQYINKFILEPITVPTYLTEGITHMLPKDPTDPLNPGKYRPITCLQTLYKIITMQCKIAEVIYDHIDNNNILNEEQKGCRKFSQECKEQLTIDAVILKQVLNKKKDVYTMYIDYKKAYDSVPHTWLFKVLDIYKINLLLVNYLQSTSRNWATKLKINTSNGCVQTEKIKIQRGIFQGDALSPLWFCLALNPLSNILNATDIGYPLTYNSISGSQNIETSRKLTHLLYMDDIKLYASTQNGINQLAELTERFSKDIGMTFGIDKCKINSIKAGQTHKHHYALSSGELIDPLDEWDTYKYLGYDQTKEIIHKEVKIKLIQKFKNRLNLILKTHLNSRNIIKAVNTFAIPILTYSFGILKWTKTDLKNAQRIINVLMTRYRKHHPRSCLQRLTLPRIDGGRGFLDIVNLHNKQITNLRNYFHSKALTSTLHKAINQNDNKYTPLNLADSTTQPNENLIDRQSKLTAWIQKSLHGRHLQELNKPHVDKVASNDWLRRGDLFPETEGFMIAIQDQVIETRNYQKYIIKNLTSDICRKCNSAPETIQHITGACKAIVQTDYKHRHDQIANIIHQKLAQKYKLISTNPLEPYYKYTPEKILENATHKLYYDRTILTDKTVHYNRPDITLLNKNNKTAIIIDIAIPNSHNVQNTISEKLSKYLELKEEIARMWKLQQVSIVPIVIYTTGIIPKQLLKAIETLDLASNIYRTLQKAVILNTCRIVRKFLKIDNMGQTDIICNSTNNEIQ

SEQ ID NO: 7142 - protein, 969 aa, Hyles vespertilio
MLIYCSAVTAAKFNGSKINTSMPNEVRSSEKDRKPAWQKRIEKRIDELRINIGRLTQFINGNRSNKVIQESNQILYRYTKHATHEPDNSQPSHVLDTLKQKLAVASHRLKRYKECSLRKTQNSQFSCNEKQFYRNIYNPNPGSYQYTIPQVDVLQDFWTNIWENPVEHNDQAEWIKNEENRFINIQEMPFTNISSETYKNTLSRLQNWKAPGSDNIHNYWYKKLTFTHPFILQYINKFILEPITVPTYLTEGITHMLPKDPTDPLNPGKYRPITCLQTLYKIITSCIAEVIYDHIDNNNILNEEQKGCRKFSQGCKEQLTIDAVILKQVLNKKKDVYTMYIDYKKAYDSVPHTWLFKVLDIYKINPLLVNYLQSTSRNWATKLKINASNGCVQTEKIKIQRGIFQGDALSPLWFCLALNPLSNILNVTDIGYPLTYNSISGSQNIENSRKLTHLLYMDDIKLYASTQNGINQLAELTERFSKDIGMTFGIDKCKINSIKAGQTHKHHYTLSSGELIDPLDEWDTYKYLGYDQTKEIIHKEVKIKLIQKFKNRLNLILKTHLNSRNIIKAVNTFAIPILTYSFGILKWTKTDLKNAQRIINVLMTRYRKHHPRSCLQRLTLPRIDGGRGFIDIVNLHNKQITNLRNYFHSKALTSTLHKAINQNDNKYTPLNLADSTTQPNENLIDQQSKLTAWIQKSLHGRHLQELNKPHVDKVASNDWLRRGDLFPETEGFMIAIQDQVIETRNYQKYIIKNLTSDICRKCNSAPETIQHITGACKAIVQTDYKHRHDQIANIIHQKLAQKYKLISTNPLEPYYKYTPEKILENATHKLYYDRTILTDKTVHYNRPDITLINKNNKTAIIIDIAIPNSHNVQNTISEKLSKYLELKEEIARMWKLQQVSIVPIVISTTGIIPKQLLKAIETLDLASNIYRTLQKAVILNTCRIVRKFLKIDNMGQTDIICNSTNNEIQ

SEQ ID NO: 7143 - protein, 1478 aa, Deilephila porcellus
MESQTKRYSLRPLPGGRRGASGADAGCHSMRTVGDGGLNRRAPLDKLTTADQPSSPSSSSSSLFANIPSPESSNKSPISSSSYSLTSSSSARTSSRSTQSSYHLRSLRERCRRGGKKPQNIQNPIEQISNIDKPAILTSPLPSTSAASVAQTASTAVNSVSTVSTQNKRIKWSTEVNEFILRTYLVLTNLETDTKAYLEPLYNKFIEKFPHIDVSRQRIGDQRRAIIRSKLLPQNRITEIYNEIQTQLTSTHPTHTQPLNIASETTKLRNQRMKWTNEHNETIIRSYLKITHLETNLTAYRKQMHREFVSNYPHLEHISEQRVADQRRVIMNNRYITEERMKQIRKEVAKELDIDIANEYSSSDKNSLVPLHSGERRTQSLNIDNNTYNHVEITGDNTCHNEINLPIEFSNRSQAQIEAEGIASQKIPNNLDRDQAPNQVQPNSSDRNNTIDLIFNESLNLYTNSEPTSRPYIPKQRATKKLAIALKYINNIILPEIINKTKTLDFLTLQTLIYCSAVTAATYNGSKINNNIPDNANIFQRKRTPAWQRRLEKRILDLRSNIGKLTQFINGNRSNRVIKDSNQILNRYARHATHEADNSQPSHVLDTLKQKLSVASHRLKRYKDCTLRKTQNSQFSCNEKQFYRSLKTQNPTKYQNQTPPLEELRNFWANIWEIPVEHNNHADWIKVEENRSNNILEMSFTNITSETFQVILKKLQNWKAPGSDNIHNYWYKKLSYTHSFILKYINQFIEQPEIVPKFITEGITHMLPKDLNDPLNPGKYRPITCLQTLYKIITSCIAHEIYNHIDSNNILNEEQKGCRKFSQGCKEQLTIDSVILKQVINKKKDIFTMYIDYKKAYDSVPHTWLFKVLNIYKINPNIINYLFITSQHWTTKLKIKTSDGYTQTESIKIQRGIFQGDALSPLWFCLALNPLTNFLNAFNIGYPLTYHTSPNSESSENIRKLTHLLYMDDIKLYASSQSDMNQLAELTEQFSKDICMQFGIDKCKINSIKAGQTHKHYYTLSTGEQIDPLDESATYKYLGYNQSKQITYKETKAALIQKFKDRLNLILKSQLNSRNIIKAINTFAIPILTYSFGILKWTKTDLKNIQRTINVLMTKHRKHHPRSCMQRITLPRVDGGRGIIDVVNLHNKQITTLRKYFHNKSLTSTLHNAIVKNDSKYTPLNLADHTVQINEKIIDRQDKLVEWARKSLHGRHLQDLSKPDVDKIASNDWLRRGELFPETEGFMLAIQDQVIETRNYQKYIIKSLNSDICRKCNSAPETIQHITGACKAIVQTDYKHRHDQIANIIHQKLAQKYKLISTHPLIPYYKYIPEIVLENATHKLYYDRTILTDKTVHYNRPDITLLDKNSKTALIIDIAVPNSHNVQNTISEKLSKYTDLKEEIARMWKLQQVSIVPIVLSTTGIVPKHLHKAIEILDLPSNIYRTLQKAVILNTCRIVRKFLKTDSNGQTDINHSNQVLGQ

SEQ ID NO: 7144 - protein, 1477 aa, Deilephila porcellus
MESQTKRYSLRPLPGGRRGASGADAGCHSMRTVGDGGLNRRAPLDKLTTADQPSSPSSSSSSLFANIPSPESSNKSPISSSSYSLTSSSSARTSSRSTQSSYHLRSLRERCRRGGKKPQNIQNPIEQISNIDKPAILTSPLPSTSAASVAQTASTAVNSVSTVSTQNKRIKWSTEVNEFILRTYLVLTNLETDTKAYLEPLYNKFIEKFPHIDVSRQRIGDQRRAIIRSKLLPQNRITEIYNEIQTQLTSTHPTTQPLNIASETTKLRNQRMKWTNEHNETIIRSYLKITHLETNLTAYRKQMHREFVSNYPHLEHISEQRVADQRRVIMNNRYITEERMKQIRKEVAKELDIDIANEYSSSDKSSLVPLHSGERRTQSLNIDNNTYNHVEITGDNTCHNEINLPIEFSNRSQAQIEAEGIASQTIPNNLDRDQAPNQVQPNSSDRNNTIDLIFNESLNLYTNSEPTSRPYIPKQRATKKLAIALKYINNIILPEIINKTKTLDFLTLQTLIYCSAVTAATYNGSKINNNIPDNANIFQRKRTPAWQRRLEKRILDLRSNIGKLTQFINGNRSNRVIKDSNQILNRYARHATHEADNSQPSHVLDTLKQKLSVASHRLKRYKDCTLRKTQNSQFSCNEKQFYRSLKTQNPTKYQNQTPPLEELRNFWANIWEIPVEHNNHADWIKVEENRSNNILEMSFTNITSETFQVILKKLQNWKAPGSDNIHNYWYKKLSYTHSFILKYINQFIEQPEIVPKFITEGIAHMLPKDLNDPLNPGKYRPITCLQTLYKIITSCIAHEIYNHIDSNNILNEEQKGCRKFSQGCKEQLTIDSVILKQVINKKKDIFTMYIDYKKAYDSVPHTWLFKVLNIYKINPNIINYLFITSQHWTTKLKIKTSDGYTQTESIKIQRGIFQGDALSPLWFCLALNPLTNFLNAFNIGYPLTYHTSPNSESSENIRKLTHLLYMDDIKLYASSQSDMNQLAELTEQFSKDICMQFGIDKCKINSIKAGQTHKHYYTLSTGEQIDPLDESATYKYLGYNQSKQITYKETKAALIQKFKDRLNLILKSQLNSRNIIKAINTFAIPILTYSFGILKWTKTDLKNIQRTINVLMTKHRKHHPRSCMQRITLPRVDGGRGIIDVVNLHNKQITTLRKYFHNKSLTSTLHNAIVKNDSKYTPLNLADHTVQINEKIIDRQDKLVEWARKSLHGRHLQDLSKPDVDKIASNDWLRRGELFPETEGFMLAIQDQVIETRNYQKYIIKSLNSDICRKCNSAPETIQHITGACKAIVQTDYKHRHDQIANIIHQKLAQKYKLISTHPLIPYYKYIPEIVLENATHKLYYDRTILTDKTVHYNRPDITLLDKNSKTALIIDIAVPNSHNVQNTISEKLSKYTDLKEEIARMWKLQQVSIVPIVLSTTGIVPKHLHKAIEILDLPSNIYRTLQKAVILNTCRIVRKFLKTDSNGQTDINHSNQVLEQ

SEQ ID NO: 7145 - protein, 1478 aa, Deilephila porcellus
MESQTKRYSLRPLPGGRRGASGADAGCHSMRTVGDGGLNRRAPLDKLTTADQPSSPSSSSSSLFANIPSPESSNQSPISSSSYSLTSSSSARTSSRSTQSYHLRSLRERCRRGGKKPQNIQNPIEQISNIDKPAILTSPLPSTSAASVAQTASTAVNSVSTVSTQNKRIKWSTEVNEFILRTYLVLTNLETDTKAYLEPLYNKFIEKFPHIDVSRQRIGDQRRAIIRSKLLPQNRITEIYNEIQTQLTSTHPTHTQPLNIASETTKLRNQRMKWTNEHNETIIRSYLKITHLETNLTAYRKQMHREFVSNYPHLEHMSEQRVADQRRVIMNNRYITEERMKQIRKEVAKELDIDIANEYSSSDKSSLVPLHSGERRTQSFLNIDNNTYSHVEITGDNTCHNEINLPTEFSNRSQAQIEAEGIASQTIPNNLDRDQAPNQVQPNSSDRNNTIDLIFNESLNLYTNSEPTSRPYIPKQRATKKLAIALKYINNIILPEIINKTKTLDFLTLQTLIYCSAVTAATYNGSKINNNIPDNANIFQRKRTPAWQRRLEKRILDLRSNIGKLTQFINGNRSNRVIKDSNQILNRYARHATHEADNSQPSHVLDTLKQKLSVASHRLKRYKDCTLRKTQNSQFSCNEKQFYRSLKTQNPTKYQNQTPPLEELRNFWASIWEIPVEHNNHADWIKVEENRSNNILEMPFTNITSETFQVILKKLQNWKAPGSDNIHNYWYKKLSYTHSFILKYINQFIEQPEIVPKFITEGITHMLPKDLNDPLNPGKYRPITCLQTLYKIITSCIAHEIYNHIDSNNILNEEQKGCRKFSQGCKEQLTIDSVILKQVINKKKDIFTMYIDYKKAYDSVPHTWLFKVLNIYKINPNIINYLFITSQHWTTKLKIKTSDGYTQTESIKIQRGIFQGDALSPLWFCLALNPLTNFLNAFNIGYPLTYHTSPNSESSENIRKLTHLLYMDDIKLYASSQSDMNQLAELTEQFSKDICMQFGIDKCKINSIKAGQTHKHYYTLSTGEQIDPLDESATYKYLGYNQSKQITYKETKAALIQKFKDRLNLILKSQLNSRNIIKAINTFAIPILTYSFGILKWTETDLKNIQRTINVLMTKHRKHHPRSCMQRITLPRVDGGRGIIDVVNLHNKQITTLRKYFHNKSLTSTLHNAIVKNDSKYTPLNLADHTVQINEKIIDRQDKLVEWARKSLHGRHLQDLSKPDVDKIASNDWLRRGELFPETEGFMLAIQDQVIETRNYQKYIIKSLNSDICRKCNSAPETIQHITGACKAIVQTDYKHRHDQIANIIHQKLAQKYKLISTHPLIPYYKYIPEIVLENATHKLYYDRTILTDKTVHYNRPDITLLDKNSKTALIIDIAVPNSHNVQNTISEKLSKYTDLKEEIARMWKLQQVSIVPIVLSTTGIVPKHLHKAIEILDLPSNIYRTLQKAVILNTCRIVRKFLKTDSNGQTDINHSNQVLGQ

SEQ ID NO: 7146 - protein, 1478 aa, Deilephila porcellus
MESQTKRYSLRPLPGGRRGASGADAGCHSMRTVGDGGLNRRAPLDKLTTADQPSSPSSSSSSLFANIPSPESSNQSPISSSSYSLTSSSSARTSSRSTQSYHLRSLRERCRRGGKKPQNIQNPIEQISNIDKPAILTSPLPSTSAASVAQTASTAVNSVSTVSTQNKRIKWSTEVNEFILRTYLVLTNLETDTKAYLEPLYNKFIEKFPHIDVSRQRIGDQRRAIIRSKLLPQNRITEIYNEIQTQLTSTHPTHTQPLNIASETTKLRNQRMKWTNEHNETIIRSYLKITHLETNLTAYRKQMHREFVSNYPHLEHMSEQRVADQRRVIMNNRYITEERMKQIRKEVAKELDIDIANEYSSSDKSSLVPLHSGERRTQSFLNIDNNTYSHVEITGDNTCHNEINLPTEFSNRSQAQIEAEGIASQTIPNNLDRDQAPNQVQPNSSDRNNTIDLIFNESLNLYTNSEPTSRPYIPKQRATKKLAIALKYINNIILPEIINKTKTLDFLTLQTLIYCSAVTAATYNGSKINNNIPDNANIFQRKRTPAWQRRLEKRILDLRSNIGKLTQFINGNRSNRVIKDSNQILNRYARHATHEADNSQPSHVLDTLKQKLSVASHRLKRYKDCTLRKTQNSQFSCNEKQFYRSLKTQNPTKYQNQTPPLEELRNFWASIWEIPVEHNNHADWIKVEENRSNNILEMPFTNITSETFQVILKKLQNWKAPGSDNIHNYWYKKLSYTHSFILKYINQFIEQPEIVPKFITEGITHMLPKDLNDPLNPGKYRPITCLQTLYKIITSCIAHEIYNHIDSNNILNEEQKGCRKFSQGCKEQLTIDSVILKQVINKKKDIFTMYIDYKKAYDSVPHTWLFKVLNIYKINPNIINYLFITSQHWTTKLKIKTSDGYTQTESIKIQRGIFQGDALSPLWFCLALNPLTNFLNAFNIGYPLTYHTSPNSESSENIRKLTHLLYMDDIKLYASSQSDMNQLAELTEQFSKDICMQFGIDKCKINSIKAGQTHKHYYTLSTGEQIDPLDESATYKYLGYNQSKQITYKETKAALIQKFKDRLNLILKSQLNSRNIIKAINTFAIPILTYSFGILKWTKTDLKNIQRTINVLMTKHRKHHPRSCMQRITLPRVDGGRGIIDVVNLHNKQITTLRKYFHNKSLTSTLHNAIVKNDSKYTPLNLADHTVQINEKIIDRQDKLVEWARKSLHGRHLQDLSKPDVDKIASNDWLRRGELFPETEGFMLAIQDQVIETRNYQKYIIKSLNSDICRKCNSAPETIQHITGACKAIVQTDYKHRHDQIANIIHQKLAQKYKLISTHPLIPYYKYIPEIVLENATHKLYYDRTILTDKTVHYNRPDITLLDKNSKTALIIDIAVPNSHNVQNTISEKLSKYTDLKEEIARMWKLQQVSIVPIVLSTTGIVPKHLHKAIEILDLPSNIYRTLQKAVILNTCRIVRKFLKTDSNGQTDINHSNQVLGQ

SEQ ID NO: 7147 - protein, 1475 aa, Anthocharis cardamines
MYSMESKPKRYNLRPLPGGRRGASGANAGCYSMRTVGDGGLNRRVPLDKTTTAEQPSPHPSKSPSHHDLSSTSTNDSSSRSPSSLQITSPSSTSSFQSITSLNKHSSRKQRKVYNQKNARKNILTSREPITSNLLQKTSSTFMDVAQTADSAGDTVPTTSEKKMRRKWSTEMNEFILRTYLEITKLGTNNRTYLEPLYVKFINRFPDIQVSKQRIGDQRRAIIRNKLLTNQRINEITKEVQIQLNLTQNTNTTIQNTNNTGMIPHQHSQRMKWTNEYNEAIIRSYFKVTQLETNKTAYRKQMHREFISIFPFLENISEQRIADQRRIIIDNGYLTQERIAEIKEEIAAELRITSHIGKSADHNNTSLVQTNPSNQSMGQTVLSQNNTINNNFESNKNIGVEGITNNTTTLACENTLDEQNLSFMNSINQELLVDQTLPTQSNPEPNTEIDKIFNETLTYYSQTLPTNRAYIPKQRTSRKLAIAVQYINQVVLPKHVDKDTDFISLQTVIYCAAVTAAKCNGSKIKTLTINNSALRNNIHKPAWQLRLEKRKEDLRAKIGRLTQYIDGNRSRKIINQVEKIIENYKTHATYESENSQPIHVLDTLKQKLSVLTRRLKRYLDCTLRKSQNNQFSNNEKVFYRKLKNKIVEQQEKSSPLPGEIQRFWAHIWERPLVHNDNADWIRNEENKHSTIEIMPFEHFSLETFHNALRKLQNWKSPGSDNIHSYWYKKFSYIHPYLFNHINNFMNHPETMPKYVSEGITHMIQKDLSDPLNPAKYRPITCLQIIYKIITSCISETLYEHVKNNNLINEEQKGCIKFSQGCKEQLTIDSVILNKVFKEKKDLFTMYIDYKKAYDSVPHSWLFKVLNIYKVNPTIIHFLSITSQNWTTRLKINTSNGFELTDNIKIQRGIFQGDALSPLWFCLALNPLSNILNSSDIGYSLKYNLNNTYSQTSPHQNINSIKITHLLYMDDIKLYTSTQSDMNTLAQLTEIFSNDICMEFGIDKCKINSIKGGRNYEHHYTLTTGETIDPLEENTAYKYLGYNQTKQILNKETKTDLTKQFKTRLILLLKSQLNGRNLIKAINTYAIPILTYSFGIIHWSKTELKNIQRIINVNMSKNRKHHPRSCIQRLTLPRIDGGRGLIDIINLHNKQITTLRNYFHNKALTVNLHSSIVQNDIKYTPLNLADHTTQSNEKLTSKSDKIAAWAQKSLHGRHLQHLNLPNVDKKASNAWLRRGELFPETEGFMLAIQDQVIETRNYQKYIIKNLPSDICRKCNSAPETIQHITGACKAITQTDYKFRHDQVAKIIHQNLAQKYKLSNVDLPYYKYTPETVIENDTHKLYYDRTILTDKTIHFNRPDITLIDKNNQTAMIIDIAIPNTHNLQNTISEKLSKYLELKQEITKMWKLQKVSIIPIVLSSTGVIPIQLHKSLQLLNLPPYIYISLQKTTILNTCRIVRKFLQTEDDEQDATASWLLDI

SEQ ID NO: 7148 - protein, 1297 aa, Anthocharis cardamines
MYIYNNNNNNNRTYLEPLYVKFINRFPHIQVSKQRIGDQRRAIIRNKLLTNERINEITKEVQIQLNLTQNTNSTIQNTISTDMITRQHSQRMKWTNEYNEAIIRSYFKVTQLETNKTAYRKQMHREFITIFPFLENISEQRIADQRRIIIDNGYLTQERIAEIKEEIAAELRITTCHIEKSTDHDNTSLVQTNPSNQSTGQTVLSQNSTINNSFESNKNIGVGGITNNTTTTACEYILDEQNLSFLNSINPELLDNQTLPTQSYPEHNTEIDKIFNESLTYYSQTLPTNRAYIPKQRTSRKLAIAVQYINQVILPKHVDKDTDFISLQTVIYCAAVTAAKYNGSKIKNLTMNNSAFRNNIHKPAWQLRLEKRKEDLRAKIGRLTQYIDGNRSRKIINQVEKIIENYKTHATYELENSQPIHVLDTLKQKLSVLTRRLKRYLDCTLRKSQNNQFSNNEKVFYRKLKNKIVEQQEKSSPLPGELQRFWAHIWERPLAHNDNADWIRNEENKHSTLETMPFEHFNPETFHNALRKLQNWKSPGSDNIHSYWYKKFSHIHPYLYNHINNFMNHPETMPKYISEGITHMIQKDLSDPLNPTKYRPITCLQIIYKIITSCITETLYEHVKNNNLISEEQKGCIKFSQGCKEQLTIDSVILNKVFKEKKDLFTMYIDYKKAYDSVPHSWLFKVLSIYKVNPTIIHFLSITSQNWTTRLKIYTSNGFELTDNIKIQRGIFQGDALSPLWFCLALNPLSNILNSSDIGYSLKYNINNTYSQTSPHQNINSIKITHLLYMDDIKLYTSTQSDMNTLAHLTEIFSNDICMEFGIDKCKINSIKGGRNHEHHYTLTTGETIDPLEENTAYKYLGYNQSKQILNKETKTDLTKQFKTRLILLLKSQLNGRNLIKAINTYAIPVLTYSFGIIHWSKTELKNIQRIINVNMSKNRKHHPRSCIQRLTLPRIDGGRGLIDIINLHNKQITTLRNYFHNKALTVNLHSSIVQNDMKYTPLNLADHTTQSNEKLTSKSDKIAAWAQKSLHGRHLQHLNLPNVDKKASNAWLRRGELFPETEGFMLAIQDQVIETRNYQRYIIKNLPSDICRKCNSAPETIQHITGACKAITQTDYKFRHDQVAKIIHQNLAQKYKLSNVDLPYYKYTPETVIENDTHKLYYDRTILTDKTIHFNRPDITLIDKNNQTAMIIDIAIPNTHNLQNTISEKLSKYLELKQEITKMWKLQKVSIIPIVLSSTGVIPIQLHKSLQILNLPPYIYISLQKTTILNTCRIVRKFLQTEDDEQDATASWLLDI

SEQ ID NO: 7149 - protein, 1475 aa, Anthocharis cardamines
MYSMESKPKRYNLRPLPGGRRGASGANAGCYSMRTVGDGGLNRRVPLDKTTTAEQPSPHPSKSPSHHDLSSTSTNDSSSRSPSSLQITSPSSTSSFQSITSLNKHSSRKQRKVYNQKNARKNILTSREPITSNLLQKTSSTFMDVAQTADSAGDTVPTTSEKKMRRKWSTEMNEFILRTYLEITKLGTNNRTYLEPLYVKFINRFPHIQVSKQRIGDQRRAIIRNKLLTNQRINEITKEVQIQLNLTQNTNTTIQNTNNTGMIPHQHSQRMKWTNEYNEAIIRSYFKVTQLETNKTAYRKQMHREFISIFPFLENISEQRIADQRRIIIDNGYLTQERIAEIKEEVAAELRITSHIGKSADHNNTSLVQTNPSNQSMGQTVLSQNNTINNNFESNKNIGVEGITNNTTTLACENTLDEQNLSFMNSINQELLVDQTLPTQSNPEPNTEIDKIFNETLTYYSQTLPTNRAYIPKQRTSRKLAIAVQYINQVVLPKHVDKDTDFISLQTVIYCAAVTAAKCNGSKIKTLTINNSAFRNNIHKPAWQLRLEKRKEDLRAKIGRLTQYIDGNRSRKIINQVEKIIENYKTHATYESENSQPIHVLDTLKQKLSVLTRRLKRYLDCTLRKSQNNQFSNNEKVFYRKLKNKIVEQQEKSSPLPDEIQRFWAHIWERPLVHNDNADWIRNEENKHSTIETMPFEHFSLETFHNALRKLQNWKSPGSDNIHSYWYKKFSYIQPYLFNHINNFMNHPETMPKYVSEGITHMIQKDLSDPLNPAKYRPITCLQIIYKIITSCISETLYEHVKNNNLINEEQKGCIKFSQGCKEQLTIDSVILNKVFKEKKDLFTMYIDYKKAYDSVPHSWLFKVLNIYKVNPTIIHFLSITSQNWTTRLKINTSNGFELTDNIKIQRGIFQGDALSPLWFCLALNPLSNILNSSDIGYSLKYNLNNTYSQTSPHQNINSIKITHLLYMDDIKLYTSTQSDMNTLAQLTEIFSNDICMEFGIDKCKINSIKGGRNYEHHYTLTTGETIDPLEENTAYKYLGYNQTKQILNKETKTDLTKQFKTRLILLLKSQLNGRNLIKAINTYAIPILTYSFGIIHWSKTELKNIQRIINVNMSKNRKHHPRSCIQRLTLPRIDGGRGLIDIINLHNKQITTLRNYFHNKALTVNLHSSIVQNDIKYTPLNLADHTTQSNEKLTSKSDKIAAWAQKSLHGRHLQHLNLPNVDKKASNAWLRRGELFPETEGFMLAIQDQVIETRNYQKYIIKNLPSDICRKCNSAPETIQHITGACKAITQTDYKFRHDQVAKIIHQNLAQKYKLSNVDLPYYKYTPETVIENDTHKLYYDRTILTDKTIHFNRPDITLIDKNNQTAMIIDIAIPNTHNLQNTISEKLSKYLELKQEITKMWKLQKVSIIPIVLSSTGVIPIQLHKSLQLLNLPPYIYISLQKTTILNTCRIVRKFLQTEDDEQDATASWLLDI

SEQ ID NO: 7150 - protein, 1476 aa, Anthocharis cardamines
MYSMESKPKRYNLRPLPGGRRGASGANAGCYSMRTVGDGGLNRRVPLDKMTTAEQPSPHPSESPTHHDLSSSSTNDSSSRSPSSLQITSPSSTSSFQSITSLTSRNKHSSRKQRKVFNLKNARKNILTSRESITSNLLQKASTTFMDVAQTAGSAGDTVPTTNENEKKMRRKWSTEMNEFILRTYLEITKLGTNNRTYLEPLYVKFINRFPHIQVSKQRIGDQRRAIIRNKLLTNERINEITKEVQIQLNLTQNTNSTIQNTNSTDMITRQHSQRMKWTNEYNETIIRSYFKVTQLETNKTAYRKQMHREFISIFPFLENISEQRIADQRRIIIENGYLTQERIAEIKEEIAAELRITTSHIEKSTDHDNTSLVQTNPSNQSTGQTVSSQNSTINNNFESNKNIGVGGITNNSTTTACENTLDEQNLSFLNSINPELLDDQTLPTQSNPEHNTEIDKIFNESLTYYSQTLPTNRAYIPKQRTSRKLAIAVQYINQVILPKHVDKDTDFISLQTVIYCAAVTAAKYNGSKIKNLTMNNSAFRNNIYKPAWQLRLEKRKEDLRAKIGRLTQYIDGNRSRKIINQVEKIIENYKTHATYELENSQPIHVLDTLKQKLSVLTRRLKRYLDCTLRKSQNNQFSNNEKVFYQKLKNKIGEQQEKSSPLPGELQRFWAHIWERPLAHNDNADWIRNEENKHSTLETMPFEHFSPETFHNALRKLQNWKSPGSDNIHSYWYKKFAHIHPYLYNHINNFMNHPETMPKYVSEGITHMIQKDLSDPLNPTKYRPITCLQIIYKIITSCITETLYEHVKNNNLISEEQKGCIKFSQGCKEQLTIDSVILNKVFKEKKDLFTMYIDYKKAYDSVPHSWLFKVLNIYKVNPTIIHFLSITSQNWTTRLKIYTSNGFELTDNIKIQRGIFQGDALSPLWFCLALNPLSNILNSSDIGYSLKYNLNNTYSQTSPHQNINSIKITHLLYMDDIKLYTSTQSDMNTLAHLTEIFSNDICMEFGIDKCKINSIKGGRNHEHHYTLTTGETIDPLEENTAYKYLGYNQSKQILNKETKTDLTKQFKTRLVLLLKSQLNGRNLIKAINTYAIPILTYSFGIIHWSKTELKNIQRIINVNMSKNRKHHPRSCIQRLTLPRIDGGRGLIDIINLHNKQITTLRNYFHNKALTVNLHSSIVQNDMKYTPLNLADHTTQSNEKLTSKSDKIAAWAQKSLHGRHLQHLNLPNVDKKASNAWLRRGELFPETEGFMLAIQDQVIETRNYQKYIIKNLPSDICRKCNSAPETIQHITGACKAITQTDYKFRHDQVAKIIHQNLAQKYKLSNVDLPYYKYTPETVIENDTHKLYYDRTILTDKTIHFNRPDITLIDKNNQTAMIIDIAIPNTHNLQNTISEKLSKYLELKQEITKMWKLQKVSIIPIVLSSTGVIPIQLHKSLQLLNLPPYIYISLQKTTILNTCRIVRKFLQTEDDEQDATAS

SEQ ID NO: 7151 - protein, 777 aa, Anthocharis cardamines
MPFEHFSLETFHNALRKLQNWKSPGSDNIHSYWYKKFSYIHPYLFNHINNFMNHPETMPKYVSEGITHMIQKDLSDPLNPAKYRPITCLQIIYKIITSCISETLYEHVKNNNLINEEQKGCIKFSQGCKEQLTIDSVILNKVIKEKNDLFTMYIDYKKAYDSVPHSWLFKVLNIYKVNPTIIHFLSITSQNWTTRLKINTSNGFELTDNIKIQRGIFQGDALSPLWFCLALNPLSNILNSSDIGYPLKYNLNNTYPQTSPHQNINSIKITHLLYMDDIKLYTSTQSDMNTLAQLTEIFSNDICMEFGIDKCKINSIKGGRNYEHHYTLTTGETIDPLEENTAYKYLGYNQTKQILNKETKTDLTKQFKTRLILLLKSQLNGRNLIKAINTYAIPILTYSFGIIHWSKTELKNIQRIINVNMSKNRKHHPRSCIQRLTLPRIDGGRGLIDIINLHNKQITTLRNYFHNKALTVNLHSSIVQNDMKYTPLNLADHTIQSNEKLTSKSDKVAAWAQKSLHGRHLQHLNLPNVDKKASNAWLRRGELFPETEGFMLAIQDQVIETRNYQKYIIKNLPSDICRKCNSAPETIQHITGACKAITQTDYKFRHDQVAKIIHQNLAQKYKLSNVDLPYYKYTPETVIENDTHKLYYDRTILTDKTIHFNRPDITLIDKNNQTAMIIDIAIPNTHNLQNTISEKLSKYLELKQEITKMWKLQKVSIIPIVLSSTGVIPIQLHKSLQLLNLPPYIYISLQKTTILNTCRIVRKFLQTEDDEQDATAS

SEQ ID NO: 7152 - protein, 1478 aa, Anthocharis cardamines
MYSMESKPKRYNLRPLPGGRRGASGANAGCYSMRTVGDGGLNRRVPLDKMTTAEQPSPHPSESPTHHELSSSSTNDSSSRSPSSLQITSPSSTSSFQSITSLTSRNKYSSRKQRKVFNLKNARKNILTSRESITSNLLQKASTTFMDVAQTAGSAGDTVPTTNENEKKMRRKWSTEMNEFILRTYLEITKLGTNNRTYLEPLHVKFINRFPHIQVSKQRIGDQRRAIIRNKLLTNERINEITKEVQIQLNLTQNTNSTIQNTNSTDMITRQHSQRMKWTNEYNEAIIRSYFKVTQLETNKTAYRKQMHREFITIFPFLENISEQRIADQRRIIIDNGYLTQERIAEIKEEIAAELRITTSHIEKSTDHDNTSLVQTNPSNQSTGQTVLSQNSTINNSFESNKNIGVGGITNNTTTTACEYILDEQNLSFLNSINPELLDNQTLPTQSYPEHNTEIDKIFNESLTYYSQTLPTNRAYIPKQRTSRKLAIAVQYINQVILPKHVDKDTDFISLQTVIYCAAVTAAKYNGSKIKNLTMNNSAFRNNIHKPAWQLRLEKRKEDLRAKIGRLTQYIDGNRSRKIINQVEKIIENYKTHATYELENSQPIHVLDTLKQKLSVLTRRLKRYLDCTLRKSQNNQFSNNEKVFYRKLKNKIVEQQEKSSPLPGELQRFWAHIWERPLAHNDNADWIRIEENKHSTLETMPFEHFSPETFHNALRKLQNWKSPGSDNIHSYWYKKFSHIHPYLYNHINNFMNHPETMPKYISEGITHMIQKDLSDPLNPTKYRPITCLQIIYKIITSCITETLYEHVKNNNLISEEQKGCIKFSQGCKEQLTIDSVILNKVFKEKKDLFTMYIDYKKAYDSVPHSWLFKVLSIYKVNPTIIHFLSITSQNWTTRLKMYTSNGFELTDNIKIQRGIFQGDALSPLWFCLALNPLSNILNSSDIGYSLKYNLNNTYSQTSPHQNINSIKITHLLYMDDIKLYTSTQSDMNTLAHLTEIFSNDICMEFGIDKCKINSIKRGRNHEHHYTLTTGETIDPLEENTAYKYLGYNQSKQILNKETKTDLTKQFKTRLILLLKSQLNGRNLIKAINTYAIPVLTYSFGIIHWSKTELKNIQRIINVNMSKNRKHHPRSCIQRLTLPRIDGGRGLIDIINLHNKQITTLRNYFHNKALTVNLHSSIVQNDMKYTPLNLADHTTQSNEKLTSKSDKIAAWAQKSLHGRHLQHLNLPNVDKKASNAWLRRGELFPETEGFMLAIQDQVIETRNYQRYIIKNLPSDICRKCNSAPETIQHITGACKAITQTDYKFRHDQVAKIIHQNLAQKYKLSNVDLPYYKYTPETVIENDTHKLYYDRTILTDKTIHFNRPDITLIDKNNQTAMIIDIAIPNTHNLQNTISEKLSKYLELKQEITKMWKLQKVSIIPIVLSSTGVIPIQLHKSLQILNLPPYIYISLQKTTILNTCRIVRKFLQTEDDEQDATALGY

SEQ ID NO: 7153 - protein, 1466 aa, Anthocharis cardamines
MESKPKSYNLRPLPGGRRGASGANAGCYSMRTVGDGGLNRRVPLDKTTTAEQPSPHPSKSPTHHDLSSTSTNDSSSRSPSSLQITSPSSTSSFQSITSLNKHSSRKQRKVYNQKNARKNILTSRESITSNLQKTSTTFMDVAQTADSAGNTVPTTSEKKMRRKWSTEMNEFILRTYLEITKLGTNNRTYLEPLYVKFINRFPHIQVSKQRIGDQRRAIIRNKLLTNQRINEITKEVQIQLNLTQNTNTTIQNTNSTDMIPHQHSQRMKWTNEYNEAIIRSYFKVTQLETNKTAYRKQMHREFISIFPFLENVSEQRIADQRRIIIDNGYLTQERIAEIKEEIAAELRITSHIDNSADHNNTSLVQTNPSNQSMGQTVSSQNSTINNNFETNKNIGVEGITNNTTTLASENTLDEQNVSFMNSIIQELLVDQTLPTQSNPEPNTEIDKIFNETLTYYSQTLPTNRAYIPKQRTSRKLAIAVQYINQVVLPKHIDKDTDFISLQTVIYCAAVTAAKCNGSKIKTLTINNSAFRNNKHKPAWQLRLEKRKEDLRAKIGRLTQYIDGNRSRKIINQVAKIIENYKTHATYESENSQPIHVLDTLKQKLSVLTRRLKRYLDCTLRKSQNNQFSNNEKVFYRKLKNEIVEQQEKSSPLPGELQRFWAHIWERPLVHNDNADWIRNEENKYSTIETMPFEHFSLETFHNALRKLQNWKSPGSDNIHSYWYKKFSYIHPYLFNHINNFMNYPETMPKYVSEGITHMIQKDLSDPLNPAKYRPITCLQIIYKIITSCISETLYEHVKNNNLINEEQKGCIKFSQGCKEQLTIDSVILNKVIKEKKDLFTMYIDYKKAYDSVPHSWLFKVLNIYKVNPTIIHFLSITSQNWTTRLKINTSNGFELTDNIKIQRGIFQGDALSPLWFCLALNPLSNILNSSDIGYPLKYNLNNTYPQTSPHQNINSIKITHLLYMDDIKLYTSTQSDMNTLAQLTEIFSNDICMEFGIDKCKINSIKGGRNYEHHYTLTTGETIDPLEENTAYKYLGYNQTKQILNKETKTDLTKQFKTRLILLLKSQLNGRNLIKAINTYAIPILTYSFGIIHWSKTELKNIQRIINVNMSKNRKHHPRSCIQRLTLPRIDGGRGLIDIINLHNKQITTLRNYFHNKALTVNLHSSIVQNDMKYTPLNLADHTIQSNEKLTSKSDKVAAWAQKSLHGRHLQHLNLPNVDKKASNAWLRRGELFPETEGFMLAIQDQVIETRNYQKYIIKNLPSDICRKCNSAPETIQHITGACKAITQTDYKFRHDQVAKIIHQNLAQKYKLSNVDLPYYKYTPETVIENDTHKLYYDRTILTDKTIHFNRPDITLIDKNNQTAMIIDIAIPNTHNLQNTISEKLSKYLELKQEITKMWKLQKVSIIPIVLSSTGVIPIQLHKSLQLLNLPPYIYISLQKTTILNTCRIVRKFLQTEDDEQDATAS

SEQ ID NO: 7154 - protein, 1360 aa, Anthocharis cardamines
MASNFFIILTSREPITSNLLQKTSSTFMDVAQTADSAGDTVPTTSEKKMRRKWSTEMNEFILRTYLEITKLGTNNRTYLEPLYVKFINRFPHIQVSKQRIGDQRRAIIRNKLLTNQRINEITKEVQIQLNLTQNTNTTIQNTNNTGMIPHQHSQRMKWTNEYNEAIIRSYFKVTQLETNKTAYRKQMHREFISIFPFLENISEQRIADQRRIIIDNGYLTQERIAEIKEEIAAELRITSHIGKSADHNNTSLVQTNPSNQSMGQTVLSQNNTINNNFESNKNIGVEGITNNTTTLACENTLDEQNLSFMNSINQELLVDQTLPTQSNPEPNTEIDKIFNETLTYYSQTLPTNRAYIPKQRTSRKLAIAVQYINQVVLPKHVDKDTDFISLQTVIYCAAVTAAKCNGSKIKTLTINNSAFRNNIHKPAWQLRLEKRKEDLRAKIGRLTQYIDGNRSRKIINQVEKIIENYKTHATYESENSQPIHVLDTLKQKLSVLTRRLKRYLDCTLRKSQNNQFSNNEKVFYRKLKNKIVEQQEKSSPLPGEIQRFWAHIWERPLVHNDNADWIRNEENKHSTIETMPFEHFSLETFHNALRKLQNWKSPGSDNIHSYWYKKFSYIHPYLFNHINNFMNHPETMPKYVSEGITHMIQKDLSDPLNPAKYRPITCLQIIYKIITSCISETLYEHVKNNNLINEEQKGCIKFSQGCKEQLTIDSVILNKVFKEKKDLFTMYIDYKKAYDSVPHSWLFKVLNIYKVNPTIIHFLSITSQNWTTRLKINTSNGFELTDNIKIQRGIFQGDALSPLWFCLALNPLSNILNSSDIGYSLKYNLNNTYSQTSPHQNINSIKITHLLYMDDIKLYTSTQSDMNTLAQLTEIFSNDICMEFGIDKCKINSIKGGRNYEHHYTLTTGETIDPLEENTAYKYLGYNQTKQILNKETKTDLTKQFKTRLILLLKSQLNGRNLIKAINTYAIPILTYSFGIIHWSKTELKNIQRIINVNMSKNRKHHPRSCIQRLTLPRIDGGRGLIDIINLHNKQITTLRNYFHNKALTVNLHSSIVQNDIKYTPLNLADHTTQSNEKLTSKSDKIAAWAQKSLHGRHLQHLNLPNVDKKASNAWLRRGELFPETEGFMLAIQDQVIETRNYQKYIIKNLPSDICRKCNSAPETIQHITGACKAITQTDYKFRHDQVAKIIHQNLAQKYKLSNVDLPYYKYTPETVIENDTHKLYYDRTILTDKTIHFNRPDITLIDKNNQTAMIIDIAIPNTHNLQNTISEKLSKYLELKQEITKMWKLQKVSIIPIVLSSTGVIPIQLHKSLQLLNLPPYIYISLQKTTILNTCRIVRKFLQTEDDEQDATASWLLDI

SEQ ID NO: 7155 - protein, 1472 aa, Anthocharis cardamines
MYSMESKPKRYNLRPLPGGRRGASGANAGCYSMRTVGDGGLNRRVPLDKTTTAEQPSPHPSKSPSHHDLSSTSTNDSSSRSPSSLQITSPSSTSSFQSITSLNKHSSRKQRKVYNQKNARKNILTSREPITSNLLQKTSSTFMDVAQTADSAGDTVPTTSEKKMRRKWSTEMNEFILRTYLEITKLGTNNRTYLEPLYVKFINRFPHIQVSKQRIGDQRRAIIRNKLLTNQRINEITKEVQIQLNLTQNTNTTIQNTNNTGMIPHQHSQRMKWTNEYNEAIIRSYFKVTQLETNKTAYRKQMHREFISIFPFLENISEQRIADQRRIIIDNGYLTQERIAEIKEEIAAELRITSHIGKSADHNNTSLVQTNPSNQSMGQTVLSQNNTINNNFESNKNIGVEGITNNTTTLACENTLDEQNLSFMNSINQELLVDQTLPTQSNPEPNTEIDKIFNETLTYYSQTLPTNRAYIPKQRTSRKLAIAVQYINQVVLPKHVDKDTDFISLQTVIYCAAVTAAKCNGSKIKTLTINNSAFRNNIHKPAWQLRLEKRKEDLRAKIGRLTQYIDGNRSRKIINQVEKIIENYKTHATYESENSQPIHVLDTLKQKLSVLTRRLKRYLDCTLRKSQNNQFSNNEKVFYRKLKNKIVEQQEKSSPLPGEIQRFWAHIWERPLVHNDNADWIRNEENKHSTIETMPFEHFSLETFHNALRKLQNWKSPGSDNIHSYWYKKFSYIHPYLFNHINNFMNHPETMPKYVSEGITHMIQKDLSDPLNPAKYRPITCLQIIYKIITSCISETLYEHVKNNNLINEEQKGCIKFSQGCKEQLTIDSVILNKVFKEKKDLFTMYIDYKKAYDSVPHSWLFKVLNIYKVNPTIIHFLSITSQNWTTRLKINTSNGFELTDNIKIQRGIFQGDALSPLWFCLALNPLSNILNSSDIGYSLKYNLNNTYSQTSPHQNINSIKITHLLYMDDIKLYTSTQSDMNTLAQLTEIFSNDICMEFGIDKCKINSIKGGRNYEHHYTLTTGETIDPLEENTAYKYLGYNQTKQILNKETKTDLTKQFKTRLILLLKSQLNGRNLIKAINTYAIPILTYSFGIIHWSKTELKNIQRIINVNMSKNRKHHPRSCIQRLTLPRIDGGRGLIDIINLHNKQITTLRNYFHNKALTVNLHSSIVQNDIKYTPLNLADHTTQSNEKLTSKSDKIAAWAQKSLHGRHLQHLNLPNVDKKASNAWLRRGELFPETEGFMLAIQDQVIETRNYQKYIIKNLPFDICRKCNSAPETIQHITGACKAITQTDYKFRHDQVAKIIHQNLAQKYKLSNVDLPYYKYTPETVIENDTHKLYYDRTILTDKTIHFNRPDITLIDKNNQTAMIIDIAIPNTHNLQNTISEKLSKYLELKQEITKMWKLQKVSIIPIVLSSTGVIPIQLHKSLQLLNLPPYIYISLQKTTILNTCRIVRKFLQTEDDEQDATGLGY

SEQ ID NO: 7156 - protein, 1206 aa, Anthocharis cardamines
MKWTNEYNEAIIRSYFKVTQLETNKTAYRKQMHREFITIFPFLENISEQRIADQRRIIIDNGYLTQERIAEIKEEIAAELRITTCHIEKSTDHDNTSLVQTNPSNQSTGQTVLSQNSTINNSFESNKNIGVGGITNNTTTTACEYILDEQNLSFLNSINPELLDNQTLPTQSYPEHNTEIDKIFNESLTYYSQTLPTNRAYIPKQRTSRKLAIAVQYINQVILPKHVDKDTDFISLQTVIYCAAVTAAKYNGSKIKNLTMNNSAFRNNIHKPAWQLRLEKRKEDLRAKIGRLTQCIDGNRSRKIINQVEKIIENYKTHATYELENSQPIHVLDTLKQKLSVLTRRLKRYLDCTLRKSQNNQFSNNEKVFYRKLKNKIVEQQEKSSQLPGELQRFWAHIWERPLAHNDNADWIRNEENKHSTLETMPFEHFNPETFHNALRKLQNWKSPGSDNIHSYWYKKFSHIHPYLYNHINNFMNHPETMPKYISEGITHMIQKDLSDPLNPTKYRPITCLQIIYKIITSCITETLYEHVKKNNLISEEQKGCIKFSQGCKEQLTIDSVILNKVFKEKKDLFTMYIDYKKAYDSVPHSWLFKVLSIYKVNPTIIHFLSITSQNWTTRLKIYTSNGFELTDNIKIQRGIFQGDALSPLWFCLALNPLSNILNSSDIGYSLKYNINNTYSQTSPHQNINSIKITHLLYMDDIKLYTSTQSDMNTLAHLTEIFSNDICMEFGIDKCKINSIKGGRNHEHHYTLTTGETIDPLEENTAYKYLGYNQSKQILNKETKTDLTKQFKTRLILLLKSQLNGRNLIKAINTYAIPVLTYSFGIIHWSKTELKNIQRIINVNMSKNRKHHPRSCIQRLTLPRIDGGRGLIDIINLHNKQITTLRNYFHNKALTVNLHSSIVQNDMKYTPLNLADHTTQSNEKLTSKSDKIAAWAQKSLHGRHLQHLNLPNVDKKASNAWLRRGELFPETEGFMLAIQDQVIETRNYQRYIIKKLPSDICRKCNSAPETIQHITGACKAITQTDYKFRHDQVAKIIHQILAQKYKLSNVDLPYYKYTPETVIENDTHKLYYDRTILTDKTIHFNRPDITLIDKNNQTAMIIDIAIPNTHNLQNTISEKLSKYLELKQEITKMWKLQKVSIIPIVLSSTGVIPIQLHKSLQILNLPPYIYISLQKTTILNTCRIVRKFLQTEDDEQDATASWLLDI

SEQ ID NO: 7157 - protein, 1469 aa, Colias croceus
MEEVGGKRRYNLRSLPGGRRGASGASAGCHSMRSVGEEELNRRVPLEKLTTAEQSLSPSCLSSSSNQSPVSNITTTTAYSPTKSPISLQETSPSSICSSNTNASSTFSYKLRNRPKVRQLNIIHKTTTSRQNLITPNSLSNPSLSLVDVAQTADSAGITVPTSSEITTRRKWSTEMNEFILRTYLEITALGTDNRTYLEPLYNKFINRYPHIQVSRQRIGDQRRAIVRNKLLSDERIAEITKEVQQQNSLTQNSNNNQYSKPTEPTTHEQSQRMRWTQEYNEAIIRSYFRVTHLETNKTSYRKQMHQDFISKFPHLEHISEQRVADQRRIIINNRYLTKEKIACIKKEVAAELGITNYNENSFENTNILTLQTNVLNEDNRVSHDRFINSQPTTTNETEATHNITSQLLETRSTNTVELLNEQNNLPFIYSILNDEPTGQTQEQQQNNPESIEEIDTIFNENLSIYLQTSPTERAYIPKQKVTKKLNTAVQYLNQVILPKHIDCNTDFISLQTIIYCSALTAAKYNGSKIHTPSIDSTQVRNKTHKPAWQRRLQKKIEDLRIKIGRLTQYIDNNRSRKVMKHVNKILEDYKTHATYEPENNKPVHVLDTLKQKLSVASQRLKRYTTCTLRKTQNIQFSNNEKLFYRNLHNQQANHHHNRYPTTDNLRNFWANLWEQPLEHNDRAEWITDEENRYLNLETMQFENIDSEIFVNTLSKLKNWKSPGSDNVHSFWYKKFTYIHPFLLDHINNFILHPETIPPYITEGITHMIPKDSTDPLNPAKYRPITCLQIIYKIITSCIAETINKHVSNNNLISEEQKGCRKFSQGCKEQLIIDSVILKQVLKEKKDLFTMYVDYKKAYDSVPHSWLFKVLSIYKVNPILIDFLSAASKQWSTRLKINTCNGHQLTDSIKIQRGIFQGDSLSPLWFCLALNPLSNILNFYDLGFPLICNPHVNTEICSNRNNNTLKITHLLYMDDIKLYASSQNHMNKLAQLTENFSKDICMEFGIDKCKVNSVKAGRNHEHFYLLSTGEKIDPLDQNSTYRYLGYNQSKQILNKETKIELTNQFKNRLNILLKSMLNARNLVKAINTYAIPILTYSFGIINWSKSELKNIQRIINVNMSKNRKHHPRSCIQRLTLPRIDGGRGFIDIVNLHNKQITTLRKFFHTKAPTVMLHNAIVQNDIKLTPLNLADNTTQRNETLISKCDKLAAWTQKSLHGRHIQHLNLPHVDKAASNAWLKRGELFPETEGFMLAIQDQVIETRNYQKYIIKNLPSDICRKCNSAPETIQHITGACKAITQSDYKHRHDQIANIIHQKLAQKYKLISYDKTPYYKYIPETILENNSYKLYYDRTILTDKTIHYNRPDITLIDKHEKNALIIDIAVPNTHNLPNTITEKLTKYTELKQEIAKMWKLQNVIIVPIVLSTTGVIPTQLHKYIELLHLPKHTYMQLQKAAILNTCRIVRKFLQTENE

SEQ ID NO: 7158 - protein, 1469 aa, Colias croceus
MEEVGGKRRYNLRSLPGGRRGASGASAGCYSMRSVGEEELNRRVPLEKLTTAEQSLSPSCLSSSSNQSPVSNITTTTAYSPTKSPISLQETSPSSICSSNTNASSTFSYKLRNRPKVRQLNIIHKTTTSRQNLITPNSLSNPSLSLVDVAQTADSAGITVPTSSEITTRRKWSTEMNEFILRTYLEITALGTDNRTYLEPLYNKFINRYPHIQVSRQRIGDQRRAIVRNKLLSDERIAEITKEVQQQNSLTQNSNNNQYSKPTEPTTHEQSQRMRWTQEYNEAIIRSYFRVTHLETNKTSYRKQMHQDFISKFPHLEHISEQRVADQRRIIINNRYLTKEKIAGIKKEVAAELGITNYNENSFENTNILTLQTNVLNEDNRVSHDRFINSQPTTTNETEATHNITSQLLETRSTNTVELLNEQNNLPFIYSILNDEPTGQTQEQQQNNPESIEEIDTIFNENLSIYLQTSPTERAYIPKQKVTKKLNTAVQYLNQVILPKHIDCNTDFISLQTIIYCSALTAAKYNGSKIHTPSIDSTQVRNKTHKPAWQRRLQKKIEDLRIKIGRLTQYIDNNRSRKVMKHVNKILEDYKTHATYEPENNKPVHVLDTLKQKLSVASQRLKRYTTCTLRKTQNIQFSNNEKLFYRNLHNQQANHHHNRYPTTDDLRNFWANLWEQPLEHNDRAEWITDEENRYLNLETMQFENIDSEIFVNTLSKLKNWKSPGSDNVHSFWYKKFTYIHPFLLDHINNFILHPETIPPYITEGITHMIPKDSTDPLNPAKYRPITCLQIIYKIITSCIAETINKHVSNNNLISEEQKGCRKFSQGCKEQLIIDSVILKQVLKEKKDLFTMYVDYKKAYDSVPHSWLFKVLNIYKVNPILIDFLSAASKQWSTRLKINTCNGHQLTDSIKIQRGIFQGDSLSPLWFCLALNPLSNILNFYDLGFPLICNPHVNTEICSNRNNNTLKITHLLYMDDIKLYASSQNHMNKLAQLTENFSKDICMEFGIDKCKVNSVKAGRNHEHFYLLSTGEKIDPLDQNSTYRYLGYNQSKQILNKETKIELTNQFKNRLNILLKSMLNARNLVKAINTYAIPILTYSFGIINWSKSELKNIQRIINVNMSKNRKHHPRSCIQRLTLPRIDGGRGFIDIVNLHNKQITTLRKFFHTKAPTVMLHNAIVQNDIKLTPLNLADNTTQRNETLISKCDKLAAWTQKSLHGRHIQHLNLPHVDKAASNAWLKRGELFPETEGFMLAIQDQVIETRNYQKYIIKNLPSDICRKCNSAPETIQHITGACKAITQSDYKHRHDQIANIIHQKLAQKYKLISYDKTPYYKYIPETILENKSYKLYYDRTILTDKTIHYNRPDITLIDKHEKNALIIDIAVPNTHNLPNTITEKLTKYTELKQEITKMWKLQNVIIVPIVLSTTGVIPTQLQKYIELLHLPKHTYMQLQKAAILNTCRIVRKFLQTENE

SEQ ID NO: 7159 - protein, 1519 aa, Colias croceus
MGRLRLVSHNTLNSLKGLCVLDLCPHVSLPKDRVSSLRRYPCIMERDIIIMEEVGGKRRYNLRSLPGGRRGASGASAGCYSMRTVGEEELNRRVPLEKLTTAEQSLSPSCLSSSSNQSPISNITTTTAYSPTKSPISLQETSPSSICSSNTNASSTFSYKLRNRPKVRQLNIIHKTTTSRQNLITPNSLSNPSLSLVDVAQTADSAGITVPTSNEITTRRKWSTEMNEFILRTYLEITALGTDNRTYLEPLYNKFINRYPHIQVSRQRIGDQRRAIVRNKLLSDERIAEITKEVQQQNSLTQNSNNNQYSKPTEPTTHEQSQRMRWTQEYNEAIIRSYFRVTHLETNKTSYRKQMHQDFISKFPHLEHISEQRVADQRRITINNRYLTKEKIAGIKKEVAAELGITNYNENSFENTNILTLQTNVLNEDNRVSHDRFINSQPTTTNETEATHNITSQLLETRSTNTVELLNEQNNLPFIYSILNDEPTGQTQEQQQNNPESIEEIDTIFNENLSIYLQTSPTERAYIPKQKVTKKLNTAVQYLNQVILPKHIDCNTDFISLQTIIYCSALTAAKYNGSKIHTPSIDSSQVRNKTHKPAWQRRLQKKIEDLRIKIGRLTQYIDNNRSRKVMKHVNKILEDYKTHATYEPENNKPVHVLDTLKQKLSVASQRLKRYTTCTLRKTQNIQFSNNEKLFYRNLHNQQANHHHNRYPTTDDLRNFWANLWEQPLEHNDRAEWITDEENRYLNLETMQFENIDSEIFVNTLSKLKNWKSPGSDNVHSFWYKKFTYIHPFLLDHINNFILHPETIPPYITEGITHMIPKDSTDPLNPAKYRPITCLQIIYKIITSCIAETINKHVSNNNLISEEQKGCRKFSQGCKEQLIIDSVILKQVLKEKKDLFTMYVDYKKAYDSVPHSWLFKVLNIYKVNPILIDFLSAASKQWSTRLKINTCNGHQLTDSIKIQRGIFQGDSLSPLWFCLALNPLSNILNFYDLGFPLICNPHVNTEICSNRNNNTLKITHLLYMDDIKLYASSQNHMNELAQLTENFSKDICMEFGIDKCKVNSVKAGRNHEHFYLLSTGEKIDPLDQNSTYRYLGYNQSKQILNKETKIELTNQFKNRLNILLKSMLNARNLVKAINTYAIPILTYSFGIINWSKSELKNIQRIINVNMSKNRKHHPRSCIQRLTLPRIDGGRGFIDIVNLHNKQITTLRKFFHTKAPTVMLHNAIVQNDIKLTPLNLADNTTQRNETLISKCDKLAAWTQKSLHGRHIQHLNLPHVDKAASNAWLKRGELFPETEGFMLAIQDQVIETRNYQKYIIKNLPSDICRKCNSAPETIQHITGACKAITQSDYKHRHDQIANIIHQKLAQKYKLISYDKTPYYKYIPETILENNSYKLYYDRTILTDKTIHYNRPDITLIDKHKKNALIIDIAVPNTHNLPNTITEKLTKYTELKQEITKMWKLQNVIIVPIVLSTTGVIPTQLHKYIELLHLPKHTYMQLQKAAILNTCRIVRKFLQTENE

SEQ ID NO: 7160 - protein, 1519 aa, Colias croceus
MGRLRLVSHNTLNSLKGLCVLDLCPHVSLPKDRVSSLRRYPCIMERDIIIMEEVGGKRRYNLRSLPGGRRGASGASAGCYSMRTVGEEELNRRVPLEKLTTAEQSLSPSCLSSSSNQSPISNITTTTAYSPTKSPISLQETSPSSICSSNTNASSTFSYKLRNRPKVRQLNIIHKTTTSRQNLITPNSLSNPSLSLVDVAQTADSAGITVPTSSEITTRRKWSTEMNEFILRTYLEITALGTDNRTYLEPLYNKFINRYPHIQVSRQRIGDQRRAIVRNKLLSDERIAEITKEVQQQNSLTQNSNNNQYSKPTEPTTHEQSQRMRWTQEYNEAIIRSYFRVTHLETNKTSYRKQMHQDFISKFPHLEHISEQRVADQRRITINNRYLTKEKIAGIKKEVAAELGITNYNENSFENTNILTLQTNVLNEDNRVSHDRFINSQPTTTNETEATHNITSQLLETRSTNTVELLNEQNNLPFIYSILNDEPTGQTQEQQQNNPESIEEIDTIFNENLSIYLQTSPTERAYIPKQKVTKKLNTAVQYLNQVILPKHIDCNTDFISLQTIIYCSALTAAKYNGSKIHTPSIDSSQVRNKTHKPAWQRRLQKKIEDLRIKIGRLTQYIDNNRSRKVMKHVNKILEDYKTHATYEPENNKPVHVLDTLKQKLSVASQRLKRYTTCTLRKTQNIQFSNNEKLFYRNLHNQQANHHHNRYPTTDDLRNFWANLWEQPLEHNDRAEWITDEENRYLNLETMQFENIDSEIFVNTLSKLKNWKSPGSDNVHSFWYKKFTYIHPFLLDHINNFILHPETIPPYITEGITHMIPKDSTDPLNPAKYRPITCLQIIYKIITSCIAETINKHVSNNNLISEEQKGCRKFSQGCKEQLIIDSVILKQVLKEKKDLFTMYVDYKKAYDSVPHSWLFKVLNIYKVNPILIDFLSAASKQWSTRLKINTCNGHQLTDSIKIQRGIFQGDSLSPLWFCLALNPLSNILNFYDLGFPLICNPHVNTEICSNRNNNTLKITHLLYMDDIKLYASSQNHMNELAQLTENFSKDICMEFGIDKCKVNSVKAGRNHEHFYLLSTGEKIDPLDQNSTYRYLGYNQSKQILNKETKIELTNQFKNRLNILLKSMLNARNLVKAINTYAIPILTYSFGIINWSKSELKNIQRIINVNMSKNRKHHPRSCIQRLTLPRIDGGRGFIDIVNLHNKQITTLRKFFHTKAPTVMLHNAIVQNDIKLTPLNLADNTTQRNETLISKCDKLAAWTQKSLHGRHIQHLNLPHVDKAASNAWLKRGELFPETEGFMLAIQDQVIETRNYQKYIIKNLPSDICRKCNSAPETIQHITGACKAITQSDYKHRHDQIANIIHQKLAQKYKLISYDKTPYYKYIPETILENNSYKLYYDRTILTDKTIHYNRPDITLIDKHKKNALIIDIAVPNTHNLPNTITEKLTKYTELKQEITKMWKLQNVIIVPIVLSTTGVIPTQLHKYIELLHLPKHTYMQLQKAAILNTCRIVRKFLQTENE

SEQ ID NO: 7161 - protein, 1519 aa, Colias croceus
MGRLRLVSHNTLNSLKGLCVLDLCSHVSLPKDRVSSLRRYPCIMERDIIIMEEVGGKRRYNLRSLPGGRRGASGASAGCYSMRTVGEEELNRRVPLEKLTTAEQSLSPSCLSSSSNQSPISNITTTTAYSPTKSPISLQETSPSSICSSNTNASSTFSYKLRNRPKVRQLNIIHKTTTSRQNLITPNSLSNPSLSLVDVAQTADSAGITVPTSSEITTRRKWSTEMNEFILRTYLEITALGTDNRTYLEPLYNKFINRYPHIQVSRQRIGDQRRAIVRNKLLSDERIAEITKEVQQQNSLTQNSNNNQYSKPTEPTTHEQSQRMRWTQEYNEAIIRSYFRVTHLETNKTSYRKQMHQDFISKFPHLEHISEQRVADQRRITINNRYLTKEKIAGIKKEVAAELGITNYNENSFENTNILTLQTNVLNEDNRVSHDRFINSQPTTTNETEATHNITSQLLETRSTNTVELLNEQNNLPFIYSILNDEPTGQTQEQQQNNPESIEEIDTIFNENLSIYLQTSPTERAYIPKQKVTKKLNTAVQYLNQVILPKHIDCNTDFISLQTIIYCSALTAAKYNGSKIHTPSIDSSQVRNKTHKPAWQRRLQKKIEDLRIKIGRLTQYIDNNRSRKVMKHVNKILEDYKTHATYEPENNKPVHVLDTLKQKLSVASQRLKRYTTCTLRKTQNIQFSNNEKLFYRNLHNQQANHHHNRYPTTDDLRNFWANLWEQPLEHNDRAEWITDEENRYLNLETMQFENIDSEIFVNTLSKLKNWKSPGSDNVHSFWYKKFTYIHPFLLDHINNFILHPETIPPYITEGITHMIPKDSTDPLNPAKYRPITCLQIIYKIITSCIAETINKHVSNNNLISEEQKGCRKFSQGCKEQLIIDSVILKQVLKEKKDLFTMYVDYKKAYDSVPHSWLFKVLNIYKVNPILIDFLSAASKQWSTRLKINTCNGHQLTDSIKIQRGIFQGDSLSPLWFCLALNPLSNILNFYDLGFPLICNPHVNTEICSNRNNNTLKITHLLYMDDIKLYASSQNHMNELAQLTENFSKDICMEFGIDKCKVNSVKAGRNHEHFYLLSTGEKIDPLDQNSTYRYLGYNQSKQILNKETKIELTNQFKNRLNILLKSMLNARNLVKAINTYAIPILTYSFGIINWSKSELKNIQRIINVNMSKNRKHHPRSCIQRLTLPRIDGGRGFIDIVNLHNKQITTLRKFFHTKAPTVMLHNAIVQNDIKLTPLNLADNTTQRNETLISKCDKLAAWTQKSLHGRHIQHLNLPHVDKAASNAWLKRGELFPETEGFMLAIQDQVIETRNYQKYIIKNLPSDICRKCNSAPETIQHITGACKAITQSDYKHRHDQIANIIHQKLAQKYKLISYDKTPYYKYIPETILENNSYKLYYDRTILTDKTIHYNRPDITLIDKHKKNALIIDIAVPNTHNLPNTITEKLTKYTELKQEITKMWKLQNVIIVPIVLSTTGVIPTQLHKYIELLHLPKHTYMQLQKAAILNTCRIVRKFLQTENE

SEQ ID NO: 7162 - protein, 1433 aa, Hemaris fuciformis
MERQNERYSLRPLPGGRRGASGADAGCHSIRSVGDGGLNRRAPLDKLTTAEQPLSPSSSISSLFADIPSPDSGNKSFISLPSNSPTSSCSSKTTSSSLQNRYDLRSIRGICRREPDAENLSRVGSPVEHKSSTVPMNPSNIISTHVIDAAQTASIAVDSVPTVSVQNKRMKWSKEINEFILRTYLEITSLETDNKAYLEPLYSKVIEKFPNISVSRQRIGDQRRAIIRNNLIPKNRITEIYNEVQTKLISAQNPSLQIENTSISRPTPKIQNQRMKWTNNHNETIIRSYLKVTHLETNLTSYRKQMHREFITSFPHLEHLSEQRIADQRRIIINNKYIPDERIQQIRKEVAEELNISINCNNHRELINKDIRSCQNNILTSVNNTDRQTETVDVILTEPLNTSNFNVDTEEAFSNGIRNSTIDIIFNEALSQFKNTEPTDRPYIPKQRASKKLAIALKYINNIILPENINNDTNFLTLQLLIYCSAITAAKFNGTKIRTQITDLPKKTKNNYKPPWQRRIEKRIEYLRVNIGRLTQLINGNKSRKLIQHSNKILSQYKKHATYEPENSQPKLVLDTLKQKLAVATHRLKRYKECTLRKSQNSLFTSNEKQFYRNLNSPSCNRCQNPTPPVEDLRKFWANIWENPIKHNEQSEWMREEENKCKNIANMCFDEVNLETFQNILSKLQNWKSPGSDNIHNYWYKKLFCIQPYLLKHINNFILQPETVPKYIAEGITFMIPKDSNHPLDPAKYRPITCLQTLYKIISSCIAQLVYNHIDTNNLLSEEQKGCRKLSQGCKEQLTIDEVILKQVSHKKKDIFTMYIDYRKAYDSIPHSWLFKILDIYKINPLLINYLHITSQNWTTRLKIRTSDGCVQTESIKIQRGIFQGDALSPLWFCLALNPLSNILNSKEIGYSLIHPANPILEYDENDRKLTHLLYMDDIKLYADKEEDLNILAELTEKFSKDICMEFGIDKCKISSVKAGKTHKHYYALATGEQIEPLDESTTYKYLGYNQSKQILHRETKSKLTEQFKHRLNLILKSQLNSRNTIKAINTFAIPILTYSFGIIKWTKTELKNTQRIINVLMTKHRKHHPRSCLQRLTLPRADGGRGLIDIGNLHNKQISSLRQYFHDKAVHSKLHKSIIQNDDKYTPLNLADPSGQPNEILIDKQAKITAWLQKSLHGRHLQDLSKPDVDKAASNDWLRRGELFPETEGFIIAIQDQVIETKNYRKYIIKNLSTDLCRKCNSSAETIQHITGSCKAIVQTEYKHRHDQIANIIHQRLAQKYNFLGNKLLEAYYKYIPETVLENDSYKLYYDRTLLTDKTVHYNRPDITLIDKINKTALIIDIAIPNTHNLINTISEKISKYTDLKDEIARMWRLQKVSIIPIVLSTTGVIPKHLHKALELLDLPTDIYRLLQKAAILNTCRIVRKFLRNDID

SEQ ID NO: 7163 - protein, 1433 aa, Hemaris fuciformis
MERQNERYSLRPLPGGRRGASGADAGCHSIRSVGDGGLNRRAPLDKLTTAEQPLSPSSSITSLFADIPSPDSCNKSFISLPSNSPTSSCSSKTTSSSLQNRYDLRSIRGICRREPDAENLSRVGSPVEHKSSTVPMNPSNIISTHVIDAAQTASIAVDSVPTVSVQNKRMKWSKEINEFILRTYLEITSLETDNKAYLEPLYSKVIEKFPNISVSRQRIGDQRRAIIRNNLIPKNRITEIYNEVQTKLTTAQNPSSQIEITSISRSTPKIQNQRMKWTNNHNETIIRSYLKVTHLETNLTSYRKQMHREFITSFPHLEHLSEQRIADQRRIIINNKYIPDERIQQIRKEVAEELNISINCNNHRELINKDIRSCQKNILTSVNITDRQTETVDVILTEPLNTSNFNVDTEEAFSNGIRNSTIDIIFNEALSQFKNTEPTDRPYIPKQRASKKLAIALKYINNIILPENVNNDTNFLTLQLLIYCSAITAAKFNETKIRTQITDLPKKTKNNYKPPWQRRIEKRIEDLRVNIGRLTQLINGNKSRKLIQHSNKILSQYKKHATYEPENSQPKLVLDTLKQKLAVATHRLKRYKECTLRKSQNSLFTSNEKQFYRNLNSPSCNRCQNPTPPVEDLRKFWANIWENPIKHNEQSEWMREEENKCKNIANMCFDEVNLETFQNILSKLQNWKSPGSDNIHNYWYKKLFCIQPYLLKHINNFILQPETVPKYIAEGITFMIPKDSNHPLDPAKYRPITCLQTLYKIISSCIAQLVYNHIDTNNLLSEEQKGCRKLSQGCKEQLTIDAVILKQVSHKKKDIFTMYIDYRKAYDSIPHSWLFKILDIYKINPLLINYLHITSQNWTTRLKIRTSDGCVQTESIKIQRGIFQGDALSPLWFCLALNPLSNILNSKEIGYSLIHPANPILEYDENDRKLTHLLYMDDIKLYADKEEDLNILAELTEKFSKDICMEFGIDKCKISSVKAGKTHKHYYALATGEQIEPLDESTTYKYLGYNQSKQILHRETKSKLTEQFKHRLNLILKSQLNSRNTIKAINTFAIPILTYSFGIIKWTKTELKNTQRIINVLMTKHRKHHPRSCLQRLTLPRADGGRGLIDIGNLHNKQISSLRQYFHDKAVHSKLHKSIIQNDDKYTPLNLADPSGQPNEILIDKQAKITAWLQKSLHGRHLQDLSKPDVDKAASNDWLRRGELFPETEGFIIAIQDQVIETKNYRKYIIKNLSTDLCRKCNSSAETIQHITGSCKAIVQTEYKHRHDQIANIIHQRLAQKYNFLGNKHLEAYYKYIPETVLENDSYKLYYDRTLLTDKTVHYNRPDITLIDKINKTALIIDIAIPNTHNLINTISEKISKYTDLKDEIARMWRLQKVSIVPIVLSTTGVIPKHLHKALELLDLPTDIYRLLQKAAILNTCRIVRKFLRNDID

SEQ ID NO: 7164 - protein, 1433 aa, Hemaris fuciformis
MERQNERYSLRPLPGGRRGASGADAGCHSIRSVGDGGLNRRAPLDKLTTAEQPLSPSSSITSLFADIPSPDSCNKSFISLPSNSPTSSCSSKTTSSSLQNRYDLRSIRGICRREPDAENLSRVGSPVEHKSSTVPMNPSNIISTHVIDAAQTASIAVDSVPTVSVQNKRMKWSKEINEFILRTYLEITSLETDNKAYLEPLYSKVIEKFPNISVSRQRIGDQRRAIIRNNLIPKNRITEIYNEVQTKLTTAQNPSSQIEITSISRSTPKIQNQRMKWTNNHNETIIRSYLKVTHLETNLTSYRKQMHREFITSFPHLEHLSEQRIADQRRIIINNKYIPDERIQQIRKEVAEELNISINCNNHRELINKDIRSCQKNILTSVNITDRQTETVDVILTEPLNTSNFNVDTEEAFSNGIRNSTIDIIFNEALSQFKNTEPTDRPYIPKQRASKKLAIALKYINNIILPENVNNDTNFLTLQLLIYCSAITAAKFNGTKIRTQITDLPKKTKNNYKPPWQRRIEKRIEDLRVNIGRLTQLINGNKSRKLIQHSNKILSQYKKHATYEPENSQPKLVLDTLKQKLAVATHRLKRYKECTLRKSQNSLFTSNEKQFYRNLNSPSCNRCQNPTPPVEDLRKFWANIWENPIKHNEQSEWMREEENKCKNIANMCFDEVNLETFQNILSKLQNWKSPGSDNIHNYWYKKLFCIQPYLLKHINNFILQPETVPKYIAEGITFMIPKDSNHPLDPAKYRPITCLQTLYKIISSCIAQLVYNHIDTNNLLSEEQKGCRKLSQGCKEQLTIDAVILKQVSHKKKDIFTMYIDYRKAYDSIPHSWLFKILDIYKINPLLINYLHITSQNWTTRLKIRTSDGCVQTESIKIQRGIFQGDALSPLWFCLALNPLSNILNSKEIGYSLIHPANPILEYDENDRKLTHLLYMDDIKLYADKEEDLNILAELTEKFSKDICMEFGIDKCKISSVKAGKTHKHYYALATGEQIEPLDESTTYKYLGYNQSKQILHRETKSKLTEQFKHRLNLILKSQLNSRNTIKAINTFAIPILTYSFGIIKWTKTELKNTQRIINVLMTKHRKHHPRSCLQRLTLPRADGGRGLIDIGNLHNKQISSLRQYFHDKAVHSKLHKSIIQNDDKYTPLNLADPSGQPNEILIDKQAKITAWLQKSLHGRHLQDLSKPDVDKAASNDWLRRGELFPETEGFIIAIQDQVIETKNYRKYIIKNLSTDLCRKCNSSAETIQHITGSCKAIVQTEYKHRHDQIANIIHQRLAQKYNFLGNKHLEAYYKYIPETVLENDSYKLYYDRTLLTDKTVHYNRPDITLIDKINKTALIIDIAIPNTHNLINTISEKISKYTDLKDEIARMWRLQKVSIVPIVLSTTGVIPKHLHKALELLDLPTDIYRLLQKAAILNTCRIVRKFLRNDID

SEQ ID NO: 7165 - protein, 1433 aa, Hemaris fuciformis
MERQNERYSLRPLPGGRRGASGADAGCHSIRSVGDGGLNRRAPLDKLTTAEQSLSPSSSISSLFADIPSPDSCNKSFISLPTNSPTSSCSSKTTSSSLQNRYDLRSIRGICRREPDAENLSRVGSSVEHKSSTVPMNPSNIISTHVIDAAQTASIAVDSVPTVSVQNKRMKWSKEINEFILRTYLEITSLETDNKAYLEPLYSKVIEKFPNISVSRQRIGDQRRAIIRNNLIPKNRITEIYNEVQTKLTTAQNPSSQIENTSISRPTPKIQNQRMKWTNNHNETIIRSYLKVTHLETNLTSYRKQMHREFITSFPHLEHLSEQRIADQRRIIINNKYIPDERIQQIRKEVAEELNISINCNNHRELINKDIRSCQNNILTSVNITDRQTETVDVILTEPLNTSNFNVDTEEAFSNGIRNSTIDIIFNEALSQFKNTEPTDRPYIPKQRASKKLAIALKYINNIILPENINNDTNFLTLQLLIYCSAITAAKFNGTKIRTQITDLPKKTKNNYKPPWQRRIEKRIEDLRVSIGRLTQLINGNKSRKLIQHSNKILSQYKKHATYEPENSQPKLVLDTLKQKLAVATHRLKRYKECTLRKSQNSLFTSNEKQFYRNLNSPSCNRCQNPTPPVEDLRKFWANIWENPIKHNEQSEWMREEENKCKNIANMCFDEVNLETFQNILSKLQNWKSPGSDNIHNYWYKKLFCIQPYLLKHINNFILQPETVPKYIAEGITFMIPKDSNHPLDPAKYRPITCLQTLYKIISSCIAQLVYNHIDTNNLLSEEQKGCRKLSQGCKEQLTIDAVILKQVSHKKKDIFTMYIDYRKAYDSIPHSWLFKILDIYKINPLLINYLHITSQNWTTRLKIRTSDGCVQTESIKIQRGIFQGDALSPLWFCLALNPLSNILNSKEIGYSLIHPANPILEYDENDRKLTHLLYMDDIKLYADKEEDLKILAELTEKFSKDICMEFGIDKCKISSVKAGKTHKHYYALATGEQIEPLDESTTYKYLGYNQSKQILHRETKSKLTEQFKHRLNLILKSQLNSRNTIKAINTFAIPILTYSFGIIKWTKTELKNTQRIINVLMTKHRKHHPRSCLQRLTLPRADGGRGLIDIGNLHNKQISSLRQYFHDKAVHSKLHKSIIQNDDKYTPLNLADPSGQPNEILIDKQAKITAWLQKSLHGRHLQDLSKPDVDKAASNDWLRRGELFPETEGFIIAIQDQVIETKNYRKYIIKNLSTDLCRKCNSSAETIQHITGSCKAIVQTEYKHRHDQIANIIHQRLAQKYNFLGNKHLEAYYKYIPETVLENDSYKLYYDRTLLTDKTVHYNRPDITLIDKINKTALIIDIAIPNTHNLINTISEKISKYTDLKDEIARMWRLQKVSIVPIVLSTTGVIPKHLHKALELLDLPTDIYRLLQKAAILNTCRIVRKFLRNDID

SEQ ID NO: 7166 - protein, 1462 aa, Phoebis sennae
MDSKPKIYYNLRPLPGGRRGASGADAGCYSMRTVGDGGLNRRVPLEKLTTADQSSSPFSSKSSSPLSSKSLSSSIHSLFHDISSPSSTSPKLSYEGSSSSSICSSHTTTSSTFASRYYLRKQQRVCRSPKTTSKIATSRQYSDTPNIASHPSNTLMVVAQTADSAGSTVSTICEKTMRRKWSTEMNEFILRTYLEITSLGIDNRTYLESLYNKFINQYPNMQVSRQRVGDQRRAILRNKLISQQRIDEITREVQSQLNLTHNTNIPTQNTYHNETTTHQASQRMRWTKDYNEAIIRSYLRVTHLETNHTAYRKEMHRDFISQFPHLEHISEQRVADQRRVIINNRYLTEKRIAEIKEEVATELGITNFNINVEIENTNLTHRTSHISTSVSNSNAEDTHHNTQITNNTVTTQVETPPQEEDMFSLNSICELTQHETLSERSSSESNAEIDTIFNEALIKYSHMQPTDRPYIPKQRTSKKLAIAVRYIDQNILPKHINNDTDFIFLQTIIYCCAITAATYNGSKFHTPNSTPRNNTQKPAWQKRLEKKIEDLRAKIGRLTQYINGNRSRKVTKHVDKIMETYKTHATHEPENSIPVHVLDTLKQKLSVTTRRLRRYTECTLRKLQNNQFSNNEKQFYRKLQATNSNDLLNVTPTTEELRGFWAQIWERPVTHEDNAEWIKTEENRHKETETMHFEHITAETFHKALRKLQNWKAPGSDNIHSYWYKKFTFTHSFLFKHINNFIIHPEAVPKYITEGITHMIQKDPSDPLNPAKYRPITCLQIIYKIITSCVAETIYEHVNKHNLINEEQKGSRKLSQGCKEQLIIDSVILKQVLKEKKDLFTMYIDYKKAYDSVPHSWLFKVLNIYKIHPTVIQFLNNTSKNWSTRLKISTNNGFVLTDSIQIQRGIFQGDALSPLWFCLALNPLSNILNSCDLGYPLKYIPNNTDCQIETDQNIHFNKINHLLYMDDIKLYTTTQNDINKLAQLTENFSRDIRMEFGIDKCKINSVRAGHNYEHCYILSTGDTIDPLEENNTYKYLGFNQAKQILNKETKSHLTNMFKNRLNLILKSQLNGRNLIKAINTYAVPILTYSFGIINWSKTELKNLQRIINVNMSKNRKHHPRSCIQRLTLPRAEGGRGIIDITNLHNKQISTLRSYFHNKTQTVNLHKAIVQNDIKFTPLNLSDTTTQPNETLISKASKIAAWSQKALHGRHIQHLNLPNVDKAASNAWLKRGELFPETEGFMLAIQDQVIETRNYHKFIIKDLPSDICRKCNSAPETIQHITGSCKAITQTDYKHRHDQVTNIIHKTLAQKYKLIPNDNIPYYKYIPETILENDTHKLYYDRTILTDKTIHYNRPDITLLDKKNQTVTIIDIAVPNTHNLQNTITEKLSKYVELKQEIIKMWKLKNSIIVPIVVSSTGVIPSQLHKSLELLNLHPNTYLSLQKASILNTCRIVRKFLQNTSNE

SEQ ID NO: 7167 - protein, 809 aa, Thyatira batis
MEHDDEADWVHTEELNNTNTPEMHFDFISTDTFHRVLSRQHNWKAPGSDHIHNYWYKKLTHTHPFIHNHINYFIHHPETLPQYITTGITYMLPKDPNDTLNPAKYRPITCLQTLYKIITSCLAELIYKHSTDNNILTEQQKGCRKYSQGCKEQLTIDSVILRKVHKNKKDIYSMYIDYKKAYDSVPHSWLLKILNIYKIHPCIINFLQNSIKNWLTSLRINTANGTINTDSIRIQRGIFQGDALSPLWFCLALNPLSNSLNSHSIGYPLNYNEKDTELGSQQNNIYLNHLLYMDDIKLYATSEENLNQLANITEKFSKDICMEFGIDKCKINSIKAGQNHQHYYVMNSGEQIDSLDENSAYKYLGYNQSKYIEHKDIKVKLQHQFRSRLNAILKTHLNSRNMIKAINTFAIPILTYSFGIISWSKTELKNIQRLINVTMTKNRKHHPRSCLQRITLPRSEGGRGLIDINNLHNSQIVGLREYFHKKAHSSALHNAIVQNDHKFTPLNLNNPDKQPNEIIIDKQTKLDIWNQKSLHGRHLQDLNHLNVDKSASNAWLRRGELFPETEGFMIAIQDQVIETRNYKKYITKTLSTDICRRCNSAPETIQHITGACKAIVQTEYKHRHDQIANIIHQKLAQKYRLIPTTYTPYYKYVPDNVIENRKYKLYYDRAILTDKTTHYNRPDITIVDKDNKTALIIDIAIPNTHNLQNTIAEKLSKYSDLKDEISRMWQLNNVTIVPIVLSTTGVIPKQLHRSIQTLNLPPHIYTILQKAAILNTCRIVRKFLQINQNQHHTDFPNSLQQTPCDLHLA

SEQ ID NO: 7168 - protein, 809 aa, Thyatira batis
MEHDDEADWVHTEELNNTNTPEMQFDFISTDTFHRVLSRQHNWKAPGSDHIHNYWYKKLTHTHPFIHNHINYFIHHPETLPQYITTGITYMLPKDPNDTLNPAKYRPITCLQTLYKIITSCLAELIYKHSTDNNILTEQQKGCRKYSQGCKEQLTIDSVILRKVHKNKKDIYSMYIDYKKAYDSVPHSWLLKILNIYKIHPCIINFLQNSIKNWSTNLRINTANGTNNTDSIRIQRGIFQGDALSPLWFCLALNPLSNSLNSHSIGYPLNYNEKDTELGSQQNNIYLNHLLYMDDIKLYATSEENLNQLANITEKFSKDICMEFGIDKCKINSIKAGQNHQHHYVMNSGEQIDSLDENSAYKYLGYNQSKYIEHKDIKVKLQHQFRCSLNAILKTHLNSRNMIKAINTFAIPILTYSFGIISWSKTELKNIQRLINVTMTKNRKHHPRSCLQRITLPRSEGGRGLIDINNLHNSQIVGLREYFHKKAHSSLLHNAIVQNDHKFTPLNLNNPDKQPNEIIIDKQTKLDIWNQKSLHGRHLQDLNHLNVDKSASNAWLRRGELFPETEGFMIAIQDQVIETRNYKKYITKTLSTDICRRCNSAPETIQHITGACKAIVQTEYKHRHDQIANIIHQKLAQKYRLIPTTYTPYYKYVPDNVIENRKYKLYYDRAILTDKTTHYNRPDITIVDKDNKTALIIDIAIPNTHNLQNTIAEKLSKYSDLKDEITRMWQLNNVTIVPIVLSTTGVIPKQLHRSIQTLDLPPHIYTILQKAAILNTCRIVRKFLQINQNQHHTDFPNSLQQTPCDLHLA

SEQ ID NO: 7169 - protein, 1423 aa, Thyatira batis
MTERRYNLRSLPGGRRGASGADAGCSSIRTIGDAELSRRVPVDQTTTADDEELSRRTLRDNATADDGELTRRVLRDNTTADDVSTAPPSAPTITSSGSSYRTPASPTISTASTYLSVDVAHEAHPAESRVPTTNKSQMRRRWTPEHNEFILRTYLQLTLLEQDTSDYLTPLHSKFIERYPLIDVPRQRLGDQRRAIIRNKLLPQEKIKTIYEEVKMELQSHTTRTQSLTLNPSQQSQTTLTSQHTQHTQHSQSQQQRTRWTNEMNEDVIRSYFRVTELETNKTGYRKALHQDFINRYPHLSVVSEQRVADQRRRIFTDKVISTDRLNSIRQEVADEMRIQTSNTENRPTNESTPLDNNTDFIYNIDPELFTDTQQFTNTPHRNPKIDETFQDMIRHFSNTQPTERLYIPKQKASKKLAKIVQYINDTLLPEHINDSTDFITLQTIIYCSAITAAKINGSKIVIPQTVDTNRIRRFTKPEWQIRLEKKITDLRAKIGRVTQYINGNTSSRLKHRVDDILEQYKVHSIHEGDNTHPIQVLDTLKQKLSVAISRLKRYNACTLRKYQNTQFYNNEKQFYRTIRNSNTTRNDSSPQPSHNSPPPDELRSFWASIWDQPREHDDEADWVHTEEINNINTPEMQFDFISTDTFHRVLSRQHNWKAPGSDHIHNYWYKKLTHTHPFLHNHINYFIHHPETLPQYITTGITYMLPKDPNDTLNPAKYRPITCLQTLYKIITSCLAELIYKHSTDNNILTEQQKGCRKYSQGCKEQLTIDSVILRKVHKNMKDIYSMYIDYKKAYDSVPHSWLLKILNIYKIHPCIINFLQNSIKNWSTSLKINTANGTINTDSIKIQRGIFQGDALSPLWFCLALNPLSNSLNSHSIGYPLNYNEKDTELGSQQNNIYLNHLLYMDDIKLYATSEENLNQLANITEKFSKDICMEFGIDKCKINSIKAGQNHQHYYVMNSGEQIDSLDENSAYKYLGYNQSKYIEHKDIKVKLQHQFRSRLNAILKTHLNSRNMIKAINTFAIPILTYSFGIISWSKTELKNIQRLINVTMTKNRKHHPRSCLQRITLPRSEGGRGVIDINNLHNSQIVGLREYFHKKADSSVLHNAIVQNDHKFTPLNLNNPDKQPNEIIIDKQTKLDIWNQKSLHGRHLQDLNHLNVDKSASNAWLRRGELFPETEGFMIAIQDQVIETRNYKKYITKTLSTDICRRCNSAPETIQHITGACKAIVQTEYKHRHDQIANIIHQKLAQKYRLIPTTYTPYYKYVPDNVMENRKYKLYYDRAILTDKTTHYNRPDITIVDKENKTALIIDIAIPNTHNLQNTIAEKLSKYSDLKDEITRMWQLNNVTIVPIVLSTTGVIPKQLHRSIQMLDLPSHIYTILQKAAILNTCRIVRKFLQINQNQHHTDFPNSLQQTPCDLHLA

SEQ ID NO: 7170 - protein, 1420 aa, Thyatira batis
MTERRYNLRSLPGGRRGASGADAGCSSIRTIGDAELSRRVPVEQTTTADNEELSRRTLRDNATADDGELTRRVLQDNTTADDVSTAPPSAATITPSGSSYRTPASPTTSTASTYLSVDVAHEAHPAESRVPTTNKSQMRRRWTPEHNEFILRTYLQLTLLEQDTSDYLTPLHSKFIERYPLIDVPRQRLGDQRRAIIRNKLLPQEKIKTIYEEVKMELQSHTTTTQSLTLNPSQQSQTTLTSQHTQHSQSQLQRTRWTNEMNEDVIRSYFRVTELETNKTGYRKALHQDFINRYPHLSVVSEQRVADQRRRIFTDKVISTDRLNCIRQEVADEMRIQTSNTEDRPTIESTPLDSNTDFIYNIDPELFTDTQQFTNTPHRNPKIDETFQDMIRHFSNTQPTERLYIPKQKASKKLAKIVQYINDTLLPEHINDSTDFITLQTIIYCSAITAAKINGSKIVIPQTVDTNRIRRNTKPEWQIRLEKKITDLRAKIGRVTQYISGNTSSRLKHRVDAILEQYKVHSIHEGDNTHPIQVLDTLKQKLSVAISRLKRYNACTLRKYQNTQFYNNEKQFYRTIRNSNTTRNDSSPQPSHNSPPPDELRSFWASIWEQPMEHDDEADWVHTEELNNTNTPEMQFDFISTDTFHRVLSRQHNWKAPGSDHIHNYWYKKLTHTHPFIHNHINYFIHHPETLPQYITTGITYMLPKDPNDTLNPAKYRPITCLQTLYKIITSCLAELIYKHSTDNNILTEQQKGCRKYSQGCKEQLTIDSVILRKVHKNKKDIYSMYIDYKKAYDSVPHSWLLKILNIYKIHPCIINFLQNSIKNWSTNLRINTANGTINTDSIRIQRGIFQGDALSPLWFCLALNPLSNSLNSHSIGYPLNYNEKDTELESQQNNIYLNHLLYMDDIKLYATSEENLNQLANITEKFSKDICMEFGIDKCKINSIKAGQNHQHHYVMNSGEQIDSLDENSAYKYLGYNQSKYIEHKDIKVKLQHQFRCRLNAILKTHLNSRNMIKAINTFAIPILTYSFGIISWSKTELKNIQRLINVTMTKNRKHHPRSCLQRITLPRSEGGRGLIDINNLHNSQIVGLREYFHKKAHSSALHNAIVQNDHKFTPLNLNNPDKQPNEIIIDKQTKLDIWNQKSLHGRHLQDLNHLNVDKSASNAWLRRGELFPETEGFMIAIQDQVIETRNYKKYITKTLSTDICRRCNSAPETIQHITGACKAIVQTEYKHRHDQIANIIHQKLAQKYRLIPTTYTPYYKYVPDNVIENRKYKLYYDRAILTDKTTHYNRPDITIVDKDNKTALIIDIAIPNTHNLQNTIAEKLSKYSDLKDEITRMWQLNNVTIVPIVLSTTGVIPKQLHRSIQTLDLPPHIYTILQKAAILNTCRIVRKFLQINQNQHHTDFPNSLQQTPCDLHLA

SEQ ID NO: 7171 - protein, 1426 aa, Laothoe populi
MEQERKIYSLRPLPGGRRGASGANAGCLSMRSVGDGGLNRRVPLDKLNTADHSPSPTSTISSPFSNIPSPTSTVKSPALLPSSSPTSSCWSQKTSTSSQSRYKLRSTTLADVAQTARDAVNSVPTTSVQSKRIKWSKEINEFILRTYLQITMLETDNKAYLEPLYNKFIEKYPHIDVSRQRIGDQRRAIIRNKLLPQDRIAEIYKEVQTQITSAHTLGSLTQSTDLIPPTIQLQNKRMKWTNDHNEVILRSYLRVTHLGTNMTSYRKQMHREFISMFPHLEHISEQRVADQRRIIINNKYISEERINQITKEVAEELNLNITPSPLHIWHLQTQRQNLEINKTRNETQPLENNADNTQNNLALTSNDSQTLLDVDINLPTFSNTMSLDPFTTDQLHPNNIKRNESIDLIFNQSLQLYMKSEPNNRPYIPKQRASKKLALAVKYLNNIILPEHINDNTDFSTLQTIIYCSAITAAKFNGSKINTNPRNSLKDRTPAWQKRIERKIEDLRAKVGKVTQFINGNTSSRLQKSVNKILSQYSIHATHEPENQQPSHVLDTLKQKLAVAARRLKRYKECTLRKIQNSQFSCNEKQFYRNFNNPDPNKSHSLAPPIHDLRNFWANIWEQPVVHNDHATWIKDEEKRNTDLPDMEFLNISVEIFQLAIGKLQNWKAPGSDNIHNYWYKKLTFSHPFLLTHINKFIMQPETVPKYITEGITHMLLKDSNEPLNPAKYRPITCLQTLYKIITSCIAELIYKHVNIRNILSEEQKGCKKYSQGCKEQLTIDSVILQQVLKKKKDIFTMYIDYKKAYDSVPHSWLFKILNIYKINSLIINFLQKTSENWTTNLQIKTSNGSIQSETIKIQRGIFQGDALSPLWFCLALNPLSNILNSTNIGYPLTYSINTTSQPNDNIRNLTHLLYMDDIKLYASTQSDMNKLAELTDFFSKDICMEFGIDKCKINSTRAGQIHQHYYTLSTGHRIDPLDDNSAYKYLGYNQTQKILYKDTKATLIQQFKNRLNYILKSQLNSRNIIKAINTFAIPILTYSFGILKWSKTDLKNAQRIINVSMTKNRKHHPRSCLQRLTLPRIDGGRGLIDVANLHNKQITTLRQYFYNKALTSDLHNAIVQNDIKHTPLNLADKTIQSNETLTDRQTKLVAWAQKSLHGRHFQDLSNPNVDKIASNEWLRRGDLFPETEGFMIAIQDQIVETRNYQKHIIKTLTSDICRKCNSAPETIQHITGACKAIVQTDYKHRHDQICNIIHQKLAQKYKLISNEPLQPYYKYIPEIILENEYYRLYYDRTILTDKTVHYNRPDITLVDKQNKSALLIDIAIPNTHNLQSTITEKLSKYTDLKDEIARMWKLQNVSIVPIVLSTTGVIPKHLHKSLEMLELPPKIYLSLQKAAILNTCRIVRKFLQNDGFEQTNITENMNNNI

SEQ ID NO: 7172 - protein, 1426 aa, Laothoe populi
MEQERKIYSLRPLPGGRRGASGANAGCLSMRSVGDGGLNRRVPLDKLNTADHSPSPTSTISSPFSNIPSPTSTVKSPALLPSSSPTSSCWSQKTSTSSQSRYKLRSTTLADVAQTARDAVNSVPTTSVQSKRIKWSKEINEFILRTYLQITMLETDNKAYLEPLYNKFIEKYPHIDVSRQRIGDQRRAIIRNKLLPQDRIAEIHKEVQTQITSAHTLGSLTQSTDLIPPTIQLQNKRMKWTNDHNEVILRSYLRVTHLGTNMTSYRKQMHREFISMFPHLEHISEQRVADQRRIIINNKYISEERINQITKEVAEELNLNITPSPLHIWHLQTQRQNLEINKTRNETQPLENNADNTQNNLALTSNDSQTLLDVDINLPTFSNTISLDPFTTDQLHPNNIKRNESIDLIFNQSLQLYMKSEPNNRPYIPKQRASKKLALAVKYLNNIILPEHINDNTDFSTLQTIIYCSAITAAKFNGSKINTNPRNSLKDRTPAWQKRIERKIEDLRAKVGKVTQFINGNTSSRLQKSVNKILSQYSIHATHEPENQQPSHVLDTLKQKLAVAARRLKRYKECTLRKIQNSQFSCNEKQFYRNFNNPDPNKSHSLAIHDLRNFWANIWEQPVVHNDHATWIKDEEKRNTDLPDMEFLNISVEIFQLAISKLQNWKAPGSDNIHNYWYKKLTFSHPFLLTHINKFIMQPETVPKYITEGITHMLLKDSNEPLNPAKYRPITCLQTLYKIITSCIAELIYKHVNIRNILSEEQKGCKKYSQGCKEQLTIDSVILQQVLKKKKKKDIFTMYIDYKKAYDSVPHSWLFKILNIYKINSLIINFLQKTSENWTTNLQIKTSNGSIQSETIKIQRGIFQGDALSPLWFCLALNPLSNILNSTNIGYPLTYSINTTSQPNDNIRNLTHLLYMDDIKLYASTQSDMNKLAELTDFFSKDICMEFGIDKCKINSTRAGQIHQHYYTLSTGHRIDPLDDNSAYKYLGYNQTQKILYKDTKATLIQQFKNRLNYILKSQLNSRNIIKAINTFAIPILTYSFGILKWSKTDLKNAQRIINVSMTKNRKHHPRSCLQRLTLPRIDGGRGLIDVANLHNKQITTLRQYFHNKALTSDLHNAIVQNDIKHTPLNLADKTIQSNETLTDRQTKLVAWAQKSLHGRHFQDLSNPNVDKIASNEWLRRGDLFPETEGFMIAIQDQIVETRNYQKHIIKTLTSDICRKCNSAPETIQHITGACKAIVQTDYKHRHDQICNIIHQKLAQKYKLISNEPLQPYYKYIPEIILENEYYRLYYDRTILTDKTVHYNRPDITLVDKQNKSALLIDIAIPNTHNLQSTITEKLSKYTDLKDEIARMWKLQNVSIVPIVLSTTGVIPKNLHKSLEMLELPPKIYLSLQKAAILNTCRIVRKFLQNDGFEQTNITENMNNNI

SEQ ID NO: 7173 - protein, 1189 aa, Laothoe populi
MKWTNDHNEVILRSYLRVTHLGTNMTSYRKQMHREFISMFPHLEHISEQRVADQRRIIINNKYISEERINQITKEVAEELNLNITPSPLHIWHLQTQRQNLEINKTRNETQPLENNADNTQNNLALTSNDSQTLLDVDINLPTFSNTMSLDPFTTDQLHPNNIKRNESIDLIFNQSLQLYMKSEPNNRPYIPKQRASKKLALAVKYLNNIILPEHINDNTDFSTLQTIIYCSAITAAKFNGSKINTNPRNSLKDRTPAWQKRIERKIEDLRAKVGKVTQFINGNTSSRLQKSVNKILSQYSIHATHEPENQQPSHVLDTLKQKLAVAARRLKRYKECTLRKIQNSQFSCNEKQFYRNFNNPDPNKSHSLAPPIHDLRNFWANIWEQPVVHNDHATWIKDEEKRNTDLPDMEFLNISVEIFQLAIGKLQNWKAPGSDNIHNYWYKKLTFSHPFLLTHINKFIMQPETVPKYITEGITHMLLKDSNEPLNPAKYRPITCLQTLYKIITSCIAELIYKHVNIRNILSEEQKGCKKYSQGCKEQLTIDSVILQQVLKKKKDIFTMYIDYKKAYDSVPHSWLFKILNIYKINSLIINFLQKTSENWTTNLQIKTSNGSIQSETIKIQRGIFQGDALSPLWFCLALNPLSNILNSTNIGYPLTYSINTTSQPNDNIRNLTHLLYMDDIKLYASTQSDMNKLAELTDFFSKDICMEFGIDKCKINSTRAGQIHQHYYTLSTGHRIDPLDDNSAYKYLGYNQTQKILYKDTKATLIQQFKNRLNYILKSQLNSRNIIKAINTFAIPILTYSFGILKWSKTDLKNAQRIINVSMTKNRKHHPRSCLQRLTLPRIDGGRGLIDVANLHNKQITTLRQYFYNKALTSDLHNAIVQNDIKHTPLNLADKTIQSNETLTDRQTKLVAWAQKSLHGRHFQDLSNPNVDKIASNEWLRRGDLFPETEGFMIAIQDQIVETRNYQKHIIKTLTSDICRKCNSAPETIQHITGACKAIVQTDYKHRHDQICNIIHQKLAQKYKLISNEPLQPYYKYIPEIILENEYYRLYYDRTILTDKTVHYNRPDITLVDKQNKSALLIDIAIPNTHNLQSTITEKLSKYTDLKDEIARMWKLQNVSIVPIVLSTTGVIPKHLHKSLEMLELPPKIYLSLQKAAILNTCRIVRKFLQNDGFEQTNITENMNNNI

SEQ ID NO: 7174 - protein, 1426 aa, Laothoe populi
MEQERKIYSLRPLPGGRRGASGANAGCLSMRSVGDGGLNRRVPLDKLNTADHSPSPTSTISSPFSNIPSPTSTVKSPALLPSSSPTSSCWSQKTSTSSQSRYKLRSTTLADVAQTARDAVNSVPTTSVQSKRIKWSKEINEFILRTYLQITMLETDNKAYLEPLYNKFIEKYPHIDVSRQRIGDQRRAIIRNKLLPQDRIAEIHKEVQTQITSAHTLGSLTQSTDLIPPTIQLQNKRMKWTNDHNEVILRSYLRVTHLGTNMTSYRKQMHREFISMFPHLEHISEQRVADQRRIIINNKYISEERINQITKEVAEELNLNITPSPLHIWHLQTQRQNLEINKTRNETQPLENNADNTQNNLALTSNDSQTLLDVDINLPTFSNTMSLDPFTTDQLHPNNIKRNESIDLIFNQSLQLYMKSEPNNRPYIPKQRASKKLALAVKYLNNIILPEHINDNTDFSTLQTIIYCSAITAAKFNGSKINTNPRNSLKDRTPAWQKRIERKIEDLRAKVGKVTQFINGNTSSRLQKSVNKILSQYSIHAAHEPENQQPSHVLDTLKQKLAVAARRLKRYKECTLRKIQNSQFSCNEKQFYRNFNNPDPNKSHSLAPPIHDLRNFWANIWEQPVVHNDHATWIKDEEKRNTDLPDMEFLNISVEIFQLAISKLQNWKAPGSDNIHNYWYKKLTFSHPFLLTHINKFIMQPETVPKYITEGITHMLLKDSNEPLNPAKYRPITCLQTLYKIITSCIAELIYKHVNIRNILSEEQKGCKKYSQGCKEQLTIDSVILQQVLKKKKDIFTMYIDYKKAYDSVPHSWLFKILNIYKINSLIINFLQKTSENWTTNLQIKTSNGSIQSETIKIQRGIFQGDALSPLWFCLALNPLSNILNSTNIGYPLTYSINTTSQPNDNIRNLTHLLYMDDIKLYASTQSDMNKLAELTDFFSKDICMEFGIDKCKINSTRAGQIHQHYYTLSTGHRIDPLDDNSAYKYLGYNQTQKILYKDTKATLIQQFKNRLNYILKSQLNSRNIIKAINTFAIPILTYSFGILKWSKTDLKNAQRIINVSMTKNRKHHPRSCLQRLTLPRIDGGRGLIDVANLHNKQITTLRQYFYNKALTSDLHNAIVQNDIKHTPLNLADKTIQSNETLTDRQTKLVAWAQKSLHGRHFQDLSNPNVDKIASNEWLRRGDLFPETEGFMIAIQDQIVETRNYQKHIIKTLTSDICRKCNSAPETIQHITGACEAIVQTDYKHRHDQICNIIHQKLAQKYKLISNEPLQPYYKYIPEIILENEYYRLYYDRTILTDKTVHYNRPDITLVDKQNKSALLIDIAIPNTHNLQSTITEKLSKYTDLKDEIARMWKLQNVSIVPIVLSTTGVIPKHLHKSLEMLELPPKIYLSLQKAAILNTCRIVRKFLQNDGFEQTNITENMNNNI

SEQ ID NO: 7175 - protein, 1401 aa, Laothoe populi
MGMCCISNIVYQLVIIVPLDKLNTADHSPSPTSTISSPFSNIPSPTSTVKSPALLPSSSPTSSCWSQKTSTSSQSRYKLRSTTLADVAQTARDAVNSVPTTSVQSKRIKWSKEINEFILRTYLQITMLETDNKAYLEPLYNKFIEKYPHIDVSRQRIGDQRRAIIRNKLLPQDRIAEIHKEVQTQITSAHTLGSLTQSTDLIPPTIQLQNKRMKWTNDHNEVILRSYLRVTHLGTNMTSYRKQMHREFISMFPHLEHISEQRVADQRRIIINNKYISEERINQITKEVAEELNLNITPSPLHIWHLQTQRQNLEINKTRNETQPLENNADNTQNNLALTSNDSQTLLDVDINLPTFSNTMSLDPFTTDQLHPNNIKRNESIDLIFNQSLQLYMKSEPNNRPYIPKQRASKKLALAVKYLNNIILPEHINDNTDFSTLQTIIYCSAITAAKFNGSKINTNPRNSLKDRTPAWQKRIERKIEDLRAKVGKVTQFINGNTSSRLQKSVNKILSQYSVHATHEPENQQPSHVLDTLKQKLAVAARRLKRYKECTLRKIQNSQFSCNEKQFYRNFNNPDPNKSHSLAPPIHDLRNFWANIWEQPVVHNDHATWIKDEEKRNTDLPDMEFLNISVEIFQLAISKLQNWKAPGSDNIHNYWYKKLTFSRPFLLTHINKFIMQPETVPKYITEGITHMLLKDSNEPLNPAKYRPITCLQTLYKIITSCIAELIYKHVNIRNILSEEQKGCKKYSQGCKEQLTIDSVILQQVLKKKKDIFTMYIDYKKAYDSVPHSWLFKILNIYKINSLIINFLQKTSENWTTNLQIKTSNGSIQSETIKIQRGIFQGDALSPLWFCLALNPLSNILNSTNIGYPLTYSINTTSQPNDNIRNLTHLLYMDDIKLYASTQSDMNKLAELTDFFSKDICMEFGIDKCKINSTRAGQIHQHYYTLSTGHRIDPLDDNSAYKYLGYNQTQKILYKDTKATLIQQFKNRLNYILKSQLNSRNIIKAINTFAIPILTYSFGILKWSKTDLKNAQRIINVSMTKNRKHHPRSCLQRLTLPRIDGGRGLIDVANLHNKQITTLRQYFYNKALTSDLHNAIVQNDIKHTPLNLADKTIQSNETLTDRQTKLVAWAQKSLHGRHFQDLSNPNVDKIASNEWLRRGDLFPETEGFMIAIQDQIVETRNYQKHIIKTLTSDICRKCNSAPETIQHITGACKAIVQTDYKHRHDQICNIIHQKLAQKYKLISNEPLQPYYKYIPEIILENEYYRLYYDRTILTDKTVHYNRPDITLVDKQNKSALLIDIAIPNTHNLQSTITEKLSKYTDLKDEIARMWKLQNVSIVPIVLSTTGVIPKHLHKSLEMLELPPKIYLSLQKAAILNTCRIVRKFLQNDGFEQTNITENMNNNI

SEQ ID NO: 7176 - protein, 1418 aa, Thyatira batis
MTERRYNLRSLPGGRRGASRADAGCSSMRTIGDAELSRRVPVEQSTTADDEELSRRTLRDNTTADDGELTRRVLRDNTTADDVSTAPPSAATITSSGSSYRTPASPSTSTASTYLSVDVAHEAHPAESRVPTTNKSQMRRRWTPEHNEFILRTYLQLTSLEQDISDYLTPLHSKFTEKFPLMDVPRQRLGDQRRAIIRNKLLPSEKIKAIYEEIKIELQSHTITTHSLIYNHSQQSQTTLTSPQHTQHSHLQRTRWTNEMNEDVVRSYFRVTELETNKTGYRKGLHQDFIKTYPHLAGVSEQRVADQRRRIFTDKVIDIDRLNRIRQEIADEIRIQRNNTENTEERPTIDTNILDGNNDFILNIDPGLFTDTQQRHEILQRNPKIDQTFQDMVRYFSNIEPTERLYIPKQKASKKLSRIVHYINAILLPENINDNTDFKTFQTIIYCSAITAAKINGSKIVIPQPVDANRIKRRNKPEWQIRLENKIINLRANIGRVTQYINGNTSTRLRHHVDLILEQYKVHSIHEGDNTQPIQVLDTLKQKLSVAISRLKRYNACTLRKHQNTQFCHNEKQFYRTIRNSNTTQNDSSHQSSHNSPPLHELRNFWASIWEQPVEYNEQADWIQVETANNANTSEMQFEFISVDTFHRVLSKQHNWKAPGSDHIHNYWYKKFTYTHPFLHNYINQFIQHPEAMPQYITKGITYMLPKDPTDTLNPAKYRPITCLQTVYKIITSCLAELIYQHSTENNLLSEQQKGCRKFSQGCKEQLTIDSVILRQINKNKKNLFSMYVDYKKAYDSIPHSWLLKILNIYKIHPNIINFLQITIKNWTTRLKINTINGTVDSDPIKIQRGIFQGDALSPLWFCLALNPLSNILNLNNKIGYPLNYNEAPTEIRPYQNTVYLNHLLYMDDIKLYATTEDDLNQLANITENFSKDICMEFGIDKCKINSIKAGQSYKQYYIMTSGDQIDSLDENSTYKYLGYNQSKCIESKEIKLKLQQQFRSRLNAIFKTHLNSRNMIKAINTFAIPILTYSFGIIKWSKTEIKNTQRLINVTMTKNRKHHPRSCLQRITLPRSEGGRGLIDINNLHNSQIGTLRQYFHIKAQTSTIHNAIVQNDQKFTPLNLSDQNRQANEYIKDKQAKLDEWNQKSLHGRHLQDLNHPNVDKLASNAWLRRGELFPETEGFMIAIQDQVMETRNYQKYITKTLASDTCRRCSSAPETIQHITGACKAIVQTEYKHRHDQIANIIHQKLAQKYNLIPDTYIPYYKYTPDNVLENPKFRMYYDRAILTDRTTHFNRPDITIVDKDNKTALIIDIAIPNTHNLQNTIAEKLSKYSDLREEITRMWQLRNVVIVPIVLSTTGVIPKQLHRSIQTLDLPPYIYTTLQKAAILNTCRIVRKFLQINHTQHHSDSGNSLEQTPM

SEQ ID NO: 7177 - protein, 1425 aa, Thyatira batis
MEKMNNRRYNLRSLPGGRRGASGADAGCSSMRTIGDAELSRRVPVEQTTTADEEELSRRTLRDNTTADNGELTRRVLRDNTTADDTSTAPPSAATIISSGSSYRTPASPSTSTATYLSVDVAHEAHPAESRVPTTNKSQMRRRWTPEHNEFILRTYLQLTSLEQDISDYLTPLHSKFTEKFPLMEVPRQRLGDQRRAIIRNKLLPSEKIKAIYEEIKIELQSHTTSHIHTSTHSLTYNHSQQSQTTLTSTQHTQHSHLQRTRWTNEMNEDVVRSYFRVTELETNKTGYRKGLHQDFIKTYPHLAGVSEQRIADQRRRIFTDKVIDIDRLNRIRQEIADEIRIQINNTENTEERLTIDTNILDGNNDFILNIDPGIFTDTHQQHENLQRNPEIDQTFQDMVRYFSNIEPTERLYIPKQKASKKLSRIVQYINAFLLPENINDNTDFKTFQTIIYCSAITAAKINGSKIVIPQPVHTDRIKRRNKPEWQIRLENKIINLRANIGRVTQYINGNTSTRLRHHVNLILEQYKVHSTHEGDNTQPIQVLDTLKQKLSVAISRLKRYNACTLRKHQNTQFCHNEKQFYRTIRNSNTTQNDSSHQSSHNSPPLHELRNFWASIWEQPVEYNEQADWIQVETANNANTSEMQFECISVDTFHRVLSKQHNWKAPGSDHIHNYWYKKFTFTHPFLHNYINQFIQHPEAMPQYITKGITYMLPKDPTDTSNPAKYRPITCLQTVYKIITSCLAELIYQHSTENNLLSEQQKGCRKFSQGCKEQLTIDSVILRQVNKSKKNLFSMYVDYKKAYDSIPHSWLLKILNIYKIHPSIINFLQITIENWTTRLKINTINGTVDSDPIKIQRGIFQGDALSPLWFCLALNPLSNILNLNNKIGYPLNYNEATTEIRPYQNTVYLNHLLYMDDIKLYATTEGDLNQLANITENFSKDICMDFGIDKCKINSIKAGQSYKQYYIMTSGDQIDSLDENSTYKYLGYNQSKCIESKEIKLKLQQQFRSRLNAIFKTHLNSRNMIKAINTFAIPILTYSFGIIKWSKTELKNIQRLINVTMTKNRKHHPRSCLQRITLPRSEGGRGLIDINNLHNSQIGTLRQYFHIKAQTSTIHNAIVQNDHKFTPLNLSDQNRQANEYIKDKQAKLDEWNQKSLHGRHLQDLNHPNVDKLASNAWLRRGELFPETEGFMLAIQDQVMETRNYQKYITKTLASDTCRRCSSAPETIQHITGACKAIVQTEYKHRHDQIANIIHQKLAQKYHLIPDTYIPYYKYTPDNVLENPKFRMYYDRAILTDRTTHFNRPDITIVDKENKTALIIDIAIPNTHNLQNTIAEKLSKYSDLREEITRMWQLRNVVIVPIVLSTTGVIPKQLHRSIQTLDLPPYIYTSLQKAAILNTCRIVRKFLQIHHTQQHSDSGNSLEQTPT

SEQ ID NO: 7178 - protein, 1426 aa, Thyatira batis
MEKMNNRRYNLRSLPGGRRGASGADAGCSSIRTIGDAELSRRVPVEQTTTADDEELSRRSLRDNTTADDGELTRRVLRDNTTADDVSTAPPSAATIISSGSSYRTPASPSTSTASTYLSVDVAHEAHPAESRVPTTNKSQMRRRWTPEHNEFILRTYLQLTSLEQDISDYLTPLHSKFTEKFPLMDVPRQRLGDQRRAIIRNKLLPSEKIKAIYEEIKIELQSHTTSHIYTSTHSLTYNHSQQSQTTLTSTQHTHHSHLQRTRWTNEMNEDVVRSYFRVTELETNKTGYRKGLHQDFIKTYPHLAGVSEQRVADQRRRIFTDKVINIDRLNRIRQEIADEIRIQINNTENTEERLTIDTNNLDGNNDFILNIDPGLFTDNHQQHETLQRNPEIDQTFQDMVRYFSNIEPTERLYIPKQKASKKLSRIVQYINAFLLPENINDHTDFKTFQTIIYCSAITAAKINGSKIVIPQPVDANRIKRKKKPEWQIRLENKIINLRANIGRVTQYINGNTSTRLRHHVDLILEQYKVHSIHEGDNTQPIQVLDTLKQKLSVAISRLKRYNACTLRKHQNTQFCHNEKQFYRTIRNSNTTQNDSSHQSSHNSPPLHELRNFWASIWEQPIEYNEQADWIQVETANNANTSEMQFECISVDTFHRVLSKQHNWKAPGSDHIHNYWYKKFTYTHPFLHNYINQFIQHPETMPQYITVGSTYMLPKDPTDTLNPAKYRPITCLQTVYKIITSCLAELIYQHTTENNLLSEQQKGCRKFSQGCKEQLTIDSVILRQVNKSKKDLFSMYVDYKKAYDSIPHNWLLKILNIYKIHPSIINFLEISIKNWTTRLKINTINGTVDSDPIKIQRGIFQGDALSPLWFCLALNPLSNILNLNNKIGYPLNYNEAPTEIRPYQKTVYLNHLLYMDDIKLYATTEDDLNKLANITENFSKDIRMEFGIDKCKINSIKAGQSYKQYYIMTSGDQIDSLDENSTYKYLGYNQSKCIESKEVKLKLQQQFRSRLNAIFKTHLNSRNMIKAINTFAIPILTYSFGIIKWSKTEIKNVQRLINVTMTKNRKHHPRSCLQRITLPRSVGGRGLIDINNLHNSQIGTLRQYFHIKAQTSIIHNAIVQNDHKFTPLNLSDQNKQANEHIKDKQAKLDEWNQKSLHGRHLQDLNHPNVDKLASNAWLRRGELFPETEGFMIAIQDQVMETRNYQKYITKTLASDTCRRCSSAPETIQHITGACKVIVQTEYKHRHDQIANIIHQKLAQKYRLIPDTYIPYYKYTPDNVLENAKFRIYYDRAILTDRTTHFNRPDITIVDKENKTALIIDIAIPNTHNLQNTIAEKLSKYSDLREEITRMWQLRNVVIVPIVLSTTGVIPKQLHRSLQTLDLPPYIYATLQKAAILNTCRIVRKFLQIHHTQHQSDSGNSLEQTPM

SEQ ID NO: 7179 - protein, 1426 aa, Thyatira batis
MEKMNNRRYNLRSLPGGRRGASGADAGCSSMRTIGDAELSRRVPVEQTTTADDEELSRRTLRDNTTADDGELTRRVLRDNTTADDVSTAPPSAATIISSGSSYRTPASPSTSTASTYLSVDVAHEAHPAESRVPTTNKSQMRRRWTPEHNEFILRTYLQLTSLEQDISDYLTPLHSKFTEKFPLMDVPRQRLGDQRRAIIRNKLLPSEKIKAIYEEIKIELQSHSTSHIYTSTHSLTYNHSQQLPTTLTSSQHTQHSHLQRTRWTNEMNEDVVRSYFRATELETNKTGYRKGLHQDFIKKYPHLAGVSEQRVADQRRRIFTDKVINIDRLNRIRQEIADEIRIQINNTEHTEERLTIDTNILDGNNDFILNIDPGLFTDTHQQHETLQRNPEIDQTFQDMIRYFSNTEPTERLYIPKQKASKKLSRIVQYINAFLLPENINDNTDFKTFQTIIYCSAITAAKINGSKIVIPQPVDANRIKRKKKPEWQIRLENKIINLRANIGRVTQYINGNTSTRLRHHVDLILQQYKVHSIYEGDNTQPIQVLDTLKQKLSVAISRLKRYNACTLRKHQNTQFCHNEKQFYRTIRNSNTTQNDSSHQSSHNSPPLHELRNFWASIWEQPVEYNEQADWIKVETANNANTSEMQFECISVDTFHRVLSKQHNWKAPGSDHIHNYWYKKFTYTHPFLHNYINQFLQHPETMPQYITVGITYMLPKDPTDTLNPAKYRPITCLQTVYKIITSCLAELIYQHTTENNLLSEQQKGCRKFSQGCKEQLTIDSVILRQVNKSKKNLFSMYVDYKKAYDSIPHNWLLKILNIYKIHPSIINFLEISIKNWTTRLKINTINGTVDSDPIKIQRGIFQGDALSPLWFCLALNPLSNILNLNNKIGYPLNYNEAPTEIGPYQNTVYLNHLLYMDDIKLYATTEDDLNKLANITENFSKDIRMEFGIDKCKINSIKAGQSYKQYYIMTSGDQIDSLDENSTYKYLGYNQSKFIESKEIKLKLQQQFRSRLNAIFKTHLNSRNMIKAINTFAIPILTYSFGIIKWSKTELKNIQRLINVTMTKNRKHHPRSCLQRIILPRSEGGRGLIDINNLHNSQIGTLRQYFHIKAQTSTIHNAIVQNDHKFTPLNLSDQNRQANEYIKDKQAKLDEWNQKSLHGRHLQDLNHPNVDKLASNAWLRRGELFPETEGFMLAIQDQVMETRNYQKYITKTLASDTCRRCSSAPETIQHITGACKAIVQTEYKHRHDQIANIIHQKLAQKYHLIPHTYIPYYKYTPDNVLENPKFRMYYDRAILTDRTTHFNRPDITIVDKENKTALIIDIAIPNTHNLQNTIAEKLSKYSDLREEITRMWQLRNVAIVPIVLSTTGVIPKQLHRSIQTLDLPPYIYTSLQKAAILNTCRIVRKFLQTNHTQHHSDSGNSLEQTPM

SEQ ID NO: 7180 - protein, 1426 aa, Thyatira batis
MEKMNNRRYNLRSLPGGRRGASGADAGCSSIRTIGDAELSRRVPVEQTTTADDEELSRRTLRDNTTADDGELTRRVLRDNTTADDVSTAPPSAATIISSGSSYRTPASPSTSTASTYLSVDVAHEAHPAESRVPTTNKSQMRRRWTPEHNEFILRTYLQLTSLEQDISDYLTPLHSKFTEKFPLMDVPRQRLGDQRRAIIRNKLLPSEKIKAIYEEIKIELQSHTTSHIYTSTHSLTYNHSQQSQTTLTSTQHTHHSHLQRTRWTNEMNEDVVRSYFRVTELETNKTGYRKGLHQDFIKTYPHLAGVSEQRVADQRRRIFTDKVINIDRLNRIRQEIADEIRIQINNTENTEERLTIDTNNLDGNNDFILNIDPGLFTDNHQQHETLQRNPEIDQTFQDMVRYFSNIEPTERLYIPKQKSSKKLSRIVQYINAFLLPENINDHTDFKTFQTIIYCSAITAAKINGSKIVIPQPVDANRIKRKKKPEWQIRLENKIINLRANIGRVTQYINGNTSTRLRHHVDLILEQYKVHSIHEGDNTQPIQVLDTLKQKLSVAISRLKRYNACTLRKHQNTQFCHNEKQFYRTIRNSNTTQNDSSHQSSHNSPPLHELRNFWASIWEQPIEYNEQSDWIQVETANNANTSEMQFECISVDTFHRVLSKQHNWKAPGSDHIHNYWYKKFTYTHPFLHNYINQFIQHPETMPQYITVGITYMLPKDPTDTLNPAKYRPITCLQTVYKIITSCLAELIYQHTTENNLLSEQQKGCRKFSQGCKEQLTIDSVILRQVNKSKKDLFSMYVDYKKAYDSIPHNWLLKILNIYKIHPSIINFLEISIKNWTTRLKINTINGTVDSDPIKIQRGIFQGDALSPLWFCLALNPLSNILNLNNKIGYPLNYNEAPTEIRPYQNTVYLNHLLYMDDIKLYATTEDDLNKLANITENFSKDIRMEFGIDKCKINSIKAGQSYKQYYIMTSGDQIDSLDENSTYKYLGYNQSKCIESKEVKLKLQQQFRSRLNAIFKTHLNSRNMIKAINTFAIPILTYSFGIIKWSKTEIKNVQRLINVTMTKNRKHHPRSCLQRITLPRSVGGRGLIDINNLHNSQIGTLRQYFHFKAQTSIIHNAIVQNDHKFTPLNLSDQNKQANEHIKDKQAKLDEWNQKSLHGRHLQDLNQPNVDKLASNAWLRRGELFPETEGFMIAIQDQVMETRNYQKYITKTLASDTCRRCSSAPETIQHITGACKAIVQTEYKHRHDQIANIIHQKLAQKYRLIPDTYIPYYKYTPDNVLENAKFRIYYDRAILTDRTTHFNRPDITIVDKENKTALIIDIAIPNTHNLQNTIAEKLSKYSDLREEITRMWQLRNVVIVPIVLSTTGVIPKQLHRSLQTLDLPPYIYATLQKAAILNTCRIVRKFLQIHHTQHQSDSGNSLEQTPM

SEQ ID NO: 7181 - protein, 1426 aa, Thyatira batis
MEKMNNRRYNLRSLPGGRRGASGADAGCSSMRTIGDAELSRRVPVEQTTTADDEELSRRTLRDNTTADDGELTRRVLRDNTTADDVSTAPPSAATIISSGSSYRTPASPSTSTASTYLSVDVAHEAHPAESRVPTTNKSQMRRRWTPEHNEFILRTYLQLTSLEQDISDYLTPLHSKFTENFPLMDVPRQRLGDQRRAIIRNKLLPPEKIKAIYEEIKIELQSHSTSHIYTSTHSLTYNHSQQLQTTLTSSQHTQHSHLQRTRWTNEMNEDVVRSYFRVTELETNKTGYRKGLHQDFIKTYPHLAGVSEQRVADQRRRIFTDKVINIDRLNRIRQEIADEIRIQINNTEHTEERLTIDTNILDGNNDLILNIDPGLFTDTHQQHETLQRNPEIDQTFQDMIRYFSNTEPTERLYIPKQKASKKLSRIVQYINAFLLPENINDNTDFKTFQTIIYCSAITAAKINGSKIVIPQPVDANRIKQKKKPEWQIRLENKIINLRANIGRVTQYINGNTSTRLRHHVDLILQQYKVHSIYEGDNTQPIQVLDTLKQKLSVAISRLKRYNACTLRKYQNTQFCHNEKQFYRTIRNSNTTQNDSSHQSSHNSPPLHELRNFWASIWEQPIEYNEQADWIQVETANNANTSEMQFECISVDTFHRVLSKQHNWKAPGSDHIHNYWYKKFTYTHPFLHNYINQFLQHPETMPQYITVGITYMLPKDPTDTLNPAKYRPITCLQTVYKIITSCLAELIYQHTTENNLLSEQQKGCRKFSQGCKEQLTIDSVILRQVNKSKKDLFSMYVDYKKAYDSIPHNWLLKILNIYKLHPSIINFLEISIKNWTTRLKINTINGTVDSDPIKIQRGIFQGDALSPLWFCLALNPLSNILNLNNKIGYPLNYNEAPTEIGPYQNTVYLNHLLYMDDIKLYATTEDDLNKLANITENFSKDIRMEFGIDKCKINSIKAGQSYKQYYIMTSGDQIDSLDENSTYKYLGYNQSKCIESKEIKLKLQQQFRSRLNAIFKTHLNSRNMIKAINTFAIPILTYSFGIIKWSKTELKNIQRLINVTMTKNRKHHPRSCLQRITLPRSEGGRGLIDINNLHNSQIGTLRQYFHIKAQTSTIHNAIVQNDHKFTPLNLSDQNRQANEYIKDKQAKLDEWNQKSLHGRHLQDLNHPNVDKLASNAWLRRGELFPETEGFMLAIQDQVMETRNYQKYITKTLASDTCRRCSSAPETIQHITGACKAIVQTEYKHRHDQIANIIHQKLAQKYHLIPHTYIPYYKYTPDNVLENPKFRMYYDRAILTDRTTHFNRPDITIVDKENKTALIIDIAIPNTHNLQNTIAEKLSKYSDLREEITRMWQLRNVAIVPIVLSTTGVIPKQLHRSIQKLDLPPYIYTSLQKAAILNTCRIVRKFLQINHTQHHSDSGNSLEQTPM

SEQ ID NO: 7182 - protein, 1426 aa, Thyatira batis
MEKMNNRRYNLRSLPGGRRGASGADAGCSSIRTIGDAELSRRVPVEQTTTADDEELSRRTLRDNTTADDGELTRRVLRDNTTADDVSTAPPSAATIISSGSSYRTPASPSTSTASTYLSVDVAHEAHPAESRVPTTNKSQMRRRWTPEHNEFILRTYLQLTSLEQDISDYLTPLHSKFTEKFPLMDVPRQRLGDQRRAIIRNKLLPSEKIKAIYEEIKIELQSHTTSHIYTSTHSLTYNHSQQSQTTLTSTQHTHHSHLQRTRWTNEMNEDVVRSYFRVTELETNKTGYRKGLHQDFIKTYPHLAGVSEQRVADQRRRIFTDKVINIDRLNRIRQEIADEIRIQINNTENTEERLTIDTNNLDGNNDFILNIDPGLFTDNHQQHETLQRNPEIDQTFQDMVRYFSNIEPTERLYIPKQKASKKLSRIVQYINAFLLPENINDHTDFKTFQTIIYCSAITAAKINGSKIVIPQPVDANRIKRKKKPEWQIRLENKIINLRANIGRVTQYINGNTSTRLRHHVDLILEQYKVHSIHEGDNTQPIQVLDTLKQKLSVAISRLKRYNACTLRKHQNTQFCHNEKQFYRTIRNSNTTQNDSSHQSSHNSPPLHELRNFWASIWEQPIEYNEQSDWIQVETANNANTSEMQFECISVDTFHRVLSKQHNWKAPGSDHIHNYWYKKFTYTHPFLHNYINQFIQHPETMPQYITVGITYMLPKDPTDTLNPAKYRPITCLQTVYKIITSCLAELIYQHTTENNLLSEQQKGCRKFSQGCKEQLTIDSVILRQVNKSKKDLFSMYVDYKKAYDSIPHNWLLKILNIYKIHPSIINFLEISIKNWTTRLKINTINGTVDSDPIKIQRGIFQGDALSPLWFCLALNPLSNILNLNNKIGYPLNYNEAPTEIRPYQNTVYLNHLLYMDDIKLYATTEDDLNKLANITENFSKDIRMEFGIDKCKINSIKAGQSYKQYYIMTSGDQIDSLDENSTYKYLGYNQSKCIESKEVKLKLQQQFRSRLNAIFKTHLNSRNMIKAINTFAIPILTYSFGIIKWSKTEIKNVQRLINVTMTKNRKHHPRSCLQRITLPRSVGGRGLIDINNLHNSQIGTLRQYFHFKAQTSIIHNAIVQNDHKFTPLNLSDQNKQANEHIKDKQAKLDEWNQKSLHGRHLQDLNQPNVDKLASNAWLRRGELFPETEGFMIAIQDQVMETRNYQKYITKTLASDTCRRCSSAPETIQHITGACKAIVQTEYKHRHDQIANIIHQKLAQKYRLIPDTYIPYYKYTPDNVLENAKFRIYYDRAILTDRTTHFNQPDITIVDKENKTALIIDIAIPNTHNLQNTIAEKLSKYSDLREEITRMWQLRNVVIVPIVLSTTGVIPKQLHRSLQTLDLPPYIYATLQKAAILNTCRIVRKFLQIHHTQHQSDSGNSLEQTPM

SEQ ID NO: 7183 - protein, 1426 aa, Thyatira batis
MEKMNNRRYNLRSLPGGRRGASGADAGCSSIRTIGDAELSRRVPVEQTTTADNEELSRRTLRDNATADDGELTRRVLRDNTTADDVSTAPPSAATIISSGSSYRTPASPSTSTASTYLSVDVAHEAHPAESRVPTTNKSQMRRRWTPEHNEFILRTYLQLTSLEQDISDYLTPLHSKFTEKFPLMDVPRQRLGDQRRAIIRNKLLPSEKIKAIYEEIKIELQSHTTSHIYTSTHSLTYNHNQQSQTTLTSTQHTHHSHLQRTRWTNEMNEDVVRSYFRVTELETNKTGYRKGLHQDFIKTYPHLAGVSEQRVADQRRRIFTDKVINVDRLNRIRQEIADEIRIQINNTENTEERLTIDTNNLDGNNDFILNIDPGLFTDSHQQHETLQRNPEIDQTFQDMVRYFSNIEPTERLYIPKQKASKKLSRIVQYINAFLLPENINDHTDFKTFQTIIYCSAITAAKINGSKIVIPQPVDANRIKRKKKPEWQIRLENKIINLRANIGRVTQYINGNTSTRLRHHVDLILEQYKVHSIHEGDNTQPIQVLDTLKQKLSVAISRLKRYNACTLRKHQNTQFCHNEKQFYRTIRNSNTTQNDSSHQSSHNSPPLHELRNFWASLWEQPIEYNEQADWIQVETANNANTSEMQFECISVDTFHRVLSKQHNWKAPGSDHIHNYWYKKFTYTHPFLHNYINQFIQHPETMPQYITAGITYMLPKDPTDTLNPAKYRPITCLQTVYKIITSCLAELIYQHTTENNLLSEQQKGCRKFSQGCKEQLTIDSVILRQVNKSKKDLFSMYVDYKKAYDSIPHNWLLKILNIYKIHPSIINFLEISIKNWTTRLKMNTLNGTVDSDPIKIQRGIFQGDALSPLWFCLALNPLSNILNLNNKIGYPLNFNEAPTEIRPYQNTVYLNHLLYMDDIKLYATTEDDLNKLANITENFSKDIRMEFGIDKCKINSIKAGQSYKQYYIMTTGDQIDSLDENSTYKYLGYNQSKCIESKEVKLKLQQQFRSRLNAIFKTHLNSRNMIKAINTFAIPILTYSFGIIKWSKTEIKNVQRLINVTMTKNRKHHPRSCLQRITLPRSVGGRGLIDINNLHNSQIGTLRQYFHIKAQTSIIHNAIVQNDHKFTPLNLSDQNKQANEHIKDKQAKLDEWNQKSLHGRHLQDLNHPNVDKLASNAWLRRGELFPETEGFMIAIQDQVMETRNYQKYITKTLASDTCRRCSSAPETIQHITGACKAIVQTEYKHRHDQIANIIHQKLAQKYRLIPDTYIPYYKYTPDNVLENAKFRIYYDRAILTDRTTHFNRPDITIVDKENKTALIIDIAIPNTHNLQNTIAEKLSKYSDLREEITRMWQLRNVIIVPIVLSTTGVIPKQLHRSLQTLDLPPYIYTTLQKAAILNTCRIVRKFLQIHHTQHQSDSGNSLEQTPM

SEQ ID NO: 7184 - protein, 910 aa, Blastobasis adustella
MSASAAPTICPHCPGSTRTFCVRGLSIHIGKVHRNHRHQAAATQAAPAADSSQVPVQSSNRCLLERLAAFKEGTPVLRHIPKGARNQAAGRLCDVLNSCIASNSVDDWGLLLAFAFIALKVPSKDLPGNMTAKVRANIESSVIHDDFVSELKHRYSTVQKKIENKVFEGDLRGAVRLLISEDSFAQHGPDTLAALKRKHPEPSRPLDFRSPPDLSIEPVTVSVEEVSRALGSFYNGSAAGLDGLRPNHLKELTSVSAGENGPRLLECLTKLCNFLLSGRVNPEVCPYLYGASLCALTKKDGGVRPIAIGSVFRRLAAKLACQFVKEEIAGYLQPHQLGFGSRMGCEAAIHATRAYVTDPANSNSVVIKLDICNAFNALERDVLLNEIKEKLPSLFHFLHQVYRFPSNLFFNNELISSQVGAQQGDPLGPLISPLSIAIHTAVKEIKSTLNIWYLDDGVIGGNPEDVLQDLDVLVPRLQELGLEANTSKCEFYPCSSAARIHFSRFNSLLPGIRELSSCTFYLLGSPLFPDAIPEAIDIRKKLLLVAQVRLSKLSAHVALTLLRMCFALPKVTYLLRTTPTWLSADNVSSFDTTLKSTVESILNVFLDDSQWSLASQPIRYGGLGVRCMQDVGLAAFLASAHGVANLVASILCCDDDKASIPYASDALIAWSARNSTALPPSAPHIERHWDDLSAKRVNKQLLDNATGTNLARLRAVSQSESGAWLHALPSPHLGTFLDDNSLRVAVALRLGCKVCESHECTCGSVVEADGHHGLSCRRCAGRFPRHHSLNDILRRAFVSANVPCVLEPPSLCRSDGKRPDGLTLVPWKNGKCLVWDATCVCTVTASHLSRSVISPAAAAEDAAAKKRQKYAALQATYLFVPFAVETKYLGAEKSTPSSFLGPSAPIIASV

SEQ ID NO: 7185 - protein, 956 aa, Erannis defoliaria
MSDLSVPLTCPHCPGSARTFSAHGLKIHIGRKHKNVRRHATTAQAAPVSVDSSQAHQAPPLTPRQCPLDRLAHLRDSIPVLRHVPKGARCQAAGKLCDIIDRCVDSNGAGDWSSLLTFAYSALKVPSKDLPGNMTAKVKANIVSSESFQVDDGCSITESSSRSRSVRGIIESKVHEGDVRGAVRLLVSDDTFAQRGPETLIALKHKHPSPSRPLDFPLAPDLSYAAVTVTADGVAQALGSFYNGSAAGLDGIRPAHLKELTSSSAGENGPRLLECLTRLSNFMLSGQINPEVCPYLYGATLCALTKKDGGLRPIAIGGVFRRLVAKLACRAVKEEMSEYLQPHQLGFGTRLGCEAAIHATRAYVMDNGNSDCIVIKLDIRNAFNTLERDVLLGEAKDHIPSVYPFLHQVYRSPSNLFFNDERILSQVGAQQGDPLGPLVFSLAIHRAITEVKSSLNLWYLDDGTIGGKPEVVYQDLEALISRLRELGLEVNTSKCEFFPCSAAACAHFPTFSSLLPGLRELSPSTFNLLGSPIFLEAVPEAIHYRINLLLAAKERLEGLSAHVALVLLRMCFALPKITYLLRTTPTWMCATEISSFDDVLKSAVESVLNVCLSKSQWSLASQPFRYGGLGIRCAGDVGLPAFLASAHGVANLVAIILQSDGDRASIPYVSEAIEAWSVLNIGAQIPMAPQVQRAWDEVGAKSAHKQLLDSSTGVDLARLRAVSQSESGAWLHALPSPHLGTLLDDDSLRVAVAFRLGCKVCEPHQCTCGSMVEADGHHALSCRRCAGRFPRHHALNDIVRRAFISANVPCVLEPPGLSRSDGKRPDGLTLVPWKNGKCLIWDATCVSTVAASHLGRSVLSAAAAAEDAACKKRLKYAALESSYCFVPIAVETMGSWGADAKRLVREIGRRIKDSGGDSRAGLFLVQRLSIAIQRGNAASIMGTFAPGTVRGGLFSD

SEQ ID NO: 7186 - protein, 823 aa, Erannis defoliaria
MTAKVKANIVSSESFQVDDGCSITESSSRSRSVRGIIESKVHEGDVRGAVRLLVSDDTFAQRGPETLIALKHKHPSPSRPLDFPLAPDLSYAAVTVTAGGVAQALGSFYNGSAAGLDGIRPAYLKELTSSSAGENGPRLLECLTRLSNFMLSGQINPEVCPCLYGATLCALSKKDGGLRPIAIGGVFRRLVAKLACRAVKEEMSEYLQPHQLGFGTRLGCEAAIHATRAYVMDTGNSDCVVIKLDIRNAFNTLERDVLLGDAKDHIPSLYPFLHQVYRSPSNLFFNDERILSQVGAQQGDPLGPLVFSLAIHRAITEVKSSLNLWYLDDGTIGGKPEVVYQDLEALISRLGELDLEVNTSKCEFFPCSAAACAHFPTFSSLLPGLRELSPSTFNLLGSPIFLEAVPEAIHYRINLLLAAKERLEGLSAHVALVLLRMCFALPKITYLLRTTPTWMCATEISSFDDVLKSAVESVLNVCLSKSQWSLASQPIRYGGLGIRCAGDVGLPAFLASAHGVANLVAIILHSDGDRASIPYVSEAIEAWSVLNIGAQIPMAPQVQRAWDKVGAKSAHKQLLDSSTGVDLARLRAVSQSESGAWLHALPSPHLGTLLDDDSLRVAVAFRLGCKVCEPHQCTCGSMVEADGHHALSCRRCAGRFPRHHALNDIVRRAFSSANVPCVLEPPGLSRSDGKRPDGLTLVPWKNGKCLIWDATCVSTVAASHLGRSVLSAAAAAEDAACKKRLKYAALESSYCFVPIAVETMGSWGADAKRLVREIGRRIKDSGGDSRAGLYLVQRLSIAIQRGNAASIMGTFAPGTVRGGLFSD

SEQ ID NO: 7187 - protein, 951 aa, Biston betularia
MSTLSVSCPYCSGSARTFSEHGLKVHIGRKHKEVIQTVPIRQTSPTGSATQQACSDTQAPRSCPLDRLAALKRSTPVLRHVPKGARNQAAGKLSDIIEKCASSNGVDDWCSLLTFAYGALRVPLKDTPGNMTAKVKCNIRASGSELQLDVSGSAGSGRSRTVEKAIESKVFEGDLRGAVRLLVSDDSFAQNDSATLAALENKHPSPSRPLNFPLAPDASYSPVSVSVEDVALALSSFYSSSAAGLDGIRPGHLKELTSPSAGENGPRLLECLTKLVNFLLSGQLNMEVCPYLYGASLFALAKKDGGVRPIAIGSVFRRLAAKLACRAVRGSVTDYLQPHQLGFGIQRGCEAAIHATRAFVMNPANSHCVVIKLDVRNAFNTLERDVLLSEAKDKIPNVYPFLHQLYSSPSNLFYGSNLISSQVGAQQGDPLGPLVFSLAIHKVLSLIRSSLNLWYLDDGTIGGSPKDVYQDLKVLIPRLRELGLEVNPSKCEFFPCSAAAGSHFACFSALLPGLKEISSYTLTLLGSPIFLDAVPEAILSRQQLLSAAQGRLKHLSAHVALVLLRMCFALPKITYLLRTAPTWLCQNMVSSFDDSLKSAVESILNVSLNELQWTQAALPIRYGGLGVRRAEDLSLPAFLASAHGVADLVAVILHLNGGEASIPLLPEAISAWSTLNPGVAGPAAPQIQRAWDDVGARRVHKQTLDGAAGVDLARLRAVSQPESGAWLHALPSPHLGTLLDDDSVRVAVAFRLGCKVCEPHKCICGMMVEDDGHHALSCRRCTGRFPRHHALNDIVRRALVSANVPCVLEPPGLSRSDGKRPDGLTLVPWKNGKCLVWDATCVNTLATSHLGRTIHSPAAAAEDAADTKRLKYAALEPQYLFVPIAVETLGCWGTEAKGLVHEIGRRIGGKTGDTRSGSYLVQRIAIAIQRGNAASVMGTFAPGTVRGGLFC

SEQ ID NO: 7188 - protein, 956 aa, Erannis defoliaria
MSDLSVPLTCPHCPGSARTFSAHGLKIHIGRKHKNVRRHATTAQAAPVSVDSSQAHQAPPLTPRQCPLDRLAHLRDSIPVLRHVPKGARCQAAGKLCDIIDRCVDSNGAGDWSSLLTFAYSALKVPSRDLPGNMTAKVKANIVSSESFQVDDGCSITESSSRSRSVRGIIESKVHEGDVRGAVRLLVSDDTFAQRGPETLIALKHKHPSPSRPLDFPLAPDLSYAAVTVTADGVAQALGSFYNGSAAGLDGIRPAHLKELTSSSAGENGPRLLECLTRLSNFMLSGQINPEVCPYLYGATLCALTKKDGGLRPIAIGGVFRRLVAKLACRAVKEEMSEYLQPHQLGFGTRLGCEAAIHATRAYVMDTGNSDCVVIKLDIRNAFNTLERDVLLGEAKDHIPSLYPFLHQVYRSPSNLFFNDERILSQVGAQQGDPLGPLVFSLAIHRAITEVKSSLNLWYLDDGTIGGKPEVVYQDLEALISRLRELGLEVNTSKCEFFPCSAAACAHFPTFSSLLPGLRELSPSTFNLLGSPIFLEAVPEAIHYRKNLLLAAKERLEGLSAHVALVLLRMCFALPKITYLLRTTPTWMCATEISSFDDVLKSAVESVLNVCLSKSQWSLASQPIRYGGLGIRCAGDVGLPAFLASAHGVANLVAIILHSDGDRASIPYVSEAIEAWSVLNIGAQIPMAPQVQRAWDEVGAKSAHKQLLDSSTGVDLARLRAVSQSESGAWLHALPSPHLGTLLDDDSLRVAVAFRLGCKVCEPHQCTCGSMVEADGHHALSCRRCAGRFPRHHALNDIVRRAFISANVPCVLEPPGLSRSDGKRPDGLTLVPWKNGKCLIWDATCVSTVAASHLGRSVLSAAAAAEDAACKKRLKYAALESSYCFVPIAVETMGSWGADAKRLVREIGRRIKDSGGDSRAGLYLVQRLSIAIQRGNAASIMGTFAPGTVRGGLFSD

SEQ ID NO: 7189 - protein, 821 aa, Biston betularia
MTAKVKCNIRASGSELQLDVSGSAGSGRSRTVEKAIESKVFEGDLRGAVRLLVSDDSFAQNDSATLAALENKHPSPSRPLNFPLAPDASYSPVSVSVEDVALALSSFYSSSAAGLDGIRPGHLKELTSPSAGENGPRLLECLTKLVNFLLSGQLNMEVCPYLYGASLFALAKKDGGVRPIAIGSVFRRLAAKLACRAVRGSVTDYLQPHQLGFGIQRGCEAAIHATRAFVMNPANSHCVVIKLDVRNAFNTLERDVLLSEAKDKIPNVYPFLHQLYSSPSNLFYGSNLISSQVGAQQGDPLGPLVFSLAIHKVLSLIRSSLNLWYLDDGTIGGSPKDVYQDLKVLIPRLRELGLEVNPSKCEFFPCSAAAGSHFACFSALLPGLKEISSYTLTLLGSPIFLDAVPEAILSRQQLLSAAQGRLKHLSAHVALVLLRMCFALPKITYLLRTAPTWLCQNMVSSFDDSLKSAVESILNVSLNELQWTQAALPIRYGGLGVRRAEDLSLPAFLASAHGVADLVAVILHLNGGEASIPLLPEAISAWSTLNPGVAGPAAPQIQRAWDDVGARRVHKQTLDGAAGVDLARLRAVSQPESGAWLHALPSPHLGTLLDDDSVRVAVAFRLGCKVCEPHKCICGMMVEDDGHHALSCRRCTGRFPRHHALNDIVRRALVSANVPCVLEPPGLSRSDGKRPDGLTLVPWKNGKCLVWDATCVNTLATSHLGRTIHSPAAAAEDAADTKRLKYAALEPQYLFVPIAVETLGCWGTEAKGLVHEIGRRIGGKTGDTRSGSYLVQRIAIAIQRGNAASVMGTFAPGTVRGGLFC

SEQ ID NO: 7190 - protein, 956 aa, Erannis defoliaria
MSSLTSPLTCPHCPGSSRIFSQHGLKVHIGRKHKDVRQTAATSQTSPIVLISQLPSQTSQVTQIPRPCLLERISSLKMSTPVLRHIPRGARNQAAGKLCDVIDRCVTCNGVEDWGALLTFAFGALKVPSKDAPGNVTAKVKANIQSSGLDQLADETYVPGFSRSCGNRKAIESKVYDGDLRGAVRLLVSNDSFAHHDPVTLNALELKHPSPSRPLSFPPAPDTSFAAVTVSVEDVSLALSSFYSGSAAGLDGIRPGHLKELTSGSAGENSQRLLECLTRLVNFLLSGQINPAVCPYLYGATLCALTKKDGGFRPIAIGSVFRRLTAKLACRSVREAMSEYLQPHQLGFGTRQGCEAAIHATRAFVMDPDHSDCVVLKLDICNAFNTLERDVLLSEVKDLTPSLYPFLYQVYSSSSNLYFNDSLISSQVGAQQGDPLGPLVFSLAIHKVISELKSTLNLWYLDDGTLGGSPKDVYQDLEALISRFRDLGLEVNPSKCEFFPCSTGARTHFLQFSSLLPGLNELSSQSFTLLGSPIFPDGVPEAIFSRQKLLLTAQERLKDLSAHVAIVLLRMCFALPKLTYLLRTAPTWLCPVEVSAFDETLKAIVESILNVSLNQTQWIQATLPIRHGGIGIRCARDVGLPAFLASAHGVADLVTVILRSSGGGVSLPFVAGAESAWSVCSSGATNPVIPQVQRAWDDITARQIKERLRLDASGADLARLRAVSEPESGAWLHALPSPYLGNLLDDNSLRVAVALRLGCKVCEPHRCTCGSMVEADGHHALSCRRCAGRFPRHHALNDIVRRALVSADVPCLLEPPGLSRSDGKRPDGVTLVPWKNGRCLLWDATCVSTVAPSHLGRTVLSPAAAAEDAAVKKRLKYAALEGQYIFVPLAVETLGSWGIDAKNLVGEIGRRLKDKSGDPRSSSYLVQRLAIAIQRGNAASVMGTFAPGAVRGGLFD

SEQ ID NO: 7191 - protein, 951 aa, Biston betularia
MSTLSVSCPYCSGSARTFSEHGLKVHIGRKHKEVIQTVPIRQTSPTGSATQQACSDTQALRSCPLDRLAALKRSTPVLRHVPKGARNQAAGKLSDIIEKCASSNGVDDWCSLLTFAYGALRVPLKDTPGNMTAKVKCNIRASGSELQLDVSGSAGSGRSRTVEKAIESKVFEGDLRGAVRLLVSDDSFAQNDSATLAALENKHPSPSRPLNFPLAPDASYSPVSVSVEDVALALSSFYSSSAAGLDGIRPGHLKELTSPSAGENGPRLLECLTKLVNFLLSGQLNMEVCPYLYGASLFALAKKDGGVRPIAIGSVFRRLAAKLACRAVRGSVTDYLQPHQLGFGIQRGCEAAIHATRAFVMNPANSHCVVIKLDVRNAFNTLERDVLLSEAKDKIPNVYPFLHQLYSSPSNLFYGSNLISSQVGAQQGDPLGPLVFSLAIHKVLSLIRSSLNLWYLDDGTIGGSPKDVYQDLKVLIPRLRELGLEVNPSKCEFFPCSAAAGSHFACFSALLPGLKEISSYTLTLLGSPIFLDAVPEAILSRQQLLSAAQGRLKHLSAHVALVLLRMCFALPKITYLLRTAPTWLCQNMVSSFDDSLKSAVESILNVSLNELQWTQAALPIRYGGLGVRRAEDLSLPAFLASAHGVADLVAVILHLNGGEASIPLLPEAISAWSTLNPGVAGPAAPQIQRAWDDVGARRVHKQTLDGAAGVDLARLRAVSQPESGAWLHALPSPHLGTLLDDDSVRVAVAFRLGCKVCEPHKCICGMMVEDDGHHALSCRRCTGRFPRHHALNDIVRRALVSANVPCVLEPPGLSRSDGKRPDGLTLVPWKNGKCLVWDATCVNTLATSHLGRTIHSPAAAAEDAADTKRLKYAALEPQYLFVPIAVETLGCWGTEAKGLVHEIGRRIGGKTGDTRSGSYLVQRIAIAIQRGNAASVMGTFAPGTVRGGLFC

SEQ ID NO: 7192 - protein, 951 aa, Biston betularia
MSTLSVSCPYCSGSARTFSEHGLKVHIGRKHKEVIQTVPIRQTSPTGSATQQACSDTQALRSCPLDRLAALKRSTPVLRHVPKGARNQAAGKLSDIIEKCASSNGVDDWCSLLTFAYGALRVPLKDTPGNMTAKVKCNIRASGSELQLDVSGSAGSGRSRTVEKAIESKVFEGDLRGAVRLLVSDDSFAQNDSATLAALENKHPSPSRPLNFPLAPDASYSPVSVSVEDVALALSSFYSSSAAGLDGIRPGHLKELTSPSAGENGPRLLECLTKLVNFLLSGQLNMEVCPYLYGASLFALAKKDGGVRPIAIGSVFRRLAAKLACRAVRGSVTDYLQPHQLGFGIQRGCEAAIHATRAFVMNPANSHCVVIKLDVRNAFNTLERDVLLSEAKDKIPNVYPFLHQLYSSPSNLFYGSNLISSQVGAQQGDPLGPLVFSLAIHKVLSLIRSSLNLWYLDDGTIGGSPKDVYQDLKVLIPRLRELGLEVNPSKCEFFPCSAAAGSYFACFSALLPGLKEISSYTLTLLGSPIFLDAVPEAILSRQQLLSAAQGRLKHLSAHVALVLLRMCFALPKITYLLRTAPTWLCQNMVSSFDDSLKSAVESILNVSLNELQWTQAALPIRYGGLGVRRAEDLSLPAFLASAHGVADLVAVILHLNGGEASIPLLPEAISAWSTLNPGVAGPAAPQIQRAWDDVGARRVHKQTLDGAAGVDLARLRAVSQPESGAWLHALPSPHLGTLLDDDSVRVAVAFRLGCKVCEPHKCICGMMVEDDGHHALSCRRCTGRFPRHHALNDIVRRALVSANVPCVLEPPGLSRSDGKRPDGLTLVPWKNGKCLVWDATCVNTLATSHLGRTIHSPAAAAEDAADTKRLKYAALEPQYLFVPIAVETLGCWGTEAKGLVHEIGRRIGGKTGDTRSGSYLVQRIAIAIQRGNAASVMGTFAPGTVRGGLFC

SEQ ID NO: 7193 - protein, 980 aa, Marasmia exigua
MSTVNVTHLACPHCPGSSRTRTFSAHGLKVHIGRMHREVRSPSRGLQASPTDTTPSASASLAPPSPSPDIRSPSPDIRSPSPDISPLERLASFKRSIPVLRHVPKGARNQVAGRLCDIIDSCVARNGVDEWSALLSFAYTALRVPSKDSPGNVTAKVKANARSSGPGSIDDIAVPRATPVPRSRKKMIEAKVFEGDLRGAVRLLMSDDSFARRDPVTLAALKSKHPDPSRPLSFPTDPDSSVPVASVTREDVSSALDCFYSGSAAGLDGIRPGHLKELTSVTAGENGGRLLGCLTRLSNFLLSGQLNPLVCPYLYGASLIALEKKDGGVRPIAIGCVFRRLTAKLACRAVKENMARYLQPHQVGFGTRLGCEAAIHATRAFVLDPENENSIVLKVDIRNAFNTLERDILLGEVRENVPSLYPFLVQVYKLPANLFYDEDRILSQVGAQQGDPLGPLVFSLAIHKVIAELKSSLNVWYLDDGTIGGRAEEVLQDLEILIPRLKALGLEVNPSKCEFFPCSDEARTHFTEFSAILPGLKELSRTELNLLGSPIFPEAVPEAITSRTRFLDNARARLQDLSPHVAMVLLRMCFALPKVTYLLRTAPTWLCSVEVTSFDRALKSVVESILNVSLEEVQWTQAALPIRCGGLGVRCMGDVGLPAFLASAHGVASLVTILLNSNGGEVSIPFVSGAVSAWSALCPGAAIPQATQSQRAWDDVRVRRVQEELLGGAVGADLARLRAVSQRESGAWLHALPSPHLGTLLDSDSLRVAVALRLGCKVCEPHKCTCGSMVGTDGHHALSCRRCAGRFPRHHAMNDVIRRALVSANVPCVLEPPGLSRTDGKRPDGLSLVPWKNGKCLIWDATCVSTVAASHLSRTVHSPSAAAEDASSKKRLKYANLEPLYQFVPVAVETMGCWGSEARDFVWEIGRRLCEVTGDSRSGSFLVQRLAIAIQRGNAASVMGTFASEAGGGELPVFAVSQCL

SEQ ID NO: 7194 - protein, 951 aa, Biston betularia
MSTLSVSCPYCSGSARTFSEHGLKVHIGRKHKEVIQTVPIRQTSPTGSATQQACSDTQALRSCPLDRLAALKRSTPVLRHVPKGARNQAAGKLSDIIEKCASSNGVDDWCSLLTFAYGALRVPLKDTPGNMTAKVKCNIRASGSELQLDVSGSAGSGRSRTVEKAIESKVFEGDLRGAVRLLVSDDSFAQNDSATLAALENKHPSPSRPLNFPLAPDASYSPVSVSVEDVALALSSFYSSSAAGLDGIRPGHLKELTSPSAGENGPRLLECLTKLVNFLLSGQLNMEVCPYLYGASLFALAKKDGGVRPIAIGSVFRRLAAKLACRAVRGSVTDYLQPHQLGFGIQRGCEAAIHATRAFVMNPANSHCVVIKLDVRNAFNTLERDVLLSEAKDKIPNVYPFLHQLYSSPSNLFYGSNLISSQVGAQQGDPLGPLVFSLAIHKVLSLIRSSLNLWYLDDGTIGGSPKDVYQDLKVLIPRLRELGLEVNPSKCEFFPCSAAAGSHFACFSALLPGLKEISSYTLTLLGSPIFLDAVPEAILSRQQLLSAAQGRLKHLSAHVALVLLRMCFALPKITYLLRTAPTWLCQNMVSSFDDSLKSAVESILNVSLNELQWTQAVLPIRYGGLGVRRAEDLSLPAFLASAHGVADLVAVILHLNGGEASIPLLPEAISAWSTLNPGVAGPAAPQIQRAWDDVGARRVHKQTLDGAAGVDLARLRAVSQPESGAWLHALPSPHLGTLLDDDSVRVAVAFRLGCKVCEPHKCICGMMVEDDGHHALSCRRCTGRFPRHHALNDIVRRALVSANVPCVLEPPGLSRSDGKRPDGLTLVPWKNGKCLVWDATCVNTLATSHLGRTIHSPAAAAEDAADTKRLKYAALEPQYLFVPIAVETLGCWGTEAKGLVHEIGRRIGGKTGDTRSGSYLVQRIAIAIQRGNAASVMGTFAPGTVRGGLFC

SEQ ID NO: 7195 - protein, 956 aa, Erannis defoliaria
MSDLSVPLTCPHCPGSARTFSAHGLKIHIGRKHKNVRRHATTAQAAPVSVDSSQAHQAPPLTPRQCPLDRLAHLRDSIPVLRHVPKGARCQAAGKLCDIIDRCVDSNGAGDWSSLLTFAYSALKVPSRDLPGNMTAKVKANIVSSESFQVDDGCSITESSSRSRSVRGIIESKVHEGDVRRAVRLLVSDDTFAQRGPETLIALKHKHPSPSRPLDFPLAPDLSYAAVTVTADGVAQALGSFYNGSAAGLDGIRPAHLKELTSSSAGENGPRLLECLTRLSNFMLSGQINPEVCPYLYGATLCALTKKDGGLRPIAIGGVFRRLVAKLACRAVKEEMSEYLQPHQLGFGTRLGCEVAIHATRAYVMDTGNSDCVVIKLDIRNAFNTLERDVLLGEAKDHIPSLYPFLHQVYRSPSNLFFNDERILSQVGAQQGDPLGPLVFSLAIHRAITEVKSSLNLWYLDDGTIGGKPEVVYQDLEALISRLRELGLEVNTSKCEFFPCSAAACAHFPTFSSLLPGLRELSPSTFNLLGSPIFLEAVPEAIHYRKNLLLAAKERLEGLSAHVALVLLRMCFALPKITYLLRTTPTWMCATEISSFDDVLKSAVESVLNVCLSKSQWSLASQPIRYGGLGIRCAGDVGLPAFLASAHGVANLVAIILHSDGDRASIPYVSEAIEAWSVLNIGAQIPMAPQVQRAWDEVGAKSAHKQLLDSSTGVDLARLRAVSQSESGAWLHALPSPHLGTLLDDDSLRVAVAFRLGCKVCEPHQCACGSMVEADGHHALSCRRCAGRFPRHHALNDIVRRAFISANVPCVLEPPGLSRSDGKRPDGLTLVPWKNGKCLIWDATCVSTVAASHLGRSVLSAAAAAEDAACKKRLKYAVLESSYCFVPIAVETMGSWGADAKRLVREIGRRIKDSGGDSRAGLYLVQRLSIAIQRGNAASIMGTFAPGTVRGGLFSD

SEQ ID NO: 7196 - protein, 956 aa, Erannis defoliaria
MSSLTSPLTCPHCPGSSRIFSQHGLKVHIGRKHKDVRQTAARSQTSPIVLISQLPSQTSQVTQIPRPCLLERISSLKMSTPVLRHIPRGARNQAAGKLCDVIDRCVTCNGVEDWGALLTFAFGALKVPSKDAPGSVTAKVKANIQSSGLDQLADETYVPGFSRSCGNRKAIESKVYDGDLRGAVRLLVSDDSFAHHDPVTLNALELKHPSPSRPLSFPPAPDTSFAAVTVSVEDVSLALSSFYSGSAAGLDGIRPGHLKELTSGSAGENSQRLLECLTRLVNFLLSGQINPAVCPYLYGATLCALTKKDGGIRPIAIGSVFRRLTAKLACRSVREAMSEYLRPHQLGFGTRQGCEAAIHATRAFVMDPDHSDCVVLKLDICNAFNTLERDVLLSEVKDLTPSLYPFLYQVYSSSSNLYFNDSLISSQVGAQQGDPLGPLVFSLAIHKVISELKSTLNLWYLDDGTLGGSPKDVYQDLEALISRLRDLGLEVNPSKCEFFPCSTGARTHFLQFSSLLPGLKELSSQSFTLLGSPIFPDGVPEAIFSRQKLLLTAQERLKDLSAHVAIVLLRMCFALPKLTYLLRTAPTWLCPVEVSAFDETLKAIVESILNVSLNQTQWIQATLPIRHGGIGIRCARDVGLPAFLASAHGVADLVTIILRSSGGGVSLPFVAGAESAWSVCSSGATNPVIPQVQRAWDDITARQIKERLRLDASGADLARLRAVSEPESGAWLHALPSPYLGNLLDDNSLRVAVALRLGCKVCEPHRCTCGSMVEADGHHALSCRRCAGRFPRHHALNDIVRRALVSADVPCLLEPPGLSRSDGKRPDGMTLVPWKNGRCLLWDATCVSTVAPSHLGRTVLSPAAAAEDAAVKKRLKYAALEGQYIFVPLAVETLGSWGIDAKNVVGEIGRRLKDKSGDPRSSSYLVQRLAIAIQRGNAASVMGTFAPGAVRGGLFD

SEQ ID NO: 7197 - protein, 937 aa, Coccinella septempunctata
MYIYIYIYIYIYIYIYIYIYIYIYTYIYIYIYIYIYIYIYIYIYIYIYIYIYIGVIHSYLNTTKPSKKLEKKVQKYADRRKLKKSDDKYHQHLKVHMETMKQKIAALGSRMRRYHKRTQRHRENNLFTNNQKEFFRSLDEQQKHPEDIPPKPTEMQEYWSNIWSRSEVHNKDAPWIKTLIEEQTDLEEMAPITITTEDVNNTIRRMKNWTTPGVDNIHNYWWKSLKSTHKVLARLFQESLQSPESIPKYFTQGATCMLPKTEKLSDPKNYRPITCLPSAYKILTSTIGFKIVTHLKNNKLLAWEQNGCNKNGRGAKELLVIDNAITKQARKRLKNLSMAWIDYRKAFDSVPHTWLLQVLQIYKINPRAIQLLKHLMTTWRTKLTVKHETLSYQTGEIRIARGIFQGDSFSPSWFCAAMNPISSMLNRSAYGYAIDSNTILSHLFYVDDLKLFARGRKQLEGELELVRKFSGDIGMSLGLEKCAVVEVKRGKLVRQQNIKLGDGREIRSLGVEDSYKYLGIQQTYEIRQQENKRETESELLRRTRKILGTQLSAKNIITAINMWAVPAFTYTAGVLSWSKTDLQRIDQKIRTTLTKHGLLHPNSAVERIYLPRRTGGRGLSSLEDTCQREERNIIDYFRKRNNPVHQWVATYQQTSNRAGTSPPVEPEMENRLERLKQSWQSKSLHGRFYASLQQEEVDRTKSHTYLMQGYLYPQTEGTLMAIQDQVVPTRVYAKHIMKLQVETTKCRLCNIAEETIQHLSSGCSQIAGTKYLTRHNDMGKVVHQLICLREELLPHFTPHHLYSPQAVLENDQTKIYWDLTVVTDRGAEHNRPDMVVWNKTKKTAHIIDFSVPLDNNLSKAYGEKITKYNVLARQIRDMWKLKSVTILPLIISANGLVHRKSSAHIEELDLPPNTIAWMQKAVILGTVGIIRQVIYPY

SEQ ID NO: 7198 - protein, 1195 aa, Harmonia axyridis
MNDEASDTAPSDEVALGGRLTQPLAEASGASGAPLRNGTTRPGVSTRITRGNSLDVLSQSSSELAQDNPAPPQARRQHWTRAMNTSLINAYYEATEGGTQTKKYAAKLVELWTKTYPDKQFTGKHLIAQIKNIKSRKLLSPDELEAMKADSVRKSPTQTINNIRRSIQRRSLQPQQERSPQPQRERSPQSQHEIISQPQQEVTKDDEATLGIHALFQEINIQWEGVEITSKPKISKLNTNKETSAMMKTIDETLDETFNNSTSLEELCHKVYCAAIMANTIQHTKTTNPNHQQQKRPPWEERIERKIAKHRQVIGVIHSYLNTDKPSKKLAKKAQSYAKRKKLKKDDKEHLRMHMETMKQKIAALGSRMRRYHKRTRKHRENNLFSNNQKEFFKRLEEGHKNQREAPPNPAEMQKYWSNIWSKNEVHNKEASWIKTITEEQAGLDEMAPITITADNVSNTIRRMKNWTTPGIDHIHNYWWKTHKSTHGVLARLFQESLKNPGKIPKYFTHGTTSMLPKNEELSDPKNYRPITCLPSAYKILTSTIGFKVMTHLKDKKLLAWEQNGCNKKGRGAKELLVIDNTITKQAKKKLKNVSMAWIDYQKAFDSIPHSWLLEVLHIYKVNQQVIQLLKCLMSTWRTTLTVKHKTISYQTEMIKITRGIFQGDGFSSPWFCVALNPLSSMINRSAYGYAIDQHTTLSHLFYVDDLKLYARGRKQLEGQLELVRKFSGDVGMSLGLEKCATVEIKRGKLARQQNIQLVDGREIKSLAIEESYKYLGIHQTYEIKQQENKRNAENELTRRMRKLLGTELSAKNIITAINMWAIPAFTYSAGVLTWSKTDLEKIDRKIRTTLTQHGLLHPNSAVERIYLPRREGGRGLSNLKEACRKEEENIRDFFLKKNHPIHQWVATHLRTSNTAERSLIEEPERQNKLEELKQSWKSKSLHGRFYASLQQEEVDKTKTHTYLMQGYLYPQTEGTLMAIQDQVIPTRTYVKHIMQQQIESTKCRLCNNAEETIQHLSSGCSQIAGTKYLARHNEMGKVVHQLICLQEGLLRCFTPHHLYTPQALLENDNIKIYWDLTIVTDRGVEHNRPDMVVWNKTETTALIIDFAVPLDNNIAKAYGEKMTKYESLARQMRDMWKLRSVRIIPLIITANGLVHRKTAAHIEELKLPSNTLTWMQKAVILGTVGIIRQIIYPY

SEQ ID NO: 7199 - protein, 1124 aa, Coccinella septempunctata
MNLSLINAYYKVTEGETQTKKYAEKLVELWTENYPDKIFTGKHLVAQVKNIKTRKLLSPDELEMIKAESIRKSPVKAINNIRRSIHRRSLNLQQDSSQQQQNSSQQQQESNTQQEGTNIQSQHERIEDDETTLEILTMFQAADLEWNGVEITRRPRITKLTNSKDTTTMMKAIDEALDRTFSNSTNLEDLCHKVYCAATVANMIQPTKTTNPKITHQQRNNKPPWEERIEKKITNIRREIGVIHSYLNTTKPSKKLEKKVQKYADRRKLKKSDDKYHQHLKVHMETMKQKIAALGSRMRRYHKRTQRHRENNLFTNNQKEFFRSLDEQQKHPEDIPPKPTEMQEYWSNIWSRSEVHNKDAPWIKTLIEEQTDLEEMAPITITTEDVNNTIRRMKNWTTPGVDNIHNYWWKSLKSTHKVLARLFQESLQSPESIPKYFTQGATCMLPKTEKLSDPKNYRPITCLPSAYKILTSTIGFKIVTHLKNNKLLAWEQNGCNKNGRGAKELLVIDNAITKQARKRLKNLSMAWIDYRKAFDSVPHTWLLQVLQIYKINPRAIQLLKHLMTTWRTKLTVKHETLSYQTGEIRIARGIFQGDSFSPSWFCAAMNPISSMLNRSAYGYAIDSNTILSHLFYVDDLKLFARGRKQLEGELELVRKFSGDIGMSLGLEKCAVVEVKRGKLVRQQNIKLGDGREIRSLGVEDSYKYLGIQQTYEIRQQENKRETESELLRRTRKILGTQLSAKNIITAINMWAVPAFTYTAGVLSWSKTDLQRIDQKIRTTLTKHGLLHPNSAVERIYLPRRTGGRGLSSLEDTCQREERNIIDYFRKRNNPVHQWVATYQQTSNRAGKSPPVEPEMENRLERLKQSWQSKSLHGRFYASLQQEEVDRTKSHTYLMQGYLYPQTEGTLMAIQDQVVPTRVYAKHIMKLQVETTKCRLCNIAEETIQHLSSGCSQIAGTKYLARHNDMGKVVHQLICLREELLPHFTPHHLYSPQAVLENDQTKIYWDLTVVTDRGAEHNRPDMVVWNKTKKTAHIIDFSVPLDNNLSKAYGEKITKYNVLARQIRDMWKLKSVTILPLIISANGLVHRKSSAHIEELDLPPNTIAWMQKAVILGTVGIIRQVIYPY

SEQ ID NO: 7200 - protein, 950 aa, Harmonia axyridis
MMKTIDETLDETFNNSTSLEELCHKVYCAAIMANTIQHTKTTNPNHQQQKRPPWEERIERKIAKHRQVIGVIHSYLNTDKPSKKLAKKAQSYARRKKLKKDYKEHLRMHMETMKQKIAALGSRMRRYHKRTRKHRENNLFSNNQKEFFKRLEEGHKNQREAPPNPAEMQKYWSNIWSKNEVHNKEASWIKAITEEQAGLDEMAPITITADNVSNTIRRMKNWTIPGIDHIHNYWWKTLKSTHRVLARLFQESLKNPSKIPKYFTHGTTSMLPKNEELSDPKNYRPITCLPSAYKILTSTIGFKVMTHLKDKKLLAWEQNGCNKKGRGAKELLVIDNTITKQAKKKLKNVSMAWIDYQKAFDSIPHSWLLEVLHIYKVNQQVIQLLKCLMSTWRTTLTVRHKTISYQTKMIKITRGIFQGDGFSSPWFCVALNPLSSMINRSAYGYAIDQHTTLSHLFYVDDLKLYARGRKQLEGQFELVRKFSGDVGMSLGLEKCATVEIKRGKLARQQNIQLVDGREIKSLAIEESYKYLGIHQTYEIKQQENKRNAENELTRRMRKLLGTELSAKNIITAINMWAIPAFTYSAGVLTWSKTDLEKIDRKIRTTLTQHGLLHPNSAVERIYLPRREGGRGLSNLKEACRKEEENIRDFFLKKNHPIHQWVATHLRTSNTAERSLIEEPERQNKLEELKQSWKSKSLHGRFYASLQQEEMDKTKTHTYLMQGYLYPQTEGTLMAIQDQVIPTRTYVKHIMQQQIESTKCRLCNNAEETIQHLSSGCSQIAGTKYLARHNEMGKVVHQLICLQEGLLRCFTPHHLYTPQALLENDNIKIYWDLTIVTDRGVEHNRPDMVVWNKTETTALIIDFAVPLDINIAKAYGEKMTKYESLARQMRDMWKLRSVRIIPLIITANGLVHRKTAAHIEELKLPSNTLTWMQKAVILGTVGIIRQIIYPY

SEQ ID NO: 7201 - protein, 903 aa, Adalia bipunctata
MYPAVKSSSSNSPVSWYRSSGCDRSSVYIYIYIYIYIYILTYTKSIKLKKGGERYHQLLRVHMETKKQKIAALGNRLRRYHKRTLRYRQNNLFTSNQKEFFRSLDDRNENHQDTPPNPEEMRKYWSNIWSQDKVHKTKARWIETEADKQSVVDEMATTTISEEDVNATIRRMKNWTTPGIDNIHNYWWKALKCTHRVLARFFQMALERSESIPTYFTHGNTRMLPKKGDLSQPENYRPITCLPSAYKILTSTIGFKISTHLKRNNLLAWEQNGCREKGKGSKELLTIDNAITKQAKKKLKNISMAWIDYQKAFDSVPHSWLLEVLQINKIDRQIIQLLKSLMSTWRTTLEVRSKRTSYKTVEVEIKRGIFQGDSFSPLWFCVALNPLSNMINRSSYGYSVNNEINLTHLFYMDDLKLFARGRKQLEGELELVRKFSEDIGMSLGLEKCAVVDVKRGKLSQQENITLKDGSEIASLGIEDRYKYLGIHQTYELRQKENKQDAEDELVRRVRKILGTQLSAKNKIMAINIWAIPAFTYTAGVLTWSITDLERMDRKIRTSLVQHGLLHPNSAVERMYLPRKEGGRGLSNLEEACLKEENNMREYFQKRNMPVHQWVLTFHQISNRTRPANLGEPERPNGLEKLRQSWRTKSLHGRFYASLHQEEVDLPSSNTYLTQGYLFPQTEGTLMAIQDQVVPTRAYKKHIMKQQVESTKCRLCNGAEETVQHLSSGCSQIAGTKYLSRHNNMGKVVHQLVCLREQLLNHFTPHHLYIPNTVLEDENIKVYWDLTVITDRGVEHNRPDMIVWDKTKKTAQIIDFAVPQDYNLSKAYGEKISKYEALARQMKDMWKLTSVTIMPLIISSNGLVHRRTVKHIEELNLPPNTIMWMQKAVILGTVSIIRQIVFPH

SEQ ID NO: 7202 - protein, 1190 aa, Adalia bipunctata
MQNEASETAPGVGIAPGGRLVQSLADVSGASGASLRTGSTRPRSSLRNTRGNSLDTSGRGSTGLAPGGPAQTQTRKRQHWTREMNLSLVNAYYLVTEGETKTKKYATKLVEKWMESYPDKNFTGKHLIAQVKNIKTRKLLAPDELEAIRRDAIIRSPSLRIQHVRRSIQRRSMLIQQTLRFEEDTESPVMLTAQTDEATQEILALFQEASLKWGGLPMDARPKIAKIILNKDAKNTMKTIDEALDETITNSISLEELCHKVYCAATIAGDIQQTNTLNPNPQSQQHRKPPWEERIEKKITSLRREIGVLHTYLCSEKPTKKLEKKILTYTKSIKLKKGGERYHQLLRVHMETKKQKIAALGNRLRRYHKRTLRYRQNNFFTSNQKEFFRSLDDRNENHQDTPPNPEEMRKYWSNIWSQDKVHKTKARWIETEADKQSVVDEMATTTISEEDVNATIRRMKNWTTPGIDNIHNYWWKALKCTHRVLARFFQMALERSESIPTYFTHGNTRMLPKKGDLSQPENYRPITCLPSAYKILTSTIGFKISTHLKRNNLLAWEQNGCREKGKGSKELLTIDNAITKQAKKKLKNISMAWIDYQKAFDSVPHSWLLEVLQIYKIDRQIIQLLKSLMSTWRTTLEVRSKRTSYKTAEVEIKRGIFQGDSFSPLWFCVALNPLSNMINRSSYGYSVNNEINLTHLFYMDDLKLFARGRKQLEGELELVRKFSEDIGMSLGLEKCAVVDVKRGKLSQQENITLKDGSEIASLGIEDRYKYLGIHQTYELRQKENKQDAEDELVRRVRKILGTQLSAKNKIMAINIWAIPAFTYTAGVLTWSITDLERMDRKIRTSLVQHGLLHPNSAVERMYLPRKEGGRGLSNLEEACLKEENNIREYFQKRNMPVHQWVLTFHQISNRTRPANLGEPERPNGLEKLRQSWRTKSLHGRFYASLHQEEVDLPSSNTYLTQGYLFPQTEGTLMAIQDQVVPTRAYKKHIMKQQVESTKCRLCNGAEETVQHLSSGCSQIAGTKYLSRHNNMGKVVHQLVCLREQLLNHFTPHHLYIPNTVLEDENIKVYWDLTVITDRGVEHNRPDMIVWDKTKKTAQIIDFAVPQDYNLSKAYGEKISKYEALARQMKDMWKLTSVTIMPLIISSNGLVHRRTVKHIEELNLPPNTIMWMQKAVILGTVSIIRQIVFPH

SEQ ID NO: 7203 - protein, 949 aa, Armadillidium nasatum
MGEQRYMNLVLAPLFPQRTAEAIKCRRKNPEYRRLVMEIRARNEREPQQLEAAGGIEADHEQLMEDAPAQENVIGYRLRPRRGRAQLIDNEEPRALVMEDPRPGEPDDPLDERQLDRDLFVGPLGREVADGLDAPVLELERAPLIEFEDLLLLLERLGFVCGDPRPIREPRQDNENDVPRLSRAMRKKREYAKVQNLYGKDKAAALKFITDRAAFVEYAPPSRAVRDEWKEYFTTNNNLPRVDDGDVLRRGQDLESFRDLDSPITRAELEMALKQTKASTARGLDGVSLADILSIERDDLLLAMNGILEWAPQAIFRGRISLIPKKSGPTQFGDFRPICILPLVVRILHRVLAARLKSIRHFAFQAGFVENRSTSENIWLLDGILRSGRAGKSSAYAALLDFRKAFDSVSHGVLLGLLSDLGLPPRLVGYIRMVYTHTRLTLGDGEFGQGRGVLQGDPLSPHLFNILIDYILAAAPENIGVEVGGFRVNALAYADDIVLFASSRMGLSHLLNSFAQRAAAVGLTLGIQKCVTAGLKWLGHSKKVVADYAPFEVNGVPLPVLGWDETYKYLGIEMSLRGSSRWLGGRLRDSMKKVAAAYLKPQQKLMLIKAYLLPSFYYAMAHRKFTIGLLRSLDCAVRAAIRKILHLPGDTPVPMFHQHPGSGGLGVPELETMICSLQIKTKEKLTRRGGIWEVVGDFISPPASGRSRRHLVSEFCDGLGLAESRQQPGCHSWISDGSLLIKGATFVQCIKIRLGVINTRERKARGQRVPLHETFCDLGCRRVEALGHILQECPHTSRLRTERHDAVNNILLSALEGAGYSTVLEPTIPTQAGVRRPDVVAWKGARSWVLDTTICADANAAVMGAVFEMKKRYYNNDDIKQWVRQNTNSTSVEVGALVMNWRGDLAPRSHALYRLLGLPLRWIKLMEVRNLEGSAKILRFHQAAAGNWG

SEQ ID NO: 7204 - protein, 1010 aa, Armadillidium nasatum
MADNRCEFCPRSFRTANGLGVHQQRSHRELYDQKVMAAQGGDTKTRWSKEEIFLLASKEVEMGEQRYMNLVLAPLFPQRTAEAIKCRRKNPEYRRLVMEIRARNEREPQQLEAAGGIEADHEQLMEDAPAQENVIGYRLRPRRGRAQLIDNEEPRALVMEDPRPGEPDDPLDERQLDRDLFVGPLGREVADGLDAPVLELERAPLIEFEDLLLLLERLGFVCGDPRPIREPRQDNENDVPRLSRAMRKKREYAKVQNLYGKDKAAALKFITDRAAFVEYAPPSRAVRDEWKEYFTTNNNLPRVDDGDVLRRGQDLESFRDLDSPITRAELEMALKQTKASTARGLDGVSLADILSIERDDLLLAMNGILEWAPQAIFRGRISLIPKKSGPTQFGDFRPICILPLVVRILHRVLAARLKSIRHFAFQAGFVENRSTSENIWLLDGILRSGRAGKSSAYAALLDFRKAFDSVSHGVLLGLLSDLGLPPRLVGYIRMVYTHTRLTLGDGEFGQGRGVLQGDPLSPHLFNILIDYILAAAPENIGVEVGGFRVNALAYADDIVLFASSRMGLSHLLNSFAQRAAAVGLTLGIQKCVTAGLKWLGHSKKVVADYAPFEVNGVPLPVLGWDETYKYLGIEMSLRGSSRWLGGRLRDSMKKVAAAYLKPQQKLMLIKAYLLPSFYYAMAHRKFTIGLLRSLDCAVRAAIRKILHLPGDTPVPMFHQHPGSGGLGVPELETMICSLQIKTKEKLTRRGGIWEVVGDFISPPASGRSRRHLVSEFCDGLGLAESRQQPGCHSWISDGSLLIKGATFVQCIKIRLGVINTRERKARGQRVPLHETFCDLGCRRVEALGHILQECPHTSRLRTERHDAVNNILLSALEGAGYSTVLEPTIPTQAGVRRPDVVAWKGARSWVLDTTICADANAAVMGAVFEMKKRYYNNDDIKQWVRQNTNSTSVEVGALVMNWRGDLAPRSHALYRLLGLPLRWIKLMEVRNLEGSAKILRFHQAAAGNWG

SEQ ID NO: 7205 - protein, 1055 aa, Armadillidium vulgare
MAENVPDFNQCEFCPRSFRTATGLGVHQQKAHRMQYDQKVQVARGGEIKSRWTKEEIYLLASKEVELGEQRFMNLALAPHFPQRSAEAVKCRRKNPEYRRLVEEIRARPMVVPQNMVAQQQPNPGDQRVEACEGRRLRPRVVRPPQEVINEEEELEQQVIPRDQRGDAQGAQIGEDDIRVRLRPRRGLPPYNELEEEGLPHLQGQRLLPDLVARERQAEVIGAQMENRADGNQLQARRIEDINIIEDNVSIEFEDLLELMNRLGMVNGEPRPVPERRPQRVEGLERISRAVRKRREYAKTQELYYKDKAAALKFITNRAAFVDYVAPTRDIRLNWENYFSINDRLPRVDDGEILRRAQRPERFRGLDAVITSAELDLAIKQTNANTARGLDGVSLSDLLAIRREDLLLVINGIFEWSPERVYRGRISLIPKKNNPEQFGDFRPICILPLIVRILHRVLAKRLSAVEHHAFQAGFVEGKGTSENIWLMDAILKSARTCGKSTYVSLLDFRKAFDSVNHNVLIGILSDIGLPPRLVGYIQMVYTHTRLTLGDGWFSQGRGVLQGDPLSPHLFNILIDYILAGIPDDIGVEVGGHKVNALAYADDIALFASTRMGLSHILDCFTRRARAVGLTLGVQKCATAGLKWLGRAKKIVVDNTPFRVGEEEIPVLDWDGVYKYLGIEVSVSGTTKWVGARLRDSLNKISKAFLKPQQKMMLVKSYLLPGFYYSVAHRKFTIGLLRSLDRAIRAAIRKILHLPGDTPVPMFHQHPGHGGLGVPELESMVLSLQTGIKRRLTERGGIWEVVGDFISPPASGRQRRQLVSEFCDGLGLAESRKQPGCHSWISDGSLLMGGSSYVQCIKIRLGVVNTRERKARGRPRELNEVLCDLGCRRVETLGHILQECPHTSRLRIDRHNGVNNILQTALEGAGYNTLLEPTIPTQAGIRRPDLVAYKGTSAWVIDTTICADAHAASMSAVYDLKKRYYDNNDIKNWVSTASRSTSVGVGALVMNWRGDLAPQSLTLLKTLKIPLRHIKLMEIRNLEGSAKALRFHQAAAGNWG

SEQ ID NO: 7206 - protein, 1041 aa, Armadillidium nasatum
MAENVPDQHRCEFCPRSFTTAIGLGVHQQRKHRAQYDLIVQAAQGGEAKTRWSKEEVFLLASKEVELGEQRFMNLALAPHFPQRTAEAIKCRRKNPEYRRTVNEIRARRRIEAPLPLEVDDPVAQPGIDPLVPQPADNNGRRLRPRQVLPPPVVAGAEMVPDEADPEGQHRDEYRRRLRPRRGEALPDLPAEEPPRHQRLRIPVRVEPREQFDQPRAQLDVDDDPVAIDDNRELTIEFDDLLSLMERLGLVCGEPRPVGDNDRPRHQVELGHETRSAKKRREYAKTQNLYYKDKKAALKFITNRADFVDFVPPSRNIRLEWQDYFSINNNLPRVPDGEVTRRAQNLELFPDLDAVITAAELDDALKQTNASTARGLDGVSLADLLTLRREDLLRVINGIFEWSPERIYRGRISLIPKKNSPQQFGDYRPICVLPLVVRVLHRILAKRLNAVEHHAFQAGFVEGRGTTENIWLMDAILKSARTSRSSTYVSLLDFRKAFDSVSHTALIGILYDLGLPPRLVGYIQMVYMHTRLTLGDGWFSQGRGVLQGDPLSPHLFNILIDYILAGLPDEIGVSLGGHRVSALAYADDIALFASTRLGLQKTLNSFITRAEAVCLTLGVQKCSTAGLKWLGRAKKIVADGAPFMVGLEEIPVLSWDDIYKYLGINISLRGTTRWEGARLRDSLAKISNACLKPQQKMMLLKAYLLPGFYHSVAHRKMTIGLLRNLDRATRAAVRKILHLPGDTPVPMFHQHPGNGGLGVPELESMILSLQTNLKAKLMRRGGIWEVVGGLISPPASGRQRRQLVSEFCDGLGLAESRKQPGCHSWISDGSLLMKGSSYIQCLKIRLGLINTRGRKTRGRPREMNDILCDLGCRRVETLGHILQECPHTSRLRIERHDAVNNILQTALEGAGYMTLLEPTIPTQAGIRRPDLVACKGARAWVVDTTICADAGAAAMSAVFDLKVRYYSTVDIVNWVITTTGAASVDFGALVMNWRGDLAPRSLGLLRTLGIPLKHIKLMEIRNLEGSAKTLQFHQAAAGRWG

SEQ ID NO: 7207 - protein, 1215 aa, Campodea augens
MSKGTVCVKLENEMLSFKRIFTQPDGNCLFRSLAYCIMDDEKKHSEMRKKITKHILLNRDEYEVFLDPNLMNGPSIPVVTGIPFLDYVSHLKHDGIWGGDESIKAAADIHSCNITLCQDSHSRTYVGLNRLRRKNNSFFLYYDPKEGHYEPLVAADGLRVEVTRNGEEHSTITSFPSVPDSGCSPIDQSNDLDDGEVESGRKITTTTTTCYICGNDFTQRGIKRHLKYCSVNSKLEKCKFCNMEYKGLNEHIRKCHSKEYRSMHSGKYQSKTLSMDAMNSRTELLNVNSPVINDNSIEIQEDKSESMEKYTEAMQNFLLLFQTMLSQSPDSQQFTTKFEEFQKFLRDSIKLMPGPKHPATKYYEARKNKAHFRSNDRTYKESSNPQRHSKRDRIKRNEKYNYDLAQFLYYNSRRKIVRKIMNSDAPANCNIEVNVIQNAFEKRFSIENTSTRDSYGPEIVQKDRMNLNSHHDTMITPEDVMKAIQFTRIDTSAGPDKVILRAIKVKSCYTVLSVMFNIMISWNYIPPSLKLARTILIYKGGNVKDSSNWRPISICSIIRRIFERILDKHLRSHVDFCLHQRGFTNCPGTHINASIVNGCLQHAKTNKATCVVLFLDVTKAFDSIGFHHIEETLKHLPIPDNLRNIINNLQVQNTTQIEVSGGKTKPISFNRGVLQGCPISPAIFNICIDFILRELSENEISQIHGYKINEQLAPISVLGFADDTTLICNSRKSAKYLLKSAILLFQSIGLEINATKSKAIIIENGKICEQDLVLDDLSLCIPSTKADEKIKYLGVTFCSTICLNKAEVISKLSKNLEKLIASPVLKQHQKLNILNQYIWPSLIYPLQAAPLHKVPKSFLEDIDKIIRSTVKEILDIPGDTPNAFIYASKQCRGLNMMRAEWEIFIQHYNICCVLLRSQNEYIRYVRDIKEEIRICLKMLNVSPTCTSEVLISNAYVPSKKDVKSETKSFRNILRLREYEKWCRLKQKGKGVEQYKECPEVNMWMHNKSNLTSSEWTTGIKMIANVAPVRAIPGRTMDTRHCRHCNEIETLAHVLGSCPKGNLLINSRHHKIRSMMAQELNKIGFDTHEEITCLAVNGSIKRVDIIAFKSDCKKGYILDPTIRFENNIEQPQEVDQEKKLHYEPVVPFFKQKYHLEEIEVIGLYIGARGTVTNFFIEHFIKKFKLQKKLITEISMSVLHDSIHILQHHLYNHEKRH

SEQ ID NO: 7208 - protein, 1021 aa, Thermophis baileyi
MEALCDDPGSSQVGSSPSPFLCICGRQFKSQRGLSTHRRHKHPADVNAERVAVLPTKRLLWSSEDDEALRRHADHCWMVGMLKKDLYELLLPHFPGRSAEAIKKCLQTIKWVVPSLLLVSSDPPPPPTAVFSGPADLGLEHQFSDSSLLPLSAPTSVFDPSAWRLALLDSAMRSFKEPKLGVEVLKSIASALKSGVINDSQGRDLLEQHAQEWFPYRWKPSVVRHKITHKWSNKTIRRANYAVIQRLYKLRRKDAAATVLSGRWRHAYRGPAPVPSGMAEFWSSVFETSSVIDTTPAVDPPALLWSVLESIAPSEVTAALQSMTASAVGLDRISAMGFLAMHQPSLAAYFNLLLVAGGPPKHLVRSRVVFISKTESPTGLGDYRPISVASVLLRALHKILAKCLRDTLHLSPFQHAFLQRDGCLEATTLLHTILRRVHTNRVPCAMLFLDVAKAFDMVSHQSLYWVASATGFPPPLLSYLDHLYKNSTVQLADSVIRCRRGVRQGDPLSPLLFILVIDDILRASLPTIGFPLEDQKIDCLAYADDLILLAERPARLQEKLDCVAHALHATGLSLNPAKSFGLTIAKGGKRKYMAILPTAYTYAGASIHPLGSEDSVRYLGLQFNWKGRVVPKHTGLLEGMLRELSQAPLKPHQRLKILKFYLVPKFIHELVLGHVHRNTLVRLDRQLRSAVRLWLRLPSDTPLGYFHSHIKDGGLGVPCFSTTIPLLQKARLEKVASGATMLPPAVLHQETFQSLSHRINQPCMMASAVVTMKEEVRMEWRNILARAIDGRDLCIADVDGASHEWLLRPSRVFPRLFIRGIQLRGGVLSTKSRSARGSNRKVVDRSCQGACRAPETLNHILQVCETTHDARCARHNRVLRHLAHLFHRDGVHCWVEPIIPSGPSFIKPDLVVDWNKELWVLDVAIVSGYRLRESWDLKIAKYGREDRVKDILTWAKITAEVKQLPVVFSNRGLCFELSGGGLRTLGLGRRDIMDLCLLTIRGSLQCYDVYQRGTRAARAVM

SEQ ID NO: 7209 - protein, 1088 aa, Formica exsecta
MSWLGRDAYSQCVCLVLADNIVLLCRLSSLTGRTSSLSRSSHTPTSSWCSWASVRRRLSGVRGENGVLRVASPLDPLGVGPKNRNLASDDCGGSAGPSAPTNPPSLRPVLYACEFPGCSRSFPTVTGRGVHHQRSHKDWYDARLRPAAGKARWTQEEAALLARKEAELMVPNPPRFMNQELLRHFPQRTVEAIKKRRQKQDHKDMVMAILNEGDGAMDLSEDEGEEDPYDDAFLKHLEALPRPHCRGFHADRLHTIVLEARTCGKDATLQKLALYLREIFPQEPPRTLVKTGRPRARNGPGTSKRRARRQAYAETQKLWQKDRTRCINNILDDMAEIVEPPRDLMEPFWSAIMNVGSDQKPEIVRIDPIRDIWKPVSEPDLRYGRISRSSAPGPDGVSARLFRSIPSALLIRMYNLLMWCRRLPEDLLVSRTVFIPKKSGASDPGDFRPITIPSVFIRGFHKILARRLEKMLDIDRRQRAFRAADGCAENTFLLDTMLRFHRSHFRSLYVASLDVSKAFDSVSHPAIEATLISVGVPAPMVEYLEEVYMRSTTRLEGRGWKSELIHPRRGVRQGDPLSPVIFNTVTHRMLRSLPDEIGARIGNTPINATAFADDLLLFAATPMGLQELIDRSAAYLETCGMSINAAKSLTVSIRADPHRKKTAVEASSVFLCQGHRLPSLRRTDGWRYLGVHFTPEGRTKCRPMETLGPLLDRLSRAPLKPQQRLYSLRTVVIPKLYHQLALGAVMIGVLNKTDKIIRAAVRKWLALPHDVPIAYLHAAVRHGGLGIPSLRWSAPLHRRGRLLVAKGTYDPDGLGRFADEELDKCTKRLSESGVVYTSPDMLSDRWAAKLYQSVDGSGLIDSVKTTHQHQWVADGTRFLSGKDFINCIKVRIGALPTRSRTARGTTKERRCRAGCLAQETLNHVLQHCHRTHAGRIRRHDAILNYMERKICSGGYRVEREPRYMTAMGLRKPDIVAVLGQTAVVLDAQVVSEQSNLNDAHRRKTNYYEEQSLVHEIKARNGVSNVIVTSATVSWRGVWSPKSAETLREIGFANGSDLKVMSTRVLIGNLIEFKIFNATTSVRWRTGIG

SEQ ID NO: 7210 - protein, 978 aa, Scaptodrosophila lebanonensis
MSRQHKDRLDADRLRVDVKARWNDEELSMMARKEIELTANGIRNINKELAVAFPNRTVDAIKKCRQRENYKQKIAHLRGQDVLLPEVNNSDAILRRPSSSERNLPVPRSATVPIEPSVHSDGVLMQMMTALRPVRCSGLWRVDVLQSIVDRAQTSGKEATLECLSNYLQGIFPRPSFRPARRSTNRRVPTNRRDFRRQQYAMVQRNWDKHKGRCIKSLLEGPDESVMPPREMMEPYWREVMTQHNTSCSNAYSPLNMEHLLERVWSPITNRDILDSRVSLTSSPGPDGITPKKARGIPMGIMLRIMNLILWCGDLPLLFRMARTIFIPKMATASRPQDFRPISVPSVIVRQLNAILSRRLNLAVDWDPRQRGFQPTDGCADNATIVDLVLRYHHKMAASCYIATLDVSKAFDTISHASVLNNLAAYGAPQGMVRYVHNLYEKGSTTLNGGGWCSEEFTPARGVKQGDPLSPVLFNLIIDRFLKSLPGEIGVRLGHATVNAAVFADDIVLFASTPKGLQSLLDTTVSFMGSVGLTLNSDKCFTVSIKGQPKQKCTVVYPRAFKVGNRECPALKRSEEWKYLGINFTADGRARYNPSKDLGPKLERLTQSPLKPQQRMFALRTVLIPQLFHKLTLGSVELGVLRKTDTLVRSTVRRWLGLPNDVCNAFFHASLNDGGLGVPSLRSISPALRLIRLSNVTWSFSRQQEVANKFLDEEKKRALDRCKMHEGIVDTRQKCDVYWANKLQFSVDGKGLSEAARYKPQNRWVGAPTRLLTGKAYHEGIKLRINALPTRSRTTRGRREQGRQCRAGCDAPETLNHILQQCYRTHGRRVARHNSVADFVKRKLEGKNYTVLAEPVLRGDSGIGKPDLVASRGDHTIVIDVQVVTDGISLDGAHASKVHKYNRQDWIESLRRDYQAHVNIEFATVTLNWRGIWSGHSIKGLIALDVLNADDSNIISARVVSCGVFGFKTFMYHSGYEE

SEQ ID NO: 7211 - protein, 1366 aa, Trachythela sp.
MASQHSCTFTKCPDCSFIASSQGGLGVHRSKLHNIIVPDNVRSVNVVRLYPEGKSFHCCLCNNTIGSFPNFVRHFKSKHCNIILNVTARCVICNRTFPTPKGAGVHCKRKHQIGKEHSFTHSPTPVMSEINIEDDETSINSPIVSRRSCRAKVRNFSNMSLSLSSPLSSNINNDNSFNDPIPLHDLIPNSQTLNPNASVFNPDTSVLEPFSPDHLQTSSPFQTRSIITPQPLSPGHQQSITNPNSSTPQSGTHVHLRPSKLNPSSIAPSIPPQPILIDLEHDPDLSINHPPRPSSPSYQTLPHTPDLSIPYLEPAVAFIGCSTAEDSHVPSHPSNLEPTVVLDGCTVEDETPPFPSPLNNNPSTSQFAPSINLPPDLEAANHQQSYLPSTFGTPQQDELNQQSDANVIPQHNRSNNREIPINPNPDVENLSPFVHSWCSRLSSTDSFDEFCDKCEDFASAVVNKSKEVSGRPVQRRKPAPNPRNRPNNRVPRPNRRPLKPNPIEARRIQTLYRLSKKRAARQILKENNTIYTGTKESAHDHFKETFKYSPINIEELRQSLDECVPSADVENITMAPMTPEAIKNKLKLMSNSAPGKDRVEYRHLRLVDPDCKILNLIFNKCLEEKKIPSSWKDSTTILIYKKGSSEDPSNFRPIALMSCIYKLFTAILSSRVSNFAIQNELMSPQQKSARPSEGCHEHSFTLQTIISDCKRSGKNCFFAWLDLKNAFGSVNHEAIYTTLRHMGFSESLVELIKDIYTNSTTVVRTSSDEQTDSIPVQAGVKQGCPISPILFNLTTELLIRKVSAKCKEDNTIPFILHGNAISILAYADDIVLISSTRAGLQSLLGEISAAADTLQLVFKQEKCATLCLTCGKGEPNRVGDTVFQVQGSEIPIIRKEETYRYLGVPMGLLYDASEMESIAGRLIADLEKIRDSQLTPWQKLDAIRTFIQPGLTYALRSYPVTRESLAQYRSKLIDVLRSICNLPKRATHAYFFADRSVGGLGLQDPFDERHIQTIVHTVKILSCNDNFVNNISRGQLNSVVYRCLHRDPTAEEIDKFLSGSREGDLSNHSRSNNSQTLWSRCMISTRALNVDISDAMKEPKVSVDGGNSWATSKSVSHYLRRHSQSIHANRLKNLPDQGKLARCLQNSNFPGSNNWMFDGSGMRFCDWRFIHRARTNTLPLNDIKSRWSENNNPECRRCHSQTNTETLTHVICHCLPNMSAITSRHNKVQKRLTDAIYRGEVTIDQAIPGAPDNNRPDIVVRDGNKVTIIDVTCPFESDEKALDAAAKRKVDKYNYLINYFKSINQKAKVFAFVVGSLGSWHNGNEDVLNELNISRRYRTLFRKLCSTDAISGSRNIYVEHLTGAPQ

SEQ ID NO: 7212 - protein, 727 aa, Bradysia odoriphaga
MDVYDSINSFPNGSSSGIDGIRPQHLKDLVAKSNGDAGIKLLNSITNLENLMLSGKVVSVICPIIYEATLCSLSKKDGGLRPIAVGSTYRRLAAKPACKYVRDETGDYLRPIQIGVNTKGGCEAAVHTTRTYLQSNRKTSKILLKIDFQNAFNSIQRDTMLHEIRKKAPSIYAFMWQCYSTPSLLFFGSDTISSQVGAQQGDPCGPLAFSLSIQPIIEGMASELNIWYLDDGTLCGEPQTVLSDFKKLIAECKAIGLNVNSNKCELFFCSDPVESVISEFDKVSPGIKVVTDDLELLGAPLTRTSTLKLLKKKRIHLKTLLERLNNLKHHIAYYILKHCLAIPKLTYILRTSCCFNFENELHGMDSDIKLSLERIMNCRLDGEQWTLACLPVHAGGLGIRKMSDIALPAFLSSVNSVTELVNTMLPTTSDESVIADYSEALAKWSSINENEIPENTHSQKEWDLRVVNRIVQSLTLSSDEDKARYNASTVKESNLWLTVLPSRQVGSLLDNNTFRIAVALRLGCDICLPHTCRCGQEVDRKGLHGLSCKLSAGRLPCHSEMNNNIWRSLKTANFPAKLEPPVFRSDGKRADGVTLVPWSNGKMLLWDATIRETVAPSYIHSSSRGVGYVARRGADDKLRKYNSIIDDYIFVPFACETLGPWCSEAIQFVQQLGDIMNQGTGEPRSKLYMKQRIGLAIQRTNAARVMGTFENSAKLDEIFYVLAVEGN

SEQ ID NO: 7213 - protein, 1123 aa, Bradysia coprophila
MDMNVSSQELADPPVITELNVLLNELKDRHKDTCPNDDRWPCPFCLVLSKTKIQCNRHIAKDHPNVPKTDKKGFFSYFCKDVNPNERNVTDHETSLRDSTGKRTRQRLTRKCKNKSMNGKSETERTPDDLIEFLKIVETDYPEFNERAESVVQDKTKNTEKLGLVSEGYEFTKGNGKEHQAEMQTGSCPYCPPKLSKKLYKLPNGLRIHCAKIHPDKSTPSIINNDESEITIESAIDKLVYMKKNVKVLKRIPKGARVVAAYNLSKIIDKCVQNNDIKSWCDLLFFSYAAFQIPEKKLKSNSLVRIVKKNINDLQMPKVQASNGTKQADLTKRIESKISEGDVRGAVKLLVSTEGLVKQNISTLHQLQAKHPAPSRQLNFPEPPDTSFTATASTTTIEVYDSIQSFANGSASGIDGIRPQHLKDLVATSNSDAAPKLLQSITNLENLMLSGKVISSICPIIYGATLCALSKKCGGLRPIAVGSAYRRLAAKLACKFVRNESGDYLRPIQIGVNTHGGCEAAVHATRTYLLLNRNSSKILLKIDFENAFNSVERDVMLNEIKKHTPSIYPFMWQCYSKPSFLFFGSDIITSQVGAQQGDPCGPLAFSLSIQPIIEGMASELNLWYLDDGTLCGEPEVVLSDLRKLIIECKKIGLNVNPSKCELFFCSTPEDSIIANFNEVTPGIKIITEDLELLGAPLTETATKRILGKKKIELSTLIERLSNLKHHVAFYILKHCFTIPKLTYLLRTSCCFNFEEHLYDMDNMIKLALEKTINSCLNNEQWTIATLPIQNGGLGIRKIKDIALPAFLASVNSVAELVNMMFPQISDESVIASYMDSLHLWSAIYDNKLPENKTIQKTWDIISIEKIVNSLTLSTEEQKARYNASIAKESSAWLTVLPSRQIGSLLDNNTFRISVALRLGCDICIPHRCKCGAQVNKNGIHDLSCKYSAGRHACHSDMNNILCRGLRSANIPARLEPQIFRDSGKRADGVTLVPWYNGKMLVWDATIRDTLAPSYIHSSSLRTGSVAQRGATDKCNDYKKIVEDNYIFLPFACETLGPWCAEALEFVGKLGNLLKMSTGEPRSKQYLTQRISLAIQRTNAARIMGTFEYDKQLDEIFYILSNDV

SEQ ID NO: 7214 - protein, 1384 aa, Crotalus tigris
MAKSRKIEERDRGTNSGCTDQALRTNAYKVKIEKTAKDSKCRLCKEAEETVDHLVSCCKKIAQTDYKQRHDRVATMVHWKICKKYHLPVSKNWWDHKIEKVIENDKIKLLWDFRIQTDKHLQHNTPDLTIVDKKDKKVWIVDVAVPGDIESISINVNGLNSPTKRKKFFNRLNKMNLDIIMLQEVHIKKQHQYLLNCPKLGNMFAALSQYKKGGVVVYIKQEIVAKQIYKDEDGRSLIVEVILNKTKILLVGIYAPNEGQKHFYKKLYNIISQFEHDSICIMGDYNAIVDNNLDYKCGKNRKRIRGTISDIFFKMVDEFNIQDIWRERNPGKKQFTFYSGRHQSWSRIDMVWMSADLNLEVDEIMIDTNTWADHNPIRIKWKGQKNTRRWTLKRAILNHKEFKSKLEEQLDLFFKSNKKEDTNCQNLWDTTKAYMRGVVISYMARQHKIKTQRQRQLEEELRKVEDNLQNDPQRCDLKQQIDLIKHKMDIITKEDLGQQIKRTKQNFFENANKQGRWLAYKIKKHNNKQRVTNLYNAKGDLVCQNEGKKLVAYEFYKNLYKDDEKRNNHDIVQYLQLVDLPKVPEDFKTLLNKEITHLELSVAIKKQKNNKTPGPDGIPAEMYKIAQESLSPMLLDLFNEVLTQAKIPASWEEAFLTLIPKENTNLTQIKNYRPISLLNSDYKIFMAIMAQRLESFLVDFIHIDQNGFLSKRYIRNNIRTVLDILEYYEVHNEKQMCLIFLDAQKAFDNVKWDFIFNQLLYMDFGENFLNMFKSVYSKQVAKVIINGELTESFQMQKGTRQGCPLSPLLFILSLEVLTRAIRQDEQIQGLEIKKETFKIQAFADYLVFIIEEPLQSGIRLMETLNRYGEIAGLKINKEKTKMLVKNMTKIPKSELVDRIGVQITNKIRHLGIQLTAKCATLKRDNYYKLIEQIQKDFDIWTNLQLSLTGRIAVIKMNVLQKILFLFQCIPIKLDKKFFQNLNKMMCKFIWQGKRARIKLKLLHDSKERGGFGLPDLEKYYQAAALVWVRDWILLKNRRLLCLEGHDLQIGWHAILLDHKYKVHKYFRSHYIRQALIDVWTKIWQPNYTQVPSWISPLEIYVHPKFTQLDKIITYKNILDERGELKSRKTIHDEGIELEWWAYLQLQARYRKDKKELGIKLEPIELDKIILGSEDKMIKKLYYYLLDQATYEEQVKVTMLNWSKDCGLNFDLHIWQELWARNKKLTLATSYKENLYKMFYRWHFPPTRLSKMYTNVSPKCWKCNLKSGTYYHMWWECTRARDFLNRIKIWLEEILEQAVEPKPELFLLGLTTQKHDKGVFYLMLHILTASRLVFAQNWRNKETPTEEEILHKILICAEMDRLTMIMKDKTEHEYFEIWGKFYRWY

SEQ ID NO: 7215 - protein, 1394 aa, Pissodes strobi
MKMEKICLRSLGKLPLPGERQGTLGAIAESDSIRDNGGRVLNRRTSADKCTAADTNPDSSSELTTFIRHNIIGDGSCLFRATSLYLNGNQEHHEQLRKESLIYIYQNWSDLQQYAFIEDDRLRELNNYIEHMEKTSTYGTSLEILALSEIKNVNFLIYYKQRRTKSNKLTIKDRPTIISKGKHKDNIYLLLTGRPDSGHFELLTPEDSQNKFGKFPSGVCQNVSGDHIGHNNCTHSVNARVLRSRNPGNGQVIIHQQEVESGNPIVPPNIDLPVCSSPIRRTARRRAHAGRMKWGRELNSHIMRAFYYVNQCDDAPLPGWRHALHAEFIKRHPELHHLTEQNVTDRKNIIIKKSYLTQQELEALKRDVGNALCQQEIHNNNECNYRPDDAVQKPTVDGATDTREQPQSIQSATYEASEDQQEISRRFYGHLSNYRDSDPITRPNIPILKNIEKAKKHISLANEVLADYFLTQRTIQEVHLTIYCAAVTVIELNGQKAYYPPNRKRDNGKNYTPAWRRRLETDIEKLRAKVDLIGEYLKGHPSNKVVKKVTAIALSAGINGAPTLNQEQLLDLKDRLRQKYKVKAARLRRYNELTKRKKQNSDFISNRRIFFRELESKKNDVFSTENIDLDNFNNYWSAIWSEPQYFKKDANWVTEIEHLNSQVGDMYVEHITADDVQLAVRKTGNWKSPGPDKLHNFWIKYFPASFSSLASCFTDVLKDPTKFPEFLIEGNTYMLLKKGEPTEPKNYRTITCLSVIYKLFTSIVSNKIYEHCLTNNILEEEQKGCVRGSMGTKHQLTIDAILLKQAQVRKRNVSMCYIDYAKAFDSVPHDWLVKVLEIYKVCPTVINMLKHLMGRWKTNIFVQNNRAGKVRISRGIFQGDSLSPLWFCLAMNPLSTLLRKTNIGYKLNTKNSRKLSHLLYMDDLKLYAENIGRLNQVLNTVQLFSDDIKMSFGVDKCAIINIKKGEVVEQEHSYFDIETLPPGETYKYLGAPQNQRIDHTQLKKIFTEKYSHRLTKIMNTKLSGKNQITAINSWAVPVLTHTFGILKWSDADLNEIDRLTRRTMTKFRCLHTNASVRRLYLPRRQGGRGMVNIYNLCRSQEQNMRSRFLQSNGTLMQLAAEQDHNLTPLKLQHKQVEFEVKTRQQEYAEWSEQAMHGIYPRSLEAKNIDKDASLRWLKSGQLYPETEGFLIAIQDRVIKTRNYEKHCLGLSVEDKCRKCGVAGESIEHIMAGCQMLANNAYLGRHNQLAKIIHQQLALNNGLLRTCPPYYKYQPSPVLETSEAVLYWDRPITTDRTVDYNRPDIVLIDKQRKIGTIIDISVPLSHNIAKVEAEKIKKYENLAIKIKHVWKLQRVITIPFVISAEGILSESFMRNLKTIGLSTNNASYGQKAVLL

SEQ ID NO: 7216 - protein, 740 aa, Pissodes strobi
MYVEHITADDVQLAVRKTGNWKSPGPDKLHNFWIKYFPASFSSLASCFTDVLKDPNKFPEFLIEGNTYMLLKKGEPTEPKNYRPITCLSVIYKLFTSIVSNKIYEHCLTNNILEEEQKGCVRGSMGTKHQLTIDAILLKQAQVRKRNVSMCYIDYAKAFDSVPHDWLVKVLEIYKVCPTVINMLKHLMGRWKTNIFVQNNRAGKVRISRGIFQGDSLSPLWFCLAMNPLSTLLRKTNIGYKLNTKNSRKLSHLLYMDDLKLYAENIGRLNQVLNTVQLFSDDIKMSFGVDKCAIINIKKGEVVEQEHSYFDIETLPPGETYKYLGAPQNQRIDHTQLKKIFTEKYSHRLTKIMNTKLSGKNQITAINSWAVPVLTHTFGILKWSDADLNEIDRLTRRTMTKFRCLHTNASVRRLYLPRRQGGRGMVNIYNLYRSQEQNMRSRFLQSNGTLMQLAAEQDHNLTPLKLQHKQVEFEVKTRQQEYTEWSEQAMHGIYPRSLEAKNIDKDASLRWLKSGQLYPETEGFLIAIQDRVIKTRNYEKHCLGLSVEDKCRKCGVAGESIEHIMAGCQMLANNAYLGRHNQLAKIIHQQLALNNGLLRTCPPYYKYQPSPVFKTSEAVLYWDRPITTDRTVDYNRPDIVLIDKQRKIGTIIDISVPLSHNIAKVEAEKIKKYENLAIEIKHVWKLQRVITIPFVISAEGILSESFMRNLKTIGLSTNNASYGQKAVLLQTCHIVRRFLN

SEQ ID NO: 7217 - protein, 991 aa, Pterostichus madidus
MSYVSEGRTKEALKGVRRGLAYRSVREELQLEEAKKASGSAQTASDARQPKRTLRSTRAPYAHSAVAEAEEVPDNSGGGSHPSIDGSGESSSSRENDTVGETGRCFGEAINKMFEELVAKPKMVSALRAVVDTLAQGEEASEKLEILLKLVVPRAKPVKPKKETEKLGNTGRSGEKLSSRKRRRRDYAYAQTMARKDFSGLAKRVLRGKLFEGGGPIPREDLVKHWKPIFESPSVRLAQQESYPQPSPALQHLWEPVSIEEVKEHTPRGGTAAGPDGITVKDWSSVCPVTQAILFNAILQAGSLPLILSTSRAVFIPKKDEPASPSDYRPLTIGSVVVRHLHKILARRLQRSAVFDTRQRAFLECDGLAENLWVLRSMLADSRKRIRTLHIASLDLSRAFDSVSWDALMHSLKQVGSPPGFASYVAETYKAGVTLLDGGSGEWTECSTRQGVKQGDPMSPLLFNLVVDQVLSKLSEDVGYYLQDVRVNALAFADDVILCASTEQGLQLNLDIFQKEMERFGLKMNTQKSCAVSMIASGRDKKVKQVTGRALFHVKGSPLPQLGMLDVWRYLGIDFEGASVKKAGVDLKEVLGNVTRAPLHPQQRMQILRTHILPKYTHTWVMSRVNVGDLVALDKQVRAAVRTWLHLPHDVPVGYFHARVRDGGLGIPSLRYFIPLLRLRRLEKLIESNAPHVLAATNSDLVRKQVSWCKQNTVINKVPLRNLKHMSDHFAESLHASCDGRSLRDCGDPISSWWVNAGSRTISSSKYVNFQKVRSNCLPTRSRTTRGRAKPQTPQNRTCDPMRACRAGCRTAETAEHCIQVCERSHAGRLERHNDIAGEVSVELRRRGWEVEEEPYLRTSNGPRKPDIIITKESELWVLDVQVVSNNWHLSLDDIDAEKISKYAKIPGISEVLTEKYGKKYRIGFGAVTLSLRGIWSKSSIEVLSYLGCSKSFLRRVPVMALHGSLKCWEMFNRSTAVVPSRGPVHRSSDF

SEQ ID NO: 7218 - protein, 991 aa, Pterostichus madidus
MSYVSEGRTKEALKGVRRGLAYRSVREELQLEEAKKASGSAQTASDARQPKRTLRSTRAPYAHSAVAEAEEVPDNSGGESHPSSDGSGESSSSRENDTVGETGRCFGEAINKMFEELVAKPKMVSALRAVVDTLAQGEEASEKLEILLKLVVPRAKPVKPKKETEKLGNTGRSGEKMSSRKRRRRDYAYAQTMARKDFSGLAKRVLRGKLFEGGGPIPREDLVKHWKPIFESPSVRLAQQESYPQPSPALQHLWEPVSIEEVKEHTPRGGTAAGPDGITVKDWSSVCPVTQAILFNAILQAGSLPLILSTSRAVFIPKKDEPASPSDYRPLTIGSVVVRHLHKILARRLQRSAVFDTRQRAFLECDGLAENLWVLRSMLADSRKRIRTLHIASLDLSRAFDSVSWDALMHSLKQVGSPPGFASYVAETYKAGVTLLDGGSGEWTECSTRQGVKQGDPMSPLLFNLVVDQVLSKLSEDVGYYLQDVRVNALAFADDVILCASTEQGLQLNLDIFQKEMERFGLKMNTQKSCAVSMIASGRDKKVKQVTGRALFHVKGSPLPQLGMLDVWRYLGIDFEGASVKKAGVDLKEVLGNVTRAPLHPQQRMQILRTHILPKYTHTWVMSRVNVGDLVALDKQVRAAVRTWLHLPHDVPVGYFHARVRDGGLGIPSLRYFIPLLRLRRLEKLIESNAPHVLAATNSDLVRKQVSWCKQNTVINKVPLRNLKHMSDHFAESLHASCDGRSLRDCGDPISSWWVNAGSRTISSSKYVNFQKVRSNCLPTRSRTTRGRAKPQTPQNRTCDPMRACRAGCRTAETAEHCIQVCERSHAGRLERHNDIAGEVSVELRRRGWEVEEEPYLRTSNGPRKPDIIITKESELWVLDVQVVSNNWHLSLDDIDAEKISKYAKIPGISEVLTEKYGKKYRIGFGAVTLSLRGIWSKSSIEVLSYLGCSKSFLRRVPVMALHGSLKCWEMFNRSTAVVPSRGPVHRSSDF

SEQ ID NO: 7219 - protein, 991 aa, Pterostichus madidus
MSYVSEGRTKEALKGVRRGLAYRSVREELQLEEAKKASGSAQTASDARQPKRTLRSTRAPYAHSAVAEAEEVPDNSGGESHPSIDGSGESSSSRENDTVGETGRCFGEAINKMFEELVAKPKMVSALRAVVDTLAQGEEASEKLEILLKLVVPRAKPVKPKKETEKLGNTGRSGEKMSSRKRRRRDYAYAQTMARKDFSGLAKRVLRGKLFEGGGPIPREDLVKHWKPIFESPSVRLAQQESYPQPSPALQHLWEPVSIEEVKEHTPRGGTAAGPDGITVKDWSSVCPVTQAILFNAILQAGSLPLILSTSRAVFIPKKDEPASPSDYRPLTIGSVVVRHLHKILARRLQRSAVFDTRQRAFLECDGLAENLWVLRSMLADSRKRIRTLHIASLDLSRAFDSVSWDALMHSLKQVGSPPGFASYVAETYKAGVTLLDGGSGEWTECSTRQGVKQGDPMSPLLFNLVVDQVLSKLSEDVGYYLQDVRVNALAFADDVILCASTEQGLQLNLDIFQKEMERFGLKMNTQKSCAVSMIASGRDKKVKQVTGRALFHVKGSPLPQLGMLDVWRYLGIDFEGASVKKAGVDLKEVLGNVTRAPLHPQQRMQILRTHILPKYTHTWVMSRVNVGDLVALDKQVRAAVRTWLHLPHDVPVGYFHARVRDGGLGIPSLRYFIPLLRLRRLEKLIESNAPHVLAATNSDLVRKQVSWCKQNTVINKVPLRNLKHMSDHFAESLHASCDGRSLRDCGDPISSWWVNAGSRTISSSKYVNFQKVRSNCLPTRSRTTRGRAKPQTPQNRTCDPMRACRAGCRTAETAEHCIQVCERSHAGRLERHNDIAGEVSVELRRRGWEVEEEPYLRTSNGPRKPDIIITKESELWVLDVQVVSNNWHLSLDDIDAEKISKYAKIPGISEVLTEKYGKKYRIGFGAVTLSLRGIWSKSSIEVLSYLGCSKSFLRRVPVMALHGSLKCWEMFNRSTAVVPSRGPVHRSSDF

SEQ ID NO: 7220 - protein, 991 aa, Pterostichus madidus
MSYVSEGRSKEALKGVRRGLAYRSVREELQLEEAKKASGSAQTASDARQHKRTLRSNRAPYAHSAVAEAEEVPDNSGGGSHPSIDGSGESSSSRENDTVGETGRNYFEEAINKMFGELVAKPKMVSALRAVVDTLAQGEEASEKLKALLKLVVPRAKPVKPINKTEKLGNTGRSGEKLSSRKRRRRDYAYAQTMARKDFSGLAKRVLRGKLFERGGPIPREDLVKHWKPIFESPSVRLAQQESYPQPSPALQHLWEPVSIEEVKEHTPRGVTAAGPDGITVKDWSSVCHVTQAILFNAILQAGSLPLILSTSRAVFIPKKDEPASPSDYRPLTIGSVVVRHLHKILARRLQRSAFFDTRQRAFLECDGLAENLWVLRSMLADSRKRVRTLHIASLDLSRAFDSVSWDALMHSLKQVGSPPGFASYVAETYKAGVTLLDDGSGQWTECSTRQGVKQGDPMSPLLFNLVVDQVLSKLSEDVGYYLQDVRVNALAFANDVILCASTEQGLQLNLDIFQKEMERFGLQMNTQKSCAVSMIASGRDKKVKQVTGRALFQVKGSPLPQLGMLDVWRYLGIDFEGASVKKAGVDLKEVLGNVTRAPLHPQQRMQILRSHILLKCTHTWVMSRVNVGDLVALDKQVRAAVRTWLHLPHDVPVGYFHARVRDGGLGIPSLRYFIPLLRLRRLEKLIESNAPHVIAATNSDLVRKQVSWCKQNTVINKVPLRNLKHMSDHFAESLHASYDGRSLRDCGDPISSWWVNAGSRTISSNKYVNFQKVRSNCLPTRSRTTRGRAKPQTPQNQTCDPMRACRAGCRTAETAEHCIQVCERSHVGRLERHNDIAGEVAVELRRRGWEVEEEPYLRTSNGPRKPDIIITKGSELWVLDVQVISNNWHLSLDDINAEKISKYAKIPGISEVLTEKYGKKYRIGFGAVTLSLRGIWSKSSIEVLSYLGCSKSFLRRVPVMALHGTLKCWELFNRSTAVVRCGLWHGSSDY

SEQ ID NO: 7221 - protein, 1232 aa, Apoderus coryli
MSNENLDRMRLPEEGSGISGADPGSQDNASGQWRGRQGRQLPRRVQLEYATATQTQRKRTNHLSDRASEAEGDHTGEIQDGPKSQTSVDTENAPENRKRKYWTREEMREVLWCFSYKRATSVDNYREVYELWRSRNPNTRLNVDAKKLLNQKNSIIKSNKFSQMEKEEIEEEIRLQIQEEDQEEEQGKTRQEDDSLRDTEQRNVSTEQVQIQNVNAHNEQTTNNYDENHEQELVEDQDSLDLKIEIRAEFEDIRLKSLCDRDKLPKIPMYLMGKINVINKVVEDILQEESLNITDLNNLIYAAAKTFYNKYLPSKYTNKSKTKRHREPPWKFRLQNKLNNTRKTLSRLTDIKRRGLNFQHNNILKIENITNKTDLNQRIEELKQKITATSARIRRIDNSQKQYLQNQMYKNNRKQLFRQITNSGRINDTNKIPTKNDLEHFWGGILEDETTHNKEAKWIKRHNQQKNIIAPMQWEPIALGELQSSLKNCQDWKAPGPDCIPNFWLKKLTSSHEHLTRVYNNLTENHNLIPDWLTSGKTILIPKNEDTENAKNYRPVTCLNTMYKNLTSIITKRLYKHIENNKLLPPEQKGCRQRVQGCKDQILLSNMISLDCKTKKKNLSVAWIDYQKAFDSVPHSWIIEALDMIGIHPIARELLIQTMKMWKTKIVINTPLKTIETRTIHIKKGIYQGDSLSPLLFCVALIPLSNEIRESKLGYQLQGETNKVHHLLFMDDLKLFGKNETELNSLLKIVEKFSRDINMQFGLEKCARIQFQRGKITKTTNQTPMLIRSLEESDTYKYLGMNEREGIDQELMKEKVSKEYFKRLRKILETHLSSKNKAETINSLAIPLLQYGFGLITWKVEELRNLDRKTRKLLTKFNYHHPRSDVDRIYIPRNEGGRGLTQIEGAWKTAIVSLNKYLHNENLDKYQKMIQKFDEAQPTGKSISKTAEKIMKELQLENEPTIATQLIKNKLQQIGIEKWKSKNMHGQHKRETEKDYVNKRITWEWLRRGQLKGETEGLLVAAQDQSLATNYIKRNIFRSTQDATCRLCKEFDETVEHITSGCPILAAREYINRHNKVATQLHYNICKSLNVPMETNLWYKHIPKAVMTSTDEQTTILWDQPITTDRTISSNRPDIIIKTKHLCQIIDVSIPADRNIVKKEAEKINKYRDLEIEIKRMWKLKTRIVPVVVGATGSVSSSFAKHLSEIPGNHSTYDLQKTTVLGTAHILRKVLT

SEQ ID NO: 7222 - protein, 1232 aa, Apoderus coryli
MSNENLDRMRLPEEGSGISGADPGSQDNASGQWRGRQGRQLPRRVQLEYATATQTQRKRTNHLSDRASEAEGDHTGEIQDGPKSQTSVDTENAPENRKRKYWTREEMREVLWCFSYKRATSVDNYREVYELWRSRNPNTRLNVDAKKLLNQKNSIIKSNKFSQMEKEEIEEEIRLQIQEEDQEEEQGKTRQEDDSLRDTEQRNVSTEQVQIQNVNAHNEQTTNNYDENHEQELVEDQDSLDLKIEIRAEFEDIRLKSLCDRDKLPKIPMYLMGKINVINKVVEDILQEESLNITDLNNLIYAAAKTFYNKYLPSKYTNKSKTKRHREPPWKFRLQNKLNNTRKTLSRLTDIKRRGLNFQHNNILKIENITNKTDLNQRIEELKQKITATSARIRRIDNSQKQYLQNQMYKNNRKQLFRQITNSGRINDTNKIPTKNDLEHFWGGILEDETTHNKEAKWIKRHNQQKNIIAPMQWEPIALGELQSSLKNCQDWKAPGPDCIPNFWLKKLTSSHEHLTRVYNNLTENHNLIPDWLTSGKTILIPKNEDTENAKNYRPVTCLNTMYKNLTSIITKRLYKHIENNKLLPPEQKGCRQRVQGCKDQILLSNMISLDCKTKKKNLSVAWIDYQKAFDSVPHSWIIEALDMIGIHPIARELLIQTMKMWKTKIVINTPLKTIETRTIHIKKGIYQGDSLSPLLFCVALIPLSNEIRESKLGYQLQGETNKVHHLLFMDDLKLFGKNETELNSLLKIVEKFSRDINMQFGLEKCARIQFQRGKITKTTNQTPMLIRSLEESDTYKYLGMNEREGIDQELMKEKVSKEYFKRLRKILETHLSSKNKAETINSLAIPLLQYGFGLITWKVEELRNLDRKTRKLLTKFNYHHPRSDVDRIYIPRNEGGRGLTQIEGAWKTAIVSLNKYLHNENLDKYQKMIQKFDEAQPTGKSISKTAEKIMKELQLENEPTIATQLIKNKLQQIGIEKWKSKNMHGQHKRETEKDYVNKRITWEWLRRGQLKGETEGLLVAAQDQSLATNYIKRNIFRSTQDATCRLCKEFDETVEHITSRCPILAAREYINRHNKVATQLHYNICKSLNVPMETNLWYKHIPKAVMTSTDEQTTILWDQPITTDRTISSNRPDIIIKTKHLCQIIDVSIPADRNIVKKEAEKINKYRDLEIEIKRMWKLKTRIVPVVVGATGSVSSSFAKHLSEIPGNHSTYDLQKTTVLGTAHILRKVLT

SEQ ID NO: 7223 - protein, 1232 aa, Apoderus coryli
MSNENLDRMRLPEEGSGISRADPGSQDNASGQWRGRQGRQLPRRVQLEYATATQTQRKRTNHLSDRASEAEGDHTGEIQDGPKSQTSGDTENARENRKRKYWTREEMREVLWCFSYKRATSVDNYREVYELWRSRNPNTRLNVDAKKLLNQKNSIIKSNKFSQMEKEEIEEEIRLQIQEEDQEEEQGKTRQEDDSLRDTEQRNVSTEQVKIQNVNAHNEQTTNNYDENHEQELVENQDSLDLKIEIRAEFEDIRLKSLCDRDKLPKIPMYLMGKINVINKVVEDILQEESLNITDLNNLIYAAAKTFYNKYLPSKYTNKSKTKRHRVPPWKFRLQNKLNNTRKTLSRLTDIKRRGLNFQHNNILKIENITNKTDLNQRIEELKQKITATSARIRRIDNSQKQYLQNQMYKNNRKQLFRQIANSGRINDTNKIPTKNDLEHFWGGILEDEATHNKNAKWIKRHNQQRKIIAPMQWEPIALGELQSSLKNCQDWKAPGPDCIPNFWLKKLTSSHEHLTRVYNNLTENHNLIPDWLTSGKTILIPKYEDTENAKNYRPVTCLNTMYKNLTSIITKRLYKHIENNKLLPLEQKGCRQRVQGCKDQILLSNMISLDCKTKKKNLSVAWIDYQKAFDSVPHSWIIEALDMIGIHPIARELLIQTMKMWKTKIVINTPLKTIETRTIHIKKGIYQGDSLSPLLFCVALIPLSNEIRESNLGYQLQGETNKVHHLVFMDDLKLFGKNETELNSLLKIVEKFSRDINMQFGLEKCARIQFQRGKITKTTNQIPMLIRSLEESDTYKYLGMNEREGIDQELMKEKVSKEYFKRLRKILETHLSSKNKAETINSLAIPLLQYGFGLITWKVEELRNLDRKTRKLLTKFNYHHPRSDVDRIYIPRNEGGRGLTQIEGAWKTAIVSLNKYLYNENLDTYQKMIQKFDEAQPTGKSISKTAEKIMEELQLENEPTIATQLIKNKLQQIGIEKWKSKNMHEQHKRETEKDYVNKGITWEWLRRGQLKGETEGLLVAAQDQSLATNYIKRNIFRSTQDATCRLCKEFDETVEHITSGCPILAAREYINRHNKVATQLHYNICKSLNVPMETNLWYKHIPKAVMTSTDEQTTILWDQPITTDRTISSNRPDIIIKTKHLCQIIDVSIPADRNIVKKEAEKINKYRDLEIEIKRMWKLKTRIVPVVVGATGSVSSSFAKHLSEIPGNHSTYDLQKTTVLGTAHILRKVLT

SEQ ID NO: 7224 - protein, 1775 aa, Caenorhabditis sp.
MIPIFEVIRTALSPVMMKRNSESRTKPPSYSILSNCAKAISISCEMNVYTVSNDILMSNDIVYLSHVNIDLRSSQIMSTNPVLCQEARVLPDICDISQWNAFLVDAYLTESFRFWSDIHGPLLHDCSTGAYVPMSGSVARFRMFFLSETLKLRSGIKHGKERMSEKFLNCSSFLRTSPRLEWEPVVQGIERGRTERGNLNMKEQKHTTFDPDIPSTSVYWESEHQSSRFHRPRLVGGGNDDTIDSQVENRSKIVEVESEESTVPKLVRLKGIDNSGKSIVIQVPAGKPIIGICPLCDNTKSTMGVGAEACKHMKTHMLSKHSLAASFTYICGICQEVPPSSMKLPARWITTHLLETHKIVVGKPRAADKAPRKLSTRARIAEKFDSASPALAFPKKKVAAMCAPKTPEKSSEELLKRPQTRSVTKKILSTLEKESKSRIGDKKKLSPIRECENRPIRRSLAPIFQRSAIPNGSSSSSLTDKRSVKRSSVPGISPPSKRCYQSVCSADDQPVNDQEVIVINDELPVRRRFNTWCLDNETGNDAWLDSDTVKFFLDRVVSEGVGFRILDPLIWAIYLSDVDEGINAILDNIRDDNISYIFPVCDGKHWVLLVFEKDEVKFLDPRHDRPNLRVMTFIDSLGKTWRRYDTEPPRQDDGWNCGVHISLAARSIINRTTWYSDQDVLEFRSIVKRWVEDSGYNLISEPIDFDQIKEPVVEMEVEMVVQDVTTINDTESMTIDYNPPMEMSDSLEGEEAIPKLMDLEVSKPLPRPKTRSVKPRKEQVKPKRKVPAGKPDELIELVRSWFDTQMSEYDGVGKTFHQLEWLANMLTAAIFKAASGDHIVLETMLKRCAPPVYSDGDMATQTDRPNRFPRKDFQPKKPKVEGEAIRELYCKSRPQAYNAIVSEESAKCDIPIAELERFFKGTTKETNVPQEVLEEMSSEIPKIDIPDAVGDPFYADEILNALKCTKDTAPGTDGIRYYHLKWFDPSGVRLTSLYNACREHRRIPTSWKEAETVLLYKGGGSDKSKPENWRPISLMPTIYKLYSSLWNRRIRSVKGVMSKCQRGFQERDGCNESIGILRTAIDTATGLSRSLAVAWLDLTNAFGSVPHELIRHSLKSFGFPGNLIEVVADMYDGSCIRVKSRTETSQSIKIHSGVKQGDPISPTLFNICLETVIRRHLGRTKGHKSLNTRVKVLAFADDLAVAADSCRDLQDSLDKLDDDCRKLNLIFKPAKCASLTIYKGKVCAKETITLNKKSITSLDSKSSYKYLGVKCGAEARVSAEDLLMRITTDLGKVYESDLSPQQKLDLIKAFILPRLTHLNANSTVLLSEMREFSKMLMRAIKLSHNIPLRGSPLEYIQIPVSKGGLGVLCPRTVALLTYLSSMMKKLWSQDEYIRRIHNDFLEKVVEMETGKDSVTIDEIAEYLSSQKVSKSKCGFNPFTRVQEVLHSMTRLKTSPLYTLQIVVDSGQLAVKVQATESSSPKIVGADGVKKLLRILTAEVQSALLDHFLKEKQVKSSVVQVLQESQGCNKFVSQGGKVSIAAQKFVHRARLNLLVCNYNTFNKGKSKACRRCGYANESQTHILQSCPKQMNLMISERHDMVLHSVKKLVEKGSKKDWKMKIDQEFGITRDRPDLYLESPDKKEVILADVAIPYENGVKAMQSSWDRKVSKYAHLVQHLKSRGVKAKVLPIVLGSLGTWWSPTDKSLAELGIDQAAQRLAKPYICSGILEYSKNIYWRHIFGEEYTPVPHLFGTEKPLGTDWKDKKAGDKRPVSLIK

SEQ ID NO: 7225 - protein, 864 aa, Danionella dracula
MPNVTALIEDQAVMLLAALSRGRGRVGLKGRSKPVLAQETKWRTPWRLRQEAFRQCQLRYGKKRADLARDLLDGRCSVACAIGRVRITEHYKQVWGVSSPFLGLGPFSTTYRVDNGGLGGLITAGEVIEHLKGIASSSAPGPDGIRKRDLLQWDPEGTKLQAVYNGWLITGVLPGCLKGARTVLIPKTMTQEALVEVGNWRPITIGSMVQRLFSRILTKRLSGVCRVHPRQKGFREVQGCSENVQILRVVMNQAKRVLGRVAIVFVDFAKAFDTVSHEHLLASLRNMGLDNHMVELVRCSYEDCESSIEIVGGVTEPIALKVGVKQGDPMSPLLFNIAVDPLIHSLERVGKGTTIQGLPIACMAFADDLVLLSESWEGMAHNLGIAFCEVTGLKVNVGKTKGFLLTHSRDSFVVNECPPWSLGGCPLEMMGPCDQIKCLGLQLSPWKGFLEPPLKEKLTGWLRCLDKSLLKPSQKLAMASQFVFPRLLYVADQGELSGNKLRQLDRVVREKVKGWLHLPASTCDGLLYARNRNGGLGIMRFERLVPGMQAKRLWAMSRSEEPILRVLTNTPEMYEAFREKWVRAGHVADQGGGIVGKGAVNRLLSIAECMNPRKGDWREEEFWRWTEMEVQGVGISEFHNSPPSNSWLGRPRGFKEWQYHFALQLQANVFPTREFVCRGREKGDASCRLCEARLESCSHILGSCPALQRQRSLRHNKICEILGREAERLQWKVLQEWAFRDTQERLKRPDLVFLKEGKALILDVTVRFEFSESSLRDADNEKWDKYGPHLPVIREALQVNQAWLSGFPLGARGLWYPHNMEVLGKMGMPVGRRKRLAALLCRRVIMYSLDMLHGFRKLVRSRNA

SEQ ID NO: 7226 - protein, 740 aa, Ormyrus pomaceus
MEAYWTTVFAQPATNTRPRSINQEVREDIWDPITPEDLRTARPPVAISPGPDGLTARQLKAIPLDILTRIVNLILWCGRLPEHLSASRIVFIRKKNGASQPGHFRPLSIPSVLTRLIHKVIAQRIDSAVKLNHQQRAFRGGIDGCRDNITLLDSIIRSRYTEHRSLYVATPDISKAFDSVEHTALLAAMKASGLPPPLVEYLEIYYARATTTLHGEGWESAPIRVTRGVKQGDPLSPIIFNIVMDHLLRSLPSECGADFNSTTIRAMAFADDLVLLANTPTGLQHLTDHTAAYLGKCGLTLNSGKSHTVSLFGDGHRKKTVVEAGRTFNILGQPIKPLSREDTWIYLGIEFSPEGRRPRPLAGQLSQLLQRLTKAPLKPQQRIYALKTTALPKLFYHMALGRTTISELLRVDKMVRATVRQWLALPNDTPTGYFHATVAEGGLGLPSLRWLAPLHRRQRLLGLVAHGREENITDPHLAKEVGICNRRLRDGNNTISSIVDIQKRWATLLHNTIEGRGLANSHQTQGQHQWVSDGTALLSSRDYIRCHHVRIGALPARARTTRGRRGERACRAGCNAQETINHILQVCPRTHDIRIERHNAIAAFIARNLRRQGFEVLEEPSIPTSEGLRKPDLVATMGTLGVVVDAQIVGEQASTERAYSAKVTKYRDNPSIHQTIERRTGANNIIHIPAILTSRGIWDKRSAQRLIGLGTINRRDAAVISTRVLIGGAMAFRTFNRRAS

SEQ ID NO: 7227 - protein, 1379 aa, Spodoptera exigua
METRAMRKLRLGSLPGGDRRGTPGADAGRSSIRTIGGSELSPRAPTGSPEQCYSRPTSSISLFPSLPSSPLSCLNYNTDSSPISSPTSINSAAVDVVQEAVADNPAPTTGQVRARLRWTSEMNEFIWRTYLYVTKLDTKVRGYLDPLYTQFIAKFPGIKISKQRLGDQKRAILRNKLLPETKLESIKNEVRLALQSSDITQDTSVFSQSLTAATQQPINTNTRLRWTDDINEAIITEYYKITHIESNRTAYRKPLHTIITHKFPSFAHVSEQRIADQRRVIINNRLISEDRLEEIKRDVRNSLNIQAIENTQHDDTPDTYTTVESNLLHFNDELINESSPGTQDSSQVSSAVLRNDSTNTVFCDENLDTTITKTFEEIYNKYLHTDPTKRPFIPKQKTSKKFAYIISHLNNTVLPKYGSIEDDFFKTHALIYCAAHTAALCNGSKIKDYIHKTSSILQQNSTIDKRPNWLKRLDRKILILRKDIGRMTQYINGNRNFNLITHIERIKLKYGKHSSYEEPNTTNEQFMDSLKQKLTAITSRRRRYFNCTKRKDQNTQFTNCERQFYRNLTSDTANTYQTQPQASDSLDLNPRQFYSYWSNIWSNTSEHNQAAGWIHDDKQKVEHLPDMLLDAIPLEVFVDVIKKAHNWKAPGTDNIHNYYYKKFTYLYPSIYKHINDFIKNPLSIPEFITQGQTYMIPKDSDRTNPAKYRPITCLQTIYKLITGCISEIIYKHVTQNNILAEEQKGCRKYSQGCKEQLTIDSIAMKHSVKLKNDICTMYIDYQKAFDSVPHSWLLYILKHYKINSSIVEFLTESMKHWSTKIKLGKLIETDPIPIRRGIFQGDALSPLWFCLALNPLSSLLNSHGHGLTIQSNNTSDFKLTHLMFMDDIKLYSNSTSGLHSLADLTKTFSDDIHMEFGIDKCKTFTLRKGQYIEHNPYMLDSGQTIESMTHNSSYKYLGFEQTHQIDQKHTKNKIIAKYKHRLNILIRSQLTSRNLMKAINSFAIPVLTYSFGIINWSNSDLTKVQRLINTILTTNRKHHPRSCVQRVTLPRDDGGRGIIDIKNLHNQQIFNLRKFFMHMSQNSPFHKAISQIDKKYTPLNLHSNGPQPNEQITNKSDKIAAWTHKSLHGRHRLDLQQPYVDLKASNAWLRRGELFPETEGFMIAIQDQIIDTANYQKFIIRRPNYNDSCRRCHSASETIQHITGACRAIAQTDYKHRHDQVAAIIHQSLAIQTKLLTDKVPYYKYKPQAVLENKHFKLYWDRTIITDKTIYNNRPDITLLDKQKKLVYIVDIAICNTHNLTNTHSEKIAKYTDLSIEIKTQWNITHTKTVPIILSTTGVIPKTLHNSLKELNISPSTYLLLQKAVILNTCRLTRKFLNA

SEQ ID NO: 7228 - protein, 893 aa, Spodoptera exigua
MTQYINGNRNLNLIKHIERIKLKYNKHSSYEEPNTTNEQFMDSLKQKLTAITSRRRRYFNCTKRKDQNTQFTNCERQFYRNLTTDTANTYQTQPQASDSLNLNPRQFYSYWSNIWSNTSEHNQAAGWIHDDKQKVDHLPDMLLDAIPLEVFIDVIKRAHNWKAPGTDNIHNYYYKKFTYLFPSIYKHINDFIKNPLSIPEFITQGQTYMIPKDSNCINPAKYRPITCLQTIYKLITGCISEIVYKHVTQNNILAEEQKGCRKYSQGCKEQLIIDSIAMKHSVKLKNDICTMYIDYQKAFDSVPHSWLLYILKHYKIHPSIVDFLTECMKHWSTKIKLGKLIETDPIPIRRGIFQGDALSPLWFCLALNPLSNLLNSHGHGLTIQSNNTSDFKLTHLMFMDDIKLYSNSTSGLHSLADLTKTFSDDIHMEFGIDKCKTFTLRKGQYIEHNPYILDSGQTIESMTHNSSYKYLGFEQTHQIDQKHTKNKIIAKYKHRLNILIRSQLTSRNLIKAINSFAIPVLTYSFGIINWSNSELTKVQRLINTILTTNRKHHPRSCVQRLTLPRDDGGRGIIDIKNLHNQQILNLRKFFMHMSQNSHFHKAISQIDKKYTPLNLHSNGPQPNEQITSKSDKIAAWTHKSLHGRHRLDLQQPYVDMKASNAWLRRGELFPETEGFMIAIQDQIIDTANYQKFIIRRPNYNDSCRRCHSASETIQHITGACRAIAQTDYKHRHDQVAAIIHQSLAIQTKLLTDKVPYYKYKPQAVLENKHFKLYWDRTIITDKTIYNNRPDITLLDKQKKLVYIVDIAICNTHNLTNTHSEKIAKYTDLSIEIKTQWNITHTKTVPIILSTTGVIPKTLHSSLKELNISPSTYLLLQKAVILNTCRLTRKFLNA

SEQ ID NO: 7229 - protein, 1257 aa, Spodoptera frugiperda
MNEFIWRTYLYVTHLDTKVRGYLDPLYSKFNEKFPEIKISKQRLGDQKRAILRNKLLPDSLLESIKNEVRSDLQNINNTQDTIGFSQSFIADRHAHNSVNSNTRLRWTDDINEAIIREYFRITHIETNRTAYRKPLHTIITQKFPNIAHVSEQRIADQRRVIINNRLISDDRLEEIKREVRDNLNIQTLENTQYDTPHTYTTVDSNNQQSSSELNETIPHTQDNTQIGNAILQDETTNTVFADETLDTKITNTFEDTYNKYLHTDPTKRPYIPKQKTSKKLAYIIAYLNNTVLPKYGSVEDDFLKTHALVYCAAHTAAVCNGSKIKEHNPTITSTQQQNSPLDKRPNWLKRLDRKIHIIRKEIGRMTQYINGNRNLNLITHIERIKHKYSKHSSYEEPNTTDQQFMDSLKQKLTAVTSRRRRYYDCTQRKNQNSQFTNSERQFYRTLATDTTNTQSRRQISDNLSPDPEQFHTYWSNIWSHVSEHNHAAAWIRDDKQKLENLPDMLLDTIPLEVFVSVITKAHNWKAPGSDNIHNYFYKKFTYLHPSIYNHINNFIKNPQSIPEFITQGLTYMIPKDSDRMNPAKYRPITCLQTIYKLITGCISEIIYKHITQNNILSEEQKGCRKYNQGCKEQLIIDSVAMKHSVKLKNDICTMYVDYQKAFDSVPHSWLIYILQHYKIHPSIIQFLIESMKHWNTKIKLGKLVETNPIPIRRGIFQGDALSPLWFCLALNPLSNLLNSSKAGLTIQGNDSPDFELTHLMFMDDIKLYSNSTPGLHILADLTQTFSDDICMTFGIDKCKTFSLRKGQLIEPNPYILDSGMTIEPMTQDCTYKYLGFEQTYQIDQKHTKNKLTAKYKHRLNMLIRSQLTSRNLIKSINTFAIPVLTYSFGIINWSKTDLTKLQRLINTSLTKNRKHHPRSCVQRITLPRDEGGRGLIDVQNLHNQQIINLRNFFMHKSQNSTLHKIISQIDRKYTPLNLHSTDPQRNEHITSKSDKIAAWARKSLHGRHRLDLQQPHVDMKASNAWLRRGELFPETEGFMIAIQDQVIDTANYQKYIIRRPNYNDSCRRCHGASETIQHITGACRAIAQTDYKHRHDQVAAIIHQSLAIQTKLVSDKVPYYKYKPQAVLENEHFKLYWDRTIITDKTIYNNRPDITMLDKQKKLVYIIDIAICNTHNLTNTHSEKIAKYTDLSIEIKTQWKITHTKTVPIILSTTGVIPKTLHHSLKELNISPSTYLLLQKAVILNTCRLTRKFLNS

SEQ ID NO: 7230 - protein, 1378 aa, Spodoptera frugiperda
METRAKKKLRIGSLPGGDRRGTPGADAGRSSIRTIGGSELSPRAPTGSPEKCDSRPSSSTSLFPSLPSSPLSCLNYNTDSSSIPSPISINSATVDVVQEAEAINPAPTTGQVRARLRWTREMNEFIWRTYLYVTHLDTKVRGYLDPLYSKFSQKFPEMKISKQRLGDQKRAILRNKLLPDSLLESIKNEVCSDLQNTNDTQDTIGFSQSFIAETHTHTSVNSNTRLRWTDDINEAIIREYFRITHIETNRTAYRKPLHTIITQKFPNIAHVSEQRIADQRRVIINNRLISDDRLEEIKREVRDNLNIHTLENTQHDTPQTYTIVDSNNQQSSNELNETIPHTQDNTQIGNAILQNETTNTAFTDETLDTKITKTFEDTYNKYLHTDPTKRPYIPKQKTSKKLAYIIAHLNNTVLPKYGSVEDDFIKTHALVYCAAHTAALCNGSKIKEHNTTITSTSQQNSSVDKRPNWLKRLDRKILIIRKEIGRMTQYINGNRNLNLITHIERIKHKYSKHSSYEEPNTTDQQFMDSLKQKLTAVTSRRRRYYDCTQRKNQNSQFNNSERQFYRTLATDTTNTQSRRQTSDNLSPDPEQFHTYWSNIWSQASEHNHAAAWIRDDKQKLENLPDMLLDTIPLEVFVSVITKAHNWKAPGSDNIHNYFYKKFTYLHPSIYNHINNFIKNPQSIPEFITQGLTYMIPKDSDHMNPAKYRPITCLQTIYKLITGCISEIIYKHITQNNILSEEQKGCRKYSQGCKEQLIIDSVAMKHSVKLKNDICTMYVDYQKAFDSVPHSWLVYILKHYKIHPSIIQFLIESMKHWNTKLKLGKLVETDPIPIRRGIFQGDALSPLWFCLALNPLSNLLNSSKAGLTIQGNDSPDFELTHLMFMDDIKLYSNSTPRLHILADLTQTFSDDICMTFGIDKCKTFSLRKGQLIEPNPYILDSGMTIEPMTQDCTYKYLGFEQTYQIDQKHTKNKLTAKYKHRLNILIRSQLTSRNLIKSINTFAIPVLTYSFGIINWSKADLTKLQRLINTSLTKNRKHHPRSCVQRITLPRDEGGRGLIDVQNLHNQQIINLRNFFMHKSQNSTLHKIISQIDRKYTPLNLHSTDPQRNEHITSKSDKIAAWARKSLHGRHRLDLQQPHVDMKASNAWLRRGELFPETEGFMIAIQDQVIDTANYQKYIIRRPNYNDSCRRCHGASETIQHITGACRAIAQTDYKHRHDQVAAIIHQSLAIQTKLASDKVPYYKYKPQAVLENEHFKLYWDRTIITDKTIYNNRPDITMLDKQKKLVYIIDIAICNTHNLTNTHSEKIAKYTDLSIEIKTQWKITHTKTVPIILSTTGVIPKTLHHSLKELNISPSTYLLLQKAVILNTCRLTRKFLNS

SEQ ID NO: 7231 - protein, 1376 aa, Spodoptera exigua
METRAMRKLRLGSLPGGDRRGTPGADAGRSSIRTIGGSELSPRAPTGSPEQCYSRPTSSISLFPSLPSSPLSCLNYNTDSPISSPTSINSAAVDVVQEAVANNPAPTTGQVRARLRWTTEMNEFIWRTYLYVTKLDTKVRGYLDPLYTQFIAKFPGIKISKQRLGDQKRAILRNKLLPETKLESIKNEVRLALQSSDITQNTSVFPQSLTAATQQPINTNTRLRWTDDINEAIITEYYKITHIESNRTAYRKPLHTIITHKFPSFAHVSEQRIADQRRVIINNRLISEDRLEEIKRDVRNSLNIQAIENTQHDDTPGTYTTIESNLSHFNDELNEISPGTQDSLQVDSAVLRNDSTNTVFCDKNLDTTITNTFEEIYNKYLHTDPTKRPFISKQKTSKKFAYIISHLNNTVLPKYGSIEDDFLKTHALVYCAAHTAALCNGSKIKDHSHTSSILQQNSTIDKRPNWLKRLDRKILILRKHIGRMTQYINGNRNLNLITHIERIKLKYGKHSSYEEPNITNEQFMDSLKQKLTAITSRRRRYFNCTKRKDQNTQFTNCERQFYRNLTTDTANTYQTQTQASDSLNLNPRQFYSYWSNIWSNTSEHNQAAGWIHDDKQKVEHLPDMLLDAIPLEVFIDVIKRAHNWKAPGTDNIHNYYYKKFTYLYPSIYKHINDFIKNPLSIPEFITQGQTYMIPKDSNCINPAKYRPITCLQTIYKLITGCISEIVYKHVTQNNILAEEQKGCRKYSQGCKEQLTIDSIAMKHSVKLKNDICTMYIDYQKAFDSVPHSWLLYILKHYKIHPSIVEFLTECTKHWSTKIKLGKLIETDPIPIRRGIFQGDALSPLWFCLALNPLSSLLNSHGHGLTIQSNNTSDFKLTHLMFMDDIKLYSNSTSGLHSLADLTKTFSDDIHMEFGIDKCKTFTLRKGQYIEHNPYILDSGQTIESMTHNSSYKYLGFEQTHQIDQKHTKNKIIAKYKHRLNILIRSQLTSRNLIKAINSFAIPVLTYSFGIINWSNSDLTKVQRLINTILTTNRKHHPRSCVQRLTLPRDDGGRGIIDIKNLHNQQIFNLRKFFTHMSQNSHFHKAISQIDKKYTPLNLHSNGPQPNEQITSKSDKIAAWTHKSLHGRHRLDLQQPYVDMKASNAWLRRGELFPETEGFMIAIQDQIIDTANYQKFIIRRPNYNDSCRRCHSASETIQHITGACRAIAQTDYKHRHDQVAAIIHQSLAIQTKLLTGKVPYYKYKPQVVLENKHFKLYWDRTIITDKTIYNNRPDITLLDKQKKLVYIVDIAICNTHNLTNTHSEKIAKYTDLSIEIKTQWNITHTKTVPIILSTTGVIPKTLHSSLKELNISPSTYLLLQKAVILNTCRLTRKFLNA

SEQ ID NO: 7232 - protein, 1378 aa, Spodoptera litura
METRAKKRLRIGPLPGGDRRGTPGADAGRFSIRTIGGSELSQRAPTGSPEQVTSRPSSSTSLFPSLPSSPLSCLNYNTDSSSIPSPTSINSATVDVVQEAEANNLAPTTGQVRARLRWTREMNEFIWRTYLYVTYLDTKVRGYLDPLHSKFTEKFPQIEVSKQRLGDQKRAILRNKLLPENILESIKNEVRSDLQSNSIIQDTIAFSQPPTAERHTRNTGTSNNRLRWTDDINEAIIREYFRITNIDTNRSAYRKPLHTIITQKFPSIAHVSEQRIADQRRVIIHNRLISDDRLEEIKREIRDNLNTQAIENTQNDSPQTYTIINPNNPQSNSELNEANPYTQDNTQVGSDVLQDETTNTVFTDETLDIKITKIFEDTYNKYLHTDPTKRPYIPKQKTSKKLAYIIAYLNNTVLPKYGSVEDDFLKIHALVYCAAHTAALCNGSKIKEQNQAVPSTPQQNSPVDNRPNWLKRLDRKIHIIRKEIGRMTQYINGNRNLNLITHIERIKHKYSKHSSYEEPNTTNEQFMDSLKQKLTAITSRRRRYYECTQRKNQNSQFTNSERQFYRTLATDTTNTQSRQQMSDNLSPNSEQFHTYWSNIWSNASEHNHAATWIHDDKQKLENLPVMLFDAIPLEVFVSVITKAHNWKAPGTDKIHNYFYKKFTYLHPSLYNHINNFIKNPQSIPKFITQGLTYMIPKDSDHANPAKYRPITCLQTIYKLITGCISEIIYKHITHNNILSEEQKGCRKYSQGCKEQLIIDSIAMKHNVKLKTDICTMYVDYQKAFDSVPHSWLVYILHHYKIHPSIIQFLTESMKHWNTKIKLGKLIETDPISIRRGIFQGDALSPLWFCLALNPLSNLLNSSTTGLTIQYDDSTDLKLTHLMFMDDIKLYSNSTPGLHTLADLTQTFSDDIRMTFGIDKCKTFTLCKGQHIEHNPYKLDSGQSIEPMTQNCTYKYLGFEQTYQIDQKYTKNKIIAKYKHRLNMLIRSQLTSRNLIKSINSFAIPVLTYSFGIINWSKTDLTKLQRLINTSLTTNRKHHPRSCVQRLTLPRDEGGRGLIDITNLHNQQIVNLRKFFMYKSQNSLFHKAISQIDRKYTPLNLNSTDPQRNESITSKSDKIAVWAHKSLHGRHRLDLQQPHVDMKASNAWLRRGELFPETEGFMIAIQDQVIDTANYQKFIIRRPNYNDSCRRCHGASETIQHITGACRAIAQTDYKHRHDQVAAIIHQSLAIQTKLITDKVPYYKYKPQAVLENEHFKLYWDRTIITDKTIYNNRPDITMLDKQKKLVYIIDIAICNTHNLTTTHSEKIAKYTDLSIEIKTQWKITHTKTVPIILSSTGVIPKTLHNSLKELNISPSTYLLLQKAVILNTCRLTRKFLNT

SEQ ID NO: 7233 - protein, 1257 aa, Spodoptera litura
MNEFIWRTYLYVTYLDTKVRGYLDPLHSKFTEKFPQIEVSKQRLGDQKRAILRNKLLPENILESIKNEVRSDLQSNSIIQDTIAFSQPPTAERHTRNTGTSNNRLRWTDDINEAIIREYFRITNIDTNRSAYRKPLHTIITQKFPSIAHVSEQRIADQRRVIIHNRLISDDRLEEIKREIRDNLNTQAIENTQNDSPQTYTIINPNNPQSNSELNEANPYTQDNTQVGSDVLQDETTNTVFTDETLDIKITKIFEDTYNKYLHTDPTKRPYIPKQKTSKKLAYIIAYLNNTVLPKYGSVEDDFLKIHALVYCAAHTAALCNGSKIKEQNQAVPSTPQQNSPVDNRPNWLKRLDRKIHIIRKEIGRMTQYINGNRNLNLITHIERIKHKYSKHSSYEEPNTTNEQFMDSLKQKLTAITSRRRRYYECTQRKNQNSQFTNSERQFYRTLATDTTNTQSRQQMSDNLSPNSEQFHTYWSNIWSNASEHNHAATWIHDDKQKLENLPVMLFDAIPLEVFVSVITKAHNWKAPGTDKIHNYFYKKFTYLHPSLYNHINNFIKNPQSIPKFITQGLTYMIPKDSDHANPAKYRPITCLQTIYKLITGCISEIIYKHITHNNILSEEQKGCRKYSQGCKEQLIIDSIAMKHNVKLKTDICTMYVDYQKAFDSVPHSWLVYILHHYKIHPSIIQFLTESMKHWNTKIKLGKLIETDPISIRRGIFQGDALSPLWFCLALNPLSNLLNSSTTGLTIQYDDSTDLKLTHLMFMDDIKLYSNSTPGLHTLADLTQTFSDDIRMTFGIDKCKTFTLCKGQHIEHNPYKLDSGQSIEPMTQNCTYKYLGFEQTYQIDQKYTKNKIIAKYKHRLNMLIRSQLTSRNLIKSINSFAIPVLTYSFGIINWSKTDLTKLQRLINTSLTTNRKHHPRSCVQRLTLPRDEGGRGLIDITNLHNQQIVNLRKFFMYKSQNSLFHKAISQIDRKYTPLNLNSTDPQRNESITSKSDKIAVWAHKSLHGRHRLDLQQPHVDMKASNAWLRRGELFPETEGFMIAIQDQVIDTANYQKFIIRRPNYNDSCRRCHGASETIQHITGACRAIAQTDYKHRHDQVAAIIHQSLAIQTKLITDKVPYYKYKPQAVLENEHFKLYWDRTIITDKTIYNNRPDITMLDKQKKLVYIIDIAICNTHNLTTTHSEKIAKYTDLSIEIKTQWKITHTKTVPIILSSTGVIPKTLHNSLKELNISPSTYLLLQKAVILNTCRLTRKFLNT

SEQ ID NO: 7234 - protein, 1365 aa, Hemaris fuciformis
METRSMKKRIGSLPGGDRRGALGAGAECLSIRTASGSELSRRAPTGSPETYATAETPSSSSSSPKSLFSSLPSSSPSQLYHISENSFSSSTSLLNIHSLAVDAVQEAVADKTAPTTGRTRARIKWTEEINKFIWRNYLIVTEMETKVRGYLDPLHSRFIEKFPHIDVSKQRIGDQKRAILRCKLLSDSTLQTIKDEVTNLLQNEKHLTTNSEIFTHQGSSQSTRMRWTDDINETILREYYKITKLETNKTAYRKPLHASIIEKFPQIINVSEQRISDQLRVILRNKLIRESRLEEIKQEIRVNLALLDMQIDDINTPSQLNATSDVQSSIVSESLNENVPPNHTAIASEEILNNKIRQTFEDIFQKYKFSNPTQRPFLPRQKSSKKFAHITSFLNTEIIPCYTSSDDNFIETHTILYCAAHTAALCNGSKIKDPTPTSTVSNTRIDRRPNWLKRLDSKIEYIRKEIGRFTQYMRGNISIKLMKHVEKIKHKYRIHSNYEDPNTTDNQFLDSLKQKLNATTNRRNRYLNCTRRKTQNAQFSNNEKQFYRELLDNTSNTHKTEHASVNHIPTSEQIHDFWSKIWAQPIQHNSSAEWIEADKRHLEKIPEMIFDSISLDVFIHVLKKAHNWKSPGTDNIHNFYYKKFSSLHAAFHRHINNFLEYPDTVPNFVSQGVTYMIPKDTEKNNPAKYRPITCLQTFYKLITSCISHVINEHITDNNIIAVEQKGCKKFSQGCKEQLIIDSIAMKHNIKQKTDLCTMYVDYQKAYDSVPHSWLTYILYHYKIHPTIIGFLKTVMQKWETKLRLGKLLETAPIQINRGIFQGDALSPLWFCLALNPLSNILNLSDNGLPIVANDATLKLSHLMYMDDIKLYSNSISSLHQLADLTQKFSDDIHMAFGINKCKTFTMRNGKNIENNPYRLATGQLIDSLDNNNSYKYLGFEQSHQINQKDTKLHLTKKFKHRLNILMKSQLNSRNLVKSINTFAIPLLTYSFGIIKWSKTDLIKLQRVINTTMSSHRKHHPRSCIQRMTLSREEGGRGLIDIRNLHNRQIATLRKFFSNTSHHSALHKTIGLADTNYTPLNLQSTDTQNNEEIVRDEDKVSEWSRKSLHGRHRLDLQQPHVDIKASNAWLQRGELFPETEGFMIAIQDQIIDTANYQKFIIHRPNYSDLCRRCHSASETIQHITGACKSIAQTDYKHRHDQVAAIIHQALAIQTNLVSEKVQYYKYKPEAVLENSNFKLYWDRTIITDKTIYNNRPDITLHDKHNKSVYLIDIAVCNTHNLLTTHTEKITKYTDLSIEIKSQWKVNHTRTIPIIISSTGVIPKTLHSSLSTLKLNPLIYLLLQKAVILNTCRLTRKFLNSENTELN

SEQ ID NO: 7235 - protein, 1365 aa, Hemaris fuciformis
METRSMKKRIGSLPGGDRRGALGAGAECHSRRTASGSELSRRAPTGSPETNATAETPSSSSSSPKSLFSSLPSSSPSHLYHISENSFSSSTSLQNIHSLAVDAMQEAEADKTASTTGRTRARIKWTEEINKFIWRNYLIVTKIETKVRGYLDPLYSRFIEKFPHIDVSKQRIGDQKRAILRCKLLSDSTLQTIRDEVTNLLQNENHLTANSEIFTHQRSSQSTRMRWTDDINEAILREYYKITKLETNKTAYRKPLHASIVEKFPQILHVSEQRISDQLRVILRNKLIRDSRLEEIKQEVRVSLSSLDIQIDDINTPLQLNVTTDVQSSIVSESLNENVPPNHNALASEEILNNKIRQTFEDIFQKYKFSNPTQRPFLPRQKSSKKFAHITSFLNTEIIPCYTSSNDNFIETHTILYCAAHTAALCNGAKIKDPTPTSTASNTQTDRRPNWLKRLDSKIEYIRKEIGRFTQYMRGNRSIKLMTHVEKIKHKYRIHSNYEDPNTTDNQFLDSLKQKLNATTNRRNRYLNCTRRKTQNAQFSNNEKQFYRELLGNTSNTHKKEHAPVKNIPTSEQIHDFWSKIWAQPIQHNSSAEWIEADKRHLEKIPEMIFDSIPLDVFIHVLKKAHNWKSPGTDNIHNFYYKKFSSLHAALHRHINNFLEYPDTVPNFVSQGVTYMIPKDTEKNNPAKYRPITCLQTFYKIITSCISHVINEHITDNNIIAVEQKGCKKFSQGCKEQLIIDSIVMKHNIKQKTDLCTMYVDYQKAYDSVPHSWLTYILYHYKIHPTIIGFLKTVMQKWETKLRLGKLLETAPIQINRGIFQGDALSPLWFCLALNPLSNMLNLSDNGLPIVENNATLKLSHLMYMDDIKLYSNSISSLHQLADLTQKFSDDIHMAFGINKCKTFTMRNGKNIENNPYRLATGQIIDSLDKNNSYKYLGFEQSHQINQKDTKLHLTKQFKHRLNILMKSQLNSRNLVKSINTFAIPLLTYSFGIINWSKTDLTKLQRVINTTMSSHRKHHPRSCIQRMTLSREEGGRGLIDIRNLHNRQIATLRKFFFNISHHSALHKTIGLADKNYTPLNLQSTDIQNNEGIVRDEDKVSEWSRKSLHGRHRLDLQQPHVDMKASNAWLQRGELFPETEGFMIAIQDQIIDTANYQKFIIHRPNYSDLCRRCHSASETIQHITGACKSIAQTDYKHRHDQVAAIIYQALAIQTNLVTEKVQYYKYKPEAVLENSNFKLYWDRTIITDKTIYNNRPDITLHDKHNKSVYLIDIAVCNTHNLLTTHTEKIAKYTDLSIEIKSQWKVNHTRTIPIIISSTGVIPKTLHSSLSALKLNPLMYLLLQKAVILNTCRITRKFLNSENTELT

SEQ ID NO: 7236 - protein, 1365 aa, Hemaris fuciformis
METRSMKKRIGSLPGGDRRGALGAGAECHSRRTASGSELSRRAPTGSPETNATAETPSSSSSSPKSLFSSLPSSSPSHLYHISENSFSSSTSLQNIHSLAVDAMQEAEADKTASTTGRTRARIKWTEEINKFIWRNYLIVTKIETKVRGYLDPLYSRFIEKFPHIDVSKQRIGDQKRAILRCKLLSDSTLQTIRDEVTNLLQNENHLTANSEIFTHQRSSQSTRMRWTDDINEAILREYYKITKLETNKTAYRKPLHASIIEKFPQILHVSEQRISDQLRVILRNKLIRDSRLEEIKQEVRVSLSSLDIQIDDINTPLQLNVTTDVQSSIVSESLNENVPPNHNALASEEILNNKIRQTFEDIFQKYKFSNPTQRPFLPRQKSSKKFAHITSFLNTEIIPCYTSSNDNFIETHTILYCAAHTAALCNGAKIKDPTPTSTASNTQTDRRPNWLKRLDSKIEYIRKEIGRFTQYMRGNRSIKLMTHVEKIKHKYRIHSNYEDPNTTDNQFLDSLKQKLNATTNRRNRYLNCTRRKTQNAQFSNNEKQFYRELLGNTSNTHKKEHAPVKNIPTSEQIHDFWSKIWAQPIQHNSSAEWIEADKRHLEKIPEMIFDSIPLDVFIHVLKKAHNWKSPGTDNIHNFYYKKFSSLHAALHRHINNFLEYPDTVPNFVSQGVTYMIPKDTEKNNPAKYRPITCLQTFYKIITSCISHVINEHITDNNIIAVEQKGCKKFSQGCKEQLIIDSIVMKHNIKQKTDLCTMYVDYQKAYDSVPHSWLTYILYHYKIHPTIIGFLKTVMQKWETKLRLGKLLETAPIQINRGIFQGDALSPLWFCLALNPLSNMLNLSDNGLPIVENNATLKLSHLMYMDDIKLYSNSISSLHQLADLTQKFSDDIHMAFGINKCKTFTMRNGKNIENNPYRLATGQIIDSLDKNNSYKYLGFEQSPQINQKDTKLHLTKLFKHRLNILMKSQLNSRNLVKSINTFAIPLLTYSFGIINWSKTDLTKLQRVINTTMSSHRKHHPRSCIQRMTLSREEGGRGLIDIRNLHNRQIATLRKFFFNISHHSALHKTIGLADKNYTPLNLQSTDIQNNEGIVRDEDKVSEWSRKSLHGRHRLDLQQPHVDMKASNAWLQRGELFPETEGFMIAIQDQIIDTANYQKFIIHRPNYSDLCRRCHSASETIQHITGACKSIAQTDYKHRHDQVAAIIHQALAIQTNLVTEKVQYYKYKPEAVLENSNFKLYWDRTIITDKTIYNNRPDITLHDKHNKSVYLIDIAVCNTHNLLTTHTEKIAKYTDLSIEIKSQWKVNHTRTIPIIISSTGVIPKTLHSSLSALKLNPLMYLLLQKAVILNTCRITRKFLNSENTELT

SEQ ID NO: 7237 - protein, 1365 aa, Hemaris fuciformis
METRSMKKRIGSLPGGDRRGALGAGAECLSIRTASGSELSRRAPTGSPETYATAETPSSSSSSPKSLFSSLPSSSPSQLYHISENSFSSSTSLLNIHSLAVDAVQEAVADKTAPTTGRTRARIKWTEEINKFIWRNYLIVTEMETKVRGYLDPLHSRFIEKFPHIDVSKQRIGDQKRAILRCKLLSDSTLQTIKDEVTNLLQNEKHLTTNSEIFTHQGSSQSTRMRWTDDINETILREYYKITKLETNKTAYRKPLHASIIEKFPQIINVSEQRISDQLRVILRNKLIRESRLEEIKQEIRVNLALLDMQIDDINTPSQLNATSDVQSSIVSESLNENVPPNHTAIASEEILNNKIRQTFEDIFQKYKFSNPTQRPFLPRQKSSKKFAHITSFLNTEIIPCYTSSDDNFIETHTILYCAAHTAALCNGSKIKDPTPTSTVSNTRIDRRPNWLKRLDSKIEYIRKEIGRFTQYMRGNISIKLMKHVEKIKHKYRIHSNYEDPNTTDNQFLDSLKQKLNATTNRRNRYLNCTRRKTQNAQFSNNEKQFYRELLDNTSNTHKTEHASVNHIPTSEQIHDFWSKIWAQPIQHNSSAEWIEADKRHLEKIPEMIFDSISLDVFIHVLKKAHNWKSPGTDNIHNFYYKKFSSLHAAFHRHINNFLEYPDTVPNFVSQGVTYMIPKDTEKNNPAKYRPITCLQTFYKLITSCISHVINEHITDNNIIAVEQKGCKKFSQGCKEQLIIDSIAMKHNIKQKTDLCTMYVDYQKAYDSVPHSWLTYILYHYKIHPTIIGFLKTVMQKWETKLRLGKLLETAPIQINRGIFQGDALSPLWFCLALNPLSNILNLSDNGLPIVANDATLKLSHLMYMDDIKLYSNSISSLHQLADLTQKFSDDIHMAFGINKCKTFTMRNGKNIENNPYRLATGQLIDSLDNNNSYKYLGFEQSHQINQKDTKLHLTKKFKHRLNILMKSQLNSRNLVKSINTFAIPLLTYSFGIIKWSKTDLIKLQRVINTTMSSHRKHHPRSCIQRMTLSREEGGRGLIDIRNLHNRQIATLRKFFSNTSHHSALHKTIGLADTNYTPLNLQSTDTQNNEEIVRDEDKVSEWSRKSLHGRHRLDLQQPHVDIKASNAWLQRGELFPETEGFMIAIQDQIIDTANYQKFIIHRPNYSDLCRRCHSASETIQHITGACKSIAQTDYKHRHDQVAAIIHQALAIQTNLVSEKVQYYKYKPEAVLENSNFKLYWDRTIITDKTIYNNRPDITLHDKYNKSVYLIDIAVCNTHNLLTTHTEKITKYTDLSIEIKSQWKVNHTRTIPIIISSTGVIPKTLHSSLSTLKLNPLIYLLLQKAVILNTCRLTRKFLNSENTELN

SEQ ID NO: 7238 - protein, 1365 aa, Hemaris fuciformis
METRSMKKRIGSLPGGDRRGALGAGAECLSIRTASGSELSRRAPTGSPETYATAETPSSSSSSPKSLFSSLPSSSPSQLYHISENSFSSSTSLLNIHSLAVDAVQEAVADKTAPTTGRTRARIKWTEEINKFIWRNYLIVTEMETKVRGYLDPLHSRFIQKFPQIDVSKQRIGDQKRAILRCKLLSDSTLQTIKDEVTNLLQNENHLTTNSEIFTHQGSSQSTRMRWTDDINETILREYYKITKLETNKTAYRKPLHASIIEKFPQIINVSEQRISDQLRVILRNKLIRESRLEEIKQEITVNLALLDMQIDDINTPLQLNATSDVQSSIVSESLNENVPPNHTAIASEEILNNKIRQTFEDIFQKYKFSNPTQRPFLPRQKSSKKFAHITSFLNTEIIPCYTSSDDNFIETHTILYCAAHTAALCNGSKIKDPTPTSTVSNTRIDRRPNWLKRLDSKIEYIRKEIGRFTQYMRGNISIKLMKHVEKIKHKYRIHSNYEDPNTTDNQFLDSLKQKLNATTNRRNRYLNCTRRKTQNAQFSNNEKQFYRELLDNTSNTHKTEHASVNHIPTSEQIHDFWSKIWAQPIQHNSSAEWIEADKRHLEKIPEMIFDSISLDVFIHVLKKAHNWKSPGTDNIHNFYYKKFSSLHAAFHRHINNFLEYPDTVPNFVSQGVTYMIPKDTEKNNPAKYRPITCLQTFYKLITSCISHVINEHITDNNIIAVEQKGCKKFSQGCKEQLIIDSIAMKHNIKQKTDLCTMYVDYQKAYDSVPHSWLTYILYHYKIHPTIIGFLKTVMQKWETKLRLGKLLETAPIQINRGIFQGDALSPLWFCLALNPLSNILNLSDNGLPIVANDATLKLSHLMYMDDIKLYSNSISSLHQLADLTQKFSDDIHMAFGINKCKTFTMRNGKNIENNPYRLATGQLIDSLDNNNSYKYLGFEQSHQINQKDTKLHLTKKFKHRLNILMKSQLNSRNLVKSINTFAIPLLTYSFGIIKWSKTDLIKLQRVINTTMSSHRKHHPRSCIQRMTLSREEGGRGLIDIRNLHNRQIATLRKFFSNTSHHSALHKTIGLADKNYTPLNLQSTDTQNNEEIVRDEDKVSEWSRKSLHGRHRLDLQQPHVDIKASNAWLQRGELFPETEGFMIAIQDQIIDTANYQKFIIHRPNYSDLCRRCHSASETIQHITGACKSIAQTDYKHRHDQVAAIIHQALAFQTNLVSEKVQYYKYKPEAVLENSNFKLYWDRTIITDKTIYNNRPDITLHDKHNKSVYLIDIAVCNTHNLLTTHTEKITKYTDLSIEIKSQWKVNHTRTIPIIISSTGVIPKTLHSSLSTLKLNPLIYLLLQKAVILNTCRLTRKFLNSENTELN

SEQ ID NO: 7239 - protein, 1365 aa, Hemaris fuciformis
METRSMKKRIGSLPGGDRRGALGAGAECLSIRTASGSELSRRAPTGSPETYATAETPSSSSSSPKSLFSSLPSSSPSQLYHISENSFSSSTSLLNIHSLAVDAVQEAVADKTAPTTGRTRARIKWTEEINKFIWRNYLIVTEMETKVRGYLDPLHSRFIEKFPHIDVSKQRIGDQKRAILRCKLLSDSTLQTIKDEVTNLLQNENHLTTNSEIFTQQGSSQSTRMRWTDDINETILREYYKITKLETNKTAYRKPLHASIIEKFPQIINVSEQRISDQLRVILRNKLIRESRLEEIKQEIRVNLALLDMQIDDINTPLQLNATSDVQSSIVSESLNENVPPNHTAIASEEILNNKIRQTFEDIFQKYKFSNPTQRPFLPRQKSSKKFAHITSFLNTEIIPCYTPSDDNFIETHTILYCAAHTAALCNGSKIKDPTPTSTVSNTRIDRRPNWLKRLDSKIEYIRKEIGRFTQYMRGNRSIKLMKHVEKIKHKYRIHSNYEDPNTTDNQFLDSLKQKLNATTNRRNRYLNCTRRKTQNAQFSNNEKQFYRELLDNTSNTHKTEHASVNHIPTSEQIHDFWSKIWAQPIQHNSSAEWIEADKRHLEKIPEMIFDSISLDVFIHVLKKAHNWKSPGTDNIHNFYYKKFSSLHAAFHRHINNFLEYPDTVPNFVSQGVTYMIPKDTEKNNPAKYRPITCLQTFYKLITSCISHVINEHITDNNIIAVEQKGCKKFSQACKEQLIIDSIAMKHNIKQKTDLCTMYVDYQKAYDSVPHSWLTYILYHYKIHPTIIGFLKTVMQKWETKLRLGKLLETAPIQINRGIFQGDALSPLWFCLALNPLSNILNLSDNGLPIVANDATFKLSHLMYMDDIKLYSNSISSLHQLADLTQKFSDDIHMAFGINKCKTFTMRNGKNIENNPYRLATGQLIDSLDNNNSYKYLGFEQSHQINQKDTKLHLTKKFKHRLNILMKSQLNSRNLVKSINTFAIPLLTYSFGIIKWSKTDLIKLQRIINTTMSSHRKHHPRSCIQRMTLSREEGGRGLIDIRNLHNRQIATLRKFFSNTSHHSALHKTIGLADNNYTPLNLQSTDTQNNEEIVRDEDKVSEWSRKSLHGRHRLDLQQPHVDIKASNAWLQRGELFPETEGFMIAIQDQIIDTANYQKFIIHRPNYSDLCRRCHSASETIQHITGACKSIAQTDYKHRHDQVAAIIHQALAIQTNLVSEKVQYYKYKPEAVLEDSNFKLYWDRTIITDKTIYNNRPDITLHDKHNKSVYLIDIAVCNTHNLLTTHTEKITKYTDLSIEIKSQWKVNHTRTIPIIISSTGVIPKTLHSSLSTLKLNPLIYLLLQKAVILNTCRLTRKFLNSENTELN

SEQ ID NO: 7240 - protein, 893 aa, Hemaris fuciformis
MRGNRSIKLMTHVEKIKHKYRIHSNYEDPNTTDNQFLDSLKQKLNATTNRRNRYLNCTRRKTQNAQFSNNEKQFYRELLGNTSNTHKKEHAPVKNIPTSEQIHDFWSKIWAQPIQHNSSAEWIEADKRHLEKIPEMIFDSIPLDVFIHVLKKAHNWKSPGTDNIHNFYYKKFSSLHAALHRHINNFLEYPDTVPNFVSQGVTYMIPKDTEKNNPAKYRPITCLQTFYKIITSCISHVINEHITDNNIIAVEQKGCKKFSQGCKEQLIIDSIVMKHNIKQKTDLCTMYVDYQKAYDSVPHSWLTYILYHYKIHPTIIGFLKTVMQKWETKLRLGKLLETAPIQINRGIFQGDALSPLWFCLALNPLSNMLNLSDNGLPIVENNTTLKLSHLMYMDDIKLYSNSISSLHQLADLTQKFSDDIHMAFGINKCKTFTMRNGKNIENNPYRLATGQIIDSLDKNNSYKYLGFEQSHQINQKDTKLHLTKQFKHRLNILMKSQLNSRNLVKSINTFAIPLLTYSFGIINWSKTDLTKLQRVINTTMSSHRKHHPRSCIQRMTLSREEGGRGLIDIRNLHNRQIATLRKLFFNISHHSALHKTIGLADKNYTPLNLQSTDIQNNEGIVRDEDKVSEWSRKSLHGRHRLDLQQPHVDMKASNAWLQRGELLPETEGFMIAIQDQIIDTANYQKFIIHRPNYSDLCRRCHSASETIQHITGACKSIAQTDYKHRHDQVAAIIHQALAIQTNLVTEKVQYYKYKPEAVLENSNFKLYWDRTIITDKTIYNNRPDITLHDKHNKSVYLIDIAVCNTHNLLTTHTEKIAKYTDLSIEIKSQWKVNHTRTIPIIISSTGVIPKTLHSSLSALKLNPLMYLLLQKAVILNTCRITRKFLNSENTELT

SEQ ID NO: 7241 - protein, 1377 aa, Idaea aversata
MELRSRKVSKGPLPGGDRRGTPGADAGRSSMQTIGGRELRRRAPTGSPEQCDSRPSPSSPSSTESLFSSIPSSPPSYLNSEHVSPISSPYSTNSAAVDVAQEAEATNPAPTTGQTRARLRWTKEMNEFIWRNYLYVTELDTKIRGYLDPLYTKFTEQFPEIKVSKQRIGDQKRAIIRNKLLPTATLEFIKNEVRVSLQTSTDQNSVTLTQPSTGSRLRWIDDINEAIIREYYKLTHIETNRTAYRKPLHTIITQQFPIISHVSEQRISDQRRVIINNKLISQDRLEEIKQEVRESLNIQYPDDRNDNNSSSLNSNTTPNSIETILFRTESSEIDTNNTLNNAQIPIGTQNEGLDSNPQFIDDTLDSKITKTFEDTYNKYIHTNPTQRPYIPKQKTSKKFAHIISFLNNSVIPKYEPNNDDFDKTHTLVYCAAYTANTCNGSKIKDYSQTETTIQPNNTTDKRPNWQKRLDIKIEILRKEIARLTHYINGNRNIRLISHVERIKHKYRTHSSYEEPNVTDGQFMDSLKQRLNATTSRRRRYLNCTNRKGQNTQFLSNEKKFYRELTSNTTNMQNSQTETLTNNPTPSADDLHRYWSKIWSQSTEHNQNANWIHTDKLKLENLPEMLFDYIPLDIFASVLKKTHNWKSPGTDNIHNYYYKKLTNLHPSLYHHINNFIKDPHTIPHFITQGLTYMISKDSDYTNPAKYRPITCLQTIYKIITGCISQIIYKHVTENNLLAEEQKGCRKFSQGCKEQLIIDSVAMRHNVKMKNDICSMYVDYQKAFDSVPHSWLVYILEHYKIHPLIIEFLKESMKHWHTTLRLGRSIQTDSIPIKCGIFQGDALSPLWFCLALNPLSNILNSSNSGIPIRIAENITDSNLTHLMFMDDIKLYSNSVPSLHSLADLTQMFSDDINMKFGIDKCKTFTLRKGQHVESNPYRLTPEQTIEPLMQNNTYKYLGFEQSHQIDQKHTKNQIITKYKHRLNILMKSQLTSRNLVKAINSFAIPILTYSFGIINWSKTDLLKLQRLINTTLTRHRKHHPRSCVQRMTLPREEGGRGFIDIANLHNQQIGNLRRYFLEKAQQSHLHQAVAQSDIRYTPLNLHSSDIQHNEQIVNNRDKIALWQNKSLHGRHRLDLQQPHVDIKASNAWLQRGELFPETEGFMIAIQDQVIDTANYQRFIIRRPNYPDSCRRCHSASETIQHITGACSAIAQTDYKHRHDQVAAIIHQSLAFQTKLITEKVPYYKYRPDAVLENSSFKLYWDRTIITDKTIYNNRPDLLLLDKQNKTVFLIDIAICNTHNLTTTHTEKIAKYVDLSIEIKTQWNVTQTITIPIVISSTGVIPKTLHTSLNSLNISPSTYLLMQKAVILNTCRLTRKFLNI

SEQ ID NO: 7242 - protein, 1377 aa, Idaea aversata
MELRSRKVSKGPLPGGDRRGTPGADAGRSSMQTIGGRELRRRAPTGSPEQCDSRPSPSSPSSTKSLFSSIPSSPPSYLNSEHVSPISSPYSTNSAAVDVAQEAEATNPAPTTGQTRARLRWTKEMNEFIWRNYLYVTELDTKIRGYLDPLYTKFTEQFPEIKVSKQRIGDQKRAIIRNKLLPTATLEFIKNEVRVSLQTSTDQNSVTLTQPSTGSRLRWTDDINEAIIREYYKLTHIETNRTAYRKPLHTIITQQFPIISHVSEQRISDQRRVIINNKLISQDRLEEIKQEVRESLNIQYPDDRNDNNSSSLNSNTTPNSIETILFRTESSEIDTNNTLNNAQIPIGTQNEGLDSNPQFIDDTLDSKITKTFEDTYNKYIHTNPTQRPYIPKQKTSKKFAHIISFLNNSVIPKYDPNNDDFDKTHTLVYCAAYTAATCNGSKIKDYSQTETTIQPNNTTDKRPNWQKRLDIKIEILRKEIARLTHYINGNRNIRLISHVERIKHKYRTHSSYEEPNVTDSQFMDSLKQRLNATTSRRRRYLNCTNRKGQNTQFLSNEKKFYRELTSNTTNMQNSQTETLTNNPTPSADDLHRYWSKIWSQSTEHNQNANWIHTDKLKLENLPEMLFDYIPLDIFASVLKKTHNWKSPGTDNIHNYYYKKLTNLHPSLYHHINNFIKDPHTIPHFITQGLTYMISKDSDYTNPAKYRPITCLQTIYKIITGCISQIIYKHVTENNLLAEEQKGCRKFSQGCKEQLIIDSVAMRHNVKMKNDICSMYVDYQKAFDSVPHSWLVYILEHYKIHPLIIEFLKESMKHWHTTLRLGRSIQTDSIPIKCGIFQGDALSPLWFCLALNPLSNILNSSNSGIPIRIAENITDSNLTHLMFMDDIKLYSNSVPSLHSLADLTQMFSDDINMKFGIDKCKTFTLRKGQHVESNPYRLTPEQTIEPLMQNNTYKYLGFEQSHQIDQKHTKNQIITKYKHRLNILMKSQLTSRNLVKAINSFAIPILTYSFGIINWSKTDLLKLQRLINTTLTRHRKHHPRSCVQRMTLPREEGGRGFIDIANLHNQQIGNLRRYFLEKAQQSHLHQAVAQSDIRYTPLNLHSSDIQHNEQIVNNRDKIALWQNKSLHGRHRLDLQQPHVDIKASNAWLQRGELFPETEGFMIAIQDQVIDTANYQRFIIRRPNYPDSCRRCHSASETIQHITGACSAIAQTDYKHRHDQVAAIIHQSLAFQTKLITEKVPYYKYRPDAVLENSSFKLYWDRTIITDKTIYNNRPDLLLLDKQKKTVFLIDIAICNTHNLTTTHTEKIAKYVDLSIEIKTQWNVTQTKTIPIVISSTGVIPKTLHTSLNSLNISPSTYLLMQKAVILNTCRLTRKFLNI

SEQ ID NO: 7243 - protein, 1372 aa, Idaea aversata
MELRSRKVSKGPLPGGDRRGTPGADAGRSSMQTIGGRELRRRAPTGSPEQCDSRPSPSSPSSTKSLFSSIPSSPPSYLNSEHVSPISSPYSTNFAAVDVAQETEATNPAPTTGQTRARLRWTKEMNEFIWRNYLYVTELDTKIRGYLDPLYTKFTEQFPEIKVSKQRIGDQKRAIIRNKLLPTATLEFIKNEVRVSLQTSTDQNSVTLTQPSTGSRLRWTDGINEAIIREYYKLTHIETNRTAYRKPLHTIITQQFPIISHVSEQRISDQRRVIINNKLISLEEIEVRESLNIQYPDDRNDNNSSSLNSNTTPNSIETILFRTESSEIDTNNTLNNAQIPIGTQNEGLDSNPQFIDDTLDSKITKTFEDTYNKYIHTNPTQRPYIPKQKTSKKFAHIISFLNNSVIPKYEPNNDDFDKTHTLVYCAAYTAATCNGSKIKDYSQTETTIQPNNTTDKRPNWQKRLDIKIEILRKEIARLTHYINGNRNIRLISHVERIKHKYRTHSSYEEPNVTDSQFMDSLKQRLNATTSRRRRYLNCTNRKGQNTQFLSNEKKFYRELTSNTTNMQNSQTETLTNNPTPSADDLHRYWSKIWSQSTEHNQNANWIHTDKLKLENLPEMLFDYIPLDIFASVLKKTHNWKSPGTDNIHNYYYKKLTNLHPSLYHHINNFIKDPHTIPHFITQGLTYMISKDFDYTNPAKYRPITCLQTIYKIITGCISQIIYKHVTENNLLAEEQKGCRKFSQGCKEQLIIDSVAMRHNVKMKNDICSMYVDYQKAFDSVPHSWLVYILEHYKIHPLIIEFLKESMKHWHTTLRLGRSIQTDSIPIKCGIFQGDALSPLWFCLALNPLSNILNSSNSGIPIRIAENITDSNLTHLMFMDDIKLYSNSVPSLHSLADLTQMFSDDINMKFGIDKCKTFTLRKGQHVESNPYRLTPEQTIEPLMQNNTYKYLGFEQSHQIDQKHTKNQIITKYKHRLNILMKSQLTSRNLVKAINSFAIPILTYSFGIINWSKTDLLKLQRLINTTLTRHRKHHPRSCVQRMTLPREEGGRGFIDIANLHNQQIGNLRRYFLEKAQQSHLHQAVAQSDIRYTPLNLHSSDIQHNEQIVNNRDKIALWQNKSLHGRHRLDLQQPHVDIKASNAWLQRGELFPETEGFMIAIQDQVIDTANYQRFIIRRPNYPDSCRRCHSASETIQHITGACSAIAQTDYKHRHDQVAAIIHQSLAFQTKLITEKVPYYKYRPDAVLENSSFKLYWDRTIITDKTIYNNRPDLLLLDKQKKTVFLIDIAICNTHNLTTTHTEKIAKYVDLSIEIKTQWNVTQTKTIPIVISSTGVIPKTLHTSLNSLNISPSTYLLMQKAVILNTCRLTRKFLNI

SEQ ID NO: 7244 - protein, 1377 aa, Idaea aversata
MELRSRKVSKGPLPGGDRRGTPGADAGRSSMQTIGGRELRRRAPTGSPEQCDSRPSPSSPSSTKSLFSSIPSSPPSYLNSEHVSPISSPYSTNSAAVDVAQEAEATNPAPTTGQTRARLRWTKEMNEFIWRNYLYITELDTKIRGYLDPLYTKFTEQFPEIKVSKQRIGDQKRAIIRNKLLPTATLEFIKNEVRVSLQTSTDQNSVTLTQPSTGSRLRWTDDINEAIIREYYKLTHIETNRTAYRKPLHTIITQQFPIISHVSEQRISDQRRVIINNKLISQDRLEEIKQEVRESLNIQYPDDRIDNNSSSLNSNTTPNSIETILFRTESSEIDTNNTLNNAQIPIGTQNEGLDSNPQFIDDTLDSKITKTFEDTYNKYIHTNPTQRPYIPKQKTSKKFAHIISFLNNSVIPKYEPNNDDFDKTHTLVYCAAYTAATCNGSKIKDYSQTETTIQPNNTTDKRPNWQKRLDIKIEILRKEIARLTHYINGNRNIRLISHVERIKHKYITHSSYEEPNVTDSQFMDSLKQRLNATTSRRRRYLNCTNRKGQNTQFLSNEKKFYRELTSNTTNMQNSQTETLTNNPTPSADDLHRYWSKIWSQSTEHNQNANWIHTDKLKLENLPEMLFDYIPLDIFASVLKKTHNWKSPGTDNIHNYYYKKLTNLHPSLYHHINNFIKDPHTIPHFITQGLTYMISKDSDYTNPAKYRPITCLQTIYKIITGCISQIIYKHVTENNLLAEEQKGCRKFSQGCKEQLIIDSVAMRHNVKMKNDICSMYVDYQKAFDSVPHSWLVYILEHYKIHPLIIEFLKESMKHWHTTLRLGRSIQTDSIPIKCGIFQGDALSPLWFCLALNPLSNILNSSNSGFPIRIAENITDSNLTHLMFMDDIKLYSNSVPSLHSLADLTQMFSDDINMKFGIDKCKTFTLRKGQHVESNPYRLTPEQTIEPLMQNNTYKYLGFEQSHQIDQKHTKNQIITKYKHRLNILMKSQLTSRNLVKAINSFAIPILTYSFGIINWSKTDLLKLQRLINTTLTRHRKHHPRSCVQRMTLPREEGGRGFIDIANLHNQQIGNLRRYFLEKAQQSHLHQAVAQSDIRYTPLNLHSSDIQHNEQIVNNRDKIALWQNKSLHGRHRLDLQQPHVDIKASNAWLQRGELFPETEGFMIAIQDQVIDTANYQRFIIRRPNYPDSCRRCHSASETIQHITGACSAIAQTDYKHRHDQVAAIIHQSLAFQTKLITEKVPYYKYRPDAVLENSSFKLYWDRTIITDKTIYNNRPDLLLLDKQKKTVFLIDIAICNTHNLTTTHTEKIAKYVDLSIEIKTQWNVTQTKTIPIVISSTGVIPKTLHTSLNSLNISPSTYLLMQKAVILNTCRLTRKFLNI

SEQ ID NO: 7245 - protein, 1253 aa, Idaea aversata
MNEFIWRNYLYVTELDTKIRGYLDPLYTKFTEQFPEIKVSKQRIGDQKRAIIRNKLLPTATLEFIKNEVRVSLQTSTDQNSVTLTQPSTGSRLRWTDGINEAIIREYYKLTHIETNRTAYRKPLHTIITQQFPIISHVSEQRISDQRRVIINNKLISQDRLEEIKQEVRESLNIQYPDDRNDNNSSSLNSNTTPNSIETILFRTESSEIDTNNTLNNAQIPIGTQNEGLDSNPQFIDDTLDSKITKTFEDTYNKYIHTNPTQRPYIPKQKTSKKFAHIISFLNNSVIPKYEPNNDDFDKTHTLVYCAAYTAATCNGSKIKDYSQTETTIQPNNTTDKRPNWQKRLDIKIEILRKEIPRLTHYINGNRNIRLISHVERIKHKYRTHSSYEEPNVTDSQFMDSLKQRLNATTSRRRRYLNCTNRKGQNTQFLSNEKKFYRELTSNTTNMQNSQTETLTNNPTPSADDLHRYWSKIWSQSTEHNQNANWIHTDKLKLENLPEMLFDYIPLDIFASVLKKTHNWKSPGTDNIHNYYYKKLTNLHPSLYHHINNFIKDPHTIPHFITQGLTYMISKDFDYTNPAKYRPITCLQTIYKIITGCISQIIYKHVTENNLLAEEQKGCRKFSQGCKEQLIIDSVAMRHNVKMKNDICSMYVDYQKAFDSVPHSWLVYILEHYKIHPLIIEFLKESMKHWHTTLRLGRSIQTDSIPIKCGIFQGDALSPLWFCLALNPLSNILNSSNSGIPIRIAENITDSNLTHLMFMDDIKLYSNSVPSLHSLADLTQMFSDDINMKFGIDKCKTFTLRKGQRVESNPYRLTPEQTIEPLMQNNTYKYLGFEQSHQIDQKHTKNQIITKYKHRLNILMKSQLTSRNLVKAINSFAIPILTYSFGIINWSKTDLLKLQRLINTTLTRHRKHHPRSCVQRMTLPREEGGRGFIDIANLHNQQIGNLRRYFLEKAQQSHLHQAVAQSDIRYTPLNLHSSDIQHNEQIVNNRDKIALWQNKSLHGRHRLDLQQPHVDIKASNAWLQRGELFPETEGFMIAIQDQVIDTANYQRFIIRRPNYPDSCRRCHSASETIQHITGACSAIAQTDYKHRHDQVAVIIHQSLAFQTKLITEKVPYYKYRPDAVLENSSFKLYWDRTIITDKTIYNNRPDLLLLDKQKKTVFLIDIAICNTHNLTTTHTEKIAKYVDLSIEIKTQWNVTQTKTIPIVISSTGVIPKTLHTSLNSLNISPSTYLLMQKAVILNTCRLTRKFLNI

SEQ ID NO: 7246 - protein, 1377 aa, Idaea aversata
MELRSRKVSKGPLPGGDRRGTPGADAGRSSMQTIGGRELRRRAPTGSPEQCDSRPSPSSPSSTKSLFSSIPSSPPSYLNSEHVSPISSPYSTNSAAVDVAQEAEATNPAPTTGQTRARLRWTKEMNEFIWRNYLYVTELDTKIRGYLDPLYTKFTEQFPEIKVSKQRIGDQKRAIIRNKLLPTATLEFIKNEVRVSLQTSTDQNSVTLTQPSTGSRLRWTDDINEAIIREYYKLTHIETNRTAYRKPLHTIITQQFPIISHVSEQRISDQRRVIINNKLISQDRLEEIKQEVRESLNIQYPDDRNDNNSSSLNSNTTPNSIETILFRTESSEIDTNNTLNNAQIPIGTQNEGLDSNPQFIDDTLDSKITKTFEDTYNKYIHTNPTQRPYIPNQKTSKKFAHIISFLNNSVIPKYEPNNDDFDKTHTLVYCAAYTAATCNGSKIKDYSQTETTIQPNNTTDKRPKWQKRLDIKIEILRKEIARLTHYINGNRNIRLILHVERIKHKYRTHSSYEEPNVTDSQFMDSLKQRLNATTSRRRRYLNCTNRKGQNTQFLSNEKKFYREITSNTTNMQNSQTETLTNNPTPSADDLHRYWSKIWSQSTEHNQNANWIHTDKLKLENLPEMLFDYIPLDIFASVLKKTHNWKSPGTDNIHNYYYKKLTNLHPSLYHHINNFIKDPHTIPHFITQGLTYMISKDSDYTNPAKYRPITCLQTIYKIITGCISQIIYKHVTENNLLAEEQKGCRKFSQGCKEQLIIDSVAMRHNVKMKNDICSMYVDYQKAFDSVPHSWLVYILEHYKIHPLIIEFLKESMKHWHTTLRLGRSIQTDSIPIKCGIFQGDALSPLWFCLALNPLSNILNSSNSGIPIRIAENITDSNLTHLMFMDDIKLYSNSVPSLHSLADLTQMFSDDINMKFGIDKCKTFTLRKGQHVESNPYRLTLEQTIEPLMQNNTYKYLGFEQSHQIDQKHTKNQIITKYKHRLNILMKSQLTSRNLVKAINSFAIPILTYSFGIINWSKTDLLKLQRLINTNLTRHRKHHPRSCVQRMTLPREEGGRGFIDITNLHNQQIGNLRRYFLEKAQQSHLHQAVAQSDIRYTPLNLHSSDIQHNEQIVNNRDKIALWQNKSLHGRHRLDLQQPHVDIKASNAWLQRGELFPETEGFMIAIQDQVIDTANYQRFIIRRPNYPDSCRRCHSASETIQHITGACSAIAQTDYKHRHDQVAAIIHQSLAFQTKLITEKVPYYKYRPDAVLENSSFKLYWDRTIITDKTIYNNRPDLLLLDKQKKTVFLIDIAICNTHNLTTTHTEKIAKYVDLSIEIKTQWNVTQTKTIPIVISSTGVIPKTLHTSLNSLNISPSTYLLMQKAVILNTCRLTRKFLNI

SEQ ID NO: 7247 - protein, 855 aa, Idaea aversata
MDSLKQRLNATTSRRRRYLNCTNRKGQNTQFLSNEKKFYRELTSNTTNMQNSQTETLTNNPTPSADDLHRYWSKIWSQSTEHNQNANWIHTDKLKLENLPEMLFDYIPLDIFASVLKKTHNWKSPGTDNIHNYYYKKLTNLHPSLYHHINNFIKDPHTIPHFITQGLTYMISKDSDYTNPAKYRPITCLQTIYKIITGCISQIIYKHVTENNLLAEEQKGCRKFSQGCKEQLIIDSVAMRHNVKMNNDICSMYVDYQKAFDSVPHSWLVYILEHYKIHPLIIEFLKESMKHWHTTLRLGRSIQTDSIPIKCGIFQGDALSPLWFCLALNPLSNILNSSNSGIPIRIAENITDSNLTHLMFMDDIKLYSNSVPSLHSLADLTQMFSDDINMKFGIDKCKTFTLRKGQHVESNPYRLTPEQTIEPLMQNNTYKYLGFEQSHQIDQKHTKNQIITKYKHRHNILMKSQLTSRNLVKAINSFAIPILTYSFGIINWSKTDLLKLQRLINTTLTRHRKHHPRSCVQRMTLPREEGGRGFIDIANLHNQQIGNLRRYFLEKAQQSHLHQAVAQSDIRYTPLNLHSSDIQHNEQIVNNRDKIALWQNISLHGRHRLDLQQPHVDIKASNAWLQRGELFPETEGFMIAIQDQVIDTANYQRFIIRRSNYPDSCRRCHSASETIQHITGACSAIAQTDYKHRHDQVAAIIHQSLAFQTKLITEKVPYYKYRPDAVLENSSFKLYWDRTIITDKTIYNNRPDLLLLDKQKKTVFLIDIAICNTHNLTTTHTEKIAKYVDLSIEIKTQWNVTQTKTIPIVISSTGVIPKTLHTSLNSLNISPSTYLLMQKAVILNTCRLTRKFLNI

SEQ ID NO: 7248 - protein, 1296 aa, Sesamia nonagrioides
MIIIIIIITATVDVVQEAAADNPVPTIGQARARLRWTREINEFIWRTYLQITDLETKIRGYLDPLYAKFTQRFPEIKVSKQRLGDQKRAILRNKLLPETTLESIKNEVRINLQNICHTQNTIASTQPLLAKSQQPINTTTRLRWADDINEAIIKEYFKITHLETNKTAYRKQLHTVVTQQFPSIAHVSEQRIADQRRVIINNKLITDERLEEIKREIRDTLNMQPTQNTQHDDTIESTININTHPNNLHSSSDFNQTDLQITMGNTQTSVDEAISTTFVDESLDTKIGKTFEDAYNKYSLTDPTNRPFIPKQKTSKKFAHIITYLNNTVLPRYSSNEDNFQKTHTLIYCAAYTAAICNGTKLKEQTISTQTPTQQRNTAADRRPKWLKRLDIKIEIIRKDIGRMTQYINGNRHSRLITHIERIKHKYRTHSSYEEPNITNEQFMDTIKQKLSAVKSRRHRYLNCTKRKDQNTQFTNNERQFYRTLTTDTTNTQHRQQTTNRPNPSPEQLHTYWSNIWSNTSEHNHTATWIQDDKQNLENVTDMSYTTIPLEVFISVINKAHNWKTPGTDHIHNYYYKKLTCLHPAIYNHINNFIKYPQNIPEFITQGLTYMLPKDTDYINPAKYRPITCLQTIYKLTTGCIAEIIYKHTVQNNILVEEQKGCRKYSQGCKEQLTIDAIAMKHNANSKNDICTMYIDYQKAFDSVPHSWLLYILQHYKIHPEIINFLTESMKHWNTKLKVGKSIETDPIFIKRGIYQGDALSPLWFCLALNPLSNLLNSSDSGLTIRNNETPDNFKLTHLLFMDDIKLYSNSISGLHSLADLTQTFSDDINMSFGIDKCKTFTLRNGKQVDSNPYVLDSGQAIDPLSQNDTYKYLGFEQSHQIDQKQTKNKIITKYKHRLNMLTKSQLTSRNLIKSINSFAIPILTYSFGIINWTKTDLTKLQRCINTTLTKNRKHHPRSCVQRLTLPRDEGGRGLIDIENLHNKQITNLRKFFIQKAQQSPLHKVITQTDKKITPLNLHAIDPQTNERITTKAEKIAAWERKSLHGRHRLDLQQPHVDIKASNAWLRRGELFPETEGFMIAIQDQIIDTANYQKFIIRRPNYNDSCRRCHGASETIQHITGACRAIAQTDYKHRHDQVAAIIHQSLAIQTKLITDKVPYYKYKPQAVLENNNFKLYWDRTIITDKTIHNNRPDITMVDKENKLVYIIDIAICNTHNLTSTHTEKIAKYTDLSIELKTQWNITHTKTIPIIISSTGVIPKTLHNSLNTLNISPSTYLLLQKAVILNTCRLTRKFLNT

SEQ ID NO: 7249 - protein, 1376 aa, Sesamia nonagrioides
METRAKKKLRIGSLPGGDRRGAPGADAGRSSIRAIGGSELSQRAPTGSPEQGYSRPSSSVSLFPSLPSSPFSCLSYNTDYSSISPPISINSATVDVVQEAVADNPVPTTGQARARLRWTREMNEFIWRTYLQITDLETKIRGYLDPLYAKFTQRFPEIKVPKQRLGDQKRAILRNKLLPETTLESIKNEVRINLQNICHTQNTIALTQPFLAESQQPINTTTRLRWTDDINEAIIKEYFKITHLETNRTAYRKQLHTVITQQFPSIAHVSEQRIADQRRVIINNKLITDERLEEIKREIRDTLHMQPTQNTQHVDTIESTINTYPNNLHSTSDLNQTDLQITIGNTQTSLDETISTTFVDESLDTKIGKTFEEIYNTYSLTDPTNRPFIPKQKTSKKFAHIITYLNTTVLPRYSSNEDNFQKTHTLIYCAAYTAAICNGTKIKEQAISTQTSTQQRNTASDRRPKWLKRLDIKIEIIRKDIGRMTQYINGNRHTRLITHIERIKHKYRTHSSYEEPNITHEQFIDTLKQKLSAVKSRRQRYLNCTKRKDQNTQFTNNERQFYRTLTTDTTNTQHRQQTINRPNPTPEQLHTYWSNIWSNTSEHNHTATWIQDDKQNLENITDMPFTTIPLEVFISVTNKAHNWKTPGTDHIHNYYYKKLTCLHPAIYNHINNFIKYPQNIPEFITQGLTYMLPKDTDYINPAKYRPITCLQTIYKLTTGCIAEIIYKHTVQNNILAEEQKGCRKYSQGCKEHLTIDAIAMKHNANSKNDICTMYIDYQKAFDSVPHSWLLYILQHYKIHPEIINFLTESMKHWNTKLKVGKSIETDPILIKRGIYQGDALSPLWFCLALNPLSNLLNSSDSGLTIKNNETPDNFKLTHLLFMDDIKLYSNSISGLHSLADLTQTFSNDINMSFGIDKCKTFTLRNGKHVDSNPYVLDSGQAIDPLSQNDTYRYLGFEQLHQIDQKQTKNKIITKYKHRLNMLTKSQLTSRNLIKSINSFAIPILTYSFGIINWTKTDLTKLQRCINTTLTKNRKHHPRSCVQRLTLPRDEGGRGLVDIENLHNKQITNLRKFFIQKAQQSPLHKVITQIDKKITPLNLHAIDPQTNERITNKAEKIAAWQRKSLHGRHRFDLQQPHVDIKASNAWLRRGELFPETEGFMIAIQDQVIDTANYQKFIIRRPNYNDSCRRCHGASETIQHITGACRAIAQTDYKHRHDQVAAIIHQSLAIQTKLITDKVPYYKYKPQAVLENNNFKLYWDRTIITDKTIYNNRPDITMVDKENKLAYIIDIAVCNTHNLTSTHTEKIAKYTDLSIELKTQWNITHTKTIPIIISSTGVIPKTLHNCLNTLNISPSTYLLLQKAVILNTCRLTRKFLNT

SEQ ID NO: 7250 - protein, 1315 aa, Sesamia nonagrioides
METRAKRKLRIGSLPGGDRRGAPGADAGRSSIRAIGGSELSQRAPTGSPEQGYSRPSSSISLFPSLPSSPLSYLNYNTDYSSISPPSSINSATVDVVQEAAADNPVPTIGQARARLRWTREINEFIWRTYLQITDLETKIRGYLDPLYAKFTQRFPEIKVSKQRLGDQKRAILRNKLLPETTLESIKNEVRINLQNICHTQNTIASTQPLLAESQQPINTTTRLRWADDINEAIIKEYFKITHLETNKTAYRKQLHTVVTQQFPSIAHVSEQRIADQRRVIINNKLITDERLEEIKREIRDTLNMQPTQNTQHDDTIESTININTHPNNLHSSSDFNQTDLQITMGNTQTSVDEAISTTFVDESLDTKIGKTFEDAYNKYSITDPTNRPFIPKQKTSKKFAHIITYLNNTVLPRYSSNEDNFQKTHTLIYCAAYTAAICNGTKLKEQTISTQTPTQQRNTAADRRPKWLKRLDIKIEIIRKDIGRMTQYINGNRHSRLITHIERIKHKYRTHSSYEEPNITNEQFMDTIKQKLSAVKSRRHRYLNCTKRKDQNTQFTNNERQFYRTLTTDTTNTQHRQQTTNRPNPTPEQLHTYWSNIWSNTSEHNHTATWIQDDKQNLENVTDMSYTTIPLEVFISVINKAHNWKTPGTDHIHNYYYKKLTCLHPAIYNHINNFIKYPQNIPEFITQGLTYMLPKDTDYINPAKYRPITCLQTIYKLTTSCIAEIIYKHTVQNNILLEEQKGCRKYSQGCKEQLTIDAIAMKHNANSKNDICTMYIDYQKAFDSVPHSWLLYILQHYKIHPEIINFLTESMKHWNTKLKVGKSIETDPIFIKRGIYQGDALSPLWFCLALNPLSNLLNSSDSGLTIRNNETPDNFKLTHLLFMDDIKLYSNSISGLHSLADLTQTFSDDINMSFGIDKCKTFTLRNGKQVDSNPYVLDSGQAIDPLSQNDTYKYLGFEQSHQIDQKQTKNKIITKYKHRLNMLTKSQLTSRNLIKSINSFAIPILTYSFGIINWTKTDLTKLQRCINTTLTKNRKHHPRSCVQRLTLPREEGGRGLIDIENLHNKQITNLRKFFIQKAQQSPLHKVITQTDKKITPLNLHAIDPQTNERITTKAEKIAAWERKSLHGRHRLDLQQPHVDIKASNAWLRRGELFPETEGFMIAIQDQIIDTANYQKFIIRRPNYNDSCRRCHGASETIQHITGACRAIAQTDYKHRHDQVAAIIHQSLAIQTKLITDKVPYYKYKPQAVLENNNFKLYWDRTIITDKTIHNNRPDITMVDKENKLVYIIDIAICNTHNLTSTHTEKIAKYTDLSL

SEQ ID NO: 7251 - protein, 1378 aa, Sesamia nonagrioides
METRAKRKLRIGSLPGGDRRGAPGADAGRSSIRAIGGSELSQRAPTGSPEQGYSRPSSSISLFPSLPSSPLSYLNYNTDYSSISPTSSINSATVDVVQEAAADNPVPTTGQARARLRWTREMNEFIWRTYLQITDLETKIRGYLDPLYAKFTQRFPEIKVSKQRLGDQKRAILRNKLLPETTLESIKNEVRINLQNICHTQNTIASTQPLLAESQQPINTTTRLRWADDINEAIIKEYFKITHLETNKTAYRKQLHTVVTQQFPSIAHVSEQRIADQRRVIINNKLITDERLEEIKREIRDTLNMQPTQNTQHDDTIESTININTHPNNLHSSSDFNQTDLQITMGNTQTSVDEAISTTFVDESLDTKIGKTFEEAYNKYSLTDPTNRPFIPKQKTSKKFAHIITYLNNTVVPRYSSNEDNFQKTHTLIYCTAYTAAICNGTKLKEQTISTQTSTQQRNTAADRRPKWLKRLDIKIEIIRKDIGRMTQYINGNRHSRLITHIERIKHKYRTHSSYEEPNITNEQFMDTIKQKLSAVKSRRHRYLNCTKRKDQNTQFTNNERQFYRTLTTDTTNTQHRQQTTNRPNPTPEQLHTYWSNIWSNTSEHNHTATWIQDDKQNLENVTDMSYTTIPLEVFISVINKAHNWKTPGTDHIHNYYYKKLTCLHPAIYNHINNFIKYPQNIPEFITQGLTYMLPKDTDYINPAKYRPITCLQTIYKLTTGCIAEIIYKHTVQNNILVEEQKGCRKYSQGCKEQLTIDAIAMKHNANSKNDICTMYIDYQKAFDSVPHSWLLYILQHYKIHPEIINFLTESMKHWNTKLKVGKSIETDPIFIKRGIYQGDALSPLWFCLALNPLSNLLNSSDSGLTIRNNETPDNFKLTHLLFMDDIKLYSNSISGLHSLADLTQTFSDDINMSFGIDKCKTFTLRNGKQVDSNPYVLDSGQAIDPLSQNDTYKYLGFEQSHQIDQKQTKNKIITKYKHRLNMLTKSQLTSRNLIKSINSFAIPILTYSFGIINWTKTDLTKLQRCINTTLTKNRKHHPRSCVQRITLPRDEGGRGLIDIENLHNKQITNLRKFFIRKAQQSPLHKVITQTDKKITPLNLHAIDPQTNERITTKAEKIAAWERKSLHGRHRLDLQQPHVDIKASNAWLRRGELFPETEGFMIAIQDQIIDTANYQKFIIRRPNYNDSCRRCHGASETIQHITGACRAIAQTDYKHRHDQVAAIIHQSLAIQTKLITDKVPYYKYKPQAVLENNNFKLYWDRTIITDKTIHNNRPDITMVDKENKLVYIIDIAICNTHNLTSTHTEKIAKYTDLSIELKTQWNITHTKTIPIIISSTGVIPKTLHNSLNTLNISPSTYLLLQKAVILNTCRLTRKFLNT

SEQ ID NO: 7252 - protein, 1305 aa, Sesamia nonagrioides
METRAKRKLRIGSLPGGDRRGAPGADAGRSSIRAIGGSELSQRAPTGSPEQGYSRPSSSISLFPSLPSSPLSYLNYNTDYSSISPPSSINSATVDVVQEAAADNPVPTIGQARARLRWTREINEFIWRTYLQITDLETKIRGYLDPLYAKFTQRFPEIKVSKQRLGDQKRAILRNKLLPETTLESIKNEVRINLQNICHTQNTIASTQPLLAKSQQPINTTTRLRWADDINEAIIKEYFKITHLETNKTAYRKQLHTVVTQQFPSIAHVSEQRIADQRRVIINNKLITDERLEEIKREIRDTLNMQPTQNTQHDDTIESTININTHPNNLHSSSDFNQTDLQITMGNTQTSVDEAISTTFVDESLDTKIGKTFEDAYNKYSLTDPTNRPFIPKQKTSKKFAHIITYLNNTVLPRYSSNEDNFQKTHTLIYCAAYTAAICNGTKLKEQTISTQTPTQQRNTAADRRPKWLKRLDIKIEIIRKDIGRMTQYINGNRHSRLITHIERIKHKYRTHSSYEEPNITNEQFMDTIKQKLSAVKSRRHRYLNCTKRKDQNTQFTNNERQFYRTLTTDTTNTQHRQQTTNRHNPTPEQLHTYWSNIWSNTSEHNHTATWIQDDKQNLENVTDMSYTTIPLEVFISVINKAHNWKTPGTDHIHNYYYKKLTCLHPAIYNHINNFIKYPQNIPEFITQGLTYMLPKDTDYINPAKYRPITCLQTIYKLTTGCIAEIIYKHTVQNNILVEEQKGCRKYSQGCKEQLTIDAIAMKHNANSKNDICTMYIDYQKAFDSVPHSWLLYILQHYKIHPEIINFLTESMKHWNTKLKVGKSIETDPIFIKRGIYQGDALSPLWFCLALNPLSNLLNSSDSGLTIRNNETPDNFKLTHLLFMDDIKLYSNSISGLHSLADLTQTFSDDINMSFGIDKCKTFTLRNGKQVDSNPYVLDSGQAIDPLSQNDTYKYLGFEQSHQIDQKQTKNKIITKYKHRLNMLTKSQLTSRNLIKSINSFAIPILTYSFGIINWTKTDLTKLQRCINTTLTKNRKHHPRSCVQRLTLPRDEGGRGLIDIENLHNKQITNLRKFFIQKAQQSPLHKVITQTDKKITPLNLHAIDPQTNERITTKAEKIAAWERKSLHGRHRLDLQQPHVDIKASNAWLRRGELFPETEGFMIAIQDQIIDTANYQKFIIRRPNYNDSCRRCHGASETIQHITGACRAIAQTDYKHRHDQVAAIIHQSLAIQTKLITDKVPYYKYKPQAVLENNNFKLYWDRTIITDKTIHNNRPDITMVDKENKLVYIIDIAICNTHNVQLRECS

SEQ ID NO: 7253 - protein, 893 aa, Sesamia nonagrioides
MTQYINGNRHTRLITHIERIKHKYRTHSSYEEPNITNEQFIDTLKQKLSAVKSRRQRYLNCTKRKDQNTQFTNNERQFYRTLTTDTTNTQHRQQTINKPNPTPEQLHTYWSNIWSNTSEHNHTATWIQDDKQNLENITDMPFTTIPLEVFISVTNKAHNWKTPGTDHIHNYYYKKLTCLHPAIYNHINNFIKYPQNIPEFITQGLTYMLPKDTDYINPAKYRPITCLQTIYKLTTGCIAEIIYKHTVQNNILAEEQKGCRKYSQGCKEQLTIDAIAMKHNANSKNDICTMYIDYQKAFDSVPHSWLLYILQHYKIHPEIINFLTESMKHWNTRLKVGKSIETDPILIKRGIYQGDALSPLWFCLALNPLSNLLNSSDSGLTIKNNETLDNFKLTHLLFMDDIKLYSNSISGLHSLADLTQTFSNDINMSFGIDKCKTFTLRNGKHVDCNPYVLDSGQAIDPLSQNDTYKYLGFEQLHQIDQKQTKNKIITKYKHRLNMLTKSQLMSRNLIKAINSFAIPILTYSFGIINWTKTDLTKLQRCINTTLTKNRKHHPRSCVQRLTLPRDEGGRGLVDIENLHNKQITNLRKFFIQKAQQSPLHKVITQIDKKITPLNLHAIDPQTNERITNKAEKIAAWQRKSLHGRHRFDLQQPHVDIKASNAWLRRGELFPETEGFMIAIQDQVIDTANYQKFIIRRPNYNDSCRRCHGASETIQHITGACRAIAQTDYKHRHDQVAAIIHQSLAIQTKLITDKVPYYKYKPQAVLENNNFKLYWDRTIITDKTIYNNRPDITMVDKENKLAYIIDIAVCNTHNLTSTHTEKIAKYTDLSIELKTQWNITHTKTIPIIISSTGVIPKTLHNSLNTLNISPSTYLLLQKAVILNTCRLTRKFLNT

SEQ ID NO: 7254 - protein, 1377 aa, Sesamia nonagrioides
METRAKRKLRIGSLPGGDRRGAPGADAGRSSIRAIGGSELSQRAPTGSPEQGYSRPSSSISLFPSLPSSPLSYLNYNTDYSSISPPSSINSATDVVQEAAADNPVPTTGQARARLRWTREMNEFIWRTYLQITDLETKIRGYLDPLYAKFTQRFPEIKVSKQRLGDQKRAILRNKLLPETTLESIKNEVRINLQNICHTQNTIASTQPLLAESQQPINTTTRLRWADDINEAIIKEYFKITHLETNKTAYRKQLHTVVTQQFPSIAHVSEQRIADQRRVIINNKLITDERLEEIKREIRDTLNMQPTQNTQHDDTIESTININIHPNNLHSSSDFNQTDLQITMGNTQTSVNEAISTTFVDESLDTKIGKTFEEAYNKYSLTDPTNRPFIPKQKTSKKFAHIITYLNNTVLPRYSSNEDNFQKTHTLIYCTAYTAAICNGTKLKEQTISTQTSTQQRNTAADRRPKWLKRLDIKIEIIRKDIGRMTQYINGNRHSRLITHIERIKHKYRTHSSYEEPNITNEQFMDTIKQKLSAVKSRRHRYLNCTKRKDQNTQFTNNERQFYRTLTTDTTNTQHRQQTTNRPNPTPEQLHTYWSNIWSNTSEHNHTATWIQDDKQNLENVTDMSYTTIPLEVFISVINKAHNWKTPGTDHIHNYYYKKLTCLHPAIYNHINNFIKYPQNIPEFITQGLTYMLPKDTDYINPTKYRPITCLQTIYKLTTGCIAEIIYKHTVQNNILVEEQKGCRKYSQGCKEQLTIDAIAMKHNANSKNDICTMYIDYQKAFDSVPHSWLLYILQHYKIHPEIINFLTESMKHWNTKLKVGKSIETDPIFIKRGIYQGDALSPLWFCLALNPLSNLLNSSDSGLTITNNETQDNFKLTHLLFMDDIKLYSNSISGLHSLADLTQTFSDDINMSFGIDKCKTFTLRNGKQVDSNPYVLDSGQAIDPLSQNDTYKYLGFEQSHQIDQKQTKNKIITKYKHRLNMLTKSQLTSRNLIKSINSFAIPILTYSFGIINWTKTDLTKLQRCINTTLTKNRKHHPRSCVQRLTLPRDEGGRGLIDIENLHNKQITNLRKFFIQKAQQSPLHKVITQTDKKLTPLNLHAIDPQTNERITTKAEKIAAWERKSLHGRHRLDLQQPHVDIKASNAWLRRGELFPETEGFMIAIQDQIIDTANYQKFIIRRPNYNDSCRRCHGASETIQHITGACRAIAQTDYKHRHDQVAAIIHQSLAIQTKLITDKVPYYKYKPQAVLENNNFKLYWDRTIITDKTIHNNRPDITMVDKENKLVYIIDIAICNTHNLTSTHTEKIAKYTDLSIELKTQWNITLTKTIPIIISSTGVIPKTLHNSLNTLNISPSTYLLLQKAVILNTCRLTRKFLNT

SEQ ID NO: 7255 - protein, 1378 aa, Sesamia nonagrioides
METRAKRKLRIGSLPGGDRRGAPGADAGRSSIRAIGGSELSQRAPTGSPEQGYSRPSSSISLFPSLPSSPLSYLKYNTDYSSNSPPSSINSATVDVVQEAAADNPVPTTGQARARLRWTREMNEFIWRTYLQITDLETKIRGYLDPLYAKFTQRFPEIKVSKQRLGDQKRAILRNKLLPETTLESIKNEVRINLQNICHTQNTIASTQPLLAESQQPINTTTRLRWADDVNEAIIKEYFKITHLETNKTAYRKQLHTVVTQQFPSIAHVSEQRIADQRRVIINNKLITDERLEEIKREIRDTLNMQPTQNTQHDDTIESTININTHPNNLHSSSDFNQTHLQITMGNTQTSVDEAISTTFVDESLDTKIGKTFEEAYNKYSLTDPTNRPFIPKQKTSKKFAHIITYLNNTVLPRYSSNEDNFQKTHTLIYCTAYTAAICNGTKLKEQTISTQTSTQQRNTAADRRPKWLKRLDIKIEIIRKDIGRMTQYINGNRHSRLITHIERIKHKYRTHSSYEEPNITNEQFMDTIKQKLSAVKSRRHRYLNCTKRKDQNTQFTNNERQFYRTLTTDTTNTQHRQQTTNRPNPTPEQLHTYWSNIWSNTSEHNHTATWIQDDKQNLENVTDMSYSTIPLEVFISVINKAHNWKTPGTDHIHNYYYKKLTCLHPAIYNHINNFIKYPQNIPEFITQGLTYMLPKDTDYINPAKYRPITCLQTIYKLTTGCIAEIIYKHTVQNNILVEEQKGCRKYSQGCKEQLTIDAIAMKHNANSKNDICTMYIDYQKAFDSVPHSWLLYILQHYKIHPEIINFLTESMKHWNTKLKVGKSIETDPIFIKRGIYQGDALSPLWFCLALNPLSNLLNSSDSGLTIRNNETPDNFKLTHLLFMDDIKLYSNSISGLHSLADLTQTFSDARNMSFGIDKCKTFTLRNGKEVDNNPYVLDSGQAIDPLSQNDTYKYLGFEQSHQIDQKQTKNKIITKYKHRLNMLTKSQLTSRNLIKSINSFAIPILTYSFGIINWTKTDLTKLQRCINTTLTKNRKHHPRSCVQRLTLPRDEGGRGLIDIENLHNKQITNLRKFFIQKAQQSPLHKVITQTDKKITPLNLHAIDPQTNERITTKAEKIAAWERKSLHGRHRLDLQQPHVDIKASNAWLRRGELFPETEGFMIAIQDQIIDTANYQKFIIRRPNYNDSCRRCHGASETIQHITGACRAIAQTDYKHRHDQVAAIIHQSLAIQTKLITDKVPYYKYKPQAVLENNNFKLYWDRTIITDKTIHNNRPDITMVDKENKLVYIIDIAICNTHNLTSTHTEKIAKYTDLSIELKTQWNITHTKTIPIIISSTGVIPKTLHNSLNTLNISPSTYLLLQKAVILNTCRLTRKFLNT

SEQ ID NO: 7256 - protein, 1072 aa, Sesamia nonagrioides
MQPTQNTQHVDTIESTINTYPNNLHSTSDLNQTDLQITIGNTQTSLDETISTTFVDESLDTKIGKTFEEIYNTYSLTDPTNRPFIPKQKTSKKFAHIITYLNTTVLPRYSSNEDNFQKTHTLIYCAAYTAAICNGTKIKEQAISTQTSTQQRNTASDRRPKWLKRLDIKIEIIRKDIGRMTQYINGNRHTRLITHIERIKHKYRTHSSYEEPNITHEQFIDTLKQKLSAVKSRRQRYLNCTKRKDQNTQFTNNERQFYRTLTTDTTNTQHRQQTINRPNPTPEQLHTYWSNIWSNTSEHNHTATWIQDDKQNLENITDMPFTTIPLEVFISVTNKAHNWKTPGTDHIHNYYYKKLTCLHPAIYNHINNFIKYPQNIPEFITQGLTYMLPKDTDYINPAKYRPITCLQTIYKLTTGCIAEIIYKHTVQNNILAEEQKGCRKYSQGCKEHLTIDAIAMKHNANSKNDICTMYIDYQKAFDSVPHSWLLYILQHYKIHPEIINFLTESMKHWNTKLKVGKSIETDPILIKRGNYQGDALSPLWFCLALNPLSNLLNSSDSGLTIKNNETPDNFKLTHLLFMDDIKLYSNSISGLHSLADLTQTFSNDINMSFGIDKCKTFTLRNGKHVDSNPYVLDSGQAIDPLSQNDTYRYLGFEQLHQIDQKQTKNKIITKYKHRLNMLTKSQLTSRNLIKSINSFAIPILTYSFGIINWTKTDLTKLQRCINTTLTKNRKHHPRSCVQRLTLLRDEGGRGLVDIENLHNKQITNLRKFFIQKAQQSPLHKVITQIDKKITPLNLHAIDPQTNERITNKAEKIAAWQRKSLHGRHRFDLQQPHVDIKASNAWLRRGELFPETEGFMIAIQDQVIDTANYQKFIIRRPNYNDSCRRCHGASETIQHITGACRAIAQTDYKHRHDQVAAIIHQSLAIQTKLITDKVPYYKYKPQAVLENNNFKLYWDRTIITDKTIYNNRPDITMVDKENKLAYIIDIAVCNTHNLTSTHTEKIAKYTDLSIELKTQWNITHTKTIPIIISSTGVIPKTLHNCLNTLNISPSTYLLLQKAVILNTCRLTRKFLNT

SEQ ID NO: 7257 - protein, 1378 aa, Sesamia nonagrioides
METRAKRKLRIGSLPGGDRRGAPGADAGRSSIRAIGGSELSQRAPTGSPEQGYSRPSSSISLFPSLPSSPLSYLNYNTDYSSISPPSSINSATVDVVQEAAADNPVPTIGQARARLRWTREINEFIWRTYLQITDLETKIRGYLDPLYAKFTQRFPEIKVSKQRLGDQKRAILRNKLLPETTLESIKNEVRINLQNICHTQNTIASTQPLLAKSQQPINTTTRLRWADDINEAIIKEYFKITHLETNKTAYRKQLHTVVTQQFPSIAHVSEQRIADQRRVIINNKLITDERLEEIKREIRDTLNMQPTQNTQHDDTIESTININTHPNNLHSSSDFNQTDLQITMGNTQTSVDEAISTTFVDESLDTKIGKTFEDAYNKYSLTDPTNRPFIPKQKTSKKFAHIITYLNNTVLPRYSSNEDNFQKTHTLIYCAAYTAAICNGTKLKEQTISTQTPTQQRNTAADRRPKWLKRLDIKIEIIRKDIGRMTQYINGNRHSRLITHIERIKHKYRTHSSYEEPNITNEQFMDTIKQKLSAVKSRRHRYLNCTKRKDQNTQFTNNERQFYRTLTTDTTNTQHRQQTTNRPNPSPEQLHTYWSNIWSNTSEHNHTATWIQDDKQNLENVTDMSYTTIPLEVFISVINKAHNWKTPGTDHIHNYYYKKLTCLHPAIYNHINNFIKYPQNIPEFITQGLTYMLPKDTDYINPAKYRPITCLQTIYKLTTGCIAEIIYKHTVQNNILVEEQKGCRKYSQGCKEQLTIDAIAMKHNANSKNDICTMYIDYQKAFDSVPHSWLLYILQHYKIHPEIINFLTESMKHWNTKLKVGKSIETDPIFIKRGIYQGDALSPLWFCLALNPLSNLLNSSDSGLTIRNNETPDNFKLTHLLFMDDIKLYSNSISGLHSLADLTQTFSDDINMSFGIDKCKTFTLRNGKQVDSNPYVLDSGQAIDPLSQNDTYKYLGFEQSHQIDQKQTKNKIITKYKHRLNMLTKSQLTSRNLIKSINSFAIPILTYSFGIINWTKTDLTKLQRCINTTLTKNRKHHPRSCVQRLTLPRDEGGRGLIDIENLHNKQITNLRKFFIQKAQQSPLHKVITQTDKKITPLNLHAIDPQTNERITTKAEKIAAWERKSLHGRHRLDLQQPHVDIKASNAWLRRGELFPETEGFMIAIQDQIIDTANYQKFIIRRPNYNDSCRRCHGASETIQHITGACRAIAQTDYKHRHDQVAAIIHQSLAIQTKLITDKVPYYKYKPQAVLENNNFKLYWDRTIITDKTIHNNRPDITMVDKENKLVYIIDIAICNTHNLTSTHTEKIAKYTDLSIELKTQWNITHTKTIPIIISSTGVIPKTLHNSLNTLNISPSTYLLLQKAVILNTCRLTRKFLNT

SEQ ID NO: 7258 - protein, 1378 aa, Sesamia nonagrioides
METRAKRKLRIGSLPGGDRRGAPGADAGRSSIRAIGGSELSQRTPTGSPEQGYSRPSSSISLFPSLPSSPLSYLNYNTDYSSISPTSSINSATVDVVQEAAADNPVPTTGQARARLRWTREMNEFIWRTYLQITDLETKIRGYLDPLYAKFTQRFPEIKVSKQRLGDQKRAILRNKLLPETTLESIKNEVRINLQNICHIQNTIASTQPLLAESQQPINTTTRLRWADDINEAIIKEYFKITHLETNKTAYRKQLHTVVTQQFPSIAHVSEQRIADQRRVIINNKLITDERLEEIKREIRDTLNMQPTQNTQHDDTIESTININTHPNNLHSSSDFNQTDLQITMGNTQTSVDEAISTTFVDESLDTKIGKTFEEAYNKYSLTDPTNRPFIPKQKISKKFAHIITYLNNTVLPRYSSNEDNFQKTHTLIYCTAYTAAICNGTKLKEQTISTQTSTQQRNTAADRRPKWLKRLDIKIEIIRKDIGRMTQYINGNRHSRLITHIERIKHKYRTHSSYEEPNITNEQFMDTIKQKLSAVKSRRHRYLNCTKRKDQNTQFTNNERQFYRTLTTDTTNTQHRQQTTNRPNPTPEQLHTYWSNIWSNTSEHNHTATWIQDDKQNLENVTDMSYTTIPLEVFISVINKAHNWKTPGTDHIHNYYYKKLTCLHPAIYNHINNFIKYPQNIPEFITQGLTYMLPKDTDYINPAKYRPITCLQTIYKLTTGCIAEIIYKHTVQNNILVEEQKGCRKYSQGCKEQLTIDAIAMKHNANSKNDICTMYIDYQKAFDSVPHSWLLYILQHYKIHPEIINFLTESMKHWNTKLKVGKSIETDPIFIKRGIYQGDALSPLWFCLALNPLSNLLNSSDSGLTIRNNETPDNFKLTHLLFMDDIKLYSNSISGLHSLADLTQTFSDDINMSFGIDKCKTFTLRNGKQVDSNQYVLDSGQAIDPLSQNDTYKYLGFEQSHQIDQKQTKNKIITKYKHRLNMLTKSQLTSRNLIKSINSFAIPILTYSFGIINWTKTDLTKLQRCINTTLTKNRKHHPRSCVQRITLPRDEGGRGLIDIENLHNKQITNLRKFFIQKAQQSPLHKVITQTDKKITPLNLHAIDTQTNERITTKAEKIAAWERKSLHGRHRLDLQQPHVDIKASNAWLRRGELFPETEGFMIAIQDQIIDTANYQKFIIRRPNYNDSCRRCHGASETIQHITGACRAIAQTDYKHRHDQVAAIIHQSLAIQTKLITDKVPYYKYKPQAVLENNNFKLYWDRTIITDKTIHNNRPDITMVDKENKLVYIIDIAICNTHNLTSTHTEKIAKYTDLSIELKTQWNITHTKTIPIIISSTGVIPKTLHNSLNTLNISPSTYLLLQKAVILNTCRLTRKFLNN

SEQ ID NO: 7259 - protein, 1074 aa, Sesamia nonagrioides
MQPTQNTQHDDTIESTININTHPNNLHSSSDFNQTDLQITMGNTQTSVDEAISTTFVDESLDTKIGKTFEEAYNKYSLTDPTNRPFIPKQKTSKKFAHIITYLNNTVLPRYSSNEDNFQKTHTLIYCTAYTAAICNGTKLKEQTISTQTSTQQRNTAADRRPKWLKRLDIKIEIIRKDIGRMTQYINGNRHSRLITHIETIKHKYRTHSSYEEPNITHEQFMDTIKQKLSAVKSRRHRYLNCTKRKDQNTQFTNNERQFYRTLTTGTTNTQHRQQTTNRPNPTPEQLHTYWSNIWSNTSEHNHTATWIQDDKQNLENVTDMSYTTIPLEVFISVINKVHNWKTPGTDHIHNYYYKKLTCLHPTIYNHINNFIKYPQNIPEFITQGLTYMLPKDTDYINPAKYRPITCLQTIYKLTTGCIAEIIYKHTVQNNILVEEQKGCRKYSQGCKEQLTIDAIAMKHNANSKNDICTMYIDYQKAFDSVPHSWLLYILQHYKIHPEIINFLTESMKHWNTKLKVGKSIETDPIFIKRGIYQGDALSPLWFCLALNPLSNLLNSSDSGLTIRNNETPDNFKLTHLLFMDDIKLYSNSISGLHLLADLTQTFSDDINMSFGIDKCKIFTLRNGKQVDSNPYVLDSGQAIDPLSQNDTYKYLGFEQSHQIDQKQTKNKIITKYKHRLNMLTKSQLTSRNLIKSINSFAIPILTYSFGIINWTKTDLTKLQRCINTTLTKNRKHHPRSCVQRLTLPRDEGGRGLIDIENLHNKQITNLRKFFIQKTQQSPLHKVITQTDKKITPLNLHAIDPQTNERITTKAEKIAAWERKSLHGRHRLDLQQPHVDIKASNAWLRRGELFPETEGFMIAIQDQIIDTANYQKFIIRRPNYNDSCRRCHGASETIQHITGACRAIAQTDYKHCHDQVAAIIHQSLAIQTKLITDKVPYYKYKPQAVLENNNFKLYWDRTIITDKTIHNNRPDITMVDKENKLVYIIDIAICNTHNLTSTHTEKIAKYTDLSIELKTQWNITHTKTIPIIISSTGVIPKTLHNSLNTLNISPSTYLLLQKAVILNTCRLTRKFLNN

SEQ ID NO: 7260 - protein, 893 aa, Sesamia nonagrioides
MTQYINGNRHTRLITHIERIKHKYRTHSSYEEPNITHEQFIDTLKQKLSAVKSRRQRYLNCTKRKDQNTQFTNNERQFYRTLTTDTTNTQHRQQTINRPNPTPEQLHTYWSNIWSNTSEHNHTATWIQDDKQNLENITDMPFTTIPLEVFISVTNKAHNWKTPGTDHIHNYYYKKLTCLHPAIYNHINNFIKYPQNIPEFITQGLTYMLPKDTDYINPAKYRPITCLQTIYKLTTGCIAEIIYKHTVQNNILAEEQKGCRKYSQGCKEHLTIDAIAMKHNANSKNDICTMYIDYQKAFDSVPHSWLLYILQHYKIHPEIINFLTESMKHWNTKLKVGKSIETDPILIKRGNYQGDALSPLWFCLALNPLSNLLNSSDSGLTIKNNETPDNFKLTHLLFMDDIKLYSNSISGLHSLADLTQTFSNDINMSFGIDKCKTFTLRNGKHVDSNPYVLDSSQAIDPLSQNDTYKYLGFEQLHQIDQKQTKNKIITKYKHRLNMLTKSQLTSRNLIKSINSFAIPILTYSFGIINWTKTDLTKLQRCINTTLTKNRKHHPRSCVQRLTLPRDEGGRGLVDIENLHNKQITNLRKFFIEKAQQSPLHKVITQIDKKITPLNLHAIDPQTNERITNKAEKIAAWQRKSLHGRHRFDLQQPHVDIKASNAWLRRGELFPETEGFMIAIQDQVIDTANYQKFIIRRPNYNDSCRRCHGASETIQHITGACRAIAQTDYKHRHDQVAAIIHQSLAIQTKLITDKVPYYKYKPQAVLENNNFKLYWDRTIITDKTIYNNRPDITMVDKENKLAYIIDIAVCNTHNVTSTHTEKIAKYTDLSIELKTQWNITHTKTIPIIISSTGVIPKTLHNSLNTLNISPSTYLLLQKAVILNTCRLTRKFLNT

SEQ ID NO: 7261 - protein, 1376 aa, Sesamia nonagrioides
METRAKRKLRIGSLPGGDRRGAPGADAGRSSIRAIGGSELSQRAPTGSPEQGYSRPSSSVSLFPSLPSSPFSCLSYNTDYSSISPPISINSATVDVVQEAVADNPVPTTGQARARLRWTREMNEFIWRTYLQITDLETKIRGYLDPLYAKFTQRFPEIKVPKQRLGDQKRAILRNKLLPETTLESIKNEVRINLQNICHTQNTIALTQPFLAESQQPINTTTRLRWTDDINEAIIKEYFKITHLETNRTAYRKQLHTVITQQFPSIAHVSEQRIADQRRVIINNKLITDERLEEIKREIRDTLHMQPTQNTQHVDTIESTINTYPNNLHSTSDLNQTDLQITIGNTQTSLDETISTTFVDESLDTKIGKTFEEIYNKYSLTDPTNRPFIPKQKTSKKFAHIITYLNTTVLPRYSSNEDNFQKTHTLIYCAAYTAAICNGTKIKEQTISTQTSTQQRNTASDRRPKWLKRLDIKIEIIRKDIGRMTQYINGNRHTRLITHIERIKHKYRTHSSYEEPNITNEQFIDTLKQKLSAVKSRRQRYLNCTKRKDQNTQFTNNERQFYRTLTTDTTNTQHRQQTINRPNPTPEQLHTYWSNIWSNTSEHNHTATWIQDDKQNLENITDMPFTTIPLEVFISVTNKAHNWKTPGTDHIHNYYYKKLTCLHPAIYNHINNFIKYPQNIPEFITQGLTYMLPKDTDYINPAKYRPITCLQTIYKLTTGCIAEIIYKHTVQNNILAEEQKGCRKYSQGCKEQLTIDAIAMKHNANSKNDICTMYIDYQKAFDSVPHSWLLYILQHYKIHPEIINFLTESMKHWNTKLKVGKSIETDPIFIKRGIYQGDALSPLWFCLALNPLSNLLNSSDSGLTIKNNETPDNFKLTHLLFMDDIKLYSNSISGLHSLADLTQTFSNDINMSFGIDKCKTFTLRNGKHVESNPYVLDSGQAIDPLSQNDTYKYLGFEQLHQIDQKQTKNKIITKYKHRLNMLTKSQLTSRNLIKSINSFAIPILTYSFGIINWTKTDLTKLQRCINTTLTKNRKHHPRSCVQRLTLPRDEGGRGLVDIENLHNKQITNLRKFFIQKAQQSPLHKVITQIDKKITPLNLHAIDPQTNERITNKAEKIAAWQRKSLHGRHRFDLQQPHVDIKASNAWLRRGELFPETEGFMIAIQDQVIDTANYQKFIIRRPNYNDSCRRCHGASETIQHITGACRAISQTDYKHRHDQVAAIIHQSLAIQTKLITDKVPYYKYKPQAVLENNNFKLYWDRTIITDKTIYNNRPDITMIDKENKLAYIIDIAVCNTHNLTSTHTEKIAKYTDLSIELKTQWNITHTKSIPIIISSTGVIPKTLHNSLNTLNISPSTYLLLQKAVILNTCRLTRKFLNT

SEQ ID NO: 7262 - protein, 1376 aa, Sesamia nonagrioides
METRAKRKLRIGSLPGGDRRGAPGADAGRSSIRAIGGSELSQRAPTGSPEQGYSRPSSSVSLFPSLPSSPFSCLSYNTDYSSISPPISINSATVDVVQEAVADNPVPTTGQARARLRWTREMNEFIWRTYLQITDLETKIRGYLDPLYAKFTQRFPEIKVPKQRLGDQKRAILRNKLLPETTLESIKNEVRINLQNICHTQNTIALTQPFLAESQQPINTTTRLRWTDDINEAIIKEYFKITHLETNRTAYRKQLHMVITQQFSSIAHVSEQRIADQRRVIINNKLITDERLEEIKREIRDTLHMQPTQNTQHVDTIESTINTYPNNLHSTSDLNQTDLQITIGNTQTSLDETISTTFVDESLDTKIGKTFEEIYNKYSLTDPTNRPFIPKQKTSKKFAHIITYLNTTVLPRYSSNEDNFQKTHTLIYCAAYTEAICNGTKIKEQTISTQTSTQQRNTASDRRPKWLKRLDIKIEIIRKDIGRMTQYINGNRHTRLITHIERIKHKYRTHSSYEEPNITNEQFIDTLKQKLSAVKSRRQRYLKCTKRKDQNTQFTNNERQFYRTLTTDTTNTQHRQQTINRPNPTPEQLHTYWSNIWSNTSEHNHTATWIQGDKQNLENITDMPFTTIPLEVFISVINKAHNWKTPGTDHIHNYYYKKLTCLHPAIYNHINNFIKYPQNIPEFITQGLTYMLPKDTDYINPAKYRPITCLQTIYKLTTGCIAEIIYKHTVQNNILAEEQKGCRKYSQGCKEQLTIDATAMKHNANSKNDICTMYIDYQKAFDSVPHSWLLYILQHYKIHPEIINFLTESMKHWNTKLKVGKSIETDPILIKRGIYQGDALSPLWFCLALNPLSNLLNSSDNGLTIKNNETPDNFKLTHLLFMDDIKLYSNSISGLHSLADLTQTFSNDINMSFGIDKCKTFTLRNGKHVDSNPYVLDSGQAIDPLSQNDTYKYLGFEQLHQIDQKQTKNKIITKYKHRLNMLTKSQLTSRNLIKSINSFAIPILTYSFGIINWTKTDLTKLQRCINTTLTKNRKHHPRSCVQRLTLPRDEGGRGLVDIENLHNKQITNLRKFFIQKAQQSPLHKVITQIDKKITPLNLHAIDPQTNERITNKAEKIAAWQRKSLHGRHRFDLQQPHVDIKASNAWLRRGELFPETEGFMIAIQDQVIDTANYQKFIIRRPNYNDSCRRCHGASETIQHITGACRAIAQTDYKHRHDQVAAIIHQSLAIQTKLITDKVPYYKYKPQAVLENNNFKLYWDRTIITDKTIYNNRPDITMVDKENKLAYIIDIAVCNTHNLTSTHTEKFAKYTDLSIELKTQWNITRTKTIPIIISSTGVIPKTLHNSLNTLNISPSTYLLLQKAVILNTCRLTRKFLNT

SEQ ID NO: 7263 - protein, 1239 aa, Sesamia nonagrioides
MITDLYFKDPHAKFTQRFPEIKVSKQRLGDQKRAILRNKLLPETTLESIKNEVRINLQNICHTQNTIALTQPFLAESQQPINTTTRLRWTDDINEAIIKEYFKITHLETNRTAYRKQLHTVITQQFPSIAHVSEQRIADQRRVIINNKLITDERLEAIKREIRDTLHMQPTQNTQHVDTIESTINTYPNNLHSTSDLNQTDLQITIGNTQTSLDETISTTFVDESLDTKIGKTFEEIYNTYSLTDPTNRPFIPKQKTSKKFAHIITYLNTTVLPRYSSNEDNFQKTHTLIYCAAYTAAICNGTKIKEQAISTQTSTQQRNTASDRRPKWLKRLDIKIEIIRKDIGRMTQYINGNRHTRLITHIERIKHKYRTHSSYEEPNITHEQFIDTLKQKLSAVKSRRQRYLNCTKRKDQNTQFTNNERQFYRTLTTDTTNTQHRQQTINRPNPTPEQLHTYWSNIWSNTSEHNHTATWIQDDKQNLENITDMPFTTIPLEVFISVTNKAHNWKTPGTDHIHNYYYKKLTCLHPAIYNHINNFIKYPQNIPEFITQGLTYMLPKDTDYINPAKYRPITCLQTIYKLTTGCIAEIIYKHTVQNNILAEEQKGCRKYSQGCKEQLTIDAIAMKHNANSKNDICTMYIDYQKAFDSVPHSWLLYILQHYKIHPEIINFLTESMKHWNTKLKVGKSIETDPILIKRGIYQGDALSPLWFCLALNPLSNLLNSSDSGLTIKNNETPDNFKLTHLLFMDDIKLYSNSISGLHSLADLTQTFSNDINMSFGIDKCKTFTLRNGKHVDSNPYVLDSGQAIDPLSQNDTYRYLGFEQLHQIDQKQTKNKIITKYKHRLNMLTKSQLTSRNLIKSINSFAIPILTYSFGIINWTKTDLTKLQRCINTTLTKNRKHHPRSCVQRLTLPRDEGGRGLVDIENLHNKQITNLRKFFIQKAQQSPLHKVITQIDKKITPLNLHAIDPQTNERITNKAEKIAAWQRKSLHGRHRFDLQQPHVDIKASNAWLRRGELFPETEGFMIAIQDQVIDTANYQKFIIRRPNYNDSCRRCHGASETIQHITGACRAIAQTDYKHRHDQVAAIIHQSLAIQTKLITDKFPYYKYKPQAVLENNNFKLYWDRTIITDKTIYNNRPDITMVDKENKLAYIIDIAVCNTHNLTSTHTEKIAKYTDLSIELKTQWNITHTKTIPIIISSTGVIPKTLHNCLNTLNISPSTYLLLQKAVILNTCRLTRKFLNT

SEQ ID NO: 7264 - protein, 1369 aa, Hemaris fuciformis
METRSMKKRIGSLPGGDRRGALGAGAECLSMRTASGSELSRRAPTGSPEINATAEPPSLSSSSPKSLFSSIPSSSPHYLHEISENSLSSPTSSQNTDSLAVDVMQEALAVETVPTTGKTRARIRWTEEINKFIWRNYLIITEIETKIRGYLDPLYTRFCEKFPDIYVSKQRIGDQKRAILRCKLLSDSTLQAIKDEVTDMLQNGNHQTIDQTYTQQKSTTRTRMRWTDDINETIMREYYKITNLETNKTAYRSLLYTAIIEKFPQLSHFSEQRIADQRRVILHNKLIQDSRLEEIKQDIRVSLASPDVDIENHMNHINTPPQRSTGPEIPSAIGLEPHNGNLPHHHNNVVSEEILNNKITYTFEEIFKKLEFSNPTQRPFLPKQKTSKKFAYIISYLNTNILPRYISNDDDFVQTHTLLYCAAYTAALCNGSKIKDSTLTSVSTDIPSDRRPKWLKRLDNKIEYTRKDIARFTQYMRGNRSLRLITHIEKIKNKYRIHSNYEDPNKTDNQFLDSLKQKLNATTNRRNRYLNCTRRKIQNAQFKNNEKQFYRDLLGSTSNAKNTEQPLNNNTPPPGELHDFWSNMWAKPVQHNSNAEWIEIDKRNLENTPEMVFDNISLDAFKNVLKKAHNWKSPGTDNIHNYYYKKLSSLHSAFYRHINSFINDPDSIPDFVTQGVTYMIPKDSERSNPAKYRPITCLQTIYKIITSCISHVINNHITDNNIIAIEQKGCKRFSQGCKEQLIIDSIAMKHNIKQKNDLCTMYVDYQKAYDSVPHSWLIHVLHHYKIHPTIIGFLKTVMQKWETKLKLGKLIETASIPIKRGIFQGDALSPLWFCLALNPLSNLLNSSNNGLPIDSNETTTLKLSHLMYMDDIKLYGNSISSLHKLADLTQQFSDDICMTFGIDKCKTFTILNGQHIENNPYRLASGKVVDSLDQNNAYRYLGFEQSHQIKQKDTKIHLMKHFKHRLNILLKSQLNARNLVKSINTFAIPILTYSFGIIHWSKTDLLKLQRLISTTMSRHRKHHPRSCVQRVTLSREEGGRGFIDIKNLHNKQIASLRKFFLNISEHSAFHKSIAQADKRYTPLNLYSTDTQTNESIVSDREKILEWERKSLHGRHRLDLQQPHVDMKASNAWLQRGELFPETEGFMIAIQDQIIDTANYQKFIIHRPNYSDLCRRCHSASETIQHITGACKSIVQTDYKHRHDQIAAIIHQSLAIQTELLTDKVQYYKYKPEAVLENANFKLYWDRTIITDKTVYNNRPDITLHDKHNKSVFLIDIAICNTHNLLTTHAEKIAKYTELSIEIKSQWKVSHIRTIPIILSSTGVIPKTLHSSLSILKINPLIYLLLQKAVILNTCRLTRKFLNNDTTDLT

SEQ ID NO: 7265 - protein, 1360 aa, Hemaris fuciformis
METRSMKKRIGSLPGGDRRGALGAGAECLSMRTASGSELSRRAPTGSPETDATAEPSSLSSPPHSLFSSPPSSSPSYLHHSPENSRSSLTSLHAVDVMQEAYADKTASTTGRTRARIKWTEDMNKFIWRNYLIITKMETKVRGYLDPLYSRFREKFPDIQISKQRIGDQRRAILRCNLLSDSIVNMIKDEVANILQNQNQHNTETVNLAPQSVRMRWTDDINEAIMKEYYKITNLETNKTAYRRLLHTAILEQFPQLSHISEQRIADQRRVIVHNKLIKDSRLDELKREISDNTQLTYMHIENISRTEETVTVVSDIQNYSIPEPITDSLHLEQHNADPDCRQFPNEKLNREIAQIFENTYENFKNSNPTLRPFIPRQKTSKKFAYIISYLDTKILPKYALSDTEFLPTHAILYCAAHTAALCNGCKIKNLDTVTSAPPNLRTDRRPNWLKRIDNKIEYIRKQIGRFTQYSQGNRSLKLIKHIEIIKHKYRIHSNYEEPNMTDSQFLDSLKQKLNATTNRRNRYLNCTRRKTQNAQFNSNEKLFYRSLLANSSNIHKEHTTDNPTPTSEQMHKYWSNIWAKPTQHNKDAEWIKMNEKNSDNISEMTCSNIPLEVFIDTIKKTHNWKSPGTDNIHNFYYKKFSSLHPLLYKQINSFLEHPNTIPEFVTQGVTYMIPKDSDTTNPAKYRPITCLQTIYKIITSCISQVIDKHLTSHNIIAEEQKGCRKFSKGCKEQLIIDAIAMKHTIKQKKDLCTMYIDYQKAYDSVPHSWLIHVLNHYKINLSIVEFLKHVMQKWETKLKINRLIETEAIPIKRGIFQGDALSPLWFCLALNPLSNLLNDSQNGLQLDSANNKNFRLSHLMYMDDIKLYSNSYSTLNKLADLTQNFSNDINMVFGIDKCKTFTIRNGKLVESNPYQLTTGQIVDALDQNNLYKYLGFEQSHEINQKDAKKELTKQFKYRLNILMKSQLNSRNLIKSINTFAIPILTYSFGIIQWSKTDILKLQRLINTTMSKHRKHHPRSCTQRMTLSREEGGRGLIDIENLHNRQISTLRKFFIHKAHHSDLHKTIASADNRYTPLNLHLTDTQANEHIRSNEEKITAWARKSLHGRHRLDLQQPHVDMKASNAWLQRGELFPETEGFMIAIQDQIIDTANYQKYIIHRPNYSDICRRCHSASETIQHITGACKSIAQTDYKHRHDQVAAIIHQCLAIQTKLLTDKVQYYKYKPESVLENSHFKLYWDRTIITDKTVYNNRPDIVLHDKLNKSVYLIDIAVCNTHNLLSTHTEKIAKYTELSIEIKSQWKVNQIRTIPIIISSTGVIPKTLHSSLSTLKVNPLTYLLLQKAVILNTCRLTRKFLNCDIS

SEQ ID NO: 7266 - protein, 1361 aa, Hemaris fuciformis
METRSMKKRIGSLPGGDRRGALGAGAECLSMRTASGSELSRRAPTGSPETDATAEPSSLSSSPPHSLFSSPPSSSPSYLHHSPENSRSSLTSLHAVDDMQEAYADKTASTTGRTRARIKWTEDMNKFIWRNYLIITKMETKVRGYLDPLYSRFREKFPDIQISKQRIGDQRRAILRCNLLSNSIVNMIKDEVASILQNQNQHNTETVNLAPQSARMRWTDDINEAIMKEYYKITNLETNKTAYRRLLHSAIIEQFPQLSHISEQRIADQRRVIVHNKLIKDSRLDELKREISDNTQLTYMHIENISRTQETVTVVSDIQNYSIPEPITDSLHLEQHNADPDCRQFPNEKLNREIAQIFENTYEKFKNSNPTLRPFIPRQKTSKKFAYIISYLDTKILPKYALSDTEFLPTHAILYCAAHTAALCNGCKIKNLDTVTSAPPNLRTDRRPNWLKRIDNKIEYIRKQIGRFTQYSQGNRSLKLIKNIEIIKHKYRIHSNYEEPNMTDSQFLDSLKQKLNATTNRRNRYLNCTRRKTQNAQFNSNEKLFYRSLLANSSNIHKEHTTDNPTPTSEQMHKYWSNIWAKPTQHNKDAEWIKMSERNLDNISEMTCSNIPLEVFIDTIKKTHNWKSPGTDNIHNFYYKKFSSLHPLLYKQINSFLEHPNTIPEFVTQGVTYMIPKDSDTTNPAKYRPITCLQTIYKIITSCISQVIDKRLTSHNIIAEEQKGCRKFSKGCKEQLIIDSIAMKHTTKQKKDLCTMYIDYQKAYDSVPHSWLIHVLNHYKINLSIVEFLKHVMQKWETKLKINRLIETEAIPIKRGIFQGDALSPLWFCLALNPLSNLLNDSQNGLQLDSANNKNFRLSHLMYMDDIKLYSNSFSTLNKLADLTQNFSDDINMVFGIDKCKTFTIRNGKLIESNPYQLATGQIVDALDQNNLYKYLGFEQSHEINQRDAKKELTKQFKYRLNILMKSQLNSRNLIKSINTFAIPILTYSFGIIQWSKTDILKLQRLINTTMSKHRKHHPRSCTQRMTLSREEGGRGLIDIENLHNRQISTLRKFFLHKAHHSDLHKTIASADNRYTPLNLHLTDTQTNEHIRSNEEKITAWARKSLHGRHRLDLQQPHVDMKASNAWLQRGELFPETEGFMIAIQDQIIDTANYQKYIIHRPNYSDICRRCHSASETIQHITGACKSIAQTDYKHRHDQVAAIIHQCLAIQTKLLTDKVQYYKYKPESVLENSHFKLYWDRTIITDKTVYNNRPDIVLHDKLNKSVYLIDIAVCNTHNLLSTHTEKIAKYTELSIEIKSQWKVNQIRTIPIIISSTGVIPKTLHSSLSTLKVNPLTYLLLQKAVILNTCRLTRKFLNCDIS

SEQ ID NO: 7267 - protein, 1319 aa, Mimas tiliae
MALATHLKWRQGLKIKSFIPSTSSSPSYSNYNLDHSSSISSRHSSNSEAVDVVQEASANNPVPTTGRIRARIKWTQEMNEFIWRTYLIITKLETKIRGYLDPLYTQFITKFPEINVSKQRIGDQRRAIVRNYLISSTALQSIREEVANILQNGSYTNMILTQSSQTNLGSQLSARSRMQWSDEVNEAIIKEYYKITNLESNRTAYRKPLHTNITEQFPHIAHVSEQRIADQRRVIINNKLISNERLEAIREEVRQSLNVNTTDNLLSSNSETVALLIQQNNTVAEIINTISTHEPTNNYQYNIEYRNLDNIITKTYEQTYEKFLNSNPTERPYIPKQKTSRKLSYIINYLNTTMIPKYDYPDNDFIMTHTIIYCAAYTAALCNGSKIKDPSVPPLFHVDRTSDNRPNWQKRLDKRIAELRKAIGRMTQYIQGNRSLGLRTHIERIKQKYTTHSKHDESNRADNQFLDTLKQKLNSLSNRRRRYLNCTNRKQQNAQFINNEKQFYRNLSANTINRQNIGPIQQNSPTKQQLCEFWSNIWSKPTQHNKDAAWIERDKQKINGISEMSFEYIPLETFNNVIKTIHNWKTPGTDHIHNFYYKKFSSIHPALHNHINDFLKSPHTIPNFITQGITYLIPKDGDSMNPANYRPITCLQTIYKIITSCISQIIYKHLVQNNILAEEQKGCRKQSQGCKEQITIDTIAMKYTTTYKKDMCTMYIDYQKAFDSVPHSWLIYILQHYNIHPTLIEFLKQAMQLWATKLKIGKSIETPFIPIKRGIFQGDALSPLWFCLALNPLSNLLNDNEDGLEIVSVHTENLKITHLLYMDDIKLYSNSISSLHNLANITEMFSKDINMAFGIDKCKTYTYQRGKCIESDPYTLETGQIIDSLDENNTYKYLGFQQSHQIHQKHTKLQLMKKFKHRLNIIMKSQLTSRNLIKAINSFAISILTYSFGLIKWSKTDLTKMQQSINTTLTKYRKHHPRSCIQRLTLPREEGGRGIIDIENLHNRQITTLRNFFFEKAQNSSLHKVIVNTDNHYTPLNLLSKNTQINEHVTSNSDKIAAWQNKSLHGRHRLDLQQPHVDIKASNAWLQRGELFPETEGFMIAIQDQIIDTRNYQKYIIRRPNFQDLCRRCHSASETIQHITGACRSIAQTDYKHRHDQVASIVHQFLAHQNKQIAEKVPYYKYTPESVLENTAFKLYWDRTIITDKTVYNNRPDITLLDKQNKTVFLIDIAVCNTHNLVTTHTEKIAKYTELSIEIKAQWQVNHVRTVPIIISSTGVVPKSLHTSLNTLHISPSTYLLLQKAVILNTCRLTRKFLNCEDT

SEQ ID NO: 7268 - protein, 1377 aa, Spodoptera exigua
METRAMKKVRLGSLPGGDRRGTPGADAGRSSIRTIGGSELSLRAPTGSPEQCYSRPSSSISLFPSLPSSPLSFLNFNTDFSSNPSPTSYNSAAVDVAQEASADNPVPTTGQVRARLRWTKEMNEFIWRTYLHVTDLDTKIRGYLDPLYAKFTEKFPEIKVSKQRLGDQKRAILRNKLLPESILESIKDEVRITLLNSTVNQVATYCEPQQSSHSNTRLRWTDDINEAIIREYFRITQNETNKTAYRKPLHTIITQKFPHIAHVSEQRIADQRRVIINNRLISDDRLQEIKREVGHTLNIQTIDNTQIDDESETILNTDPNYLPCGYEISQLASQIHQDNTDVDITIAQDTIVLEDNTANTTYLDKTLDTSIAKTFEETYNKYSLSDPTKRPFIPRQHTSRKFSHIISYINNTILPKYVSNEDDFLTTHTLVYCAAHTAALCNGSKIKEITHNTPTPQQNSTTDKRPNWLKRLDRKIQIIRKEIGRMTQYINGNRHLGLITHIERIKNKYRKHSNYEEPNTTNEQFMDSLKQKLTAITSRRRRYVNCTKRKEQNTQFKYNEKQFYRNLTSFTSNTQNRQQIPDSHYLDPEQFHSYWSNIWSNTSEHKQNATWIDDDRQRLDNIPEMLFDTIPLEVFVNVIKKAHNWKAPGTDHIHNYFYKKLTYLHPSIYKHINNFIKNPQSIPKFVTQGLTYMIPKDFDQTNPSKFRPITCLQTIYKLTTGCISEIIYKYITQNNLLAEEQKGCRKLSQGCKEQLTIDLIAMKHNVKLKKDICTMYVDYQKAFDSVPHSWLLYVLQHYKIHPDIIEFLNVTIAHWSTRIKLGKLIETDPIPIKRGIFQGDALSPLWFCLAMNPLSNLLNSSKNGLTIQDNTTQVLNLTHLMFMDDIKLYSNNISGLHSLADLTQTFSDDINMSFGIDKCKTFTLRKGHHLESNPYTLESGQIIEPMTLNSTYKYLGFEQSHQINQKHTKNKIISKYKHRLNMLIRSQLTSRNLIKSINTFAIPVLTYSFGIINWSKTDLTKLQRLINTCLTTNRKHHPRSCVQRLTLPRDDGGRGLIDITNLHNQQIANLRKFFMQNAQQSPLHKIVSHMDKKYTPLNLHSTEPQTNERLTSKAEKIAVWAHKSLHGRHRLDLQQPHVDMKASNAWLRRGELFPETEGFMIAIQDQVIDTANYQKFIVRRPNYNDSCRRCHGASETIQHITGACRSIAQTDYKHRHDQVAAIIHQSLAIQTKLITEKIAYYKYKPQTVLENDSFKLYWDRTIITDKTIYNNRPDITMIDKRKKTVYIIDIAICNTHNLITTHSEKIAKYTDLSIELKTQWNITHTKTIPIILSTTGVIPKNLHSSLHSLNISPATYLLLQKAVILNTCRLTRKFLNT

SEQ ID NO: 7269 - protein, 1239 aa, Spodoptera exigua
MNEFIWRTYLFVTNMDTKIRGYLDPLYAKFTDRFPEMKISKQRLGDQKRAILRNKLLSETTLEVIKNEVQKELQNSNINDNTVACTQLTTTEMQHPTNSSTRLKWTDDINEAIIREYFKITHVETNKTAYRKQLHTTITQQFPIIAHVSEQRIADQRRVILNNRLVSDDRLEQIKREVRDYLSTQSIQNTQRDTTILNTSNPGGNASMDTGTTSQDETINTILVDETLDTKIQKTFEEIYYKYLSTDPSNRPFIPKQKTSKRFAHIISYLNNKILPKYGTKDDDFLKTHALVYCAAHTAALCNGSKIKDHSQTPSSTQHIDDMKDKRPNWLRRLDQKILIIRKEIGRMTQYINGNRHLRLITHIEKIKHKYKTHSSYEEPNTTNEQFMDSLKQKLTAITSRRRRYFYCTKRKDQNTQFTNSERQFYRTLATDTTHTQNRQQATEISHPNTEQLHNYWSNIWSKTSDHNQSATWIENDKERLEQLPQMSFDSIPLEVFVKVIQRAHNWKSPGTDHIHNYYYKKLTFLHPSIYKHINDFIKNPHDIPDFITQGVTYMIPKDSDHTNPANYRPITCLQTIYKLITGCISEIIYKHISQNNILAEEQKGCRKYSQGCKEQLTIDLIAMKHNAKQKNNIFTMYIDYQKAYDSVPHSWLLYILNHYKIHPELIKFLTESMKHWNTKIKLGKLVQTDSIPIRRGIFQGDALSPLWFCLALNPLSNLLNSSDYGLSLKDNMGQNLHLTHLMFMDDIKLYSNSISGLFSLADLTQTFSDDIKMSFGIDKCKTFSLIKGQQIENNPYALGSGEIIESMTQNCSYKYLGFEQTYQIDKKYAKHKITTKYKHRLNMLIKSQLTSRNLIKSINTFAIPILTYSFGIINWSKTDLTKLQRVINTSLTINRKHHPRSCVQRLTLPREEGGRGLIDIENLHNQQIANLRKFFFQKSQQSHLHKLICYLDQNYTPLNLHSSNPQRNESINTKIDKITAWERKSLHGRHRLDLQQPHVDIKASNAWLQRGELFPETEGFMIAIQDQVIDTANYQKYIIRRPNYNDSCRRCHSASETIQHITGACRAIAQTDYKHRHDQVAAIIHQSLAIKTKLITDRVPYYKYKPHTVLENNNFKLYWDRTIITDKTIYNNRPDITMLDKQSKIVYIIDIAICNTHNLVSTHTEKIAKYTELSIEIKTQWNVTHTKTIPIVLSSTGVIPKTLHNSLNSLNISPSTYLLLQKAVILNTCRLTRKFLNA

SEQ ID NO: 7270 - protein, 1360 aa, Spodoptera exigua
METRAKKRLRIGSLPGGDRRGTPGADAGRSSIRTIGGSELSLRAPTGSPEQCDSRPSSSFSLFPSLPSSPLSCLNYNTDYTSISSPPSNNSTALDVVQEATANNPAPTNGQVRARLRWTREMNEFIWRTYLFVTNMDTKIRGYLDPLYAKFTDRFPEMKISKQRLGDQKRAILRNKLLPETILEVIKNDVQKELQNSNTNDNTIACTQLTTTEMQHPTNSSTRLKWTDDINEAIIREYFKITHVETNKTAYRKQLHTTITQQFPIIAHVSEQRIADQRRVILNNRLVSDDRLEQIKREVRDYLCTQSIQNTQHDMTILNTSNPGGNASMDIGTTFQDETINTILVDETLDSKIEKTFEEIYYKYLSTDPTNRPFIPKQKTSKRFAHIISYLNNKILPKYGTKDDDFHKTHALVYCAAHTAALCNGSKIKDHSQTSSSRHHIDDMKDKRPNWLRRLDQKILIIRKEIGRMTQYINGNRHLRLITHIEKIKHKYRTHSSYEEPNTTNEQFMDSLKQKLTAITSRRRRYFYCTKRKDQNTQFTNSERQFYRTLATDTTHTQNRQQATGIPHPNTEQLHNYWSNIWSKTSDHNQSATWIENDKERLEQLPQMSFDSIPLEVFFKVIQRAHNWKSPGTDHIHNYYYKKLTFLHPSIYKHINDFIKNPHDIPDFITQGVTYMIPKDSDHTNPAKYRPITCLQTIYKLITGCISEIIYKHISQNNILAEEQKGCRKYSQGCKEQLTIDLIAMKHNAKQKNDIFTMYIDYQKAYDSVPHSWLLYILNHYKIHPELIKFLTESMKHWNTKIKLGKLVQTDSIPIRRGIFQGDALSPLWFCLALNPLSNLLNSSDYGLSLKDNTGQNLHLTHLMFMDDIKLYSNSISGLFSLADLTQTFSDDIKMSFGIDKCKTFCLIKGQQIENNPYALGSGEIIESMTQNCSYKYLGFEQTYQIDKKYAKHKITTKYKHRLNMLIRSQLTSRNLIKSINTFAIPILTYSFGIINWSKADLIKLQRVINTSLTINRKHHPRSCVQRLTLPREDGGRGLIDIENLHNQQIANLRKFFFQKSQQSPLHKLICYLDQNYTPLNLHSSNPQRNESINTKIDKITAWERKSLHGRHRLDLQQPHVDIKASNAWLQRGELFPETEGFMIAIQDQVIDTANYQKYIIRRPNYNDSCRRCHGASETIQHITGACRAIAQTDYKHRHDQVAAIIHQSLAIKTKLITDRVPYYKYKPHTVLENNNFKLYWDRTIITDKTIYNNRPDITMLDKQNKIVYIIDIAICNTHNLVSTHTEKIAKYTELSIEIKTQWNVTHTKTIPIVLSSTGVIPKTLHNSLNSLNISPSTYLLLQKAVILNTCRLTRKFLNA

SEQ ID NO: 7271 - protein, 1375 aa, Spodoptera exigua
METRAKRKLRIGSLPGGDRRGTPGADAGRSSIRTIGGSELSLRAPTGSPEQCYSRPSSSISLFPSLPSSPLSCLNYHTDSSSICSSNSINSAAVDVVQEAAANNPAPTTGQVRARMRWTIEMNEFIWRTYLTITHLDTKVRGYLDPLHAKFTENFPEIKVSKQRLGDQKRAILRNKLLSESTLQKIKNEVQIALQNSNQIQNTIGTTQPMLNQQTQPSNSNTRMKWTDDINEAIIREYFKITHLETNRTAYRKPLHTIITELFPNIAHVSEQRIADQRRVIINNKLISDNRLEEIKEEVRSSLSVQSAENIQSAIITPTFDSNSVLSSIVLNQTDLQNTPDNMHINITELQNETTNTMFTDETFENKIAKTFEESYNKHSLTHPAKRPFIPKQKTSKKLAYIISYLNNTVLPKYMSVEDDFLKTHTLVYCAAYTAALCNGAKIKENIQKTTTLQRKNSTIDKRPSWLRRLDRRIHIIRKEIGRLTQYINGNRSLGLITHIERIKHKYRKHSSYEEPNTTNEQFMDSLKQRLTAITSRRRRYSNCTKRKDQNTQFINSERQFYRNLTIDTSNTHITRHTAHDTHPNSEQFHSYWSNIWSKPSQHNQAAPWTQIDKQKLENVPEMTFDAIPLDIFASVIQKIHNWKAPGTDHIHNYYYKKLTCLHPSIYRHINNFITNPQTIPEFVTQGLTYMIPKDSDYMNPAKYRPITCLQTIYKLTTGCISEMMYKHISLNHILAEEQKGCRKYSQGCKEQLIIDSIAIKHNIKLKNDICTMYIDYQKAFDSVPHSWLLYILEHYKINPVIINFLTTAMKHWNTTLKVGKLIETQPIPIKRGIFQGDALSPLWFCLALNPLSNLLNSSENGLTVQDSCTPVLQLSHLLFMDDIKLYSNNISGLHSLADLTQQFSDDINMAFGIDKCKTFTLRKGRHVESNPYTLDSGQEIDPMTPNCTYKYLGFEQSHKIDQKLTKDKITTKYKQRLNMLIRSQLTSRNLVKSINSFAIPVLTYSFGIINWTKTDLIKLQRLINTCLTTNRKHHPRSCVQRLTLPRDEGGRGIVDITNLHNQQITNLRKFFHQKADQSIFHKAISILDKQYTPLNLHSTAPQINEQITSKIDKIATWAQKSLHGRHRLDLQQPHVDMKASNAWLRRGELFPETEGFMIAIQDQVIDTANYQKFIIHRPNYNDSCRRCHGASETIQHITGGCRAIAQTDYKHRHDQVASIIHQSLAIQTKLITDKVAYYKYKPQAVLENEHFKLYWDRTIITDKTVYNNRPDITLLDKRNKLVYIIDIAICNTHNLVNTHSEKIAKYTDLSIELKTQWNVAHTKTIPIILSTTGVIPKTLHNSLSTLKISPSTYLLMQKAVILNTCRLTRKFLNN

SEQ ID NO: 7272 - protein, 1375 aa, Spodoptera exigua
METRAKRKLRIGSLPGGDRRGTPGADAGRSSIRTIGGSELSLRAPTGSPEQCYSRPSSSISLFPSLPSSPLSCLNYHTDSSSICSSNSINSAAVDVVQEAAANNPAPTTGQVRARMRWTIEMNEFIWRTYLTITHLDTKVRGYLDPLHAKFTENFPEIKVSKQRLGDQKRAILRNKLLSESTLQKIKNEVQIALQNSNQIQNTIGTTQPMLNQQTQPSNSNTRMKWTDDINEAIIREYFKITHLETNRTAYRKPLHTIITELFPNIAHVSEQRIADQRRVIINNKLISDNRLEEIKEEVRSSLSVQSAENIQSAIITPTIDSNSVLSSIVLNQTDLQNTPDNMHINITELQNETTNTMFTDETFENKIAKTFEESYNKHSLTHPAKRPFIPKQKTSKKLAYIILYLNNTVLPKYMSVEDDFLKTHTLVYCAAYTAALCNGAKIKENIQKTTTLQQKNSTIDKRPSWLRRLDRRIHIIRKEIGRLTQYTNGNRSLGLITHIERIKHKYRKHSSYEEPNTTNEQFMDSLKQRLTAITSRRRRYSNCTKRKDQNTQFINSERQFYRNLTIDTSNTHITRHTAHDTHPNSEQFHSYWSNIWSKPSQHNQAAPWTQIDKQKLENVPEMTFDAIPLDIFASVIQKIHNWKAPGTDHIHNYYYKKLTCLHPSIYRHINNFITNPQTIPEFVTQGLTYMIPKDSDYMNPAKYRPITCLQTIYKLTTGCISEMMYKHISLNHILAEEQKGCRKYSQGCKEQLIIDSIAIKHNIKLKNDICTMYIDYQKAFDSVPHSWLLYILEHYKINPVIINFLTTAMKHWNTTLKVGKLIETQPIPIKRGIFQGDALSPLWFCLALNPLSNLLNSSENGLTVQDSCTPVLQLSHLLFMDDIKLYSNNISGLHSLADLTQQFSDDINMAFGIDKCKTFTLRKGRHVESNPYTLDSGQEIDPMTPNCTYKYLGFEQSHKIDQKLTKNKITTKYKQRLNMLIRSQLTSRNLVKSINSFAIPVLTYSFGIINWTKTDLIKLQRLINTCLTTNRKHHPRSCVQRLTLARDEGGRGIVDITNLHNQQITNLRKFFHQKADQSIFHKAISILDKQYTPLNLHSTAPQINEQITSKIDKIATWAQKSLHGRHRLDLQQPHVDMKASNAWLRRGELFPETEGFMIAIQDQVIDTANYQKFIIHRPNYNDSCRRCHGASETIQHITGGCRAIAQTDYKHRHDQVASIIHQSLAIQTKLITDKVAYYKYKPQAVLENEHFKLYWDRTIITDKTVYNNRPDITLLDKRNKLVYIIDIAICNTHNLVNTHSEKIAKYTDLSIELKTQWNVAHTKTIPIILSTTGVIPKTLHNSLSTLKISPSTYLLLQKAVILNTCRLTRKFLNN

SEQ ID NO: 7273 - protein, 1370 aa, Laothoe populi
METRSKMKRIGSLPGGDRRGALGAGAECHSIRTAGGSELNRRAPTGLPETNATADTSSSSSPKSLFSSLPSSPPSYLNYLENSSPISSHYSVNYEAVDVVQQAPAINSAPTTGQIRARIKWTQEMNEFIWRTYLIITKLETKIRGYLDPLYTQFITKFPDINVSKQRIGDQRRAIVRNQLITPNTLQLIKEEVAQNFKNENYTNTSLTRQLPTLNTGTQSSTNSRMRWTDEVNEAIMKEYYIITNLETNRTAYRKQLHTTITEKFPHLAHVSEQRIADQRRVIVNNKLIANERLELIKDEIKDRVLDNLTTAEPLPPLHIEAEVSPTQHTAQNNLESTSNTVLSQESTNNTQYIETNSLDTKITKTFEQTFEKFLYSNPTERPYVPKQKTSKKFAYIITFLNTKVIPKYDCHDNDFIKTQTIIYCAAYTAALCNGSKIKDYCEHQPLHTDSSKDRKPNWQIRLDKRIGKLRKEVGRMTQYIQGNRGLGLMTHVEKIKHKHKTHSNYEEPNKTDNQFLDTLKQKLNALSSRRRRYLNCTQRKQQNAQFMNNERQFYRKLTANTTNLQTTDTAIHNSPTKEQLHEFWSSIWGKSTQHNHNASWIGEEKQKHNEIPEMTFDYIPLEVFMNVLKATHNWKTPGTDHIHNFYYKKFTCTHPSLHNHINDFVRRPDTIPTFITQGVTYMIPKDAKSTDPANYRPITCLQTIYKITTSCISQVINKHLIEHNILAEEQKGCRKYSQGCKEQITIDTVAMKYTTSAKKDMCTMYIDYQKAFDSVPHSWLVYILHLYKIHPILIEFLKEVMKHWVTKLKIGKSIETAPIPIRRGIFQGDALSPLWFCLALNPLSNLLNDTNNGLKILSEQSENIRITHLMYMDDIKLYSNAVPSLHKLADITQMFSDDIGMVFGIDKCKTFTFRKGKYIENDPYILGTGQTIESLDNNNTYKYLGFQQSHQVQQKQAKAELTKKYKHRLNTIMKSQLTSRNLVKAINTYAISILTYSFGIIKWSKTDLTRMQQLINTTLTKYRKHHPRSCVQRMTLPREDGGRGIIDIENLHNKQITTLRTFFFEKAQNSILHKIITDTDKHHTPLNLLCKDTQANEHIKSNRDKINAWQHKSLHGRHRLDLQQPHVDIKASNAWLQRGELFPETEGFMIAIQDQIIDTKNYQKYIIRRPNFQDSCRRCHSASETIQHITGACRSIAQTDYKHRHDQVAAIIHQNLAHKHKLITEKIPYYKYRPEAVLENTEFKLYWDRTVITDKTIYNNRPDIALIDKQNKTVFLIDIAICNTHNLVATHTEKIAKYTELAIEIKTQWQMSHVRTVPIVVSSTGVIPKSLHTSLSNLHINPSTYLLLQKAVILNTCRLTRKFLNSEDM

SEQ ID NO: 7274 - protein, 1258 aa, Scirpophaga incertulas
MTWTREMNEFIWRTYLYITHLDTKIRGYLDPLYAKFTEKFPEIKVSKQRLGDQKRAILRNKLLPESTLESIKNEVRIAFQNTVTARNTIALTQPLLNQSQQPANSNTRLRWTDDINEAIIREYFKITNLEQNRTAYRKPLHTIITELFPNIAHVSEQRIADQRRVIMNNSLISDNRLEEIKEEIRSSLNMQTTENTQYNETQVTTPNLNSTSESNQTDHITTSQNISSNMHTNTTELHNETISTIFTDEALDTKITKTFEEAYNKYSLTDPTKRPFIPKQKTSKKLAYIISYLNNNVLPNYETIEDDFLKTHSLIYCAAHTAALCNGSKIKENIQTTTILQQQHTIIDKRPKWLKRLDRRIAIIRKEIGRFTQYNNGNRSLGLMTYIERIKHKYRKHSSYEEPNTTNQQFMDSLKQKLTAITSRRRRYSNCTKRKDQNTQFINSERQFYRNLTIDTSNTKNTSHNSPNSEQFHIYWSNIWSKTSEHNQTATWIQMDKHKLQNVQEMAFDAIPLEIFVKVIQKAHSWKAPGTDHIHNYYYKKLTCLHPSIYKHINNFITNPQTIPDFITQGLTYMIPKDTDHMNPAKYRPITCLQTFYKLTTGCISEMMYKHITQNNILAEEQKGCRKYSQGCKEQLTIDSIAMNHNIKLKNDICTMYIDYQKAFDSVPHSWLLFILQHYKINPTIINFLTITMEHWNTKLKVGKLIQTDPIPIKRGFFQGDALSPLWFCLALNPLSNLLNTSENGLIIQDSSTPVSKLTHLLFMDDIKLYSNDISGLHSLADLTQEFSDDINMEFGINKCKTFTLRKGRHIESNPYTLESGQEIDAMTPNCTYKYLGFEQSHQIEQKLTKNKIITKYKQRLNMLIRSQLTSRNLVKSINSFAIPVLTYSFGIINWTKTDLIKLQRLINTSLTTNRKHHPRSCVQRLTLPRDEGGRGLIDITNLHNQQITNLRKFFLQKADQSHFHKVISLLDKHYTPLNLHSTGPQANEHITSKTDKIAAWAHKSLHGRHRLDLQQPHVDMKASNAWLRRGELFPETEAFMIAIQDQVIDTANYQKFIIHRPHYYDSCRRCHGASETIQHITGACRAIAQTDYKHRHDQVASIIHQSLAIQTKLTTEKVSYYKYKPQAVLENENFKLYWDRTIITDKTIYNNRPDITMLDKRNKLVYIIDIAICNTHNLVNTHSEKIAKYTDLSIELKTQWNVTHTKTIPIILSTTGVIPKTLHNGLNTLKISPSTYLLLQKAVILNTCRLTRKFLNS

SEQ ID NO: 7275 - protein, 1384 aa, Idaea aversata
METRAQRKLRLGSLPGGDRRGALGADAECLSMQTVSGSGLSRRAPAGKPEQCDSRQSSSSPSSTKSLFSSLPSSPPSYLNFNQPSPSSSLHSFNSEAMDVVREANANNPAPTTGLVRARLKWTAEINEFIWRTYLTVTKLETRVRGYLDPLYNKFREKYPEIDVSKQRIGDQRRVIIKNKLIPDNTLQRIKDEVALTLQPEEPHTITQQIQHSSSTRMRWSDDINEAIMKVYYKLTHVETNRTAYRKPLHTIITEQFPQIAHVSEQRISDQRRIIINNRLITNDRLEQIKQEVRVELQLSNNTISDTTTLQDTISQNELTRNYEPLEYTENTEPDLMNEATQELPEPISIQFAEEDLDDKIFNTFKETYEFYLDSNPIDRPFIPKQTISKKFFHIISYLNTKVIPEYDNINNDFIKTQTIVYCAALTAALCNGTKIKTQNNIQNNNQQVNNNNKIPNWQKRLDSKIQKLRKDIGRMTQYIRGNRNFRLIQHVEDIKNRFKTHSTHEEPNQTDNQYLDSIKQRLNAITSRRRRYINCTKRKQQNAQFTSNEKQFYRKLTSNTANTQNADRDVVPNNPTPEQFHEYWSNIWSIPSEHNKDAEWIQTDKQTLDAIPQMPFDYIPLDIFIDVIKHIHNWKSPGTDHIHNFFYKKFTSLHPSLYKHINDFIKFPNTMPKFISQGVTYMIPKDHTDFSNPSKYRPITCLQTIYKIITSCLSRVMYNHLMQNNILAEEQKGCRKFSQGCKEQLLIDAIAMKHNKGKTDVCTMYIDYQKAFDSIPHSWLTYILEHYKIHPIIIDFLKQSMLNWETKLKINKFLETEPISIKRGIFQGNALSPLWFCLALNPLSNLLNHSDHGLPLVANNTETIKLTHLMYMDDIKLFSDSTASLHHLADLTQEFSCDINMTFGIDKCKTFTYRKGKFIDNEEYPLSSGQTIESLIQNDTYKYLGFQQSLQISQKQTKEQLIKKFKHRITILLKSQLLSRNLVKAINTFAVSILTYSFGIINWSKSDLLRLQRIINTSMTAHRKHHPRSCVQRMTLPREEGGRGFIDVTNLHSKQINNLRKYFSEKSQNSILHRIIIQIDLNFTPLKLHTLNSQTDQYNDKLISDKDRIAIWTNKSLHGRHRLDLQQPHVDLKASNAWLERGELFPETEGFMIGIQDQVIDTANYQKFIIRRPNTTDTCRRCHSASETIQHITGACRSIAQTDYKHRHDQVASIIHQHLAFQCKLISEKVAYYKYNPDVVLENANYKLYWDRTIITDKTIYNNRPDITLLDKQNKSVYLIDIAVCNTHNLVTTHSEKIAKYTELSVEIRTQWRVNQTRTVPIVISTTGVVPKTLHTSLSILNINPLVYIQLQKAAILNTCRLTRKGDMQAWAWIDKMFDIFKE

SEQ ID NO: 7276 - protein, 1376 aa, Idaea aversata
METRAQRKLRLGSLPGGDRRGALGADAECLSMQTVSGSGLSRRAPAGKPEQCDSRQSSSSPSSTKSLFSSLPSSPPSYLNFNQPSPSSSLHSFNSEAMDVVREANANNPAPTTGLVRARLKWTAEINEFIWRTYLTVTKLETRVRGYLDPLYNKFREKYPEIDVSKQRIGDQRRVIIKNKLIPDNTLQRIKDEVALTLQPEEPHTITQQIQHSSSTRMRWSDDINEAIMKVYYKLTHVETNRTAYRKPLHTIITEQFPQIAHVSEQRISDQRRIIINNRLITNDRLEQIKQEVRVELQLSNNTISDTTTLQDTISQNELTRNYEPLEYTENTEPDLMNEATQELPEPISIQFAEEDLDDKIFNTFKETYEFYLDSNPIDRPFIPKQTISKKFFHIISYLNTKVIPEYDNINNDFIKTQTIVYCAALTAALCNGTKIKTQNNIQNNNQQVNNNNKIPNWQKRLDSKIQKLRKDIGRMTQYIRGNRNFRLIQHVEDIKNRFKTHSTHEEPNQTDNQYLDSIKQRLNAITSRRRRYINCTKRKQQNAQFTSNEKQFYRKLTSNTANTQNADRDVVPNNPTPEQFHEYWSNIWSIPSEHNKDAEWIQTDKQTLDAIPQMPFDYIPLDIFIDVIKHIHNWKSPGTDHIHNFFYKKFTSLHPSLYKHINDFIKFPNTMPKFISQGVTYMIPKDHTDFSNPSKYRPITCLQTIYKIITSCLSRVMYNHLMQNNILAEEQKGCRKFSQGCKEQLLIDAIAMKHNKGKTDVCTMYIDYQKAFDSIPHSWLTYILEHYKIHPIIIDFLKQSMLNWETKLKINKFLETEPISIKRGIFQGDALSPLWFCLALNPLSNLLNHSDHGLPLVANNTETIKLTHLMYMDDIKLFSDSTASLHHLADLTQEFSCDINMTFGIDKCKTFTYRKGKFIDNEEYPLSSGQTIESLIQNDTYKYLGFQQSLQISQKQTKEQLIKKFKHRITILLKSQLLSRNLVKAINTFAVSILTYSFGIINWSKSDLLRLQRIINTSMTAHRKHHPRSCVQRMTLPREEGGRGFIDVTNLHSKQINNLRKYFSEKSQNSILHRIIIQIDLNFTPLKLHTLNSQTDQYNDKLISDKDKIAIWTNKSLHGRHRLDLQQPHVDLKASNAWLERGELFPETEGFMIGIQDQVIDTANYQKFIIRRPNTTDTCRRCNSASETIQHITGACRSIAQTDYKHRHDQVASIIHQHLAFQCKLISEKVAYYKYNPDVVLENANYKLYWDRTIITDKTIYNNRPDITLLDKQNKSVYLIDIAVCNTHNLVTTHSEKIAKYTELSVEIRTQWRVNQTRTVPIVISTTGVVPKTLHTSLSILNINPLVYIQLQKAAILNTCRLTRKFLNNNNSTLS

SEQ ID NO: 7277 - protein, 1376 aa, Idaea aversata
METRAQRKLRLGSLPGGDRRGALGADAECLSMQTVSGSGLSRRAPAGKPEQCDSRQSSSSPSSTKSLFSSLPSSPPSYLNFNQPSPSSSLHSFNSEAMDVVREANANNPAPTTGLVRARLKWTAEINEFIWRTYLTVTKLETRVRGYLDPLYNKFREKYPEIDVSKQRIGDQRRVIIKNKLIPDNTLQRIKDEVALTLQPEEPHTITQQIQHPSSTRMRWSDDINEAIMKVYYKLTHVETNRTAYRKPLHTIITEQFPQIAHVSEQRISDQRRVIINNRLITNDRLEQIKQEVRVELQLSNNTISDTTTLQDTISQNELTRNYEPLEYTENTEPDLMNEATQELPEPISIQFAEEDLDDKIFNTFKETYEFYLDSSPIDRPFIPKQTISKKFFHIISYLNTKVIPEYDNINNDFIKTQTIVYCAALTAALCNGTKIKTQNNIQNNNQQVNNNNKIPNWQKRLDSKIQKLRKDIGRMTQYIRGNRNFRLIQHVEDIKNRFKTHSTHEEPNQTDNQYLDSIKQRLNAITSRRRRYINCTKRKQQNAQFTSNEKQFYRKLTSNTANTQNADRDVVPNNPTPEQFHEYWSNIWSITSEHNKDAEWIQTDKQTLDAIPQMPFDYIPLDIFVDVIKHIHNWKSPGTDHIHNFYYKKFTSLHPSLYKHINDFIKFPNTMPKFISQGVTYMIPKDHTDFSNPSKYRPITCLQTIYKIITSCLSRVMYNHLMQNNILAEEQKGCRKFSQGCKEQLLIDAIAMKHNKGKTDVCTMYIDYQKAFDSIPHSWLTYILEHYKIHPIIIDFLKQSMLNWETKLKINKFLETEPISIKRGIFQGDALSPLWFCLALNPLSNLLNHSDHGLPLVANNTETIKLTHLMYMDDIKLFSDSTASLHHLADLTQEFSCDINMTFGIDKCKTFTYRKGKFIDNEEYPLSSGQTIESLIQNDTYKYLGFQQSLQISQKHTKEQLIKKFKHRITILLKSQLLSRNLVKAINTFAVSILTYSFGIINWSKSDLLRLQRIINTSMTAHRKHHPRSCVQRMTLPREEGGRGFIDVTNLHSKQINNLRKYFSEKSQNSILHRIIIQIDLNFTPLKLHTLNSQTDQYNDKLISDKDKIAIWTNKSLHGRHRLDLQQPHVDLKASNAWLERGELFPETEGFMIGIQDQVIDTANYQKFIIRRPNTTDTCRRCHSASETIQHITGACRSIAQTDYKHRHDQVASIIHQHLAFQCKLISEKVAYYKYNPDVVLENANYKLYWDRTIITDKTIYNNRPDITLLDKQNKSVYLIDIAVCNTHNLVTTHSEKIAKYTELSVEIRTQWRVNQTRTIPIVISTTGVVPKTLHTSLSILNINPLVYIQLQKAAILNTCRLTRKFLNNNNSTLS

SEQ ID NO: 7278 - protein, 1376 aa, Idaea aversata
METRAQRKLRLGSLPGGDRRGALGADAECLSMQTVSGSGLSRRAPAGKPEQCDSRQSSSSPSSTKSLFSSLPSSPPSYLNFNQPSPSSSLHSFNSEAMDVVREANANNPAPTTGLVRARLKWTAEINEFIWRTYLTVTKLETRVRGYLDPLYNKFREKYPEIDVSKQRIGDQRRVIIKNKLIPDNTLQRIKDEVALTLQPEEPHTITQQIQHSSSTRMRWSDDINEAIMKVYYKLTHVETNRTAYRKPLHTIITEQFPQIAHVSEQRISDQRRVIINNRLITNDRLEQIKQEVRVELQLSNNTISDTTTLQDTISQNELTRNYEPLEYTENTEPDLMNEATQELPEPISIQFAEEDLDDKIFNTFKETYEFYLDSNPIDRPFIPKQTISKKFFHIISYLNTKVIPEYDNINNDFIKTQTIVYCAALTAALCNGTKIKTQNNIQNNNQQVNNNNKIPNWQKRLDSKIQKLRKDIGRMTQYIRGNRNFRLIQHVEDIKNRFKTHSTHEEPNQTDNQYLDSIKQRLNAITSRRRRYINCTKRKQQNAQFTSNEKQFYRKLSSNTANTQNADRDVVPNNPTPEQFHEYWSNIWSIPSEHNKDAEWIQTDKQTLDAIPQMPFDYIPLDIFIDVIKHIHNWKSPGTDHIHNFYYKKFTSLHPSLYKHINDFIKFPNTMPKFISQGVTYMIPKDHTDFSNPSKYRPITCLQTIYKIITSCLSRVMYNHLMQNNILAEEQKGCRKFSQGCKEQLLIDAIAMKHNKGKTDVCTMYIDYQKAFDSIPHSWLTYILEHYKIHPIIIDFLKQSMLNWETKLKINKFLETEPISIKRGIFQGDALSPLWFCLALNPLSNLLNHSDHGLPLVANNTETIKLTHLMYMDDIKLFSDSTASLHHLADLTQEFSCDINMTFGIDKCKTFTYRKGKFIDNEEYPLSSGQTIESLIQNDTYKYLGFQQSLQISQKHTKEQLIKKFKHRITILLKSQLLSRNLVKAINTFAVSILTYSFGIINWSKSDLLRLQRIINTSMTAHRKHHPRSCVQRMTLPREEGGRGFIDVTNLHSKQINNLRKYFSEKSQNSILHRIIIQIDLNFTPLKLHTLNSETDQYNDKLISDKDKIAIWTNKSLHGRHRLDLQQPHVDLKASNAWLERGELFPETEGFMIGIQDQVIDTANYQKFIIRRPNTIDTCRRCHSASETIQNITGACRSIAQTDYKHRHDQVASIIHQHLAFQCKLISEKVAYYKYNPDVVLENANYKLYWDRTIITDKTIYNNRPDITLLDKQNKSVYLIDIAVCNTHNLVTTHSEKIAKYTELSVEIRTQWRVNQTRTVPIVISTTGVVPKTLHTSLSILNINPLVYIQLQKAAILNTCRLTRKFLNNNNSTLS

SEQ ID NO: 7279 - protein, 1369 aa, Idaea aversata
METRQQKRKRLTPLPGGYRQGTLGANAECCSGRAVGGRELRRRAPTGSPEQSDSRPKSSSSSSPKSLFSSIPSSPPSYLNYNLNKSLPSPSSSIHSTNSAVNVVQEAIADNPAPTTGRVRAPRLKWTQEMNEFIWRTYLIITNLETKPRGYLDPLYIQFKAKFPQINVSKQRIGDQRRAIVRNQLIPPATLQLIKEEAANSLQNTNTSLSQSQSVNIGTQQPTSSRMSWPDDINEAIMREYYKITNLESNRSAYRQPLHRAIIEQFPHISHVSEQRIADQRRVIVNNKLITSERLSTIRDEVRMSLNSETTEQSLPPTNYEIDSTINTLSNLVEPSHDTATIDSNNSTHLTDSEDLDDKISKTFEETYDKLSHTNPVQRPFIPKQKTSKRFAHIISYLNSQVIPKYDSTDNDFIKTQTIIYSAAYTAALCNGSKIKELVQTPPSGTPSNYRTDKRPNWLKRLDRKISKLRKAIGRFTQYIQGNRSLGLIANIERIKNIYKTHSSYEEPNRTDNQFLDTLKQKLNSFSSRRRRYLNCTERKNQNAQFTNNERQFYRNLANNTTNLQTTDTTLPSAPPKEELHEFWSNIWATPTHHNQDAAWIESDRQNIENIPDMDFEFIPLDVFNNVLKSAHNWKTPGTDHIHNFYYKKFTSLHPTLYHHINNFLKYPQTIPSFVMQGITYLIPKDTDLTNPAKYRPITCLQTIYKIITSCISQVVYKHLTQNNLLAEEQKGCRKYSQGCKEQITIDSIAMKYTSKTKTDMCTMYVDYQKAFDSVPHSWLLYILQHYKIHPSLIEFLREVMQHWVTKLRLGKFLETAEIPIKRGIFQGDALSPLWFCLALNPLSNLLNSTDAGLQVVSQNSENTQITHLMYMDDIKLYSNSVPSLHNLADVTQMFSNDIRMTFGIDKCKTYTFREGKYIENEPFTLTNEQTIEPLDENSTYKYLGFHQSNQVHQKQTKTQLTKNFKHRLNVLMKSQLSSRNLVKAINTYAIPILTYSFGIISWSKTDLNRLQQMINTTLTKQRKHHPRSCVQRLTLPREEGGRGIIDIKNLHNKQITSLRKYFFERAESSLLHRIITDTDRRFTPLNLLSKDTQPNEQITSNTDKIAAWQHKSLHGRHRSDLLQPHVDMKASNAWLQRGELFPETEGFMLAIQDQVIDTKNYQKFIIRRPDVQDSCRRCHSAPETIQHITGACRAIVQTDYKHRHDQVAAIIHQYLAHQCKFITEKVPYYKYIPEAVLENNTFKLYWDRTIITDKTVYNNRPDITLLDKINKKVFLIDIAICNTHNLVTTHSEKIAKYTELSIEIKTQWQVTQVRTIPIVISSTGVIPKTLHNGLNILHITPSIYLLLQKAVILNTCRLTRKFLNSLDS

SEQ ID NO: 7280 - protein, 1368 aa, Idaea aversata
METRQQKRKRLTPLPGGYRQGTLGANAECCSGRAVGGRELRRRAPTGSPEQSDSRPKSSLSSPKSLFSSIPSSPPSYLNYNLNKSLPSPSSSIHSTNSAVNVVQEAIADNPAPTTGRVRAPRLKWTQEMNEFIWRTYLIITNLETKPRGYLDPLYIQFKAKFPQINISKQRIGDQRRAIVRNQLIPPATLQLIKEEAANSLQNTNTSLSQSQSVNIGTQQPTSSRMSWPDDINEAIMREYYKITNLESNRSAYRQPLHRAIIEQFPHISHVSEQRIADQRRVIVNNKLITSERLLTIRDEVRMSLNSETTEQSLPPTSFEIDSTINTLSNLVEPSPDTATLDSNNSTHLTDSEDLDDKISKTFEETYDKLSHTNPVQRPFIPKQKTSKRFAHIISYLNTQVIPKYDSTDNDFIKTQTIIYSAAYTAALCNGSKIKELVQTPPSETPNNYRTDKRPNWLKRLDRKISKLRKAIGRFTQYIQGNRSLGLIANIERIKNIYKTHSSYEEPNRTDNQFLDTLKQKLNSFSSRRRRYLNCTERKNQNAQFTNNERQFYRNLANNTTNLQTTDTTLSNAPPKEDLHEFWSNIWATPTHHNQDAAWIESDRQNIDNIPDMDFEFIPLDVFNNVLKSTHNWKTPGTDHIHNFYYKKFTSLHPTLYHHINNFLKYPQTIPSFVMQGITYLIPKDADLTNPAKYRPITCLQTIYKIITSCISQVVYKHLTQNNLLAEEQKGCRKYSQGCKEQITIDSIAMKYTSKTKTDMCTMYIDYQKAFDSVPHSWLLYILQHYKIHPSLIEFLREVMQHWVTKLRLGKFLETDEIPIKRGIFQGDALSPLWFCLALNPLSNLLNSTDAGLQIVSQNSENTQITHLMYMDDIKLYSNSVPSLHNLADVTQMFSNDIGMTFGIDKCKTYTFREGKYIENEPYTLTTDQTIEPLDENSTYKYLGFHQSNQVHQKHAKTQLTKTFKHRLNIIMKSQLSSRNLVKAINTYAIPILTYSFGIINWSKTDLNRLQQMINTTLTKQRKHHPRSCVQRLTLPREEGGRGIIDIKNLHNKQITSLRKYFFERAESSLLHRIITDSDRRFTPLNLLSKDTQPNEQITSNADKIAAWQHKSLHGRHRSDLLQPHVDMKASNAWLQRGELFPETEGFMLAIQDQVIDTKNYQKFIIRRPDVQDSCRRCHSAPETIQHITGACRAIVQTDYKHRHDQVAAIIHQYLAHQCKFITEKVPYYKYIPEAVLENNTFKLYWDRTIITDKTVYNNRPDITLLDKINKKVFLIDIAICNTHNLVTTHSEKIAKYTELSIEIKTQWQVSQVRTIPIVISSTGVIPKTLHTGLNILHITPSIYLLLQKAVILNTCRLTRKFLNSLDC

SEQ ID NO: 7281 - protein, 1369 aa, Idaea aversata
METRQQKRKRLTPLPGGYRQGTLGANAECCSGRAVGGRELRRRAPTGSPEQSDSRPKSSSSSSPKSLFSSIPSSPPSYLNYNLNKSLPSPSSSIHSTNSAVNVVQEAIADNPAPTTGRVRAPRLKWTQEMNEFIWRTYLIITNLETKPRGYLDPLYIQFKAKFPQINVSKQRIGDQRRAIVRNQLIPPASLKLIKEEAANSLQNTNTSLSQSQSVNIGTQQPTSSRMSWPDDINEAIMREYYKITNLESNRSAYRQPLHRAIIEQFPHISHVSEQRIADQRRVIVNNKLITNERLLTIRDEVRMSLNSETTEQSLPPTNYEIDSTINTLSNLVEPSHDTATIDSNNSTHLTDSEDLDDKISKTFEETYDKLSHTNPVQRPFIPKQKTSKRFAHIISYLNSQVIPKYDSTDNDFIKTQTIIYSAAYTAALCNGSKIKELVQTPPSGTPSNYRTDKRPNWLKRLDRKISKLRKAIGRFTQYIQGNRSLGLIANIERIKNIYKTHSSYEEPNRTDNQFLDTLKQKLNSFSSRRRRYLNCTERKNQNAQFTNNERQFYRNLANNTTNLQTTDTTLPSAPPKEELHEFWSNIWATPTHHNQDAAWIESDRQNIENIPDMDFEFIPLDVFNNVLKSAHNWKTPGTDHIHNFYYKKFTSLHPTLYHHINNFLKYPQTIPSFVMQGITYLIPKDTDLTNPAKYRPITCLQTIYKIITSCISQVVYKHLTQNNLLAEEQKGCRKYSQGCKEQITIDSIAMKYTSKTKTDMCTMYVDYQKAFDSVPHSWLLYILQHYKIHPSLIEFLREVMQHWVTKLRLGKFLETAEIPIKRGIFQGDALSPLWFCLALNPLSNLLNSTDAGLQVVSQNSENTQITHLMYMDDIKLYSNSVPSLHNLADVTQMFSNDIRMTFGIDKCKTYTFREGKYIENEPFTLTNEQTIEPLDENSTYKYLGFHQSNQVHQKQTKTQLTKNFKHRLNVLMKSQLSSRNLVKAINTYAIPILTYSFGIISWSKTDLNRLQQMINTTLTKQRKHHPRSCVQRLTLPREEGGRGIIDIKNLHNKQITSLRKYFFERAESSLLHRIITDTDRRFTPLNLLSKDTQPNEQITSNTDKIAAWQHKSLHGRHRSDLLQPHVDMKASNAWLQRGELFPETEGFMLAIQDQVIDTKNYQKFIIRRPDVQDSCRRCHSAPETIQHITGACRAIVQTDYKHRHDQVAAIIHQYLAHQCKFITEKVPYYKYIPEAVLENNTFKLYWDRTIITDKTVYNNRPDITLLDKINKKVFLIDIAICNTHNLVTTHSEKIAKYTELSIEIKTQWQVTQVRTIPIVISSTGVIPKTLHNGLNILHITPSIYLLLQKAVILNTCRLTRKFLNSLDS

SEQ ID NO: 7282 - protein, 1368 aa, Idaea aversata
METRQQKRKRLTPLPGGYRQGTLGANAECCSGRAVGGRELRRRAPTGSPEQSDSRPKSSSSSPKSLFSSIPSSPPSYLNYNLNKSLPSPSSSIHSTNSAVNVVQEAIADNPAPTTGRVRAPRLKWTQEMNEFIWRTYLIITNLETKPRGYLDPLYIQFKAKFPQINVSKQRIGDQRRAIVRNQLIPPATLQLIKEEAANSLQNTNTSLSQSQSVNIGTQQPTSSRMSWPDDINEAIMREYYKITNLESNRSAYRQPLHRAIIEQFPHISHVSEQRIADQRRVIVNNKLITSERLLTIRDEVRMSLNSETTEQSLPPTNYEIDSRINTLSNLVELSHDTATIDSNNSTHLTDPEDLDDKISKTFEETYDKLSHTNPVQRPFIPKQKTSKRFAHIISYLNSQVIPKYDSTDNDFIKTQTIIYSAAYTAALCNGSKIKELIQTPPSGTPSNYRTDKRPNWLKRLDRKISKLRKAIGRFTQYIQGNRSLGLIANIERIKNIYKTHSSYEEPNRTDNQFLDTLKQKLNSFSSRRRRYLNCTERKNQNAQFTNNERQFYRNLANNTTNLQTTDTTLPSAPPKEELHEFWSNIWATPTHHNQDAAWIESDRQNIENIPDMDFEFIPLDVFNNVLKSAHNWKTPGTDHIHNFYYKKFTSLHPTLYHHINNFLKYPQTIPSFVMQGITYLIPKDTDLTNPAKYRPITCLQTIYKIITSCISQVVYKHLTQNNLLAEEQKGCRKYSQGCKEQITIDSIAMKYTSKTKTDMCTMYVDYQKAFDSVPHSWLLYILQHYKIHPSLIEFLREVMQHWVTKLRLGKFLETAEIPIKRGIFQGDALSPLWFCLALNPLSNLLHSTDAGLQVVSQNSENTQITHLMYMDDIKLYSNSVPSLHNLADVTQMFSNDIRMTFGIDKCKTYTFREGKYIENEPFTLTNEQTIEPLDENSTYKYLGFHQSNQVHQKQTKTQLTKNFKHRLNVLMKSQLSSRNLVKAINTYAIPILTYSFGIISWSKTDLNRLQQMINTTLTKQRKHHPRSCVQRLTLPREEGGRGIIDIKNLHNKQITSLRKYFFERAESSLLHRIITDTDRRFTPLNLLSKDTQPNEQITSNTDKIAAWQHKSLHGRHRSDLLQPHVDMKASNAWLQRGELFPETEGFMLAIQDQVIDTKNYQKFIIRRPDVQDSCRRCHSAPETIQHITGACRAIVQTDYKHRHDQVAAIIHQYLAHQCKFITEKVPYYKYIPEAVLENNTFKLYWDRTIITDKTVYNNRPDITLLDKINKKVFLIDIAICNTHNLVTTHSEKIAKYTELSIEIKTQWQVTQVRTIPIVISSTGVIPKTLHNGLNILHITPSIYLLLQKAVILNTCRLTRKFLNSLDS

SEQ ID NO: 7283 - protein, 1368 aa, Idaea aversata
MEKRQQKRKRLTPLPGGYRQGTLGANAECCSGRAVGGRELRRRAPTGSPEQSDSRPKSSLSSPKSLFSSIPSSPPSYLNYNLNKSLPSPSSSIHSTNSAVNVVQEAIADNPAPTTGRVRAPRLKWTQEMNDVIWRTYLIITNLETKPRGYLDPLYIQFKAKFPQINVSKQRIGDQRRAIVRNQLIPPATLQLIKEEAANSLQNTNTSLSQSQSVNIGTQQPTSSRMSWPDDINEAIMREYYKITNLESNRSAYRQPLHRAIIEQFPHISHVSEQRIADQRRVIVNNKLITSERLLTIRDEVRMSLNSETTEQSLPPTSFEIDSTINTLSNLVEPSPDTATLDSNNSTHLTDSEDLDDKISKTFEETYDKLSHTNPVQRPFIPKQKTSKRFAHIISYLNTQVIPKYDSTDNDFIKTQTIIYSAAYTAALCNGSKIKELVQTPPSETPNNYRTDKRPNWLKRLDRKISKLRKAIGRFTQYIQGNRSLGLIANIERIKNIYKTHSSYEEPNRTDNQFLDTLKQKLNSFSSRRRRYLNCTERKNQNAQFTNNERQFYRNLANNTTNLQTTDTTLSNAPPKEDLHEFWSNIWATPTHHNQDAAWIESDRQNIDNIPDMDFEFIPLDVFNNVLKSTHNWKTPGTDHIHNFYYKKFTSLHPTLYHHINNFLKYPQTIPSFVMQGITYLIPKDADLTNPAKYRPITCLQTIYKIITSCISQVVYKHLTQNNLLAEEQKGCRKYSQGCKEQITIDSIAMKYTSKTKTDMCTMYIDYQKAFDSVPHSWLLYILQHYKIHPSLIEFLREVMQHWVTKLRLGKFLETDEIPIKRGIFQGDALSPLWFCLALNPLSNLLNSTDAGLQIVSQNSENTQITHLMYMDDIKLYSNSVPSLHNLADVTQMFSNDIGMTFGIDKCKTYTFREGKYIENEPYTLTTDQTIEPLDENSTYKYLGFHQSNQVHQKHAKTQLTKTFKHRLNIIMKSQLSSRNLVKAINTYAIPILTYSFGIINWSKTDLNRLQQMINTTLTKQRKHHPRSCVQRLTLPREEGGRGIIDIKNLHNKQITSLRKYFFERAESSLLHRIITDSDRRFTPLNLLSKDTQPNEQITSNADKIAAWQHKSLHGRHRSDLLQPHVDMKASNAWLQRGELFPETEGFMLAIQDQVIDTKNYQKFIIRRPDVQDSCRRCHSAPETIQHITGACRAIVQTDYKHRHDQVAAIIHQYLAHQCKFITEKVPYYKYIPEAVLENNTFKLYWDRTIITDKTVYNNRPDITLLDKINKKVFLIDIAICNTHNLVTTHSEKIAKYTELSIEIKTQWQVSQVRTIPIVISSTGVIPKTLHTGLNILHITPSIYLLLQKAVILNTCRLTRKFLNSLDC

SEQ ID NO: 7284 - protein, 1368 aa, Idaea aversata
METRQQKRKRLTPLPGGYRQGTLGANAECCSGRAVGGRELRRRAPTGSPEQSDSRPKSSLSSPKSLFSSIPSSPPSYLNYNLNKSLPSPSSSIHSTNSAVNVVQEAIADNPAPTTGRVRAPRLKWTQEMNEFIWRTYLIITNLETKPRGYLDPLYIQFKAKFPKINVSKQRIGDQRRAIVRNQLIPPATLQLIKEEAANSLQNTNTSLSQSQSVNIGTQQPTSSRMSWPDDINEAIMREYYKITNLESNRSAYRQPLHRAIIEQFPHISHVSEQRIADQRRVIVNNKLITSERLLTIRDEVRMSLNSETTEQSLPPTSFEIDSTINTLSNLVEPSPDTATLDSNNSTHLTDSEDLDDKISKTFEETYDKLSHTNPVQRPFIPKQKTSKRFAHIISYLNTQVIPKYDSTDNDFIKTQTIIYSAAYTAALCNGSKIKELVQTPPSETPNNYRTDKRPNWLKRLDRKISKLRKAIGRFTQYIQGNRSLGLIANIERIKNIYKTHSSYEEPNRTDNQFLDTLKQKLNSFSSRRRRYLNCTERKNQNAQFTNNERQFYRNLANNTTNLQTTDTTLSNAPPKEDLHEFWSNIWATPTHHNQDAAWIESDRQNIDNIPDMDFEFIPLDVFNNVLKSTHNWKTPGTDHIHNFYYKKFTSLHPTLYHHINNFLKYPQTIPSFVMQGITYLIPKDADLTNPAKYRPITCLQTIYKIITSCISQVVYKHLTQNNLLAEEQKGCRKYSQGCKEQITIDSIAMKYTSKTKTDMCTMYIDYQKAFDSVPHSWLLYILQHYKIHPSLIEFLREVMQHWVTKLRLGKFLETDEIPIKRGIFQGDALSPLWFCLALNPLSNLLNSTDAGLQIVSQNSENTQITHLMYMDDIKLYSNSVPSLHNLADVTQMFSNDIGMTFGIDKCKTYTFREGKYIENEPYTLTTDQTIEPLDENSTYKYLGFHQSNQVHQKHAKTQLTKTFKHRLNIIMKSQLSSRNLVKAINTYAIPILTYSFGIINWSKTDLNRLQQMINTTLTKQRKHHPRSCVQRLTLPREEGGRGIIDIKNLHNKQITSLRKYFFERAESSLLHRIITDSDRRFTPLNLLSKDTQPNEQITSNADKIAAWQHKSLHGRHRSDLLQPHVDIKASNAWLQRGELFPETEGFMLAIQDQVIDTKNYQKFIIRRPDVQDSCRRCHSAPETIQHITGACRAIVQTDYKHRHDQVAAIIHQYLAHQCKFITEKVPYYKYIPEAVLENNTFKLYWDRTIITDKTVYNNRPDITLLDKINKKVFLIDIAICNTHNLVTTHSEKIAKYTELSIEIKTQWQVSQVRTIPIVISSTGVIPKTLHTGLNILHITPSIYLLLQKAVILNTCRLTRKFLNSLDC

SEQ ID NO: 7285 - protein, 1365 aa, Spodoptera exigua
METRAKKRLRIGSLPGGDRRGTPGADAGRSSIRTIGGSELSLRAPTGSPEQCDSRPSSSFSLFPSLPSSPLSCLNYNTDYSSISSPPSNNSAAMDVVQEAEANNPAPTTGQARARLRWTREMNEFIWRTYLLVTNLDTKIRGYLDPLYAKFTERFPDMKVSKQRLGDQKRAILRNKLLPDTILEIIKNEVQVELQNNNNNHNTIGLTRITTTELQQTTNASTRLKWTDDINEAIIREYFKITHIETNKTAYRKPLHTSITQQFPIIAHVSEQRIADQRRVILNNRLVSDDRLEQIKREVRDYLSTQSIHNIQHDDISTNNTIFNTSNPDGNANTDTGTTIFQQEMTNTILVDDSLDTKIEKTFEEIFYKYLSTDPTNRPFIPKQKTSKRFAHIISYLNNKILPKYSTKDDDFLKTHALVYCAAHTAALCNGSKIKDHIQTHSTQHVDIRKDRRPNWLRRLDQKILIIRKEIGRMTQYINGNRNLRLITHIEKIKHKYRTHSSYEEPNTTNEQFMDSLKQKLTAITSRRRRYFYCTKRKNQNSEFTNNERQFYRKLATDTTHTQNQQQATEIPHPNSEQLHNYWSNIWSKTSEHNQTATWIQVDKKKLEQLPHMSFDTVPLEVFVKVIQKAHNWKSPGTDHIHNYFYKKLTFLHPSIYNHINDFLKNPHNIPNFITQGLTYMIPKNSDHTNPANYRPITCLQTIYKLITGCISEIIYRHILQNNILAEEQKGCRKYSQGCKEQLTIDLIAMQHSVKQKNDIFTMYIDYQKAFDSVPHSWLLYILDHYKIHPDLIKFLNESMKHWSTKIKLGKSVQTDSIPIRRGIFQGDALSPLWFCLALNPLSNLLNSSDYGLSLKDNTGQNFQLTHLMFMDDIKLYSNSVLGLSSLADLTQTFSDDINMTFGIDKCKTFTLMKGQHIENNPYTLGSGDIIESMTQNCSYKYLGFEQTYQIDKKHAKNKITTKYKHRINMLVRSQLTSRNLFKSINTFAIPILTYSFGIIHWSKTDLRKLQRTINTALTINRKHHPRSCVQRLTLPREDGGRGLIDIENLHNHQIANLRKFFFQKAQQSQLHKLISCLDKNYTPLNLHSSNPQRNESLTTKTDKIAAWERKSLHGRHRLDLQQPHVDIKASNAWLQRGELFPETEGFMIAIQDQVIDTANYQKFIIRRPNYNDSCRRCHSASETIQHITGACRAIAQTDYKHRHDQVAAIIHQSLAIKTKLINDRLPYYKYKPHTVLENENFKLYWDRTIITDKTIYNNRPDITMLDKQNKIVYIIDIAICNTHNLVSTHTEKIAKYTELSIEIKTQWNVAHTKTIPIVVSSTGVIPKTLHNSLNSLNISPSTYLLLQKAVILNTCRLTRKFLNA

SEQ ID NO: 7286 - protein, 1366 aa, Spodoptera exigua
METRAKKRLRIGSLPGGERRGTPGADAGRSSIRTIGGSELSLRAPTGSPEQCDSRPSSSFSLFPSLPSSPLSCLNYNTDYSSISSSPSNNSAAMDVVQEADANNSAPTTGQVRARLRWTREMNEFIWRTYLLVTNLDTKIRGYLDPLHAKFTDRFPDMKVSKQRLGDQKRAILRNKLLPDTTLEVIKNEVQVELQKNNNNHNTIVLTQTTTPELQQSTNASTRLKWTDDINEAIIREYFKITHNETNKTAYRKQLHTTITQQFPTIAHVSEQRIADQRRVIFNNRLVPDDRLEQIKREVRDYLSTQLIQNTQHDDVSTNSTIVNTSNPDGNANRDTGTTIFQEEIINTVLVDDSLDIKIEKTFEEIYYKYLSIDPTNRPFIPKQKTSKRFAHIISYLNNKILPKYSTKDDDFLKTHALIYCSAHTAALCNGSKIKEHNQTPSSIQHTDNRKDRRPNWLRRLDQKILIIRKEIGRMTQYINGNRNLRLITCIEKIKHKYRTHSSYEEPNATNEQFMDSLKQKLTAITSRRRRYFYCTKRKEQNAQFTNSERQFYRTLATDTTHTQNRHQATEMPHPNTEQLHNYWSNIWSKTSEHNQSATWVEDDKERLDQLPQMSFDFIPLEVFVKVIQKAHNWKCPGTDHIHNYYYKKLTFLHPSIYKHINDFIKNPHDIPDFITQGLTYMIPKDSDHTNPAKYRPITCLQTIYKLITGCISEIIYKHITQNNILAEEQKGCRKYSQGCKEQLTIDLIAMKHNAKQKNDIFTMYIDYQKAFDSVPHSWLLYILNHYKIHPDLIKFLTESMKHWSTTIKVGKLVQTDSIPIRRGIFQGDALSPLWFCLALNPLSNLLNSSDYGLSLKHNTGQNLHLTHLMFMDDIKLYSNSISGLSSLADLTQTFSEDIKMSFGIDKCKTFSLIKGQHIENNPYALGSGDIVESMTLNCSYKYLGFEQTYQIDKKYAKNKIITKYKHRLNMLVKSQLTSRNLFKSINTFAIPILTYSFGIINWSKTDLIKLQRIINTSLTINRKHHPRSCVQRLTLPREDGGRGLIDIENLHNHQIANLRKFFFQKAQQSQLHKLISCLDKNYTPLNLHSSNPQRNQSLTTKTDKIAAWERKSLHGRHRLDLQQPHVDIKASNAWLQRGELFPETEGFMIAIQDQVIDTANYQKFIIRRPNYNDSCRRCHSASETIQHITGACRAIAQTDYKHRHDQVAAIIHQSLAIKTKLITDRVPYYKYKPHTVLENENFKLYWDRTIITDKTIYNNRPDITMLDKQNKIVYIIDIAICNTHNLVSTHTEKITKYTELSIEIKTQWNVAHTKTIPIVVSSTGVIPKTLHNSLNSLNISPSTYLLLQKAVILNTCRLTRKFLNA

SEQ ID NO: 7287 - protein, 1365 aa, Spodoptera exigua
METRAKKRLRIGSLPGGDRRGTPGADAGRSSIRTIGGSELSLRAPTGSPEQCDSRPSSSFSLFPSLPSSPLSCLNYNTDYSSISSPPSNNSVAMDVVQEAEANNPAPTTGQARARLRWTREMNEFIWRTYLLVTNLDTKIRGYLDPLYAKFTDRFPDMKVSKQRLGDQKRAILRNKLLPDTILEIIKNEVQVELQNNNNNHNTIGLTRITTTELQQTTNASTRLKWTDDINEAIIREYFKITHIETNKTAYRKQLHTSITQQFPIIAHVSEQRIADQRRVILNNRLVSDDRLEQIKREVRDYLSTQSIHNIQHDDISTNNTIFNTSNTDGNANTDTGTTIFQQEMTNTILVDDSLDTKIEKTFEEIYYKYLSTDPTNRPFIPKQKTSKRFAHIISYLNNKILPKYSTKDDDFLKTHALVYCAAHTAALCNGSKIKDHIQTHSTQHVDIRKDRRPNWLRRLDQKILIIRKEIGRMTQYINGNRNLRLITHIEKIKHKYRTHSSYEEPNTTNEQFMDSLKQKLTAITSRRRRYFYCTKRKDQNSEFTNNERQFYRKLATDTTHTQNQQQATEIPHPNSDQLHNYWSNIWSKTSEHNQTATWIQVDKKKLEQLPHMSFDAIPLEVFVKVIQKAHNWKSPGTDHIHNYFYKKLTFLHPSIHNHINDFLKNPHNIPNFITQGLTYMIPKNSDHTNPANYRPITCLQTIYKLTTGCISEIIYRHILQNNILAEEQKGCRKYSQGCKEQLTIDLIAMQHSVKQKNDIFTMYIDYQKAFDSVPHSWLLYILDHYKIHPDLIKFLNESMKHWSTKIKLGKSVQTDPIPIRRGIFQGDALSPLWFCLALNPLSNLLNSSDYGLSLKDNTGQNFQLTHLMFMDDIKLYSNSVLGLSSLADLTQTFSDDINMTFGIDKCKTFTLMKGQHIENNPYTLGSGDIIESMTQNCSYKYLGFEQTYQIDKKHAKNKITTKYKHRINMLVRSQLTSRNLFKSINTFAIPILTYSFGIIHWSKTDLRKLQRTINTALTINRKHHPRSCVQRLTLAREDGGRGLIDIENLHNQQIGNLRKFFFHKAQQSQIHKLVSCLDQNYTPLKLHSSNPQRNESITTKTDKIAAWERKSLHGRHRLDLQQPHVDIKASNAWLQRGDLFPETEGFMIAIQDQVIDTANYQKYIIRRSNYNDSCRRCHGASETIQHITGACRAIAQTDYKHRHDQVAAIIHQSLAIKTKLITERNPYYKYKPHTVLENENFKLYWDRTIITDKTIYNNRPDITMLDKQNKIVYIIDIAICNTHNLVSTHTEKIAKYTELSIEIKTQWNVTHTKTIPIVLSSTGVIPKTLHNSLNSLNISPSTYLLLQKAVILNTCRLTRKFLNA

SEQ ID NO: 7288 - protein, 1366 aa, Spodoptera exigua
METRAKKRLRIGSLPGGDRRGTPGADAGRSSIRTIGGSELSLRAPTGSPEQCDSRPSSSFSLFPSLPSSPLSCLNYNTEYSSISSSPSNNSAAMDVVQEADANNSAPTTGQVRARLRWTREMNEFIWRTYLLVTNLDTKIRGYLDPLHAKFTDRFPDMKVSKQRLGDQKRAILRNKLLPDITLEAIKNEVQVELQNNNNNHNTIVLTQTTTIKLQQSTNASTRLKWTDDINEAIIREYFKITHNETNKTAYRKQLHTTITQQFPTIAHVSEQRIADQRRVIFNNRLVPDDRLEQIKREVRDYLSTQLIQNTEHDDVLTNSTIVNTSNPDGNANRDTGTTIFQEEIMNTVLVDDSLDIKIEKTFEEIYYKYLSIDPTNRPFIPKQKTSKRFAHIISYLNNKILPKYSTKDDDFLKTHALIYCSAHTAALCNGSKIKEHNQTPSSTQHTDNRKDRRPNWLRRLDQKILIIRKEIGRMTQYINGNRNLRLITCIEKIKHKYRTHSSYEEPNTTNEQFMDSLKQKLTAITSRRRRYFYCTKRKEQNSQFTNSERQFYRTLATDTTHTQNRHQATEMPHPNTEQLHYYWSNIWSKTSEHNQSATWIEDDKERLDQLPQMSFDFIPLEVFVKVIQKAHNWKCPGTDHIHNYYYKKLTFLHPSIYKHINDFIKNPHDIPDFITQGLTYMIPKDSDHTNPAKYRPITCLQTIYKLITGCISEIIYKHITQNNILAEEQKGCRKYSQGCKEQLTIDLIAMKHNAKQKNDIFTMYIDYQKAFDSVPHSWLLYILNHYKIHPDLIEFLTESMKHWSTTIKVGKLVQTDSIPIRRGIFQGDALSPLWFCLALNPLSNLLNSSDYGLSLKDNTGQNLHLTHLMFMDDIKLYSNSISGLSSLADLTQTFSDDIKMSFGIDKCKTFSLIKGQHIENNPYALGSGDIVESMTLNCSYKYLGFEQTYQIDKKYAKNKITTKYKHRLNMLVKSQLTSRNLFKSINTFAIPILTYSFGIINWSKTDLIKLQRIINTSLTINRKHHPRSCVQRLTLPREDGGRGLIDIENLHNHQIANLRKFFFQKAQQSQLHKLISCLDKNYTPLNLHSSNPQRNESLTTKTDKIAAWERKSLHGRHRLDLQQPHVDIKASNAWLQRGELFPETEGFMIAIQDQVIDTANYQKFIIRRPNYNDSCRRCHSASETIQHITGACRAIAQTDYKHRHDQVAAIIHQSLAIKTKLINDRLPYYKYKPHTVLENENFKLYWDRTIITDKTIYNNRPDITMLDKQNKIVYIIDIAICNTHNLVSTHTEKIAKYTELSIEIKTQWNVAHTKTIPIVVSSTGVIPKTLHNSLNSLNISPLTYLLLQKAVILNTCRLTRKFLNA

SEQ ID NO: 7289 - protein, 1437 aa, Laothoe populi
MRLRNRTIPQAGTKANGDGESRPGPPSPGCPAYSGEGAVSQQPAQLHTVADQHDPPSSSCNSPTSLFSSIPSSPPSYLETVFESHSSCSSPTSSVQSSLDVVPEAISAYGTTADTSSSSSPKSLFPSSSSSPPLYLNSNLNYSSPSSSRHSEAVDVVQEAVANNPAPTTGQVRARIKWTQEMNEFIWRTYLIITKLETKIRGYLDPLYIQFTTKFPEIIVSKQRIGDQRRAIVRNYLISDTTLQLIKEEVAHSFRNKDYSGIISTQVSQSTNIGTKQSTSSRMRWTDEVNEAIIREYYRITHLETRRTAYRKPLHTVITEQFPHIAHVSEQRIADQRRVIVNNKLINDERLEQIRQEIRLSFNSGISENLAPVYTETETPLTVPIETHIIIQNTLDNTTPTEESPRTSQCVENSSLNNKIIEIFQQTYKRFLNTNPVERPYIPKQKTSKKFAYIITHLNTKVIPIYDSQDNDFIKTQTIIYCAAFTAALCNGSKIKDVSEHFTQQCIPSNDKRPNWQKRLEKRIAILRKEIGRMTQYLQGNRSLGLIAHIERIKHKYKTHSNYEEPNSTDNQYLDTLKQKLNSLSSRRRRYLNCTQRKQQNAKFINNEKQFYRNLTSNTTNIQETGSTLHNLPSKEHLHEFWSNIWSKPIQHNHNALWIETEKQKTSKIPNMAYEYISLEVFFNILKTTHNWKAPGTDHIHNYYYKKFTSIHPSLHNHVNDFIKYPHTIPAFITQGVTYMIPKGTDSTDPAKYRPITCLQTFYKIITSCVSQIISKHLTSNDILAEEQKRCRKYSQGCKEQITIDTIAMKYTTTSKKDMYTMYIDYQKAFDSVPHSWLVYILQHYKIHPILIKFLEKVMSHWVTKLKIGKSIETDIIHIKRGIFQGDALSPLWFCLALNPLSNLLNDSGNGLTIFTEQSDNINITHLLYMDDIKLYSNSASSLHNLADITQIFSSDIGMTFGINKCKTFTCRKGKFIGNDPYTLDTGHTIESLDQNNTYKYLGFEQSRRIDKKQTKMELLKKYKYRLNIVMKTQLTSRNLVKAVNTFVISVLTYSFGIIKWSKTDLKKMQRLINTTMTKYRKHHPRSCTQRITLPREDGGRGIIDIENLHNKQISTLRNFFFEKAQNSLLHQTIVNTDKNYTPLNLYSKNTQSNEHTTSNRDKILAWQHKSLHGRHRLDLQQPNVDIKASNAWLQRGDLFPETEGFMIAIQDQIIDTRNYQKFIIRRQNVQDTCRRCRSASETIQHITGACRSIAQTDYKHRHDQVAAIIHQYLSYQNKLVTENIPYYKYKPETVLENTNFKLYWDRTIITDKTIYNNRPDITLLDKQNKTVFLIDIAICNTHNLATAHAEKIAKYTELSIEIKTQWQVNHVRTVPIIVSSTGVIPKSLHTSLNILHIRPSTYLLLQKAVILNTCRLTRKFLNSEDLMVKQTYLCDV

SEQ ID NO: 7290 - protein, 1427 aa, Laothoe populi
MRLRNRTIPQAGTRANGDGESRPGPPSPGCPAYSGEGAVSQQPAQLHTVADQHDPPSSSCNSPTSLFSSIPSSPPSYLETVFESHSSCSSPTSSVQSSLDVVPESISAYGTTADTSSSSSPKSLFPSSSSSPPLYLNSNLNYSSPSSSRHSEAVDVVQEAVANNPAPTTGQVRARIKWTQEMNEFIWRTYLIITKLETKIRGYLDPLYIQFTTKFPEIIVSKQRIGDQRRAIVRNYLISDTTLQLIKEEVAHSFRNKDYSGIISTQVSQSTNIGTKQSTSSRMRWTDEVNEAIMREYYRITHLETRRTAYRKPLHTVITEQFPHIAHVSEQRIADQRRVIVNNKLINDERLEQIRQEIRLSFNSGISENLAPVYTETETPLTVPIETHIIIQNTLDNTTPTEESPRTSQCVENSSLNNKIIEIFQQTYKRFLNTNPVERPYIPKQKTSKKFAYIITHLNTKVIPIYDSQDNDFIKTQTIIYCAAFTAALCNGSKIKDVSEHFTQQNIPSNDKRPNWQKRLEKRISILRKEIGRMTQYLQGNISLGLIAHIERIKHKYKTHSNYEEPNSTDNQYLDTLKQKLNSLSSRRRRYLNCTQRKQQNAKFINNEKQFYRNLTLNTTNIQETGSTLHNLPSKEHLHEFWSNIWSKPIQHNHNALWIETEQQKTSKIPNMTYEYISLEVFFNILKTTHNWKAPGTDHIHNYYYKKFTSIHPSLHNHVNDFIKYPHTIPAFITQGVTYMIPKGTDSTDPAKYRPITCLQTFYKIITSCVSQIISKHLTSNDILAEEQKGCRKYSQGCKEQITIDTIAMKYTTTSKKDMYTMYIDYQKAFDSVPHSWLVYILQHYKIHPILIQFLEKVMSHWVTKLKIGKSIETDIIHIKRGIFQGDALSPLWFCLALNPLSNLLNDSGNGLTIFTEQSDSINITHLLYMDDIKLYSNSASSLHNLADITQIFSSDIGMTFGINKCKTFTCRKGKFIGNDPYTLDTGHTIESLDQNNTYKYLGFEQSRRIDKKQTKMELLKKYKYRLNIVMKTQLTSRNLVKAVNTFVISVLTYSFGIIKWSKTDLKKMQRLINTTMTKYRKHHPRSCTQRITLPREDGGRGIIDIENLHNKQISTLRNFFFEKAQNSLLHQTIVNTDKNYTPLNLYSKNTQSNEHTTSNRDKILAWQHKSLHGRHRLDLQQPNVDIKASNAWLQRGDLFPETEGFMIAIQDQIIDTRNYQKFIIRRQNVQDTCRRCHSASETIQHITGACRSIAQTDYKHRHDQVAAIIHQYLSYQNKLVTENIPYYKYKPETVLENTNFKLYWDRTIITDKTIYNNRPDITLLDKQNKTVFLIDIAICNTHNLATAHAEKIAKYTELSIEIKTQWQVNHVRTVPIIVSSTGVIPKSLHTSLNILHIRPSTYLLLQKAVILNTCRLTRKFLNSEDS

SEQ ID NO: 7291 - protein, 1427 aa, Laothoe populi
MRLRNRTIPQAGTRANGDGESRPGPPSPGCPAYSGEGAVSQQPAQLHTVADQHDPPSSSCNSPTSLFSSIPSSPPSYLQTVFESHSSCSSPTSSVQSSLDVVPEAISAYGTTADTSSSSCPKSLFPSSSSSPPLYLNSNLNYSSPSSSRHSEAVDVVQEAVANNPAPTTGQVRARIKWTQEMNEFIWRTYLIITKLETKIRGYLDPLYIQFTTKFPEIIVSKQRIGDQRRAIVRNYLISDTTLQLIKEEVAHSFRNKDYSGIISTQVSQSTNIGTKQSTSSRMRWTDEVNEAIIREYYRITHLETRRTAYRKPLHTVITEQFPHIAHVSEQRIADQRRVIVNNKLINDERLEQIRQEIRLSFNSGVSENLAPVYTETETPLTVPIETHIIIQNTLDNTTPTEESPRTSQCVENSSLNNKIIEIFQQTYKRFLNTNPVERPYIPKQKTSKKFAYIITHLNTKVIPIYDSQDNDFIKTQTIIYCAAFTAALCNGSKIKDVSEHFTQQCIPSNDKRPNWQKRLEKRIAILRKEIGRMTQYLQGNRSLGLIAHIERIKHKYKTHSNYEEPNSTDNQYLDTLKQKLNSLSSRRRRYLNCTQRKQQNAKFINNEKQFYRNLTSNTTNIQETGSTLHNLPSKEHLHEFWSNIWSKPIQHNHNALWIETEKQKTSKITNMAYEYISLEVFFNILKTTHNWKAPGTDHIHNYYYKKFTSIHPSLHNHVNDFIKYPHTIPAFITQGVTYMIPKGTDSTDPAKYRPITCLQTFYKIITSCVSQIISKHLTSNDILAEEQKGCRKYSQGCKEQITIDTIAMKYTTTSKKDMYTMYIDYQKAFDSVPHSWLVYILQHYKIHPILIKFLEKVMSHWITKLKIGKSIETDIIHIKRGIFQGDALSPLWFCLALNPLSNLLNDSGNGLTIFTEKSDSINITHLLYMDDIKLYSNSASSLHNLADITQIFSSDIGMTFGINKCKTFTCRKGKFIGNDPYTLDTGHTIESLDQNNTYKYLGFEQSRRIDKKQTKMELLKKYKYRLNIVMKTQLTSRNLVKAINTFVISVLTYSFGIIKWSKTDLKKMQRLINTTMTKYRKHHPRSCTQRITLPREDGGRGIIDIENLHNKQISTLRNFFFEKAQNSLLHQTIVNTDKNYTPLNLYSKNTQSNEHTTSNRDKILAWQHKSLHGRHRLDLQQPNVDIKASNAWLQRGDLFPETEGFMIAIQDQIIDTRNYQKFIIRRQNVQDTCRRCRSASETIQHITGACRSIAQTDYKHRHDQVAAIIHQYLSYQNKLVTENIPYYKYKPETVLENTNFKLYWDRTIITDKTIYNNRPDITLLDKQNKTVFLIDIAICNTHNLATAHAEKIAKYTELSIEIKTQWQVNHVRTVPIIVSSTGVIPKSLHTSLNILHIRPSTYLLLQKAVILNTCRLTRKFLNSEDS

SEQ ID NO: 7292 - protein, 1427 aa, Laothoe populi
MRLRNRTIPQAGTKANGDGESRPGPPSPGCPAYSGEGAVSQQPAQLHTVADQHDPPSSSCNSPTSLFSSIPSSPPSYLETVFESHSSCSSPTSSVQSSLDVVPEAISAYGTTADTSSSSSPKSLFPSSSSSPPLYLNSNLNYSSPSSSRHSEAVDVVQEAVANNPAPTTGQVRARIKWTQEMNEFIWRTYLIITKLETKIRGYLDPLYIQFTTKFPEIIVSKQRIGDQRRAIVRNYLISDTTLQLIKEEVAHSFRNKDYSGIISTQVSQSTNIGTKQSTSSRMRWTDEVNEAIIREYYRITHLETRRTAYRKPLHTVITEQFPHIAHVSEQRIADQRRVIVNNKLINDERLEQIRQEIRLTFNSGISENLAPVNTETETPLTVPIETHIIIQNTLDNTTPTEESPRTSQCVENSSLNNKIIEIFQQTYKRFLNTNPVERPYIPKQKTSKKFAYIITHLNTKVIPIYDSQDNDFIKTQTIIYCAAFTAALCNGSKIKDVSEYFTQQCIPSNDKRPNWQKRLEKRIAILRKEIGRMTQYLQGNRSLGLIAHIERIKHKYKTHSNYEEPNSTDNQYLDTLKQKLNSLSSRRRRYLNCTQRKQQNAKFINNEKQFYRNLTSNTTNIQETGSTLHNLPSKEHLHEFWSNIWSKPIQHNHNALWIETEKQKTSKIPNMAYEYISLEVFFNILKTTHNWKAPGTDHIHNYYYKKFTSIHPSLHNHVNDFIKYPHTIPAFITQGVTYMIPKGTDSTDPAKYRPITCLQTFYKIITSCVSQIISKHLTSNDILAEEQKGCRKYSQGCKEQITIDTIAMKYTTTSKKDMYTMYIDYQKAFDSVPHSWLVYILQHYKIHPILIKFLEKVMSHWVTKLKIGKSIETDIIHIKRGIFQGDALSPLWFCLALNPLSNLLNDSGNGLTIFTEQSDNINITHLLYMDDIKLYSNSASSLHNLADITQIFSSDIGMTFGINKCKTFTCRKGKFIGNDPYTLDTGHTIESLDQNNTYKYLGFEQSRRIDKKQTKMELLKKYKYRLNIVMKTQLTSRNLVKAVNTFVISVLTYSFGIIKWSKTDLKKMQRLINTTMTKYRKHHPRSCTQRITLPREDGDRGIIDIENLHNKQISTLRNFFFEKTQNSLLHQTIVNTDKNYTPLNLYSKNTQSNEHTTSNRDKILAWQHKSLHGRHRLDLQQPNVDIKASNAWLQRGDLFPETEGFMIAIQDQIIDTRNYQKFIIRRQNVQDTCRRCRSASETIQHITGACRSIAQTDYKHRHDQVAAIIHQYLSYQNKLVTENIPYYKYKPETVLENTNFKLYWDRTIITDKTIYNNRPDITLLDKQNKTVFLIDIAICNTHNLATAHAEKIAKYTELSIEIKTQWQVNHVRTVPIIVSSTGVIPKSLHTSLNILHIRPSTYLLLQKAVILNTCRLTRKFLNSEDS

SEQ ID NO: 7293 - protein, 899 aa, Idaea aversata
MSHYMQGSRSLGLIAHVEKIRNKYRIHSSYEEPNITDAQFLDTLKQKLNTLCSRRRRYLNCTQRKQQNAQFMCNEKQFYRNLTTNTTNIQNNSHPSNNITPSQEQLHNFWSNIWSNPVHHNQNAEWIQTDKQTINNTIAMEFEHIPLDIFVNVIKNTHNWKTPGTDHIHNYYYKKLTALHPALFHHINDFIKSPHLMPNFITQGITYMIPKTSDSTNPANYRPITCLQNIYKIITSCISQAIYKHVTENKILAEEQKGCRKYSQGCKEQLIIDSVAMKNNTKFKRDVCTMYVDYQKAFDSVPHSWLIYILEHYKIHPIITNFLKETMQHWETKLKLGKTIETDTVNIRRGIFQGDALSPLWFCLALNPLSNLLNKTGEGLTIDSDDFNNKKLTHLMYMDDIKLYSNNTTSLHKLADITQTFSNDISMAFGIDKCKIYTLQKGKFIGSDEYTLTTGQTVESLDSGDAYKYLGFQQTHRIDEKHTKTQLIKKFKHRLNMIMKSQLTSRNLTKAINTFAIPILTYSFGVIKWSKTDLRKMQQVINTTLTKHRKHHPRSCVQRMTLPREDGGRGIIDIENLHNRQITNLRLFFFNKSSSSALHNLISNTDKRYTPLNLSSTAKQPNENITSNTEKIIAWERKTLHGRHRLDLQQSHVDIKASNAWLQRGELFPETEGFMIGIQDQVIDTRNYQKFIIRRPNYQDSCRRCHSASETIQHITGACRSIAQTDYKHRHDQVSAIIHQYLAHQKKLITNKVPYYKYKPDPVLENSNFKLYWDRTIITDKTIYNNRPDINLLDKQNKTVYLIDIAVCNTHNLLTTHTEKIAKYTELSIEIKTQWQVSHVRTVPIVLSSTGVIPKTLHTNLKLLNINPSTYLQMCLQLQKAVILNTCRLTRKFLNSDTT

SEQ ID NO: 7294 - protein, 1364 aa, Idaea aversata
METRQKKNKRLTPLPGGYRQGTSGANAGCCSGRAVGGRELRRRAPTGSPEQSDSRPKSSSLSSSPKSLFSSIPSSPPSFLNFNLDHHSPSSRDSFSSTAVDVVQEANANHPVPATGQARLRLKWTEEMNEFIWRTYLILTKLETKTRGYLDPLHAQFINKFPDMIVSKQRVGDQRRVIVRNNLIPPQKLQLIKDDVSQILQSPSQTEPTLTDTQPNTRTRMTWSDEINEAIMREYFKITNLERNRTAYRKPLHTVIIELFPQISHVSEQRISDQRRVIINNKLINDNRLEEIKQEVRDYLNLSTTTPDTLITATLSDLASNTLSETETTQEQLSPIAQPNDPVQFIESDSDLDPKIAQTFDDTYNKYINSNPTQRPFIPKQKTSKNFAYIISYLNSKVIPKYILDDNDFNTTHTIIYCAAYTAATCNGAKIRDNNLVATQQNTDSNDKRPNWQRRLDRKIQKLRKEIGRMSHYMQGSRSLGLIAHVEKIRNKYRIHSSYEEPNITDAQFLDTLKQKLNTLCSRRRRYLNCTQRKQQNAQFMCNEKQFYRNLTTNTTNIQNNSHPSNNITPSQEQLHNFWSNIWSNPVHHNQNAEWIQTDKQTINNTIAMEFEHIPLDIFVNVIKNTHNWKTPGTDHIHNYYYKKLTALHPALFHHINDFIKSPHLMPNFITQGITYMISKTSDSTNPANYRPITCLQNIYKIITSCISQAIYKHVTENKILAEEQKGCRKYSQGCKEQLIIDSVAMKNNTKFKRDVCTMYVDYQKAFDSVPHSWLIYILEHYKIHPIITNFLKETMQHWETKLKLGKTIETDTVNIRRGIFQGDALSPLWFCLALNPLSNLLNKTGEGLTIDSDDFNNKKLTHLMYMDDIKLYSNNTTSLHKLADITQTFSNDISMAFGIDKCKTYTLHKGKFIGSDEYTLTTGQTVESLDSGDAYKYLGFQQTHRIDEKHTKTQLIKKFKHRLNMIMKSQLTSRNLTKAINTFAIPILTYSFGVIKWSKTDLRKMQQVINTTLTKHRKHHPRSCVQRMTLPREDGGRGIIDIENLHNRQITNLRLFFFNKSSSSALHNLISNTDKRYTPLNLSSTAKQPNENITSNTEKIIAWERKTLHGRHRLDLQQSHVDIKASNAWLQRGELFPETEGFMIGIQDQVIDTRNYQKFIIRRPNYQDSCRRCHSASETIQHITGACRSIAQTDYKHRHDQVSAIIHQYLAHQKKLITNKVPYYKYKPDPVLESSNFKLYWDRTIITDKTIYNNRPDITLLDKQNKTVYLIDIAVCNTHNLLTTHTEKIAKYTELSIEIKTQWQVSHVRTVPIVLSSTGVIPKTLHTNLKLLNINPSTYLQLQKAVILNTCRLTRKFLNSDTT

SEQ ID NO: 7295 - protein, 894 aa, Mimas tiliae
MTQYLQGNRSLGLISHIERIKHKYKTHSRYEEPNSTDNQFLDTLKQKLNSLSSRRRRYLNCTRRKQQNSQFINNERQFYRNLTSNTTNLQSTDYTSRNLPTKEQLDEFWSSIWSKPTQHNHNATWIETEKRKMEVVPDMTFECIPLDVFLNVLKTTHNWKTPGTDHIHNFYYKKFTSIHPSLHNHINNFIKYPHTIPAFITQGITYMIPKDNDSTDPAKYRPITCLQTIYKIITSCISQVIYKHLTHNNILAEEQKGCRKYSQGCKEQITIDTIAMKYTTTSKKDMCTMYIDYQKAFDSVPHSWLVYILKHYKIHPILIEFLENLMKHWTTKLKIGKSIETASIPIKRGIFQGDALSPLWFCLALNPLSNLLNDSKNGLTIVTEQFDKIKITHLLYMDDIKLFSNSVTSLHKLADITQMFSSDIGMIFGINKCKTLTYQKGKHIGNDPYTLVSGHTIEPLDQKNTYKYLGFEQSHQVDQKHSKAELIKKYKHRLNIVMKSQLTSRNLVKAVNTFAISILTYSFGIIKWSKTDFKKMQQLINTTLTKYRKHQPRACTQRLTLPREDGGRGIMDIENLHNKQITILRNFFFEKAKYSLLHKTIVEIDKKYTPLNLQSKNTQSNEYITSNRDKTAAWQHKSLHGRHRLDLQQPYVDIKASNAWLQRGDLFPETEGFMIAIQDQIINTRNYQKFIIRRPNLQDTCRRCNSASETIQHITGACRSIAQTDYKHRHDQVAAIIHQCLAHQNKLITKKIPYYKYKPETVLENTDFKLYWDRTIITDKTIYNNRPDITLLDKQNRTVFLIDIAVCNTHNLLTTHTEKIAKYTDLSIEIKTQWQVNHARTVPIIVSSTGIIPKSLHTSLNVLNINPSTYLLLQKAVILNTCRLTRKFLNCNEM

SEQ ID NO: 7296 - protein, 1384 aa, Helicoverpa zea
METRAQRKLRIGSLPGGDRRGAPGADAGRSSIRTIGGSELSQRAPTGSPEQGYSRPSSSVSLFPSLPSSPLSCLNYNSDSSSTSPSSTINSATVDVVQEAVADNPVPTTGQARARLRWTREMNEFIWRTYLEVTDLDTKIRGYLDPLHIKFIHKFPDMQVSKQRLGDQKRAILRNKLLPETTLGSIKNEVRINLQNISQTQNTIALTQSIIAESQQSLNTTGRLRWTDDINEAIITEYFKITHLETNRTAYRKQLHTIITQQFSSIAHVSEQRIADQRRVIINNKLISDDRLEQIKQQVRNTLNLRPAQDSQHDDTVENIINILPSSLCTSNDLHQTDLQIGIDNTHSQIDALAEATIGAMIVDESLNTKIEKTFEETYNKYLLTDPTNRPFIPKQKTSKKFAHIVSYLNNTVIPKYASNEDNFLKTHTLIYCAAYTAAICNGTKIKEQTTFTLTSSQTSPQQRNTVVDRRPKWLKRLDIKIEKIRKDIARMTQYMNGNRHLRLIAHIDRIKHKYRTHSTYEEPNTTNDQFMDSLKQKLSAVTSRRRRYFNCTKRKDQNIQFTNNERRFYRTLTSDTTNTQNIQHTSDRPNPNPEHLHTYWSNIWSNTSEHNHTATWIQDDKRHLQNVTDMEFTAIPLEVFVNVINKAHNWKSPGSDHIHNYYYKKLTFLHPSIYNHINDFIKDPQNIPEFITQGLTYMLPKDSDYTNPAKYRPITCLQTIYKLTTGCIAEIIYKHTAQNNILAEEQKGCRKRSQGCKEQLTIDAIAMKHNVNLKNDICTMYIDYQKAFDSVPHSWLLYILQHYKIHPQIIQFLTESMKHWSTKLKVGKSIDTDPIPIRRGIYQGDALSPLWFCLALNPLSNLLNSSDSGLTIKNNENQDSCKLTHLMFMDDIKLYSNSVLGLHSLADLTQTFSDDIDMSFGIDKCKTFTLRNGKHVDSNPFVLESGQAIEPLSQNDTYKYLGYEQSHQIDQKHTKNKIITKYRHRLHMLIKSQLTSRNLFKSINSFAIPILTYSFGIINWSKTDLSKLQRSINTILTTHRKHHPRSCVQRLTLPRDEGGRGLIDIQNLHNKQITTLRKFFLQKALQSQLHKAITQTDKKITPLNLHTTEPQTNEQIVSKADKIAVWERKSLHGRHRLDLQQPHVDMKASNAWLQRGELFPETEGFMIAIQDQVIDTGNYQKFIIRRPNYNDSCRRCHGASETIQHITGACRAIAQTDYKHRHDQVAAIIHQSLAFQTKLITDKVPYYKYKPQAVLENDYFKLYWDRTIITDKTIYNNRPDITMLDKQKKSVYIIDIAVCNTHNLTSTHTEKIAKYTDLSIELKTQWNITHTKTIPIILSSTGVIPKTLHNSLASLNISPSTYLLLQKAVILNTCRLTRKFLNA

SEQ ID NO: 7297 - protein, 1384 aa, Helicoverpa armigera
METRAQRKLRIGSLPGGDRRGAPGADAGRSSIRTIGGSELSLRAPTGSPEQGYSRPSSSVSLFPSLPSSPLSCLNYNTDSSSISPPSSITSAAMDVVQEAVADNPAPTTGQARARLRWTREMNEFIWRTYLQVTDLDTKIRGYLDPLHVKFTQKFPEIPVSKQRLGDQKRAILRNKLLPETTIESIKNEVRISLQNISNTTLALTQPFVADSQQPMNTTGRLRWTDDINEAIITEYFKITHLETNRTAYRKQLHTVITQRFSCIAHVSEQRIADQRRVIINNRLISDDRLEEIKRQVRDFLNIQPTHDTYDDTITSSPTVNTQPINLRSSNGLGLNQTDIPITIDSALPQLDTVAEETISTMFVDESLDTKIEKLFEETYNKYLLSDPTNRPFIPKQKTSKKFAHIITYLNNNVLPKYATKEDNFLKTHTLIYCAAYTAAICNGTKLKEQTTTTQTPTQTTPQRNTVVDRRPKWLKRLDIKIEKIRKDIGRMTQYINGNRHLSLITHIDRIKHKYRTHSSYEEPNTTNEQFMDSLKQKLSAVTSRRRRYFNCTKRKDQNIQFTNNERQFYRTLTTDTTNIQNRQQTVDRPNPNPEQLHAFWSNIWSNASEHNQTARWIEDDKSNLETVTDMEFTAIPLEVFANVINKAHNWKSPGTDHIHNYYYKKLTSLHPSIYNHINDFIKYPENVPEFITQGLTYMLPKDSDYTNPAKYRPITCLQTIYKLTTGCIAEIIYKHTVQNNILAEEQKGCRKYSQGCKEQLTIDAIAMKHNVKLKNDICTMYIDYQKAFDSVPHSWLLYILKHYKIHPEIIHFLTQSMKHWNTKLKVGKSIETDPVPIKRGIYQGDALSPLWFCLALNPLSNLLNSSDSGLIIKNNETQDSYQLTHLLFMDDIKLYSNTISGLHSLADLTQTFSDDINMLFGIDKCKTFTLRNGNDVDRNPYVLDSGKTIEPLSQNDTYKYLGFEQSHQINQKHTKNKIITKYRHRLNMLVKSQLTSRNLIKSINSFAIPLLTYSFGIINWSKSDLTKLQRSINTTLTTNRKHHPRSCVQRLTLPRDEGGRGLIDIENLHNKQITSLRKFFMQKALESPLHKIITQTDKKITPLNLHSTDPQTNERITSKADKIAAWESKSLHGRHRLDLQQPHVDMKASNAWLQRGELFPETEGFMIAIQDQVIDTANYQKYIIRRPNYNDSCRRCHGASETIQHITGACRAIAQTDYKHRHDQVAAIIHQSLAIQTKLITDKVPYYKYKPQAVLENDNFKLYWDRTIITDKTIYNNRPDITMVDKRNKLVYIIDIAICNTHNLTNTHTEKIAKYTDLSIELKTQWNISHTKTIPIIISSTGVIPKTLHNSLNTLKISPSTYLLLQKAVILNTCRLTRKFLNS

SEQ ID NO: 7298 - protein, 1353 aa, Spodoptera litura
METRAKRKLRIGPLPGGDRRGTPGADAGRFSIRTIGGSELSQRAPTGSPEQVTSRPSSSTSLFPSLPSSPLSCLNYNTDSYSSSNHSPTSINSATVDVVQEAEANNPAPTTGQVRARLKWTTEMNEFIWRTYLYITHLDTKIRGYLDPLYAKFTEKFPEITVSKQRLGDQKRAILRNKLLPENVLELIKNEVQAALQNSNTTQNTIVSAQILVDQSQQQSSNSGTRLRWTDDINEAIIREYFKITHLETNRTAYRKPLHTIITHLFPNIAHVSEQRIADQRRVIMNNRLITDNRLEEIKQEVRSSLNMQVTPNIDSNNFPPCSELNEIDLNNTANNTNTIEFQNTMFTDETLDTKIIQIFEETYNKYSPIDPTKRPFIPKQKTSKKLAYIISYLNRTVLPKYGSVEDDFLKTHTLIYCAAHTAALCNGSKIKENTQSTTTLQQQPSTIDKRPNWLKRLDRKIQIIRKEIGRLTQYINGNRSLGLITHIERIKHKYRKHSSYEEPNTTNEQFMDSLKQKLTAITSRRRRYSNCTKRKDQNTQFINSERQFYRNLTVDTSNTQNRSHISQNTSPNSEQFHTYWSNIWSKTSQHNHAATWTEIDKEKLENVPEMAFDAVPLEIFVKVIQKAHNWKAPGTDHIHNYYYKKLTYLHPSIYKHINNFITNPQTIPEFVTQGLTYMIPKDSDHMNPAKYRPITCLQTIYKLTTGCISEVMYKHITHNNILAEEQKGCRKYSQGCKEQLTIDSIAMKHNIKLKNDICTMYVDYQKAFDTVPHSWLLYILEHYKINSVIINFLTSAMKHWNTKLKVGKLIETEPIPIKRGIFQGDALSPLWFCLALNPLSDLLNSSENGLTIQDSSAPTVKLTHLLFMDDIKLYSNNIAGLHSLADLTQKFSDDINMVFGIDKCKTFTLRKGRHVESNPYTLESGQQIDPMSPNCTYKYLGFEQSHQIDQKFTKNKIISKYKQRLNMLIRSQLTSRNLVKSINSFAIPVLTYSFGIIKWTKTDLIKLQRLINTCLTTNRKHHPRSCVQRLTLPREDGGRGLIDITNLHNQQIINLRKFFLHKAEQSHFHRVISQLDKHHTPLNLQSPDPQANEHIISKTDKIAAWAHKSLHGRHRLDLQQPHVDMEASNAWLRRGELFPETEGFMIAIQDQVIDTANYQKFIIHRPNYNDSCRRCHGASETIQHITGACRAIAQTDYKHRHDQVASIIHQSLAIQTKLITEKIAYYKYKPQAVLENEHYKLYWDRTIITDKTIYNNRPDITMLDKRNKLVYIIDIAICNTHNLANTHSEKIAKYTDLSIELKTQWNVTQTKTIPIILSTTGVIPKSLHNSLNTLHISPSTYLLLQKAVILNT

SEQ ID NO: 7299 - protein, 1321 aa, Spodoptera frugiperda
MDVVQEAVANNPAPTTGQVRARLRWTREMNEFIWRTYLFITNLDTKIRGYLDPLHAKFTDRFPEMKVSKQRLGDQKRAILRNKLLPEATLELIKNEVQIELQNSNIDHNTIIYTHSTTTDPQQPTNSNTRLKWTEDINEAIIKEYYKITHIETNRTAYRKQLHTTITQQFPVIAHVSEQRIADQRRVILNNRLISEERLEEIKREVRNSLSIQITQNTQHDNISANSTNVNASNPISEYDQNGLQNSSSDNTNTDTTTLQDETTTILVDETLDTKIEKTFEEIYQKYLYTDPTQRPFIPKQKTSKRFAHIISYLNTTVLPKYSSTEDDFLKTHTLVYCAAHTAALCNGTKFKQHNHHTPSATQTQRSETSSVTQHNQTSSTTQHNQTSSSTQHNQTSSSTQYTGNIRDKRPNWLRRLDQKILIIRKEIGRMTQYINGNRHLRLITHIEKIKHKYRTHSSYEEPNTTNEQFMDSLKQKLTAITSRRRRYFYCTKRKDQNTQFTNNERHFYRTLTTDTTHTQDRQQATPHPNSEQLHNYWSNIWSKTSNHNQTARWIQDDKEKLEQLPQMSFDAIPLEVFVNVIQKAHNWKSPGTDHIHNYYYKKLTSLHPSIYKHINDFIKNPYNIPDFITQGLTYMIPKDSDHMNPAKYRPITCLQTFYKLTTGCISEIVYKHVSENNILAEEQKGCRKYSQGCKEQLTIDLIALKHNVKQKNDIFTMYIDYQKAFDSVPHSWLLYILEHYKIHPDLINFLTESMKHWSTKIKLGKVVQTDRIPIRRGIFQGDALSPLWFCLALNPLSNLLNSSDYGLTLKDTTTGQNFNLTHLMFMDDIKLYSNNILGLSSLADLTQTFSDDIKMKFGIDKCKTFTLLKGQHLENNPYTLESGEIIESMTQNCNYKYLGFEQTHQIDKKLTKHKITTKYKHRLNMLIRSQLTSRNLFKAINSFAIPILTYSFGIVSWSKTDLIKLQRTINTSLTTNRKHHPRSCVQRLTLPREDGGRGLIDIENLHNQQIANLRKFFFHKAQQSPLHKLISCLDKNYTPLNLHSSDPQRNEHITTKSDKITAWERKSLHGRHRLDLQQPHVDMKASNAWLRRGELFPETEGFMIAIQDQVIDTANYQKFIIRRPNYNDTCRRCHSASETIQHITGACRAIAQTDYKHRHDQVAAIIHQSLAIQTKLVTDKVPYYKYKPHAVLENDNFKLYWDRTIITDKTIYNNRPDITMLDKQKKLVYIIDIAICNTHNLTNTHSEKIAKYTDLSIEIKTQWNVTHTKTVPIILSTTGVIPKTLHNSLNQLNISPSTYLLLQKAVILNTCRLTRKFLNT

SEQ ID NO: 7300 - protein, 1378 aa, Spodoptera frugiperda
MNFQHNTERSFIIIIIISRPSSSFSLFPSLPSSPLSFLNHDTDLSSIPSPNSINSAAMDVVQEAVANNPAPTTGQVRARLRWTREMNEFIWRTYLFITNLDTKIRGYLDPLHAKFTDRFPEMKVSKQRLGDQKRAILRNKLLPEATLELIKNEVQIELQNSNIDHNTIIYTHSTTTDPQQPTNSNTRLKWTEDINEAIIKEYYKITHIETNRTAYRKQLHTTITQQFPVIAHVSEQRIADQRRVILNNRLISEERLEEIKREVRNSLSIQITQNTQHDNISANSTNVNASNPISEYDQIGLQNSTSDNTNTDTTTLQDETTTILVDETLDTKIEKTFEEIYQKYLYTDPTQRPFIPKQKTSKRFAHIISYLNTTVLPKYSSTEDDFLKTHTLVYCAAHTAALCNGTKFKQHNHHTPSATQTQRSETSSVTQHNQTSSTTQHNQTSSTTQHNQTSSSTQYTGNIRDKRPNWLRRLDQKILIIRKEIGRMTQYINGNRHLRLITHIEKIKHKYRTHSSYEEPNTTNEQFMDSLKQKLTAITSRRRRYFYCTKRKDQNTQFTNNERHFYRTLTTDTTHTQDRQQATPHPNSEQLHNYWSNIWSKTSNHNQTARWIQDDKEKLEQLPQMSFDAIPLEVFVNVIQKAHNWKSPGTDHIHNYYYKKLTSLHPSIYKHINDFIKNPYNIPDFITQGLTYMIPKDSDHMNPAKYRPITCLQTFYKLTTGCISEIVYKHVSENNILAEEQKGCRKYSQGCKEQLTIDLIALKHNVKQKNDIFTMYIDYQKAFDSVPHSWLLYILEHYKIHPDLIIFLTESMKHWSTKIKLGKVVQTDRIPIRRGIFQGDALSPLWFCLALNPLSNLLNSSDYGLTLKDTTTGQNFNLTHLMIMDDIKLYSNNMLGLSSLADLTQTFSDDIKMTFGIDKCKTFTLLKGQHLENNPYTLESGEIIESMTQNCNYKYLGFEQTHQIDKKLTKHKITTKYKHRLNMLIRSQLTSRNLFKAINSFAIPILTYSFGIVSWSKTDLIKLQRTINTSLTTNRKHHPRSCVQRLTLPREDGGRGLIDIENLHNQQIANLRKFFFHKAQQSPLHKLISCLDKNYTPLNLHSSDPQRNERITTKSDKIAAWERKSLHGRHRLDLQQPHVDMKASNAWLRRGELFPETEGFMIAIQDQVIDTANYQKFIIRRPNYNDSCRRCHSASETIQHITGACRAIAQTDYKHRHDQVAAIIHQSLAIQTKLVTDKVPYYKYKPHAVLENDNFKLYWDRTIITDKTIYNNRPDITMLDKQKKLVYIIDIAICNTHNLTNTHSEKIAKYTDLSIEIKTQWNVTQTKTVPIILSTTGVIPKTLHNSLNQLNISPSTYLLLQKAVILNTCRLTRKFLNT

SEQ ID NO: 7301 - protein, 1427 aa, Spodoptera frugiperda
METRAKRRLRIGPLPGGDRRGTPGADAGRSSIRTIGGSELSPRAPTGSPEQCDSRPSSSFSLFPSLPSSPLSFLNHDTDPSSIPSPNSINSAAMDVVQEAVANNPAPTTGQVRARLRWTREMNEFIWRTYLFVTNLDTKIRGYLDPLHAKFTDRFPEMKVPKQRLGDQKRAILRNKLLPEATLELIKNEVQIELQNSNIDHNTIIYTHSTTTDSQQPTNSNTRLKWTEDINEAIIKEYYKITHVETNRTAYRKQLHTTITQQFPVIAHVSEQRIADQRRVIINNRLISDDRLEEIKREVRNSLSLSIQITQSTQHDNISANSTNVNASNLISEYDQISIQNNTTDNTNTDTTTLQDETTTILVDETLDTKIEKTFAEIYQKYLSTDPTHRPFIPKQKTSKRFAHIISYLNSTVLPKYSSTEDDFLKTHTLVYCAAHTAALCNGTKFKERNNQTSSPTQTQCNETSSDTQHTQTSSTTQHNQTSSTTQHNQTSSITQHNQTSSSTQYTGNIRDKRPNWLRRLDQKILIIRKEIGRMTQYINGNRHLRLITHIEKIKHKYRTHSSYEEPNTTNEQFMDSLKQKLTAITSRRRRYFYCTKRKDQNTQFTNNERHFYRTLTTDTTHTQNRQQATEIPHPNSEQLHSYWSNIWSKTSNHNQTARWIQDDKEKLEQLPQMSFDAIPLEVFVNVIQKAHNWKSPGTDHIHNYYYKKLTSLHPAIYKHINDFIKNPYNIPDFITQGLTYMIPKDSDHMNPAKYRPITCLQTFYKLTTGCISEIIYKHISQNNILAEEQKGCRKYSQGCKEQLTIDLIALKHNVKQKNDIFTMYIDYQKAFDSVPHSWLLYILEHYKIHPDLILFLTETMKHWSTKIKLGKVLQTDHIPIRRGIFQGDALSPLWFCLALNPLSNLLNSSDYGLTLKDTATGQNFNLTHLMFMDDIKLYSNNISGLSSLADLTQTFSDDIKMTFGIDKCKTFTLLQGQHIENNPYILESGEIIESMTQNCNYKYLGFEQTHQIDKKLTKNKITTKYKHRLNMLIRSQLTSRNLFKAINSFAIPILTYSFGIVSWSKTDLIKLQRSINTSLTTNRKHHPRSCVQRLTLPREDGGRGLIDIENLHNQQIANLRKFFFHKAQQSPLHKLISCLDKNFTPLNLQSSDPQRNERISTKSDKIVAWERKSLHGRHRLDLQQPHVDMKASNAWLRRGELFPETEGFMIAIQDQVIDTANYQKFIIRRPNYNDTCRRCHSASETIQHITGACRAIAQTDYKHRHDQVAAIIHQSLAIQTKLVTDKVPYYKYKPQTVLENNNFKLYWDRTIITDKTIYNNRPDITMLDKQKKLVYIIDIAICNTHNLTNTHSEKIAKYTDLSIEIKTQWNVTHTKTVPIILSTTGVIPKTLHNSLNQLNISPSTYLLLQKAVILNTCRLTRKFLNT

SEQ ID NO: 7302 - protein, 1423 aa, Spodoptera frugiperda
METRAKKRLRIGPLPGGDRRGTPGADAGRSSIRTIGGSELSPRAPTGSPEQCDSRPSSSFSLFPSLPSSPLSFLNHDTDLSSIPSPNSINSAAMDVVQEAVANNPAPTTGQVRARLRWTREMNEFIWRTYLFITNLDTKIRGYLDPLHAKFTDRFPEMKVSKQRLGDQKRAILRNKLLSEATLELIKNEVQIELHNSNIDHNTIIYTHSTTTDPQQPTNSNTRLKWTEDINEAIIKEYYKITHIETNRTAYRKQLHTTITQQFPVIAHVSEQRIADQRRVILNNRLISEERLEEIKREVRNSLSIQITQNTQHDNISANSTNVNASNPISEYDQIGLQNSTSDNTNTDTTTLQDDTTTILVDETLDTKIEKTFEEIYQKYLYTDPTQRPFIPKQKTSKRFAHIISYLNTTVLPKYSSTEDDFLKTHTLVYCAAHTAALCNGTKFKQHNHHTPSATQTQRSETSSVTQHNQTSSTTQHNQTPSTTQHNQTSATTQHNQTSSSTQYTGNIRDKRPNWLRRLDQKILIIRKEIGRMTQYINGNRHLRLITHIEKIKHKYRTHSSYEEPNTTNEQFMDSLKQKLTAITSRRRRYFYCTKRKDQNTQFTNNERHFYRTLTTDTTHTQDRQQATPHPNSEQLHNYWSNIWSKTSNHNQTARWIQDDKEKLEQLPQMSFDAIPLEVFVNVIQKAHNWKSPGTDHIHNYYYKKLTTLHPSIYKHINDFIKNPYNIPDFITQGLTYMIPKDSDHMNPAKYRPITCLQTFYKLTTGCISEIVYKHVSENNILAEEQKGCRKYSQGCKEQLTIDLIALKHNVKQKNDIFTMYIDYQKAFDSVPHSWLLYILEHYKIHPDLINFLTESMKHWSTKIKLGKVVQTDRIPIRRGIFQGDALSPLWFCLALNPLSNLLNSSDYGLTLKDTTTGQNFNLTHLMFMDDIKLYSNNILGLSSLADLTQTFSDDIKMTFGIDKCKTFTLLKGQHLENNPYTLESGEIIESMTQNCNYKYLGFEQTHQIDKKLTKHKITTKYKHRLNMLIRSQLTSRNLFKAINSFAIPILTYSFGIVSWSKTDLIKLQRTINTSLTTNRKHHPRSCVQRLTLPREDGGRGLIDIENLHNQQIANLRKFFFHKAQQSPLHKLISCLDKNYTPLNLHSSDPQRNEHITTKSDKIAAWERKSLHGRHRLDLQQPHVDMKASNAWLRRGELFPETEGFMIAIQDQVIDTANYQKFIIRRPNYNDSCRRCHSASETIQHITGACRAIAQTDYKHRHDQVAAIIHQSLAIQTKLVTDKVPYYKYKPHAVLENDNFKLYWDRTIITDKTIYNNRPDITMLDKQKKLVYIIDIAICNTHNLTNTHSEKIAKYTDLSIEIKTQWNVTHTKTVPIILSTTGVIPKTLHNSLNQLNISPSTYLLLQKAVILNTCRLTRKFLNT

SEQ ID NO: 7303 - protein, 1425 aa, Spodoptera frugiperda
METRAKKRLRIGPLPGGDRRGTPGADAGRSSIRTIGGSELSPRAPTGSPEQCDSRPSSSFSLFPSLPSSPLSFLNHDTDPSSIPSPNSINSAAMDVVQEAVANNPAPTTGQVRARLRWTREMNEFIWRTYLFVTNLDTKIRGYLDPLHAKFTDRFPEMKVPKQRLGDQKRAILRNKLLPEATLELIKNEVQIELQNSNIDHNTIIYTHSTTTDSQQPTNSNTRLKWTEDINEAIIKEYYKITHIETNRTAYRKQLHATITQQFPVIAHVSEQRIADQRRVIINNRLISDDRLEEIKREVRNSLSLSIQITQNTQHDNISANSTNVNASNLISEYDQIGIQNNTADNTNTDTTTLHDETTTILVDETLDTKIEKTFAEIYQKYLSTDPTHRPFIPKQKTSKRFAHIISYLNSTVLPKYCSTEDDFLKTHTLVYCAAHTAALCNGTKLKEYNNQTSSPTQTQRNETSSATQHTQTSSTTQHNQTSSITQHNQTSSTTQHNQTSSSTQNTGNIRDKRPNWLRRLDQKILIIRKEIGRMTQYINGNRHLRLITHIEKIKHKYRTHSSYEEPNTTNEQFMDSLKQKLTAITSRRRRYFYCTKRKDQNTQFINNERHFYRTLTTDTTHTQNRQQEIPHPNSEQLHSYWSNIWSKTSNHNHTARWIQDDKEKLEQLPQMSFDAIPLEVFVNVIQKAHNWKSPGTDHIHNYYYKKLTSLHPSIYKHINDFIKNPYNIPDFITQGLTYMIPKDSDHMNPAKYRPITCLQTFYKLTTGCISEIIYKHISQNNILAEEQKGCRKYSQGCKEQLTIDLIALKHNVKQKNDIFTMYIDYQKAFDSVPHSWLLYILEHYKIHPDLILFLTETMKHWSAKIKLGKVLQTDRIPIRRGIFQGDALSPLWFCLALNPLSNLLNSSDYGLTLKDTATGQNFNLTHLMFMDDIKLYSNNISGLSSLADLTQTFSDDIKMTFGIDKCKTFTLIKGQHIENNPYTLESGEIIESMTQNCNYKYLGFEQTHQIDKKITKNKITTKYKHRLNMLIRSQLTSRNLFKAINSFAIPILTYSFGIVSWSKTDLIKLQRSINTSLTTNRKHHPRSCVQRLTLPREDGGRGLIDIENLHNQQIANLRKFFFHKAQQSPLHKLISCLDKNFTPLNLQSSDPQRNERISTKSDKIAAWERKSLHGRHRLDLQQPHVDMKASNAWLRRGELFPETEGFMIAIQDQVIDTANYQKFIIRRPNYNDSCRRCHSASETIQHITGACRAIAQTDYKHRHDQVAAIIHQSLAIQTKLVTDKVPYYKYKPQTVLENNNFKLYWDRTIITDKTIYNNRPDITMLDKQKKLVYIIDIAICNTHNLTNTHSEKIAKYTDLSIEIKTQWSVTHTKTVPIILSTTGVIPKTLHNSLNQLNISPSTYLLLQKAVILNTCRLTRKFLNT

SEQ ID NO: 7304 - protein, 1031 aa, Idaea aversata
MQTEETTYTQFTDEALDNKIAQTFEEIYNKYLSTAPTHRPYIPKQKTSKRFAHIIAYLNSTVLPKYESDEDDFLKIHTLIYCSAYTAALCNGSKIKDDNQITTTTQHNTNVDRRPNWLKRLDRKIQFIRKDIGRMTQYINGNRNLGLITHIERIKHKYRTHSSYEEPNVTNYQYMDSLKQKLNAVTSRRRRYHNCTKRKDQNIQFLNNEKQFYRNITTDTTNVQNRQSNVDNSTPTSEQLHQYWSDLWSQTSEHNQNADWIQKDKIKLENIPQMSFEFIPLEIFVNVLKKTHNWKSPGTDHIHNYYYKKLTHLHPAIYKHINNFIKHPHDIPEFITQGLAYMIPKDSELTNPAKYRPITCLQTIYKLITGCISQVIYKHVTQNNLLAEEQKGCRKFSQGCKEQLIIDSIAMKHNVKLNNDICTMYIDYQKAFDSVPHSWLIYILDHYKIHPVIVEFLRESMKHWTTKLRLGKSIETDPIAIRRGIFQGDALSPLWFCLALNPLSNFLNSSDNGLIIQNNDNTENVELTHLMFMDDIKLYSNSIPALHVLADLTQTFSDDINMSFGIDKCKTFTLRKGHIIESNPYSLTTEQIIEPLVQNNTYKYLGFEQSYQIDQKQTKNKIITKYKHRLNMLMNSQLSSRNLVKSINTFAIPILTYSFGIINWSKTDILKLQRLINTSLTTHRKHHPRSCVQRLTLPRSEGGRGLIDVGNLHNQQISTLRKFFLDKTQQSLLHKAIAQLDKRFTPLNLHSTDLQTNEAIVSKTDKITAWERKSLHGRHRLDLQQPHVDITASNAWLQRGELFPETEGFMIAIQDQVIDTANYQKYIIRRPNYNDACRRCHSTSETIQHITGACRAIAQTDYKHRHDQVAAIIHQSLAVQTKLIKPTDKVPYYKYRPEPVLENADFKLYWDRTIITDKTIYNNRPDITMLDKQKKLVYIIDIAICNTHNLTNTHSEKIAKYTDLAIEIKTQWNVTHTKTIPIIVSSTGVIPKTLHNSLNSLNISPSTYLLLQKAVILNTCRLTRKFLSIDN

SEQ ID NO: 7305 - protein, 1005 aa, Heteractis magnifica
MNEVESGFGIETGKFGGGEGGGSVGVEEVELRGVEVVVQKLITFRGDDGLRTANDEEKEVFEEMRRVFDSEDWEDVPGLKAQDRRKVNREVKIVEGLMHNLVRDGMSVSEINRLLYVGSFVVAQRLGLMRRRNGTKFEKKKPRWQRRIESNIVEWRKDLSRVEELRKGKVLKSKVMDRLVRRYDVIEKGGVAVATLLRRKIQAGSMKIRGYVDSCTKVRQNHLFRNNQSQLYKELGGKANLGPTEAPDAKEATEFWSGIWSKEKRHNKKASWLGEVRERTSGVEKQSEVRISVEDIKSGIRKMANWKAPGPDGVRGFWFKRFGSLHRSMAQSLQECLNRGQVPDWMVKGRTVLIQKDRDKGTVASNYRPIACLPLMWKLFTRILSEKLYQHLDDSGLLPDEQKGCRKKSRGTKDQLLIDKAVLREARVKKRCLAMGWIDYRKAYDMVPHSWIVEMLEMVKVADNVKGLLCGSMKDWRTVLMSNGKELGEVKIRRGIFQGDSLSPLLFVLAMIPLTMVLKRENLGYRFGKEQQMINHLLFMDDLKLYCKTEEELEKLIDVVQVYSGDIGMEFGLDKCAVLVLKQGIKVNCEGIVLPDGQAMREVDECGYKYLGVLEGADMMQKEMKKKVRDEYLRRVKLVAKSKLYGGNLIKAINAWAVGVVRYSAGILDWNNRELKEMDVKTRKKLTMFGAFHKKGSVPRLYMKRKHGGRGLISVVDCVREEELGLFEYVKGSEEWMLKVVGETLEVGETKKEYKKRVQKERRENLLEKRLHGKFMRDVSEVADERSWQWLRAGYLGKGTEGFVFAAQEQALRTRFFRATIQKEDVDPKCRVCGKEVESVGHLASGCSVLVQKEYRRRHDRMGLRVYWELCRKYGVKCADVWYKEVPDEVRISEDGQVEIWWDRSVETTQKMDHNRPDVTVLDRAAQKWTFVDFSVPWDRNVVVKEEEKFNKYSPLAKEIRKMHRVSTKVIPLVVGCLGVVSGRLTGYLKDLGIPDVLGGMQTSA

SEQ ID NO: 7306 - protein, 1215 aa, Heteractis crispa
MTSRNKRLGSGRADESGVAMSNTNDTERASVEANQGPLASNEGALLGANKGQANFVSCSGDGRRKGGKRGKSKDWWSLEERKVLWECFVRSGKKRSGGYIKKIKDLWDERGLSVREVPSLLSQLKGIENGLLTMMERDEIAKRVEDEDEVDIEGQEIIENRRVEWNVLFGGSDDEDEFLGFEIEGDVEGQPGVDELMNEVESGFGIETGKFGGGEGGGSVGVEEVELRGVEVVVQKLITFRGDDGLRTANDEEKEVFEEMRRVFDSEDWEDVPGLKAQDRRKVNREVKIVEGLMHNLVRDGMSVSEINRLLYVGSFVVAQRLGLMRRRNGTKFEKKKPRWQRRIESNIVEWRKDLSRVEELRKGKVLKSKVMDRLVRRYDVNEKGWVAVAILLRRKIQAGSMKIRGYVDSCTKVRQNHLFRNNQSQLYKELGGKANLGPTEAPDAKEATEFWSGIWSKEKRHNKKASWLGEVRERTSGVEKQSEVRISVEDIKSGIRKMANWKAPGPDGVRGFWFKRFGSLHRSMAQSLQECLNRGQVPDWMVKGRTVLIQKDRDKGTVASNYRPIACLPLMWKLFTRILSEKLYQHLDDSGLLPDEQKGCRKKSRGTKDQLLIDKAVLREARVKKRCLAMGWIDYRKAYDMVPHSWIVEMLEMVKVADNVKGLLCGSMKDWRTVLMSNGKELGEVKIRRGIFQGDSLSPLLFVLAMIPLTMVLKRENLGYRFGKEQQMINHLLFMDDLKLYCKTEEELEKLIDVVQVYSGDIGMEFGLDKCAVLVLKQGIKVNCEGIVLPDGQAMREVDECGYKYLGVLEGADMMQKEMKKKVRDEYLRRVKLVAKSKLYGGNLIKAINAWAVGVVRYSAGILDWNNRELKEMDVKTRKKLTMFGAFHKKGSVPRLYMKRKHGGRGLISVVDCVREEELGLFEYVKGSEEWMLKVVGETLEVGETKKDYKKRVQKERRENLLEKRLHGKFMRDVSEVADERSWQWLRAGYLGKGTEGFVFAAQEQALRTRFFRATIQKEDVDPKCRVCGKEVESVGHLASGCSVLVQKEYRRRHDRMGLRVYWELCRKYGVKCADVWYKEVPDEVRISEDGQVEIWWDRSVETTQKMDHNRPDVTVLDRAAQKWTFVDFSVPWDRNVVVKEEEKFNKYSPLAKEIRKMHRVSTKVIPLVVGCLGVVSGRLTGYLKDLGIPDVLGGMQTSAIIGTTLILQKVLNL

SEQ ID NO: 7307 - protein, 1043 aa, Owenia fusiformis
MEQRSGTPDKTKEGPGQDKNHSARNVQVPKTNETAKAKEERLQRIKWPNATKKEEWSNLDEDLESILESSLSGPVEKKIQAMTTIIYSIASDRFGVEEKCHLKSQTVNISRRQKDIKEVRKQLRDLKKRYKHAGPVERNALSELRDIARCKLKTLRRAEYHRRRRRERSKRRASFTKDPFGFVKELLGQKKNGTLRSSKEEVENHLTMTHKDIRRNEELGECDLILEYPPPTKEFNLKEPTFKEIKDIVYHARASSAPGPSGIPYKIYKRCPKLLTRLWKLLKAVWRKGYTAPQWKTAEGCFIPKEDESEAVGQFRTISLLSVEGKIFMAVVARRMTSFLIENEYLDLSVQKGGIPGMSGCIEHTAMVTQLIKESRESKGDLTVLWLDLANAYGSLPHKLVEFTMMSYYIPKKIQKMILDYYDNFKMRFSTKQFTTNWIKLEVGIVTGCTLSVILFAAAMNLLAKSAEQECRGPTTSSGTRQPPIRAFMDDLTVTTRGVMGARWILKGLEKIIKWGRMKFKPVKSRSLVLKKGKVDGKFKFNIDGQDIPTVTEKPVKSLGKVFDASLSDRKSIREMEDQLDTWFKLVDKSGLPGKYKAWIYQHGILPRILWPLLVYAVPMTTVEMLERKTNKYLRKWFGVPKSFSSSGFYGESNMLHLPIKSMTEEYKVTKVRKIVMIRNAKDTKISKSSTHEKTGRKWNAEEELTRAEDRLKQKVLVGRVAKGRQGLGFGSKPLWNEATDREKRDLIQLEVRESLEEDRRVKAIEMKKQGKWMKWEGVRERKLTWNDLWKEQPQTISFLLKATYDVLPTPSNLVTMGLAETAECPLCGAVSNLKHIMSACRKGLADGRFRWRHDQVLKELAQVIETERRKKHKKLGTQYINFIKAGEAITKEIRKPTGILHTANDWTLMVDLEKQLKFPEEVVETSLRPDIVLWSKSSKHIVLIELTVPWEENIQEAQERKREKYAELVEQCRNKGYTARCEPVEVGCRGFAGQSLWRTLGLLGINGNTRKQAIGSITRIAEKASKWLWIKRADDWKTIKHY

SEQ ID NO: 7308 - protein, 908 aa, Owenia fusiformis
MTTITYSIASDRFGEEEKCHLKPHIVHISRRQKDIKDLRKELKDLKKRYKQAGPIERNALRELRVIVRSKLKTLRRAEYHRRRRRERTRKRASFTKDPFRFVKEILGQKKNGTLKSSKEEVENHLTSTHKDPRRSDELGECDLIIEYPPPTKEFNLNEPTFKEIKDIVYHARASSAPGPSGIPHKVYKRCPKLLTRLWKLLRAVWRKGYTAPQWKTAEGCFIPKEDESELVGQFRTISLLSVEGKIFMAVVARRMTKFLIENEYLDLSVQKGGIPGMSGCIEHTAMVTQLLREARENKGDLAVLWLDLANAYGSIPHKLVEFTMMSYYIPIKIQRMILDYYSNFKMRFSTKDFTTDWIRLEVGIVTGCTLSVILFAAAMNLLAKSAEQECRGPATSSGIRQPPIRAFMDDLTVTTQGVMGARWILRGLDKIIKWSRMKFKPVKSRSLVLKKGKVDDKFKFNIDGQEIPTVTEKPVKSLGKVFDASLSDKKSIKEMEDQLDTWFKLVDKTGLPGKFKAWIYQHGILPRILWPLLVYAVPMTTVEMLERKTNKYLRKWFGVPKSFSSAGFYGESNMLHLPIKAMTEEYKVTKVRKIVMIRNARDNKISKSCTKEKTGRKWNAEEELARAEDRLKQKVLVGRVAKGRQGLGFGSKPLWNEASDREKRDLIQQEVRESLEEERRVKAIEMKKQGKWMKWEGVRERKLTWNDLWKEQPQTISFLLKATYDVLPTPTNLVTMGLADSAQCPLCGGMSNLKHIMAACSKGLSDGRFRWRHDQVLKEIAQVIDTEMRKKHKKQGTRYINFVKAGEDTTKEVKKPTGILHTANDWNLMVDLEKQLKFPEEVVETSLRPDIVLLSKVSKHIVLIELTVPWEENIQEAQERKREKYAELVEQCRNKGYIARCEPVEVGC

SEQ ID NO: 7309 - protein, 1043 aa, Owenia fusiformis
MEQRSGTPDKTKEGPGQDKNHSARNVQVPKTNETAKAKEERLQRIKWPNATKKEEWSNLDEDLESILESSLSGPVEKKIQAMTTIIYSIASDRFGVEEKCHLKSQTVNISRRQKDIKEVRKQLRDLKKRYKHAGPVERNALSELRDIARCKLKTLRRAEYHRRRRRERSKRRASFTKDPFGFVKELLGQKKNGTLRSSKEEVENHLTMTHKDIRRNEELGECDLILEYPPPTKEFNLKEPTFKEIKDIVYHARASSAPGPSGIPYKIYKRCPKLLTRLWKLLKAVWRKGYTAPQWKTAEGCFIPKEDESEAVGQFRTISLLSVEGKIFMAVVARRMTSFLIENEYLDLSVQKGGIPGMSGCIEHTAMVTQLIKESRESKGDLTVLWLDLANAYGSLPHKLVEFTMMSYYIPKKIQKMILDYYDNFKMRFSTKQFTTNWIKLEVGIVTGCTLSVILFAAAMNLLAKSAEQECRGPTTSSGTRQPPIRAFMDDLTVTTRGVMGARWILKGLEKIIKWGRMKFKPVKSRSLVLKKGKVDGKFKFNIDGQDIPTVTEKPVKSLGKVFDASLSDRKSIREMEDQLDTWFKLVDKSGLPGKYKAWIYQHGILPRILWPLLVYAVPMTTVEMLERKTNKYLRKWFGVPKSFSSSGFYGESNMLHLPIKSMTEEYKVTKVRKIVMIRNAKDTKISKSSTHEKTGRKWNAEEELTRAEDRLKQKVLVGRVAKGRQGLGFGSKPLWNEATDREKRDLIQLEVRESLEEDRRVKAIEMKKQGKWMKWEGVRERKLTWNDLWKEQPQTISFLLKATYDVLPTPSNLVTMGLAETAECPLCGAVSNLKHIMSACRKGLADGRFRWRHDQVLKELAQVIETERRKKHKKLGTQYINFIKAGEGITKEVRKPTGILHTANDWTLMVDLEKQLKFPEEVVETSLRPDIVLWSKSSKHIVLIELTVPWEENIQEAQERKREKYAELVEQCRNKGYTARCEPVEVGCRGFAGQSLWRTLGLLGINGNTRKQAIGSITRIAEKASKWLWIKRADDWKTIKHY

SEQ ID NO: 7310 - protein, 850 aa, Birgus latro
MAAISSLCDTLAIQEGDDPDQLIQLMLEELPVRGAPVMARGGRRRRPGQPAPGAHRARRQLFARTQGRWAKDRGRLVRDILDGVIDVNDNVADREKIAFWKDLYETPSHPWSNPVPTPVRPPRWDLVEPISVEEVEGALRKARVCTPGPDGTTLADLRSLGPVKVTLLFNALLVGNTPERLLRSKTTLVPKTARPDGPSGFRPISVSSYVVRIMHSILAAQIQGADLFSWAQRASRPSDGCAENINMMSAILYQGYRRWHNVYIAMLDVRKAFDSLFHQALGAIMGRVGVPPPLIRYIKQGFVNTQLDLLGASICPQRGVRQGDPLSPLVFNAAVDYVLGGLDNQLGTNIGDQWVSGFAFADDLVLTSIAKPGLQALVHTAIYRLGQLGLSVNPDKCKSLAVVQDGKAKQYVWAANLYLTADGRLIPALTASETTKYLGVDVGWKQSLKSHLEMLRELLGRIRTAPLRPQQKLWAISKVVYPRCLHRLVLGCVNLGTLKDLDRSMRAAVREALHLPKDTPWAFFHAGLKGGVLGVPSFYTRVPSLRVARLLRLKKSTCPIMKTLGEHAYISDCLERTRWPVIQGVRIQDRRAEANQWVLDLCRRYDGEGLRGTAQQAHWSSHRWVYEGSDRLSGSRYVDAVKLRRSLVSTPVRTSRGRGVQRPNLRCEGGCGTPPSLNHVLQGCALTHEIRVARHDRLVDYLERQLERANPNYRVGKEQTLRAGAVMRRPDLLIDTGTSLAVLDVQVVSDTRYTSLDSANARKVEYYNTHEVKEAACQWAARSAATVEAVTLNWRGMLSRESAEALLRLGITPLSLATLVMISLEGSQNILWFRRRRGWRSWRRWGRPPW

SEQ ID NO: 7311 - protein, 874 aa, Aleiodes sp.
MQEILEGVSPHCQVEKETVQDYFRNMYSGETTLQSQPHEWPLRNPDEDAGIRANLVRPFTAIEVNKRLRRAQNTAPGPDGVTYCDLRRADPGSHVLTAIFNVCLRQSSIPESWKSSNTVLIHKKGDRNDLSNWRPLALSDTTAKLFAAVMADRLTEFATKGKRLSGSQKGFLRYEGCHEHNFILKELLDDSRKKGKDLVVAWLDLTNAFGSIPHETIFDAFRGAGVPQEIQKLITSMNTGCTTRIRTTNGLTEPVSIKSGVRQGCPNSPVTFNLAIERVLQEIGKLPVGYRLQEVNYRALAYADDLALVASSVDDMEMLLRVTGEAAARAGLVFNPKKCATLHLKGNGSSRIAESTSFSLEGENIEVMEEGDAYRYLGIPIGLRINQTPVSLIQKMMDDVELIDGSLLAPWQKMDALRTFIMPRLDHILRSGSVDKTPLSVLDKLVKKKVKGWMNLPKRASAEVVFLPTWRGGAGILPIADLADILTISHAFRSLACRDAEVANVAEASLREAVRRRTIHEPTLEEIAEYLSGSLEGPFSRDLHGDPSQWTRVRLATRRQASRLLVRWTCDRGSGGLKLECRGTEGRKVIIPLSASGQIIRRLRQAAQEYYLHTLTSKRDQGKVFQVSSRSAVSNAFVRDGKYTRFAEWRFIHRARLDVLPLNGAMRWSDGDKRCRRCGYAKETLPHVLCHCMRHSDAMQRRHDAILGRLSKACRMKGEVRVNQVVRGVNGDLARLRPDLVIRDEEAKCVHIVDVTVAFENQRKAMEDARRAKIVKYTPLATALNASGYTVNVDAIVVGALGTWCPENEPVLKKLGVSNHYALMMRRFIVSETIHWSRDIYVEHVSGVRQYRPVGSCPDGGRPSGPVAVNPRSQ

SEQ ID NO: 7312 - protein, 1547 aa, Aleiodes sp.
MEVTINFPHSAEEFQCPGCFRPGFRTIAANGQKTGEFKDERAFLQHLRRMHKGVKISFKCRTCDYTGKGAYAAKDVKTHFGKRHANHQSERQESPAVLTIETTQAGNIINNNSNNNDNYNNGIDNNGENGSGTNEGLSISRNNNDNINNNDFTPQPTAIATNVNYNEDNHTTQQTVSSVMAPVTVNLVCESSQRRETTTVTEVLENARTNLLQALAQNPDTLISNRNSSDLRTLGVDNQPNNNTRGQCGVSVTTGVTTSVTQAQTPNARRGGMLDFIIRPPPVENGDNNGEFPISNHPPYNITTTPTSIAVTTTSQAALTTTTVTSTCYGGTIMSATITDSIIGRGEPFTQPNEPHVTTTVTATIHQTPEIHRNANTEYANNTRAGGKRIRQSSEESSSASEGENEGDRRRRRKRRNRTSPQQEIITGALSPVLTSQEQQPPPVTEHPETTITNSPSHTRTDPMASRNETRNNNGNNNLNTNGTRSDRGGRRGGRGTGALGRGAGGRGGQVLGNSVRGRNSAALANRRQNINRDGINNNGNSNIESNDDSGTNDGVRSRDTNPSSTSPGRRRQPETRTVRAACRKDLIAKAEATTSLDGLRMLADELTVFLQPFRTGRDTRPAQGENSSSQPRGHRDNRQQNHNRTEHQRGNRIQNAESIQRLYRNNRRRAMQEILEGASPHCQVERGTVEEYFRNMYSGETTLQSQPHEWPQRNPDEDAGIRANLVRPFTAIEVNKRLRRAQNTAPGPDGITYCDLRKADPGSHVLSAIFNVCLRQNSIPESWKSSNTVLIHKKGDRNDLSNWRPLALSDTTAKLFAAVMADRLTDFATKGKRLSGSQKGFLRYEGCHEHNFVLRELLDDSRKRGKDLVVAWLDLTNAFGSIPHDTIFDAFRGAGVPQEIQKIITSMNTGCTTRVRTTEGLTEPISIKSGVRQGCPNSPVTFNLAIERVLQEIGELPVGYRLQEVDYRALAYADDLALVASSAEDMEIMLRTTGEAAAKAGLVFNPKKCATLHLRGNGSGRLAENTIFSLEGENIEVMKEGDAYRYLGIPTGLRINQTPVSLIQKMVDDVELIDRSLLAPWQKMDALRTFIMPRLDFILRGGAVDKTPLSTLDKLIKKTVKGWMNLPQRASAEVVFLPTWRGGAGILPTADLADILTISNAFRSLACRDLEVANVAEASLREAVRRRTIHEPSLEEIAEYLSGSLEGPFSRDLHGDPSQWTRVRLATRRQASRLLVRWTCDEGSGALKLECRGTEERKIIIPLSASGQVIRRLRQAAQEYYLHTLTSKRDQGKVFQVSSRSSVSNAFVRDGKFTRFAEWRFIHRARLDVLPLNGAMRWSSGDKRCRRCGYAKETLPHVICHCAKHSAAIQRRHDAILGRLSKACRVKGDVRVNQVVRGVNGDLARLRPDLVIRDEEAKSIHIVDVTVAFENQRKAMEDARRAKIVKYAPLATALNASGYTVNVDAIVVGALGTWCSENEPVLKRLGVTNHYALMMRRFIVGETIHWSRDIYVEHVSGVRQYRPVGSGPDVNLSSGPVNGPRRSQQQ

SEQ ID NO: 7313 - protein, 1195 aa, Euura saliciscinereae
MDRTNDHASEAGGSPVPMEPPVAELIASPIRDENVDGPLPIRLVERITLTAQLNTVVNCPKCAAQGLNLIFFGSQPLDKHLVSKHPTVRVSWECESCRRPFPGIQAWRVHYALCTGPIPEVPRAFICEVCQAGFDTQIGLSQHERHIHPRLRNAKRAEAAERPRNRGGRAATLWSAEDLEELRRREAECINERFINKALMRFFPGKTNKQISDARRRLKPAVQPPAPNDHPNEPPVELAGEPREPPQGPQPPLVPHLQQPGAGNEAGNMEVTEPPIERAEGNDNVIVEARQPLDLPLEHPRPRAEEGEGAAVEQAPAAAEPRSAWGDALRSAIRTYKDETARWKDFARQTQVLVEGDPLAGDLDALYDKLVGIIKSSRETQSAVERNQAKAKSKPRQGRGRRGPANRTARRAYAFARCQDLWNNCPKKLADIVVANDMSLLKAQGAPPRAATQELYNRLWGVSGPIIPPFERDDNSVPMEVIFAPVTTAEIERKIKDVASSSAAGPDGLVKSDLKGEGLSEALTAIFNLLLLARHYPEAWRVNRTTLIPKPGKDTTDVKNWRPITISSMLSRLFSSLLDKRLRGALKQLERQKGFTDENGCFANTRLLNVAIRDAKERGGVVSILDVSKAFDTVPHTAVGECLLRKGIPRYAAEFVAGMYRNSRTRIKTSEGEVDIELKRGVKQGDPLSPLLFNLIIEPTLERIQATQGFELGGENLAALAFADDVVLLARTSDTAKAQLELVRRDLAAFDMALSIDKCCTFEYKPSGKTWYVRNPHIELGAQEVPYAEPDESLKYLGVKMNPWRGLISGLEREIFQEIIARVKALPLKPMQKIDLLATYLYPRYTYGLITSPPAKQTLVDIDQLIRVETKRILHLPCSTCDAFLYTPRKAGGVGVIQLETMVPVAAIRNAIKARASRDPAVRAAIERHDANRWVLEYTKALRLPWPLSLEQLDRTKARIRADHQKRWAELVWQGQGVTEFASDPLSNLWLTKHDLLKASRVVDAMKLRTNTYPTRALMKRIDPNFDARCRKCREHNETLGHVLGQCPDTKPKRIRRHDEIKDLICDRLARKNAILYEQEVTVEGVRLKPDLVVQTNERRVLVIDITVRYENGNYLSLAASEKIRKYTPILETLRERLEAAEAQVVPIVVGSRGSLPKKTVLALKQLGIPRKDMLTISLIALRSSIEMMNSFMDS

SEQ ID NO: 7314 - protein, 1082 aa, Microvelia longipes
MISGISARKPTPVYLAPHVTCTRSFATGRARTLHVKSAHPEIYRAQREELVAAPHGAPGRGRYVWSEADLAAFDRLMIIHAGTHGYSTRVAAGIPGKTPAQVRELARVRKPRRLSTSSDSSDQTAADSVSDRDRFSEGENDHQDEVVPEREEPGPGDSPRNAANPPPMIPNETMSSDLTNQSNTPNSDNQEVDQPEATPQDNFKRKLIQSAISLTYQGAQGEVGQILSSLDNVLSRDVQNWSMLELDGVVDRITDLLRSGREETARAPVRKGRSRGKPTRDQKRRRRYAATQQMFRSCPKRLAQAIQDGKDPVEIASEAPDERPSPESIKAFYGDIWGTVGPESATPVSATPRVSVDDVLGIIEPKEIYKKLMLIRPESAPGPDGLKRRDVTRIGGMSVVLAKLYTLIICSGLYPSAWLKNRTTLIPKKGVGDKNPGNWRPITIGSILARVYSSVLLSRISKAALLSPAQKGFQPLNGCFENTFIVDEIMREARKRGSRGAVICQLDIQKAFDKVPHSAIRKAMVENGIPVFLADCVDRMYDGASTVISCGGVQVDINLRRGVKQGDPLSPLLFNLVMNSLLNSLDLNRETGGPEGCRTVLAFADDLTLIGEDEVEVQQRLDTVISYLEELGMSLSPKKCLAFKILSGRGTWRIEDPHLKICGQGVPCVPPGSKFTYLGLSFDPESGMDNNATLEEMMSCLERVKRVALKPRQKIELIFTYLVPRYLYKLSLDLPAKSKLIALDCRIRQLVKEILHLHPSTPNALLYCRRRDGGLGIPKLANTVATAYLRSGIAMTLSADPLIVSLSRGCELGARLQKVAERLGVDWPLSVDDLDRFARQLKSLEVSNWASLGATGHGVRAFKNDPIGNVWLNRSEFLSDSRFINALKLRSNTLGTREVLKRENPERDVTCRKCMEATESLSHVLSTCPENKPKIIRRHDEIKEVIADKLREAGQEVYLEQPFTITVSGEEIRLKPDIVVVDNHEVKVLDIAVTYESGTSLSVVADQKISKYHQLAELLVSRFNRESFRVEPVVVGARGAMPQRTLGSLRRCGLSNIRSLATTCSMIALRSSLEIATRHLDI

SEQ ID NO: 7315 - protein, 958 aa, Graphium evemon
MDQVQCSLPAGPAADTSHQQQHSASFLTVNRANFIAEIVCFEGCAEALSCHHYVSATILVKPLYVERRPSQWRCLRCKHNPRSGLQFNEHMVNEHKVKLTFVCPYCNTEKGSVREVTAHMRSRTCNRTVSIDPLTDEELLHPPSPMGEPPSPLQPRLLDAINNLENTTFRRIALEAFFSRRGSSNVTTLADHLTKLCKPTSKPKRKRRKKRQANQQSNVQRTYNRNQWLWHRSKAKCYSTIMKGDTESNLNITEADTFFRQLFGESGTCQFELSPTQQADSIPLVSYYINDEEVLWYLQKKNRSAPGPDGLRASDLMPKVKEWSILINLCLYHQRIPKLWHSSRTTLIPKTESNDPANHRPLSVGPIAYRALASVLSRRLLQSVNLHTSQRGFIVDDGIHHAITTIRYLSSRHKPMISIDLRKAFDSVPHTTLFKACEANGLDESSLRLIKEIYTNATTTLQIGGKKSSPIPILRGVRQGDPLSPILFNLVIDQILRQLDKCNSGVQLGSKRLAALAYADDIIICADNDVELSQLTQSAITTLTSLGLTINMSKSFSVNASYNGLPRRSAFKHLGSMIDPTGESRMKNDDLLEELRKLDRGVIRGNQKLFFLRFHLLPAIYHRLVHERTTATVLREMTTAIRNYVRKWTRLPPTTVSSFIHLSLANGGLGIPNLRWRIPEMTRTRLMKLQKCHTWYIQEIVKSNWYRDELYRVDALCPQGTTEKWLLHDVSLANPGHMAFPVGGSRFCNRHLSGSSFIEGKRFYRLAQLRCFSDNFCSRQARPPLVCNKCNTGQMATLQHILCQCRDNEAVIRRRHNMVLKELVTHCKNQKLTFTVEPTFGNGLRPDIIVKLPNGTSLCLDVTIVFELSRNSLIEAGKIKQEKYKQCLPEMSSHLATPLPNCHVYGLVFGARGSIAAQTINVLEQHLKMPKWRIDKMINQVIHHSLNLFEHSPAASRA

SEQ ID NO: 7316 - protein, 1308 aa, Asterias rubens
MILQIKAMNMPAEAPPGTTRRPRASPKSAQWGSSIKDRTPATATTVVEPVLPFGTHHTSPQGVIDRAWGIPLSTVVHTDNDNSANRFQMIETFTIWNSKRYTGREMPLAAIAVGTDTVDQPAGEVTTPQREEQMSPMRGDDIIIDLTEPSTPEAEAQRAAISPHGVLRERPSHRDDDVIDLTTSNKPEAVTPREVNSPRGIEELSESSDDGGTEVGTPPREEETLVETVDESELEAVVSYSVPYRETACARCHELFPARKSLVDHYKSLHPKVVVLGECGKCGRRYQKFQALACHAGKCQGKIPTPTPHPFPCKICGQTFRSKIGLGQHERHQHPNHRNEERLCKKAADATRKRQTRSTTTNAAQARVQVWTEEEVDRLGDLEKQFAGEKYINKCIAEYLPGKTCKQISDKRRGLKRTNQQVPLKPKSRAAVKVPTPTSALNKKAYLEFVGLNPETQMGKCIAKEARSSEPSNWHEIEAESTRLLNAKTSKKPQSGRAKNNKRKVDVREGANTGKSNPKRAGKKSEYKRVQSLYKFKKKILVAEILDKKVREKCKLDPKEVEDFYREKLEGTPEIAGLEDWSGIKISEGAEEPSVLTEPVTVLEVVKNLHSMDSSSAPGPDGITVKDLRSMNMETLSNMLSAWMLCGKVPESIKGARSVLLPKCSEGLDQIGNWRPITIGSVIMRLFTKILTARITKIVSLSPRQRGFVAAPGCAQNLFLIDTLVKTAKKRRLPISMAFLDLSKAFDTVNHRHIYSELEKAGMDSHVIGLIKSLYERSFTEFKVGDSKTGPLYFKKGVKQGDPLSPLLFNIAIDPLLRRLEDEEGFSFEIDGERCSISALAFADDIAIVGKSSLDLQRLLDIADEFCQRTGLRMNVGKCAAFHIQPWGKSFTVNEGASWSIGGLPIPWITPDETTKYLGLRVGPWRGVKTEDLGERLNVWIERIGKAPLKPVQRVDLVRNHVTPRLQFQLSMTQASGNSLRSLDSTIRGAVKEWLKLPPCTTNGMIYSAVGDGGLGMIRFEKVIPTLRAKAIMSSIESKDPTIARIGKVGVAHLRNAEDLRELAKPKECWRVKEHTEWAAKACQGIGANAWKDDAHGNRWITTPILRGHQYCAALQMRTNTYPVREAILRGREGDKTCRGCDAPTESLSHVSGQCPKVQGARIVRHNKICDMIVDRVVAHKTHKWQVRREVTCKDQSGATKRPDLVFSDLEHTVVIDTTVRFESGRSLDKAYAEKVSKYQTCAESLKAITGTETIEFHGLVIGARGAWCVENAKPLAALGIDCKSFRSQLCNKALLKTLDLLYLFGNR

SEQ ID NO: 7317 - protein, 737 aa, Asterias rubens
MVDVREGANTGKSNPKRAGKKSEYKRVQSLYKFKKKILVAEILDNKVREKCKLDPKEVEDFYREKLEETPEIAGLEDWSGIKISIGAEEPSVLTEPVTVLEIVKSLHSMDSSSAPGPDGITVKDLRSMNMETLSNMLSAWMLCGKVPESIKGARSVLLPKCSEGLDQIGNWRPITIGSVIMRLFTKILTARITKIVSLSPRKRGFVAAPGCAQNLFLIDTLVKTDKKRRMPISMAFLDLSKAFDTVNHRHIYSELEKAGMDSHVIDLIKSLYDGSFTEFKVGDSKTGPLYFKKGVKQGDLLFPLLFNIAIDPLLRRLEEEEEGFSIEIDGERCSISALAFADDIAIVGKSSLDLQRLLDIADEFCQKTGLRMNVGKCAAFHIQPWGKSFTVTGGASWSIGGLPIPWITPDETTKYLGLRIGPWRVVKMEDLGERLNVWIERIGKAPLKPVQRVDLVRNHVTPRLQFQLSMTQTSGNSLRSLDNTIRGAVKEWLKLPPCTTNGLIYSVVGNGGLGMVRFEKVIPTLRAKAIMSSTNSKDPTIARIGKVGVAHLRNAEDLRELARPKECWRIKEHTEWAAKACQGIGADAWKDDAHGNRWITTSILRGHQYCAALQMRTNTYPVREAILRGREGDNTCRGCDAPTESLSHVSGQCPKVQGARIVRHNKICDMLVDQVVAHKTHKWQVRREVTCKDQSGIILLQRMESGNCFPFFTVFSINHHWVEFHIFNAKLAQYNAG

SEQ ID NO: 7318 - protein, 1248 aa, Marthasterias glacialis
MLVQINDRRIPAETSPGSKRSPISSIGADRRNRAGSSNTIATAVVGVAPSGLPPGDHHPMPRGVTGNARGIQATPPNVAQVDDDRDLAVGFQRVPSFDVWNSTRYSGRSIPLAALELGEEVLSEPNETDGMSLPRDDITLEPGSPGSVVIEADTQEVVAQMQVGPPEVEQPVTTVSYPVPYKETGCKLCQEVFPARKRLVEHYKSKHPRVIVVGECAKCQRRYQNFQALACHAGKCPGRIQAPVQLLHRCENCGQSFKTLSGMKQHMRHRHPAQRNEERLRKKADDVMRKRLARSAASKSGQARVQVWSEEEVYRLLELEEQFANEKYVNKCIAEFLPGKTYKQISDKRRCLKKKGGSNPPGRTRPPRKTVTVPVQSAMDKKSYIEYVGPNPQTRMGKCIAKEAQAGGPSAWLEIEAESNLLLKAASSKNPRNGRAKTSKRKVDIRREVANPGKSNQNYARRKSEYKRIQSLYKYKKRILVEEILDNKSRKTCKLDPKEVEDFYREKLETIPECAGLEDWEGIKISEGVEEATLLTGPVSVSEVRRNLQSMDKGSAPGPDGITVKDLWEMDLEEMARMFSAWVLCGKVPECTKGARSVLLPKGTEGLDRIGNWRPITIGEIVMRLFTKILTARLTRVVRLSPRQRGFVAAQGCAQNLFLIDTLVKAAKEHRLPISMAFLDLSKAFDSVSHKHVIDELKKAGMDTHIIGLIQSLYDGSYTEFKMGTKATGPIYFKRGVKQGDPLSPLLFNIAIDPLLRRLEEEEGFSFEIEGERCSISALAFADDIAIVGKSSLDLQRLLDITEEFCQRTGLRMNVGKCAAFHIQPWGSRSFTVNEGSPWNIDGSPIPWIQPGETTKYLGLRVGPWLGVKPSDLGERLKEWVERIGKAPLKPHQKVDIVRNHAIPRLQYQLSMIKVSGNTLRALDGTIRAAVKEWLNLPPCVTNGLIYSSPKDGGVGLLRMEKAIPILRARAVMTAVESEDPTISRIAREGVSQLGKADKLREVARPKESWRTQEHSAWAAKPCQGIGAEAWRGDTFGNKWITTPMLRSHQYCAALQMRTNTYPLREAVQRGREGDKTCRGCDAPLETLSHVSGQCPKVQGARIMRHNKICDMLVDRVVASKPQVWLVRREVTCKDESGATKRPDLVFTNGEHAVVVDITVRFESKGNLEKAYDDKVSKYQTCGKSLKAITGVTTIEFHGLVLGARGAWCNKNVAVLEALNVDCKSFRSRLCTKALIKTLDLLYTFGNR

SEQ ID NO: 7319 - protein, 1163 aa, Ophraella communa
MAETQTDSVRNRPDDQSVAGPSGIGAADLQKANTEAMNRNRETSPNRDALEGETHPTTLQGKPRQRTKWTDEMNEFIYRSFLVLTNMETNTTGYSKELHSQVTRQFPELKRKTIQNILDQKRAILSANKISPEAKDRIKEEAKRELGINPTTPPRTEIQANNEPIEELTEKERQIHECFEETYIQYYGTMANIRPKLPKLKTRIKSDINKIVNQINTLIESKINENDDIATIHNLVYIGAATTLKLITPKKQQTKQKRETNREPPWARRISKDIEELRSKIGRLTKAKEPNASQKLKNKAQEILAEHKNENNKSINEVTDLLKQKLAAKSKRLRRLKESSQRRQDNKQFQEDERQFYRQLNQHTKNDQENKIPDKDETKEYWSNIWTKERKHKHTAKWIKEERTKMKNTQQMNDHNITVDDIKKALTKAHNWKAPGKDGIHNFWWKRFTVTHNKLAEIFTKILQGQAEIPDFMTDGITYLLPKTTPTSNRPDKYRPITCLPTIYKILTSILTDKIYNHLTKNNILAMEQKGCRKRTKGCKEQLIIDTIITQHKKKEKQPLYTAYIDYRKAFDSVPHSWLIEILDIYKIDPFIQNTLQQTMRKWKTTISINNNNTKIVIDNIEIKRGIFQGDALSALWFCMAINPLSQILNKSNKGIAIENNILSHLLYMDDLKLYAENKENIEKLIKITKTFSDDIHMEFGLDKCRINAMERGKWKKYEGYDINTDKGQVEGMEIEELYKYLGYQQSRGIDQKQSKETLKNKFKERLRKILKTKLNSKNITKAINTYAISILTYSFGIISWTDTDLQNLNRDIRTMCTKFRKHHPRSSIERINIPRNKGGQGIINIPLHNQKQIMALRKYFNNETTNNQIYKSLKKLDKNFTPLNLAQDNNDEPENDTLEDQWKRKELHGRYPATLMQPHINKDASLMWLKLGYLFPETEAFVIAIQDQVIATRNYKKYIMKEKIPTDKCRICKEQTESLDHIIGGCQGLASIEYTRRHNNVGKIIHQELLKLYDLKIKETIPYYKYSPESVIETETYKIYWDREIITDLAIQHNRPDLVFTNKINKHTYLIDFSIPLSGNLQKKYKEKISKYLPLANEIKEMWGQEEVTIVPIIIGATGEIPNSLIESLKKLNLKEQVYYQLQKIILIETSGIVRRVLNDNN

SEQ ID NO: 7320 - protein, 1163 aa, Ophraella communa
MDKNSLEEPQLEASTSSTPALENTQTGSRAVQAQGRQRIKWTKEMNVKVMESFYRVNNGENQPLPGWRSKFHQDISINVFPELELTEQNIVDRKNVIVRKKYLDEIELEQIRTQCSIHNKETRDEIQDERTSESTEERQEIRQSEQQVIQNTQAPAETAQTTNQQEQTLRYNTSHLQNEFYSTLRFYEGGDPTERPRIPKLSIKKDTFTIIAMINEMIGQYLNKTDDIAQIQLVIYVAAVTVTKANGQKPYCERSRIANGTRSFREKEPPWTTRIKRQIAELRAKADVITAYLQGNRNRRILKKIMNIMKQDAISEEDNKKKEKLTELRDTVRQTYKAKSARLRRYNELTKRKKQNREFATNPTNFFRTLSKTTSGENNTINSQCFTSFWEDIWSNKKYYNHNADWLQKIQESTEELVAMEDCIITQQEIANVTRKLPNWKSPGVDGVQNFWLKKLTSSHESLALAFTKALREPNSIPDWMMMGRTHLIYKKDDPKQPKNYRPITCLSVFYKLFTSVITEKIYQHCEMNNIIAPEQKGCTRNTLGCKEQLTIDATILKQATTKKRNLNLCYIDYKKAYDSTPHDWLIKVLDIYKIDPNIRATLAHCMSRWRTKIWLKSSEIGTVQINRGIFQGDSLSPLWFCLAINPLSHLLKTSDCGYRLNTKHNETRISHLLYMDDLKLFAETSNQLKHLIEITAQFSNSIQMSFGLDKCAKIQMEGGKVNMNTRTETFRDIQDLEPDNLYKYLGVKQNCNINHTEVKRDLKETYRERVTKLLNTKLSGKNQISAINMWAVPVLTYSFGVIKWTTTDLEQLDRLTRMLLNKFRCLHPNSATERLYLSRKDGGRGLINIFNLCKRQEKNMREYFLKSNNPILKIITSSDQGYTPLNLGTQNYQPTPEINFKEQWTTKVLHGKYPIQLKNDTIDMKNSLSWLKSGSLYPETEGFIFAIQDRVIRTKNYEKHILKQNTADICRKCNLPGESIEHVIAGCPQLAQTSYLSRHNQVAKIVHQELALKAGLIQNRVPHYKYNPVSILENQGYILYWDRPIITDRTVDFNRPDIVLINMEGNEAKLIDIAVPLSQNVVKTEGQKKSKYENLALEIKHIWRVEKVEIVPIVISAEGIVSRNFEQYLHKIGLSANLIPLISRTAILQTTHIVRKFFTSLG

SEQ ID NO: 7321 - protein, 1338 aa, Schlechtendalia chinensis
MEYAGTSQTAGPSTRRTRGPRIPTGDAPSDTGGPLSTTTTITTRATRRGSGPRIPAGNTPPDTGGPDRPVANAEPCAERQPVLDGPTLRVFYPVPKSWQCPVGGCVTAYGNKTWTTNRTSLTKHLERHHGVVAVYELVCARCGVELGRKPASHECAVDGPRPVGTRKQPVLCEEGVTFYVPAPVAVECPWEQCSARFRAQSWTTMKLSVVRHIELCHGQRLRAVVVCAGCDEVLGLRATLHKCEYVFGPESPVEESFDCGECDAHFASAVGLHNHAQAHLHRDRVEAAAAPMPAPATRQQKRREREAERLPVADANTPVPATPATPNAVIVPTSRTYRVSTTPVRESPRIDGYDIVYASSDLWLPNPPVAIGTTADVGDDGDRSNDGSDATADGEDDDDANAEEVDEDVELRPDDTTELHDAMPALMAAARAPCSTENWALFEDQLRSIVVEARRIAKIPDRVEGARKRTLLDVDDAQGIQTVYRRNRRRAIRAIVQGEGGDCEVPLDAVEAHFREVWAETTCEDGIYVPTEGREAVSLGHFTTVEVSRRLGRFENTAPGEDGLTYRHWKRLDPSCLLVTVVFNACLRYRRIPSSWKSSVTVLIPKKGDETLVTNWRPIAMCNTIYKLYMGCLADRLTRWAIDNSAISPCQKGFMPADGAFEHVHCLQRLVEKARCSKTDRCIAWLDVSNAFGAVPHGALTAALSSAGAGQAMVEIVREAYDGASSRVSTGLGTTQPIEVRSGIKQGCPLSGVLFNFAVDHVVRELQADNPEHRVLAFADDLCLIADNPPELQRLLDTATDGLRRMGLRLNPAKCVTTHVSGRTPVGVRPTQFAVGGVAIRALREGETTTFLGAEVGFRIVPQMSTVAEITQFGLKVLRSKLAPWQRIDAMKTFVYPSVTHLLRVGTFSKTDWETVDKIWRPEFKVTLGVPQEASNEYLYGARAGGSCGLPLIAEESDFARVDSAFKLLTSTDTRVANDAAGHLEATVRRRLQTPVDGVMSMDYLTGINEGAMRAPAVGVANVWTRARAASKRVGVEWKREGEEAVVTVPAAQATLRRNQRRRVFATLRKAAQMARTRELLEKPDQGRAMECVAAHPASTHFMKTGEYTRFADWRFVHRARLNLVHLNGSAAWRSGDRRCRRCGYHTESLAHVVDHCTRYTALINARHNAVVARVRAAADRKFEVISENQAIGTADVGRGRLRPDLVLKRRSDGKTFIVDVTIPFDNRLEAFRVAADLRRSRYANLAVELSGDQPAEVVPFVVGALGAWDPGTTSSLPSFVAGPTPQKCEDCVSVRRYLSPEISISSTSLAPVSVNCNHNNAPYIYTIILISLCIYFV

SEQ ID NO: 7322 - protein, 1202 aa, Schlechtendalia chinensis
MEYAGTSQTAGPSTRLTRGPRIPAGNTPPDTGGPDRPVANAEPCAERQPVLDGPTLRVFYPVPKSWQCPVGGCVTAYGNKTWTTNRTSLTKHLERHHGVVAVYELVCARCGVELGRKPASHECAVDGPRPVGTRKQPVLCEEGVTFYVPAPVAVECPWEQCSARFRAQSWTTMKLSVVRHIELCHGQRLRAVVVCAGCDEVLGLRATLHKCEYVFGPESPVEESFDCGECDAHFASAVGLHNHAQAHLHRDRVEAAAAPMPAPATRQQKRREREAERLPVADANTPVPATPATPNAVIVPTSRTYRVSTTPVRESPRIDGYDIVYASSDLWLPNPPVASRIAKIPDRVKGARKRTLLDVDDAQGIQTVYRRNRRRAIRAIVQGEGGDCEVPLDAVEAHFREVWAETTCEDGIYVPTEGREAVSLGHFTTVEVSRRLGRFENTAPGEDGLTYRHWKRLDPSCLLVTVVFNACLRYRRIPSSWKSSVTVLIPKKGDETLVTNWRPIAMCNTIYKLYMGCLADRLTKWAIDNSAISPCQKGFMPADGAFEHVHCLQRLVEKARCSKTDRCIAWLDVSNAFGAVPHGALTAALSSAGAGQAMVEIVREAYDGASSRVSTGLGTTQPIEVRSGIKQGCPLSGVLFNFAVDHVVRELQADNPEHRVLAFADDLCLIADNPPELQRLLDTATDGLRRMGLRLNPAKCVTTHVSGRTPVGVRPTQFAVGGVAIRALREGETTTFLGAEVGFRIVPQMSTVAEITQFGLKVLRSKLAPWQRIDAMKTFVYPSVTHLLRVGTFSKTDWETVDKIWRPEFKVTLGVPQEASNEYLYGARAGGSCGLPLIAEESDFARVDSAFKLLTSTDTRVANDAAGHLEATVRRRLQTPVDGVMSMDYLTGINEGVMRAPAVGVANVWTRARAASKRVGVEWKREGEEAVVTVPAAQATLRRKQRRQVFATLRRAAQTARTRELLEKPDQGRAMECVAAHPASTHFMKTGEYTRFADWRFVHRARLNLVHLNGSAAWRNGDRRCRRCGYHTESLAHVVDHCTRYTVLINARHNAVVARVRAAADRKFEVISENQAIGTADAGRGRLRPDLVLKRKSDGKTFIVDVTIPFDNRLEAFRVAADLRRTRYANLAVELSGDQPAEVVPFVVGALGAWDPGNDEFLAKLCSRSYASKMRRLCVSEVISFSRDIYIEHLTGTRQRQL

SEQ ID NO: 7323 - protein, 895 aa, Schlechtendalia chinensis
MPALMAAARAPCSTENWALFEDQLRSIVVEARRIAKIPDRVEGARKRTLLDVDDAQGIQTVYRRNRRRAIRAIVQGEGGDCEVPLDAVEAHFREVWAETTCEDGIYVPTEGREAVSLGQFTTMEVSRRLGRFENTAPGEDGLTYRHWKRLDPSCLLVTVVFNACLRYRRIPSSWKSSVTVLIPKKGDETLVTNWRPIAMCNTIYKLYMGCLADRLTRWAIDNSAISPCQKGFMPADGAFEHVHCLQRLVEKARCSKTDRCIAWLDVSNAFGAVPHGALTAALSSAGAGQAMVEIVREAYDGASSRVSTGLGTTQPIEVRSGIKQGCPLSGVLFNFAVDHVVRELQADNPEHRVLAFADDLCLIADNPPELQRLLDTATDGLRRMGLRLNPAKCVTTHVSGRTPVGVRPTQFAVGGVAIRALREGETTTFLGAEVGFRIVPQMSTVAEITQFGLKVLRSKLAPWQRIDAMKTFVYPSVTHLLRVGTFSKTDWETVDKIWRPEFKVTLGVPQEASNEYLYGARAGGSCGLPLIAEESDFARVDSAFKLLTSTDTRVANDAAGHLEATVRRRLQTPVDGVMSMDFLTGINEGAMRAPAVGVANVWTRARAASKRVGVEWKREGEEAVVTVPAAQATLRRNQRRRVFATLRKAAQMARTRELLEKPDQGRAMECVAAHPASTHFMKTGEYTRFADWRFVHRARLNLVHLNGSAAWRSGDRRCRRCGYHTESLAHVVDHCTRYTALINARHNAVVARVRAAADRKFEVISENQAIGTADAGRGRLRPDLVLKRKSDGKTFIVDVTIPFDNRLEAFRVAADLRRTRYANLAIELSGDQPAEVVPFVVGALGAWDPGNDEFLAKLCSRSYATKMRRLCVSEVISFSRDIYIEHLTGTRQRQL

SEQ ID NO: 7324 - protein, 895 aa, Schlechtendalia chinensis
MPALMAAARAPCSTENWALFEDQLRSIVVEARRIAKIPDRVEGARKRTLLDVDDAQGIQTVYRRNRRRAIRAIVQGEGGDCEVPLDAVEAHFREVWAETTCEDGIYVPTEGREAVSLGHFTTVEVSRRLGRFENTAPGEDGLTYRHWKRLDPSCLLVTVVFNACLRYRRIPSSWKSSVTVLIPKKGDETLVTNWRPIAMCNTIYKLYMGCLADRLTRWAIDNSAISPCQKGFMPADGAFEHVHCLQRLVEKARCSKTDRCIAWLDVSNAFGAVPHGALTAALSSAGAGQAMVEIVREAYDGASSRVSTGLGTTQPIEVRSGIKQGCPLSGVLFNFAVDHVVRELQADNPEHRVLAFADDLCLIADNPPELQRLLDTATDGLRRMGLRLNPAKCVTTHVSGRTPVGVRPTQFAVGGVAIRALREGETTTFLGAEVGFRIVPQMSTVAEITQFGLKVLRSKLAPWQRIDAMKTFVYPSVTHLLRVGTFSKTDWETVDKIWRPEFKVTLGVPQEASNEYLYGARAGGSCGLPLIAEESDFARVDSAFKLLTSTDTRVANDAAGHLEATVRRRLQTPVDGVMSMDFLTGINEGAMRAPAVGVANVWTRARAASKRVGVEWKREGEEAVVTVPAAQATLRRNQRRRVFATLRKAAQMARTRELLEKPDQGRAMECVAAHPASTHFMKTGEYTRFADWRFVHRARLNLVHLNGSAAWRSGDRRCRRCGYHTESLAHVVDHCTRYTALINARHNAVVARVRAAADRKFEVISENQAIGTADAGRGRLRPDLVLKRKSDGKTFIVDVTIPFDNRLEAFRVAADLRRSRYANLAIELSGDQPAEVVPFVVGALGAWDPGNDEFLAKLCSRSYATKMRRLCVSEAISFSRDIYIEHLTGTRQRQL

SEQ ID NO: 7325 - protein, 963 aa, Paramacrobiotus metropolitanus
MPTQNINNFICELCGKVCATAHGIGKHRDSGKCREAQARNLRSEPAIPSASRQAISPEEKLEDTLSRLRRTNPILPRVPVGARDACADAFAELLFACCAKNDIGAWSDLILFAPNILTAPPTKSGKGPSLATSVKRNLTGRQSDTAPPLGKKQQKPKAAPAVKAKLVNAKLECGSIGRAMNILVSQETIAPLSDEVIATLKEKHPGRPVDLDDTVRIVDVAPADVTHRELLSAVESFDSGTCPGPDGLRADHLKDLLFTQGETRRKLLDALVKFADHVLKREIPAEARTIFFGANLFPFVKPNGGIRPIASGCTLRRLVAKIVCFRLTEEMGNYFRPIQFGFGTKKGAEIVVHSAREFLETSSTKPRAFVKFDFTNAFNTVRRDKLLAKVFERIPAYYNFVHSAYGDSTTLFCISPNSGITIPSACGVQQGDPCAPMYYGLLTQDVSSQSEAAINLWYLDDGVSAGDPQAVKDTLVNIQGAAATVGLQLNTAKCELYVDGGTVDERQTVIQSFLNAAPDIRLSKPEELELLGSPLLNEAVSGALMRKVGQAQVLADQLGILPSHQALFLLKNCLSLPKLLYLLRTSPCWQFPEELKKFDEVISAKTEQLTNVAMISSVWTQASLPTKFGGLGLVCAADVALAAYAASVHGAADMVCCITGNASMKERTNQLTEVWSGRYSLEPPRMESRHLQSAWTALQHTQIASRMMENADVFTSARLLAASSPESRAWLSALPVTIFGNLLEDAHLRIAVARRLGAPVCQMHVCRCGSTVDSLGHHGLVCKLAKGRLGVHAVLNEATKRALTSAKVPSSLEPVGLDRGDGKRPDGVTAFPWKNGKPLVWDVTVADTFAQTYIGQTSRAPGSAAEIRENRKLGKYSGLADRYVVQPLAFETTGTFGPLTKKFFKDLSRKICDCTGNPRSGEFLRQKIGIEIQRGNAVSVLGTFSDMVEKEDVYFAFKLAKRQ

SEQ ID NO: 7326 - protein, 964 aa, Paramacrobiotus metropolitanus
MSSKNFICDLCGKICLTAHGIASHRDSGKCREAQARNLRNKPGLPTASPQPVPHDENLLDKLSRLRRTNPILPHVPVGARDACANAFAELLTACCAKNDMEAWSNLLFFAPSILTAPPTKSGRGPSLATSVKKNLSSKQTEDIIPSKKKQPKPKTAAALKAKLVNAKLESGSIGRAMNILVSQETIAPLTDEVIAILKEKHPGRPVDLDATVRNVDAIPSEVTHRELIAAVESFDTGTCPGPDGLRADHLKDLLSTQGETRRKLLDALVRFADHILNKEIPAEARKVFFGANLFPFLKPNGGIRPIASGCTLRRLVAKIVCFRLAEEMGNYFRPVQFGFGTKQGAEIIVHSAREFLQTPSTKPRAFLKFDFANAFNTVRRDKLMEKVFDRIPAYYNFVRSAYGEDSVLFCISPASGVTIPSASGVQQGDPCAPMFYGLLTQDVCSQIKAETNLWFLDDGVSAGDPQVVKDDMVNLQEAAAAVGLRLNTAKYELFVDGGTPTERENVAQLFLNAVPDIRISKPEEMELLGSPLLSEAIAGALMRKVGQAQVLADQLGILPSHQAFFLLKNCLSLPKLLYKLLYILRTSPCWQYPEELRKFDDVIRFKAEQLTNVAMSDTVWNQASLPTKFGGLGLISATEVALAAYTSSVHGAVDMVCNVTRNESIKDRCNHLTEVWTSRFSTEPPRTESRRFQTAWTTPQHTQTASRMMENADVITSARLLAASSSESRAWLSALPVSLFGNLLEDAHLRIAVARRLGAPVCEQHVCRCGNVVDSLGHHGLVCKLAKGRHGVHAVLNDVTKRALNSARMPSSLEPPGLDRGDGKRPDGVTAFPWKNGKPLVWDVTVADTFAQTYIARTSRVPGSAAEARENHKLGKYDGLADRDVVQPIAFETTGTFGPLTKKFFKELSRKISDCTGNPRSGEFLRQKISIEIQRGNAVSVLGTFNDMVNNEDVFFAFKLAKRE

SEQ ID NO: 7327 - protein, 1111 aa, Riptortus pedestris
MKWTKDMHIAVMRAYYLATKCDTEKTGYTRRIEQYWNELYPQITLKSQNLADQVRRILRTGKILTSFELEEIKNEVRQTIGLENETEQVVVNEPTQINDMEQEVEPIRENDETNITIALDDLLMSEFVKFEGIPFHMRPSIPRIPYNKKSLSAVKTMNNVLEFHVESVDNIEQIKHWTYSAARGVACYLGIVREDNKNSQNKSQQSLGIPQWQRRLEKRIADLRKRIGILTNFLCNPDGSSTKLKGKIDEIIVLHLGLVNENDLIETLRTYLDKEKQRLAVYANRIRRYKESHMRKKQNALFSTQEKHFYRSIGTNMVKKQIDCNVIDLTNYWANIWELPVTHRREQWIKDLTHGLKNVPEMADDSISAEEVTQALKKMHNWKCPGRDRIQNYWFKHFTCLHHMLARCYSDLLTGHVTIPEDFAEGVTYMIPKKEGHLEPKDYRPITCLNGIYKLFTSIISAKINSHLVSNGLLAPEQLGCKSGAKGCKELLVIDSFIASQVSKKQRNISIAWIDYKKAYDSVPHSWLIEVLKVYKVAPSVTNLLSRLMATWKTSLSIGKGKTKFQSETIKIKRGIYQGDSLSPLWFCLAMNPMSQIIRDSEYGYEISIGKKETKVSHSLYMDDLKLYAKTPTQLQSMIGIIKNYSDSIGMSFGLDKCAVLHISRGQKTTTDIIVSDETYIHELERTESYKYLGFQQHLKIAKKDVKDLLKNEFIKRLRLIFNSYLSSRYKIKAVNTWAIPSLIYSFGIIKWSDTTLDELDRLIRTEMTKARMHHPISSMARLYLSRKQGGRGLLNIRNLCRSQEVNLRHYIRSNDCHVFKEIVKLDDGFTALNLKCCNNPEVKNESHFLSEWQSKELHGRYYSRLYDSEVDLAYSVAWLTSGKLFSETEGFITAIQDQVIATRSYRRHILKDSSVSDKCRLCNKAYESIQHITAGCEILAGSEYLQRHNNVAKVYHQALAEKFGMVGSKVAYYRYNPQKLLEKDNIKMYWDEAMITDHTVHHNKPDILIIDKINKTADIIDIAVPNDENIRKSHAEKLRKYQELAIELKELYKLKSAIVTPIIVSSNGLVPKTTIAGTKNLNLPTAIIKEAQQGVLLDTARIVRKFLNSP

SEQ ID NO: 7328 - protein, 819 aa, Riptortus pedestris
MRKKQNALFSTQEKHFYRSIGTSMVKKQIDCNVNDLTNYWANIWELPVTHRREQWIKDLTHGLKNVPEMADDSISAEEVTQALKKMHNWKCPGRDRIQNYWFKHFTCLHHMLARCYSDLLTGHVTIPEDFAEGVTYMIPKKEGHLEPKDYRPITCLNGIYKLFTSIISAKINSHIVSNGLLAPEQLGCKSGAKGCKELLVIDSFIASQVSKKQRNISIAWIDYKKAYDSVPHSWLIEVLKVYKVAPSVTNLLSRLMATWKTSLSIGKGKTKFQSETIKIKRGIYQGDSLSPLWFCLAMNPMSQIIRDSEYGYEISIGKKETKVSHSLYMDDLKLYAKTPTQLQSMIGIIKNYSDSIGMSFGLDKCAVLHISRGQKTTTDNIIVSDETYIHELERTESYKYLGFQQHLKIAKKDVKDLLKNEFIKRLRLIFNSYLSSRYKIKAVNTWAIPSLIYSFGIIKWSDTTLDELDRLIRTEMTKARMHHPISSMVRLYLSRKQGGRGLLNIRNLCRSQEVNLRHYIRSNDSHVFKEIVKLDDGFTALNLKCSNNPEVKNESHFLSEWQSKELHGRYYNRLYDSEVDLAYSVAWLTSGKLFSETEGFITAIQDQVIATRSYRRHILKDSSISDKCRLCNKAYESIQHITAGCEILAGSEYLQRHNNVAKVYHQALAEKFGMVGSKVAYYRYNPQKLLEKDNIKMYWDEAMITDHTVHHNKPDILIIDKINKTADIIDIAVPNDENIRKSHAEKLRKYQELAIELKEVYKLKSAIVTPIIVSSNGLVPKTTIAGTKNLNLPTAIIKEAQQGVLLDTARIVRKFLNSP

SEQ ID NO: 7329 - protein, 1193 aa, Riptortus pedestris
MVRRTKKTASDESGVRAAPEGIDCQPSTSSGSASGAPMLYGSVRTPTVPTVQNSSSDFSLEEGDSPPAPVRKGRPRSTQQRMKWTKDMHIAVMRAYYLATKCDTEKTGYTRRIEQYWNELYPQITLKSQNLADQIRRILRTSKILTSFELEEIKNEVRQTIGLENETEQVVVNEPTQINDMEQEVEQIRENDETNITIALDDLLMSEFVKFEGIPFHMRPSIPRIPYNKKSLSAVKTMNNVLEFRVESVDNIEQIKHWTYSAARGVACYLGIVREDTKNSQNKSQQSLGIPQWQRRLEKRIADLRKRIGILTNFLCNPDGSSTKLKGKIDEIIVLHLGLVNKNDLIETLRTYLDKEKQRLAVYANRIRRYKESHMRKKQNALFSTQEKHFYRSIGTSMVKKQIDCNVNDLTNYWANIWELPVTHRREQWIKDLTHGLKNVPEMADDSISAEEVTQALKKMHNWKCPGRDRIQNYWFKHFTCLHHMLARCYSDLLTGHVTIPEDFAEGVTYMIPKKEGHLEPKDYRPITCLNGIYKLFTSIISAKINSHLVSNGLLAPEQLGCKSGAKGCKELLVIDSFIASQVSKKQRNISIAWIDYKKAYDSVPHSWLIEVLKVYKVAPSVTNLLSRLMATWKTSLSIGKGKTKFQSETIKIKRGIYQGDSLSPLWFCLAMNPMSQIIRDSEYGYEISIGKKETKVSHSLYMDDLKLYAKTPTQLQSMIGIIKNYSDSIGMSFGLDKCAVLHISRGQKTTADNIIVSDETYIHELERTESYKYLGFQQHLKIAKKDVKDLLKNEFIKRLRLIFNSYLSSRYKIKSVNTWAIPSLIYSFGIIKWSDTTLDELDRLIRTEMTKARMHHPISSMARLYLSRKQGGRGLLNIRNLCRSQEVNLRHYIRSNDSHVFKEIVKLDDGFTALNLKCSNNPEVKNESHFLSEWQSKELHGRYYSRLYDSEVDLAYSVAWLTSGKLFSETEGFITAIQDQVIATKSYRRHILKDSSVSDKCRLCNKAYESIQHITAGCEILAGSEYLQRHNNVAKVYHQALAEKFGMVGSKVAYYRYNPQKLLEKDNIKMYWDEAMITDHTVHHNKPDILIIDKINKTADIIDIAVPNDENIRKSHAEKLRKYQELAIELKEVYKLKSAIVTPIIVSSNGLVPKTTIAGTKNLNLPTAIIKEAQQGVLLDTARIVRKFLNSP

SEQ ID NO: 7330 - protein, 1193 aa, Riptortus pedestris
MVRRTKKTASDESGVRAAPEGTDCQPSTSSGSASGAPMLYGSVRTPTVPTVQNSSSDFSLEEDDSPPAPVRKGRPRSTQQRMKWTKDMHIAVMRAYYLATKCDTEKTGYTRRIEQYWNELYPQITLKSQNLADQIRRILRTSKILTSFELEEIKNEVRQTIGLENETEQVVVNEPTQINDMEQEVEPIRENDETNITIALDDLLMSEFVKFEGIPFHMRPSIPRIPYNKKSLSAVKTMNNVLEFRVESVDNIEQIKHWTYSAAKGMACYLGIVREDTKNSQNKSQQSLGIPQWQRRLEKRIADLRKRIGILTNFLCNPDGSSTKLKGKIDEIIVLHLGLVNENDLIETLRTYLDKEKQRLAVYANRIRRYKESHMRKKQNALFSTQEKHFYRSIGTSMVKKQIDCNINDLTNYWANIWELPVTHRREQWIKDLTHGLKNVPEMADDSISAEEVTQALKKMHNWKCPGRDRIQNYWFKHFTCLHHMLARCYSDLLTGHVTIPEDFAEGVTYMIPKKEGHLEPKDYRPITCLNGIYKLFTSIISAKINSHLVSNGLLAPEQLGCKSGAKGCKELLVIDSFIASQVSKKQRNISIAWIDYKKAYDSVPHSWLIEVLKVYKVAQSVTNLLSRLMATWKTSLSIGKGKTKFQSETIKIKRGIYQGDSLSPLWFCLAMNPMSQIVRDSEYGYEISIGKKETKVSHSLYMDDLKLYAKTPTQLQSMIGIIKNYSDSIGMSFGLDKCAVLHISRGQKTTTDNIIVSDETYIHELERTESYKYLGFQQHLKIAKKDVKDLLKNEFIKRLRLIFNSYLSSRYKIKAVNTWAIPSLIYSFGIIKWSDTTLDELDRLIRTEMTKARMHHPISSMARLNLSRKQGGRGLLNIRNLCRSQEVNLRHYIRSNDSHVFKEIVKLDDGFTALNLKCSNNPEVKNESHFLSEWQSKELHGRYYSRLYDSEVDLAYSVAWLTSGKLFSETEGFITAIQDQVIATRSYRRHILKDSSVSDKCRLCNKAYESIQHITAGCEILAGSEYLQRHNNVSKVYHQALAEKFGMVGSKVAYYRYNPQKLLEKGNIKMYWDEAMITDHTVHHNKPDILIIDKINKTADIIDIAVPNDENIRKSHAEKLRKYQELAIELKEVYKLKSAIVTPIIVNSNGLVPKTTIAGTKNLNLSTAIIKEAQQGVLLDTARIVRKFLNSP

SEQ ID NO: 7331 - protein, 1193 aa, Riptortus pedestris
MVRRTKKTASDESGVRAAPEGIDCQPSTSSGSASGAPMLYGSVRTPTVPTVHNSSSDFSLEEDDSPPAPVRKGRPRSTQQRMKWTKDMHIAVMRAYYLATKCDTEKTGYTRRIEQYWNELYPQITLKSQNLADQIRRILRTSKILTSFELEEIKNEVRQTIGLENETEQVVVNEPTQINDMEQEVERIRENDETNITIALDDLLMSEFVKFEGIPFHMRPSIPRIPYNKKSLSAVKTMNNVLEFRVESVDNIEQIKHWTYSAARGVACYLGIVREDTKNSQNKNQQSLGIPQWQRRLEKRIADLRKRIGILTNFLCNPDGSSTKLKGKIDEIIVLHLGLVNENDLIETLRTYLDKEKQRLAVYANRIRRYKESHMRKKQNALFSTQEKHFYRSIGTSMVKKQIDCNVNDLTNYWANIWEVPVTHRREQWIKDLTHGLKNVPEMADDSISAEEVTQALKKMHNWKCPGRDRIQNYWFKHFTCLHHMLARCYSDLLTGHVTIPEDFAEGVTYMIPKKEGHLEPKDYRPITCLNGIYKLFTSIISAKINSHLVSNGLLAPEQLGCKSGAKGCKELLVIDSFIASQVSKKQRNISIAWIDYKKAYDSVPHSWLIEVLKVYKVAPSVTNLLSRLMVTWKTSLSIGKGKTKFQSETIKIKRGIYQGDSLSPLWFCLAMNPMSQIIRDSEYGYEISIGKNETKVSHSLYMDDLKLYAKTPTQLQSMIGIIKNYSDSIGMSFGLDKCAVLHISRGQKMTTDNIIVSDETYIHELERTESYKYLGFQQHLKIAKKDVKDLLKNKFIKRLRLIFNSYLSSRYKIKAVNTWAIPSLIYSFGIIKWSDTALDELDRLIRTEMTKARMHHPISSMARLYLSRKQGGRGLLNIRNLCRSQEVNLRHYIRSNDSHVFKEIVKLDDGFTALNLKCSNNPEVKNESHFLSEWQSKELHGRYYSRLYDSEVDLAYSVAWLTSGKLFSETEGFITAIQDQVIATRSYRRHILKDSSVSDKCRLCNKAYESIQHITAGCEILAGSEYLQRHNNVAKVYHQAIAEKFGMVGSKVAYYRYNPQKLLEKDNIKMYWDEAMITDHTVHHNKPDILIIDKINKTADIIDIAVPNDENIRKSHAEKLRKYQELAIELKEVYKLKSAIVTPIIVSSNGLVPKTTIAGTKNLNLPTAIIKEAQQGVLLDTARIVRKFLNSP

SEQ ID NO: 7332 - protein, 1193 aa, Riptortus pedestris
MVRRTKKTASDESGVRAAPEGIDCQPSTSSGSASGAPMLYGSVRTPTVPTVQNSSSDFSLEEDDSPPAPVRKGRPRSTQQRIKWTKDMHIAVMRAYYLATKCDTEKTGYTRRIEQYWNELYPQITLKSQNLADQIRRILRTSKILTSFELEEIKNEVRQTIGLENETEQVVVNEPTQINDMEQEVEPIRENDEINITIALDDLLMSEFVKFEGIPFHMRPSIPRIPYNKKSLSAVKTMNNVLEFRVESVDNIEQIKHWTYSAARGVACYLGIVREDTKNSQNKSQQNLAIPQWQRRLEKRIADLRKRIGILTNFLCNPDGSSAKLKGKIDEIIVLHLGLVNENDLIETLRTYLDKEKQRLAVYANRIRRYKESHMRKKQNALFSTQEKHFYRSIGTSMVKKQIDCNVNDLTNYWANIWELPVTHRREQWIKDLTHGLKNVPEMADDSISAEEVTQALKKMHNWKCPGRDRIQNYWFKHFTCLHHMLARCYSDLLTGHVTIPEDFAEGVTYMIPKKEGHLEPKDYRPITCLNGIYKLFTSIISAKINSHLVSNGLLAPEQLGCKSGAKGCKELLVIDSFIASQVSKKQRNISIAWIDYKKAYDSVPHSWLIEVLKVYKVAPSVTNLLSRLMATWKTSLSIGKGKTKFQSETIKIKRGIYQGDSLSPLWFCLAMNPMSQIIRDSEYGYEISIGKKETKVSHSLYMDDLKLYAKTPTQLQSMIGIIKNYSDSIGMSFGLDKCAVLHISRGQKMTTDNIIVSDETYIHELERTESYKYLGFQQHLKIAKKDVKDLLKNEFIKRLRLIFNSYLSSRYKIKAVNTWAIPSLIYSFGIIKWSDTTLDELDRLIRTEMTKARMHHPISSMARLYLSRKQGGRGLLNIRNLCRSQEVNLRHYIRSNDSHVFKEIVKLDDGFTALNLKCSNNPEVKNESHFLSEWQSKELHGRYYSRLYDSEVDLAYSVAWLTSGKLFSETEGFITAIQDQVIATRSYRRHILKDSSVSDKCRLCNKAYESIQHITAGCEILAGSEYLQRHNNVAKVYHQALAEKFGMVDKKVAYYRYIPQKLLEKDNIKMYWDEAMITDHTVHHNKPDILIIDKINKTADIIDIAVPNDENIRKSHAEKLRKYQELAIELKEVYKLKSAIVTPIIVSSNGLVPKTTIAGTKNLNLPTAIIKEAQQGVLLDTARMVRKFLNSP

SEQ ID NO: 7333 - protein, 839 aa, Riptortus pedestris
MRKKQNALFSTQEKHFYRSIGTSLFKKQIDCNVNDLTSYWANIWEVPVTHRSEQWIKNLTHGLKNVPEMADSSISAEEVTQALTKMHNWKCPGRDRIQNYWFKHFKCLHHMLARCYSDLLTGHVTIPEDFAEGVTYMIPKKEGHLEPKDYRPITCLNGIYKLFTSIISAKINSHLVCNGLLAPEQLGCKRGAKGCKELLVIDSFIASQVSKKQRNISIAWIDYKEAYDSVPPSWLIEVLKVYKIAPSVTNLLSRLMATWKTSLSIRKGKTKFQSETIKIKRGIYQGDSLSPLWFCLAMSTMSKIFRDSEYGYEISIGKNETKVSHSLYMDDLKLYAKTPAQLQSMIGIIKNYSDSVGMSFGLDKCAVLHISRGQKMTTDNIIVSDEPYIHELEKTESYKYLGFQQHLKIAKKDVKDLLKHEFIKRLIFNSYLSSRYKIKAVNTWAIPPLIYSFGIIKWSGTTLDELDRLIRTEMTKARMHHPISSMVRLYLSRKQGGRGLLNIRNLCRSQEVNLRHYIRSNDSHVFKEIVKLDDGFMALNLKCRNNPEVIDESHFLSEWQNKELHGRYYSRLYDSEVDLAYSVAWLTSGKLFSETEGFITAIQDQVIATKSYRRHILKGSSVSDKCRLCNKAYESIQHIMAGCEILAGSEYLQRHNNVAKLYHQALADKFGMVDRKVAYYRYIPQKLLEKDNIKMYWDEAIITDHTVHHNKPDILIIDKINKTADIIDIAVSNDENIRKSHAEKLRKYQELAIELKEVYKLKSAAVRPIIVISNGLVPKTTIAGTKNLNLPTATKKKHSKGYFLILPESFEKFKFPIVTITNSISVGFSPDVDFTPVFH

SEQ ID NO: 7334 - protein, 1207 aa, Amphibalanus amphitrite
MKTAVIISLIVLSLSHRQRERDSHAAQRHSGMVSIIRSVTAYHYRPLTPLRKMRSSNGRLCVPVLLLLLSGDVEPNPGPESGAVKMCHCCAMKNSRKRTIQCGRCLLHWHLSCVRLTKVQAESLARWWCRDCLRSDSFPGTVPVSAQPVSTAPTNEGSKSCLASTLAALKRHNRIVPRIPKGVRIQAAEALTQLIESAVATKSEAAWFRLLQFPLVALSTPVRDRHARNDLSLNTKLKQQIARYMAETDTQMSTHLQDRSRGAPGRRQLRRQSEGEVLKKRVGAKLSDGDVKGALRLLTSSDTLALPSEENIACLKLKHPDAPADLDLPPAPDQEMELPGQVSEAEVTAAIGTFNTGSSAGLDGLRPAHLKDLISKSAGEAGVRLITALTALVNQALLGELPAFACPAFFGASLTALRKRDGGLRPIAVGSVFRRLATKVALKPLAAEFGEELRPVQLGYGTPGGCEAAVHASRRFMECMSGEEVFVKIDMKNAFNTIRRDCFLRDVRERAPGLYRLLWQAYSEPTPLFYGTFKIPSATGLQQGDPCGPAVFSLAIDTAAREVKSAFNMWYLDDGSIGGDIDTVCRDLERLIPALSARGLVVNPTKCEIILPRCCSEHQTRSIIERLHTFIPGAALVKDIEARMLGAPMMDAAAEKVMAEKKNDLERMVDRLQHIDAHSAFYLLRNCLWIPKLQYILRAAPVYRRLDLLQPLDETLRAAVCSITNVAFSQDSWTQAVLPTRYGGLGIRRTQDLALPSYVTSLHHCMQLLMSMLPGSLRARLSAEQEVTLTDWRMAAEPAEPPTGDAARSQRAWDSVLADKVRSSLLATATQVEQARLFAAGTVESGAWLHALPSASLGTLLDPPTLRVAVALRVGAEVCQPHRCRCGSLADSLGHHALTCRLSAGRHPRHTALNDVIKRALQTVGLPSLLEPTGIDRGDGKRPDGLTLFPFTEGKSLVWDATCVNTYAASHLPATAAAAGAAARDAEERKMRKYSGLADRFQIQPVAIETSGVYGPATSRFISLLGGRLVSVTGDARESSWLRQRLALAVVRGNAASVLHSPFSSGPLKQATGETHLTDPAERHQLHVDPEWATTPDNTASRSAPLSESQVGENIELCYTTTSPHQSNSHSPPPPSDDIPSISARLARYRELFSRMKQEFTEQRLENMTSRDVMADPELAYYLTRKAKDRAVDAASPEVPRRSLTPC

SEQ ID NO: 7335 - protein, 1138 aa, Amphibalanus amphitrite
MKTAVIMSLIVLSLSHRQRERDSHAAQRHSGMVSIIRSVTAYHYRPLTPLRKMRSSNGRLCVPVLLLLLSGDVEPNPGPESGAVKMCHCCAMKNSRKRTIQCGRCLLHWHLSCVRLTKVQAESLARWWCRDCLRSDSFPGTVPVSAQPVSTAPTNEGSKSCLASTLAALKRHNRIVPRIPKGVRIQAAEALTQLIESAVATKSEAAWFRLLQFPLVALSTPVRDRHARNDLSLNTKLKQQIARYMAETDTQMSTHLQDRSRGAPGRRQLRRQSEGEVLKKRVGAKLSDGDVKGALRLLTSSDTLALPSEENIACLKLKHPDAPADLDLPPAPDQEMELPGQVSEAEVTAAIGTFNTGSSAGLDGLRPAHLKYLISKSAGEAGVRLITALTALVNQALLGELPAFACPAFFGASLTALRKRDGGLRPIAVGSVFRRLATKVALKPLAAEFGEELRPVQLGYGTPGGCEAAVHASRRFMECMSGEEVFVKIDMKNAFNTIRRDCFLRDVRERAPGLYRLLWQAYSEPTPLFYGTFKIPSATGLQQGDPCGPAVFSLAIDTAAREVKSAFNMWYLDDGSIGGDIDTVCRDLERLIPTLSARGLVVNPTKCEIILPRCCSEHQTRSIIERLHTFIPGAALVKDIEARMLGAPMMDAAAEKVMAEKKNDLARMVDRLQHIDAHSAFYLLRNCLWIPKLQYILRAAPVYRRLDLLQPLDETLRAAVCSITNVAFSQDSWTQAVLPTRYGGLGIRRTQDLALPSYVTSLHHCMQLLMSMLPGSLRARLSAEQEVTLTDWRMAAEPAEPPTGDAARSQRAWDSVLADKVRSSLLATATQVEQARLFAAGTVESGAWLHALPSASLGTLLDPPTLRVAVALRVGAEVCQPHRCRCGSLADSLGHHALTCRLSAGRHPRHTALNDVIKRALQTVGLPSLLEPTGIDRGDGKRPDGLTLFPFTEGKSLVWDATCVNTYAASHLPATAAAAGAAARDAEERKMRKYSGLADRFQIQPVAIETSGVYGPATSRFISLLGGRLVSVTGDARESSWLRQRLALAVVRGNAASVLHSPFSSGPLKQATGETHLTDPAERHQLHVDPEWATTPDNTASRSAPLSESQVGENIELHMLHHHQSTPVQQSLSTTSIR

SEQ ID NO: 7336 - protein, 1155 aa, Amphibalanus amphitrite
MRSSNGRLCVPVLLLLLSGDVEPNPGPESGAVKMCHCCAMKNSRKRTIQCGRCLLHWHLSCVRLTKVQAESLARWWCRDCLRSDSFPGTVPVSAQPVSTAPTNEGSKSCLASTLAALKRHNRIVPRIPKGVRIQAAEALTQLIESAVATKSEAAWFRLLQFPLVALSTPVRDRHARNDLSLNTKLKQQIARYMAETDTQMSTHLQDRSRGAPGRRQLRRQSEGEVLKKRVGAKLSDGDVKGALRLLTSSDTLALPSEENIACLKLKHPDAPADLDLPPAPDQEMELPGQVSEAEVTAAICTFNTGSSAGLDGLRPAHLKDLISKSAGEAGVRLITALTALVNQALLGELPAFACPAFFGASLTALRKRDGGLRPIAVGSVFRRLATKVALKPLAAEFGEELRPVQLGYGTPGGCEAAVHASRRFMECMSGEEVFVKIDMKNAFNTIRRDCFLRDVRERAPGLYRLLWQAYSEPTPLFYGTFKIPSATGLQQGDPCGPAVFSLAIDTAAREVKSAFNMWYLDDGSIGGDIDTVCRDLERLIPALSARGLVVNPTKCEIILPRCCSEHQTRSIIERLHKFIPGAALVKDIEARMLGAPMMDAAAEKVMAEKKNDLERMVDRLQHIDAHSAFYLLRNCLWIPKLQYILRAAPVYRRLDLLQPLDETLRAAVCSITNVAFSQNSWTQAVLPTRYGGLGIRRTQDLALPSYVTSLHHCMQLLMSMLPGSLRARLSAEQEVTLTDWRMAAEPAEPPTGDAARSQRAWDSVLADKVRSSLLATATQVEQARLFAAGTVESGAWLHALPSASLGTLLDPPTLRVAVALRVGAEVCQPHRCRCGSLADSLGHHALTCRLSAGRHPRHTALNDVIKRALQTVGLPSLLEPTGIDRGDGKRPDGLTLFPFTEGKSLVWDATCVNTYAASHLPATAAAAGAAARDAEERKMRKYSGLADRFQIQPVAIETSGVYGPATSRFISLLGGRLVSVTGDARESSWLRQRLALAVVRGNAASVLHSPFSSGPLKQATGETHLTDPAERHQLHVDPEWATTPDNTASRSAPLSESQVGENIELCYTTTSPHQSNSHSPPPPSDDIPSISARLARYRELFSRMKQEFTEQRLENMTSRDVMADPELAYYLTRKAKDRAVDAASPEVPRRSLTPC

SEQ ID NO: 7337 - protein, 1091 aa, Bugula neritina
MMNYNRKNKANNVNGMSSQTRHVSSGSGYVEDQATYGRQPVTGTTRRRYSREDNKAVMECYFKSRPGVRGYRKRMYELWKERGGFDISEQRLADQARTIKKHKHFTEEELHEIEEGTLQELGTVDEENHEELDRDIEEGVIVHHERPDEPTIRILRVPSSEAEKVLVEKIIEERSRLTNDRPRLSALRHIERVKLLQAVRQINEVLDCVEINNITELNDTIMACAIIVTEQVCNNKERRKPNNVPAWKVRLQNKSREIRSDLSKVVECKRRPYNDPLRRRLEGKYRIKNKGYDVVIEELKQNLRAVSQKIKRYTERVEQYNQNRMFTNNEKRFYQELQGTECTSKEAPDKEESKVFWQNIWGQPTKHNTNAEWLNKVSSKLEHIEKQENLSITVADVKKMVSKMPNWKSPGPDGVQGYWIKHLTKLHMLIADHLQKCLDNGDVPEWMTSGKTALIMKDPAKGKQPGNYRPITCLPLMWKTLTGILADHLYDHLSEQNIIGEEQKGCIRKSRGAKDHLMLDKAIMCDSKKRSTNLAMCWIDYQKAYDMVPHSWILETMQLTGMAGNVIRLIRKSMKSWKTQLEYLGEKIGGIDIKRGNFPRRLFLSPLLFVTALIPLSILMREAAQGYKFRQGRKINHLLYMDDLKLYGKSKPELEALVNTARIFTRDVEMKFGLQKCATLVMKRGKKIEDTGITMPDEQVIKDLDEEPYKYLGVLETDRIKMNEMKDKIRKEYYKRIRQVLESKLNGGNTIKAINTWAVAAVRYTAGILDWTVDELKDMDRKTRKLMTINRALHPRADVDRLYVSRREGGRGMVSIEECVRIEECSMSDYIKRTCTDGDTTLNTFLKDKTALEIKNDKSVERTDGWKEKALHGQYIRKVEDMKTCSWKWLKSGWLKKETEGLLLAAQDQALPTRNYKVAIMKEQGSKKCRMCNARDETVMHILSECEKLAQGEYKKRHDHVASIIHWELCELHGFQRSKNWYDHRAESVLENDNVKILWDFNIHTDRVIEARRPDIVVVDKRNAETTIIDICSSWGLQSKRKRIREDRKISGFSTRVNTPLENINKSYPHCNWSPWSFTQNCRLDGTTWSS

SEQ ID NO: 7338 - protein, 1126 aa, Morbakka virulenta
MMNSQRQRNPNGVNGSSSQARCTWPRSDVVVNQARHDGQPVTGKTRRRYSREDNRAIMECYYGSQPSLIGYRQKMHRAWREMDQFEIDEQRMADQVRNILKRKWFTEEELDEIRESVLQKRETTDENIRENERDEDHIVETPPGNEDQNEPEGESTPIIVREPTSETEKDMIERIISERNQPASDQPRLRTLRDIERSKILSEVKQIDKVLDCVEINNITELNDTIMACAKIITQKLTKNVDQRQSKRVPRWKTRLQKKMKDIKADLSRVVESKGRDCDDSMRMRLEKKYRIKNKGYDVVIEELKQNLRAVSQKIKRYTERVEQYNQNRKFVNNQKRFYQDLQGDGNSTGGEAPDKEESRVFWQGIWSEETKHNTNAEWINRVQDELKHVERQGDLNITENDVKKMIGKVPNWKSPGPDGVQGFWIKNLTSLHKLMGTHLQKCLEDGNVPKWMTSGRTVLIMKVPAKGKQPENYRPITCLPLMWKVLTGILADKLYEHLSDQDVIGEEQKGCIRKSRGTKDHLMLDKAILRDSKKRSTNLAVCWIDYQKAYDMLPHSWILKTMEITGMAKNVIKLIGNSMRSWNTELEYLGEKIAEVDIKRGIFQGDSLSPLLFVTAIIPLSILMREATQGYKFQQGRKVNHRLYMDDLKLYGKSKSELEALVNTVRIFTSDIRMKFGLHKCATLVMRRGKKVEDEGIVMPDGQLIKDLGEESYKYLGILEADKMKMENMKEKVRKEYFRRIRKVLESKLNGGNVIKAMNTWAVAAVRYTAGILDWTVDELQGMDRKTRKLMTMNRALHPKADVDRLYVSRIEGGRGMVSIEECVRTEEYSLSDYIKRTTINDDAVLESFVKERTATEFKKEKVAERIEGWKEKPLHGQYPKKVLENETFSWNWLKAGWLKKETEGLLLAAQDQSLPTRNYKVKIMKEQGSKMCRMCGAREETVMHILGECEKLAQGQYKKRHDRVASIIHWELCELHGFQRSKNWFDHRAEPVLENDKVKILWDFNIHTDRVIEARRPDIVVVDKIKSETTIIDIAVPGDFRVKEKESEKIEKYQDLALEITRTWKTSIKVIPIVIGALGAKCRIKEWIALLGVHTKKFGLIQQTALLGSANTIRKVLSIPTWRN

SEQ ID NO: 7339 - protein, 1129 aa, Morbakka virulenta
MMNSQRQRNPNGVNGSSSQARCTSPRSDVVVNQVRHDGQPVTGKTRRRYSREDNRAIMECYYASQASLIGHRQRMHRAWREMDQFEIDEQRMADQVRNILKRKWFTEEELDEIRESVLQKRERTDENIRENERDEDHIVETPPGNEDQNEPEGEPTPKIVPTPKIVREPTSETEKDLIERVISERNQPASDQPRLRTLRHIERSKILSEVKQIDKVLDCVEINNITELNDTIMACAKIITQKLTKNVDQRQSKRVPRWKTRLQKKMKDIRADLSRVVESKGRDYDDSMRMRLEKKYRIKNKGYDVVIEELKQNLRAVSQKIKRYTERVEQYNQNRKFVNNQKRFYQDLQGDGNSTGGEAPDKEESRVFWQGIWSEETKHNTNAEWINRVQDELKHVERQGDLNITENDVKKMIGKVPNWKSPGPDGVQGFWIKNLTSLHKLMGTHLQKCLEDGNVPKWMTSGRTVLIMKVPAKGKQPENYRPITCLPLMWKVLTGILADKLYEHLSDQDVIGEEQKGCIRKSRGTKDHLMLDKAILRDSKKRSTNLAVCWIDYQKAYDMLPHSWILKTMEITGMAKNVIKLIGNSMRSWNTELEYLGEKIAEVDIKRGIFQGDSLSPLLFVTAIIPLSILMREATQGYKFQQGRKVNHRLYMDDLKLYGKSKSELEALVNTVRIFTSDIRMKFGLHKCATLVMRRGKKVEDEGIVMPDGQLIKDLGEESYKYLGILEADKMKMENMKEKVRKEYFRRIRKVLESKLNGGNVIKAMNTWAVAAVRYTAGILDWTVDELQGMDRKTRKLMTMNRALHPKADVDRLYVSRIEGGRGMVSIEECVRTEEYSLSDYIKRTTINDDAVLESFVKERTATEFKKEKVAERIEGWKEKPLHGQYPKKVLENETFSWNWLKAGWLKKETEGLLLAAQDQSLPTRNYKVKIMKEQGSKMCRMCGAREETVMHILGECEKLAQGQYKKRHDRVASIIHWELCELHGFQRSKNWFDHRAEPVLENDKVKILWDFNIHTDRVIEARRPDIVVVDKIKSETTIIDIAVPGDFRVKEKESEKIEKYQDLALEITRTWKTSTKVIPIVIGALGAKYRIKEWIALLGVDTKKFGLIQQTALLGSANTIRKVLSIPT

SEQ ID NO: 7340 - protein, 896 aa, Bugula neritina
MACAIIVTEQVCNNKERRKPNNVPAWKVRLQNKSREIRSDLSKVVECKRRPYNDPLRRRLEGKYRIKNKGYDVVIEELKQNLRAVSQKIKRYTERVEQYNQNRMFTNNEKRFYQELQGTECTSKEAPDKEESKVFWQNIWGQPTKHNTNAEWLNKVSSKLEHIEKQENLSITVADVKKMVSKMPNWKSPGPDGVQGYWIKHLTKLHMLIADHLQKCLDNGDVPEWMTSGKTALIMKDPAKGKQPGNYRPITCLPLMWKTLTGILADHLYDHLSEQNIIGEEQKGCIRKSRGAKDHLMLDKAIMCDSKKRSTNLAMCWIDYQKAYDMVPHSWILETMQLTGMAGNVIRLIRKSMKSWKTQLEYLGEKIGGIDIKRGIFQGDSLSPLLFVTALIPLSILMREAAQGYKFRQGRKINHLLYMDDLKLYGKSKPELEALVNTARIFTRDVEMKFGLQKCATLVMKRGKKIEDTGITMPDEQVIKDLDEEPYKYLGVLETDRIKMDEMKDKIRKEYYKRIRKVLESKLNGGNTIKAINTWAVAAVRYTAGILDWTVDELKDMDRKTRKLMTINRALHPRADVDRLYVSRREGGRGMVSIEECVRIEECSMSDYIKRTCTDGDTTLNTFLKDKTALEIKNDKSVERTDGWKEKALHGQYIRKVEDMKTCSWKWLKSGWLKKETEGLLLAAQDQALPTRNYKVAIMKEQGSKKCRMCNARDETVMHILSECEKLAQGEYKKRHDHVASIIHWELCELHGFQRSKNWYDHRAESVLENDNVKILWDFNIHTDRVIEARRPDIVVVDKRNAETTIIDIAVPGDYRVKEKESEKIGKYQDLALELTRLWKTSTKVIPIVIGALGASHKTVDWMALLGVAENKYQLIQQTALLGSAHILRKVLSIPA

SEQ ID NO: 7341 - protein, 1051 aa, Bugula neritina
MMNYNRKNKANDVNGMSSQTRHVSSGSGYVEDQATYGRQPVTGTTRRRYSREDNKAVMECYFKSRPGVRGYRKRMYELWKERGGFDISEQRLADQARTIKKHKHFTEEELHEIEEGTLQELGTVDEEDHEELDRDIEEGVIVHHERPDEPIIRILRVPSSEAEKVLVEKIIEERSRLSNDRPRLSALRHIERVKLLQAVRQINEVLDCVEINNITELNDTIMACAIIVTEQVCNNKERRKPNNVPAWKVRLQNKSREIRSDLSKVVECKRRPYNDPLRRRLEGKYRIKNKGYDVVIEELKQNLRAVSQKIKRYTERVEQYNQNRMFTNNEKRFYQELQGTECTSKEAPDKEESKVFWQNIWGQPTKHNTNAEWLNKVSSKLEHIEKQENLSITVADVKKMVSKMPNWKSPGPDGVQGYWIKHLTKLHMLIADHLQKCLDNGDVPEWMTSGKTALIMKDPAKGKQPGNYRPITCLPLMWKTLTGILADHLYDHLSEQNIIGEEQKGCIRKSRGAKDHLMLDKAIMCDSKKRSTNLAMCWIDYQKAYDMVPHSWILETMQLTGMAGNVIRLIRKSMKSWKTQLEYLGEKIGGIDIKRGIFQGDSLSPLLFVTALIPLSILMREAAQGYKFRQGRKINHLLYMDDLKLYGKSKPELEALVNTARIFTRDVEMKFGLQKCATLVMKRGKKIEDTGITMPDEQVIKDLDEEPYKYLGVLETDRIKMDEMKDKIRKEYYKRIRKVLESKLNGGNTIKAINTWAVAAVRYTAGILDWTVDELKDMDRKTRKLMTINRALHPRADVDRLYVSRREGGRGMVSIEECVRIEECSMSDYIKRTCTDGDTTLNTFLKDKTALEIKNDKSVERTDGWKEKALHGQYIRKVEDMKTCSWKWLKSGWLKKETEGLLLAAQDQALPTRNYKVAIMKEQGSKKCRMCNARDETVMHILSECEKLAQGEYKKRHDHVASIIHWELCELHGFQRSKNWYDHRAESVLENDNVKILWDFNIHTDRVIEARRPDIVVVDKRNAETTIIDIAVPGDYRVKEKESEKIGNIRI

SEQ ID NO: 7342 - protein, 1118 aa, Morbakka virulenta
MDKGGKTPTEKATLIFFMMNSQRQRNPNGVNGSSSQARCTSPRSDVVVNQARHDGQPVTGKTRRRYSREDNRAIMECYYASQPSLIGYRQRMHRAWREMDQFEIDEQRMADQVRNILKRKWFTEEELDEIRESVLQKREPTDENIRENERDEDHIVETPPGNEDQNEPEGEPTPKIVREPTSETEKDLIERIISERNQPASDQPRLRTLRHIERSKILSEVKQIDKVLDCVEINNITELNDTIMACAKIITQKLTKNVDQRQSKRVPRWKTRLQKKMKDIRADLSRVVESKGRDYDDSMRMRLEKKYRIKNKGYDVVIEELKQNLRAVSQKIKRYTERVEQYNQNRKFVNNQKRFYQDLQGDGNSTGGEAPDKEESRVFWQGIWSEETKHNTNAEWINRVQDELKHVERQGDLNITENDVKKMIGKVPNWKSPGPDGVQGFWIKNLTSLHKLMGTHLQKCLEDGNVPKWMTSGRTVLIMKVPAKGKQPENYRPITCLPLMWKVLTGILADKLYEHLSDQDVIGEEQKGCIRKSRGTKDHLMLDKAILRDSKKRSTNLAVCWIDYQKAYDMLPHSWILKTMEITGMAKNVIKLIRNSMRSWNTELEYLGEKIAEVDIKRGIFQGDSLSLLLFVTAIIPLSILMREATQGYKFQQGRKVNHRLYMDDLKLYGKSKSELEALVNTVRIFTSDIRMKFGLHKCATLVMRRGKKVEDEGIVMPDGQLIKDLGEESYKYLGILEADKMKMENMKEKVRKEYFRRIRKVLESKLNGGNVIKAMNTWAVAAVRYTAGILDWTVDELQGMDRKTRKLMTMNRALHPKADVDRLYVSRIEGGRGMVSIEECVRTEEYSLSDYIKRTTINDDAVLESFVKERTATEFKKEKVAERIEGWKEKPLHGQYPKKVLENETFSWNWLKAGWLKKETEGLLLAAQDQSLPTRNYKVKIMKEQGSKMCRMCGAREETVMHILGECEKLAQGQYKKRHDRVASIIHWELCELHGFQRSKNWFDHRAEPVLENDKVKILWDFNIHTDRAIEARRPDIVVVDKIKSETTIIDIAVPGDFRVKEKESEKIEKCQDLALEITRTWKTSTKVIPIVIGALGAKYRIKEWMLYLELKRRNLD

SEQ ID NO: 7343 - protein, 1117 aa, Bugula neritina
MMNYNRKNKANDVNGMSSQTRHVSSGSGYVEDQATYGRQPVTGTTRRRYSREDNKAVMECYFKSRPGVRGYRKRMYELWKERGGFDISEQRLADQARTIKKHKHFTEEELHEIEEGTLQELGTVDEEDHEELDRDIEEGVIVHHERPDEPTIRILRVPSSEAEKVLVEKIIEERSRLTNDRPRLSALRHIERVKLLQAVRQINEVLDCVEINNITELNDTIMACAIIVTEQVCNNKERRKPNNVPAWKVRLQNKSREIRSDLSKVVECKRRPYNDPLRRRLEGKYRIKNKGYDVVIEELKQNLRAVSQKIKRYTERVEQYNQNRMFTNNEKRFYQELQGTECTSKEAPDKEESKVFWQNIWGQPTKHNTNAEWLNKVSSKLEHIEKQENLSITVADVKKMVSKMPNWKSPGPDGVQGYWIKHLTKLHMLIADHLQKCLDNGDVPEWMTSGKTALIMKDPAKGKQPGNYRPITCLPLMWKTLTGILADHLYDHLSEQNIIGEEQKGCIRKSRGAKDHLMLDKAIMCDSKKRSTNLAMCWIDYQKAYDMVPHSWILETMQLTGMAGNVIRLIRKSMKSWKTQLEYLGEKIGGIDIKRGIFQGDSLSPLLFVTALIPLSILMREAAQGYKFRQGRKINHLLYMDDLKLYGKSKPELEALVNTARIFTRDVEMKFGLQKCATLVMKRGKKIEDTGITMPDEQVIKDLDEEPYKYLGVLETDRIKMDEMKDKIRKEYYKRIRKVLESKLNGGNTIKAINTWAVAAVRYTAGILDWTVDELKDMDRKTRKLMTINRALHPRADVDRLYVSRREGGRGMVSIEECVRIEECSMSDYIKRTCTDGDTTLNTFLKDKTALEIKNDKSVERTDGWKEKALHGQYIRKVEDMKTCSWKWLKSGWLKKETEGLLLAAQDQALPTRNYKVAIMKEQGSKKCRMCNARDETVMHILSECEKLAQGEYKKRHDHVASIIHWELCELHGFQRSKNWYDHRAESVLENDNVKILWDFNIHTDRVIEARRPDIVVVDKRNAETTIIDIAVPGDYRVKEKESEKIGKYQDLALELTRLWKTSTKVIPIVIGALGASHKTVDWMALLGVAENKYQLIQQTALLGSAHILRKVLSIPA

SEQ ID NO: 7344 - protein, 1060 aa, Bugula neritina
MECYFKSRPGVRGYRKRMYELWKERGGFDISEQRLADQARTIKKHKHFTEEELHEIEEGTLQELGTVDEEDHEELDRDIEEGVIVHHERPDEPTIRILRVPSSEAEKVLVEKIIEERSRLTNDRPRLSALRHIERVKLLQAVRQINEVLDCVEINNITELNDTIMACAIIVTEQVCNNKERRKPNNVPAWKVRLQNKSREIRSDLSKVVECKRRPYNDPLRRRLEGKYRIKNKGYDVVIEELKQNLRAVSQKIKRYTERVEQYNQNRMFTNNEKRFYQELQGTECTSKEAPDKEESKVFWQNIWGQPTKHNTNAEWLNKVSSKLEHIEKQENLSITVADVKKMVSKMPNWKSPGPDGVQGYWIKHLTKLHMLIADHLQKCLDNGDVPEWMTSGKTALIMKDPAKGKQPGNYRPITCLPLMWKTLTGILADHLYDHLSEQNIIGEEQKGCIRKSRGAKDHLMLDKAIMCDSKKRSTNLAMCWIDYQKAYDMVPHSWILETMQLTGMAGNVIRLIRKSMKSWKTQLEYLGEKIGGIDIKRGIFQGDSLSPLLFVTALIPLSILMREAAQGYKFRQGRKINHLLYMDDLKLYGKSKPELEALVNTARIFTRDVEMKFGLQKCATLVMKRGKKIEDTGITMPDEQVIKDLDEEPYKYLGVLETDRIKMDEMKDKIRKEYYKRIRKVLESKLNGGNTIKAINTWAVAAVRYTAGILDWTVDELKDMDRKTRKLMTINRALHPRADVDRLYVSRREGGRGMVSIEECVRIEECSMSDYIKRTCTDGDTTLNTFLKDKTALEIKNDKSVERTDGWKEKALHGQYIRKVEDMKTCSWKWLKSGWLKKETEGLLLAAQDQALPTRNYKVAIMKEQGSKKCRMCNARDETVMHILSECEKLAQGEYKKRHDHVASIIHWELCELHGFQRSKNWYDHRAESVLENDNVKILWDFNIHTDRVIEARRPDIVVVDKRNAETTIIDIAVPGDYRVKEKESEKIGKYQDLALELTRLWKTSTKVIPIVIGALGASHKTVDWMALLGVAENKYQLIQQTALLGSAHILRKVLSIPA

SEQ ID NO: 7345 - protein, 1117 aa, Bugula neritina
MMNYNRKNKANDVNGMSSQTRHISSGSGYVEDQATYGRQPVTGTTRRRYSREDNKAVMECYFKSRPGVRGYRKRMYELWKERGGFDISEQRLADQARTIKKHKHFTEEELHEIEEGTLQELGTVDEEDHEELDRDIEEGVIVHHERPDEPIIRILRVPSSEAEKVLVEKIIEERSRLTNDRPRLSALRHIERVKLLQAVRQINEVLDCVEINNITELNDTIMACAIIVTEQVCNNKERKKPNNVPAWKVRLQNKSREIRSDLSKVVECKRRPYNDPLRRRLEGKYRIKNKGYDVVIEELKQNLRAVSQKIKRYTERVEQYNQNRMFTNNEKRFYQELQGTECTSKEAPDKEESKVFWQNIWGQPTKHNTNAEWLNKVSSKLEHIEKQENLSITVADVKKMVSKMPNWKSPGPDGVQGYWIKHLTKLHMLIADHLQKCLDNGDVPEWMTSGKTALIMKDPAKGKQPGNYRPITCLPLMWKTLTGILADHLYDHLSEQNIIGEEQKGCIRKSRGAKDHLMLDKAIMCDSKKRSTNLAMCWIDYQKAYDMVPHSWILETMQLTGMAGNVIRLIRKSMKSWKTQLEYLGEKIGGIDIKRGIFQGDSLSPLLFVTALIPLSILMREAAQGYKFRQGRKINHLLYMDDLKLYGKSKPELEALVNTARIFTRDVEMKFGLQKCATLVMKRGKKIEDTGITMPDEQVIKDLDEEPYKYLGVLETDRIKMDEMKDKIRKEYYKRIRKVLESKLNGGNTIKAINTWAVAAVRYTAGILDWTVDELKDMDRKTRKLMTINRALHPRADVDRLYVSRREGGRGMVSIEECVRIEECSMSDYIKRTCTDGDTTLNTFLKDKTALEIKNDKSVERTDGWKEKALHGQYIRKVEDMKTCSWKWLKSGWLKKETEGLLLAAQDQALPTRNYKVAIMKEQGSKKCRMCNARDETVMHILSECEKLAQGEYKKRHDHVASIIHWELCELHGFQRSKNWYDHRAESVLENDNVKILWDFNIHTDRVIEARRPDIVVVDKRNAETTIIDIAVPGDYRVKEKESEKIGKYQDLALELTRLWKTSTKVIPIVIGALGASHKTVDWMALLGVAENKYQLIQQTALLGSAHILRKVLSIPA

SEQ ID NO: 7346 - protein, 1070 aa, Morbakka virulenta
MMNTNGVNGSPSQARCTSPRSDVVVNQARHDGQPVTGKTWRYSREDNRAIMECYYASQPSLIGYRQRMHRAWREMDQFEIDEQRMADQVRNILKRKWFTEEELDEIRESVLQKREPTDENIRENERDEDHIVETPPGNEDQNEPEGEPTPKIVREPTSETEKDLIERIISERNQPASDQPRLRTLRHIERSKILSEVKQIDKVLDCVEINNITELNDTIMACAKIITQKLTKNVDQRQSKRVPRWKTRLQKKMKDIRADLSRVVESKGRDYDDSMRMRLEKKYRIKNKGYDVVIEELKQNLRAVSQKIKRYTERVEQYNQNRKFVNNQKRFYQDLQGDGNSTGGEAPDKEESRVFWQGIWSEETKHNTNAEWINRVQDELKHVERQGDLNITENDVKKMIGKVPNWKSPGPDGVQGFWIKNLTSLHKLMGTHLQKCLEDGNVPKWMTSGRTVLIMKVPAKGKQPENYRPITCLPLMWKVLTGILADKLYEHLSDQDVIGEEQKGCIRKSRGTKDHLMLDKAILRDSKKRSTNLAVCWIDYQKAYDMLPHSWILKTMEITGMAKNVIKLIGNSMRSWNTELEYLGEKIAEVDIKRGIFQGDSLSPLLFVTAIIPLSILMREATQGYKFQQGRKVNHRLYMDDLKLYGKSKSELEALVNTVRIFTSDIRMKFGLHKCATLVMRRGKKVEDEGIVMPDGQLIKDLGEESYKYLGILEADKMKMENMKEKVRKEYFRRIRKVLESKLNGGNVIKAMNTWAVAAVRYTAGILDWTVDELQGMDRKTRKLMTMNRALHPKADVDRLYVSRIEGGRGMVSIEECVRTEEYSLSDYIKRTTINDDAVLESFVKERTATEFKKEKVAERIEGWKEKPLHGQYPKKVLENETFSWNWLKAGWLKKETEGLLLAAQDQSLPTRNYKVKIMKEQGSKMCRMCGAREETVMHILGECEKLAQGQYKKRHDRVASIIHWELCELHGFQRSKNWFDHRAEPVLENDKVKILWDFNIHTDRVIEARRPDIVVVDKIKSETTIIDIAVPGDFRVKEKESEKIEKYQDLALEITRTWKTSTKVIPTVI

SEQ ID NO: 7347 - protein, 1015 aa, Myotis brandtii
MRRTNDISKRIRIKKRPMIELDKINKAVKYLLHTEKYDDLWSINCLIYAAAKVATKTNYSKELVELSLARIEEQFSEAEKERSQARRLVSYAYAAYKNDSIKTKRQERNERIVIHCLGVPFYPTGKAHWGEILSLAKHNLAAKSAHARYIKNLRDTKRDDNMMKTNLGLLIQNYTSTKTGKIPLDIKKAEKFWGDIWGKSENHNETEKLRLILDDMYMKNRQNEANQFESLQWEEFIRIIKSKPNWKSPGPDRIPNFWIKKLTAVWPKLKLGIEKWINGEIALPSWLCHARTVLVPKTEPPSTNPGEYRPITCLNALYKIYTSCLLSLLQRSERVLQRIPPMQRGAKQGSSGVIENNIINRWVIEDAKCKKRNLSMAWIDFKKAFDTVKHSWVERVLQVSGYPTHIIEAITNMMHQWSTQIEFAGQNDRAKSNKIVFRRGIIQGDSLSPFIFCLCTSPLSNLIERFSSGYTPGDRRTNSIPVTHCYYMDDLKVYAKSPGELQSTITTISESFQAIGFEVNVSKSGYLHLKNGRESNSPVCKIDQTNLPCCNASQGGYKYLGIIESEGVDKIENISRLIVKVRKSTKMLAKAHVNANNLSKLINICIVPKIEYISHVVDFNDTQIKHVTKAMVDGLTESGFHRSFANKSRLFIPRRFGGRGIICPRLAIARGCIRRLIIMLCSDDAHIRAIRTSKSVTWNSTVSKFCTTLKRANLTAEVGEVHLKINEREIALDSYKSANQQVVMQYTNASIDKKVQKLASLALHGSYMRSLRDQNICLTSASEFLLKGNLDRQTESIIAAAMDTAVPFRWYVQKIMKQPTPISCRMCGNTNETIEHILSGCPVISFTQYLERHNKMLAHVYYHLRDQITDTCDTGNPNIIRTIRTATVDLCWDSIIETVPIVSACKPDILWKDRNNILIIEGAITTNSKIKDKYNEKLSKYQPLATALKHMYPNHQISVLPLVMGTLGAYEDQLINNVKRLPGCMMSKAKQMARRMQISVVRTSAMILKKTMNIK

SEQ ID NO: 7348 - protein, 1072 aa, Vollenhovia emeryi
MSTGCACSGIFRGCHQVESPPPPQRGTRPPPSLTERERWGRGRLRRHQALGLPAPPLVHVGPATRRNQASDERGGPTGLPTPALPQPVEPAAFLCDFPGCNRNFQSARGRGVHQQRTHKEWYDARQEAPGDKTRWTQEEVALLARKEVELTENGNPPRFMNQELHRFFLTRSLEGIKGRRKREDYKTMVAELRRQAAANYEDNNQPEDNANEPIEEAFLGFLESMPPPRSTDFQAEKIHLIARNARRSGKKETLHKLALYLREILPVTTKKNNAGRRRTDTLEPTGRREARRQAYATTQRLWKKDRRRCITSILDGLNDTKQPPAEIMKPYWSQIMNTTSNNTPARRRTPMIEGIWAPIEARDMKLGRPEISSAAGPDGLSPRLLRSIPTEVLIRIYNLLMWCGRLPEYLLRSRTVFIPKTKDAKEPGDYRPITIPSVLVRGLHKILAKRMEALLDIDHRQRAFRSTDGCADNIFLLDTILRFHRKNIKPVYIASLDVSKAFDSVSHAAITTTLENMGLPPPMVEYLKNVYEGSTTRLEGSTWTSSYRHPKRGVRQGDPLSPVVFNALTHGLLGLLPGDVGVRLGDTTINAAAFADDLLLFASTPTGLQQLINTTVDYLADCGMSVNTTKSMTISVVANAHTKKTMVDTTAAFRASGDLLPAVGRETRWRYLGVFFTLEGRARGRPGEILRPMLNNLSKAPLKPQQRLFALRTVVLPRLYYQLALGAITIGTLNKIDALVRSATRKWIALPHDTPVAYFHATVKDGGLGIPSVRWYAPLHRRGRIIAARRTHSQQGFNEYANQEITQCNRRLTDHGTLHNTIEMVNERWKARLLNSVDGCGLRNSEKTPHQHQWVADGNMLLSGKDYLNCVKLRIGAMPTKSRSTRGRTGDRRCRGGCAAQETLNHVLQQCHRTHAQRIKRHDAIPTYMTRRLGRGGYKVLLEPHYRTAEGLRKPDIVATLGETAIVVDAQVVSEQTDLNNAHKKKVEYYSHPSVIEAIKQKHGVRNVVVGSATLSWRGVWSSESAKHLRSLGLITTGDLKILATRVLIGGIAEYRAFNASTMLLGGRVGIG

SEQ ID NO: 7349 - protein, 930 aa, Vollenhovia emeryi
MARKEAELALREEPPRFMNQELLGLFPLRTLEAIKGRRRREDYKSLVADFREQITTNNLDDSQPEDEEAEETTDEAFLELLESLPQPRTTNFGANQIHQIAQNARRSGKEESLRKLTLYLREVFPISTPGRKPKNRQGVPVGQVKKREARRQAYAITQKLWSKDRKRCITSILDNLGNVEQPPSDIMKPYWNQIMNTHSDSTPASKRAPTVDGIWAPIRMEEIKLGRPAASTAAGPDGLSARILRSVPAGVLTRIYNLLMWCGRLPEHLLQSRTIFLPKTKDAREPGEFRPITIPSVMLRGLHKILAKRMEVQLDIDHRQRAFRETDGCTDNVFLLDTILRFHRKQIEPVYLASLDVSKAFDSVSHPAIITALRNMGLPIPMTEYLKDVYERSCTRLEGQGWTSRFRRPKRGVRQGDPLSPVIFNVLTHGLLKQLPDDIGVRMGDTAINAAAFADDMLLFASIPAGLQRLIDVTTSYLADCGMSINTGKSMTVSIIANKHTKKTMVDTSTIFQVLGEHLPAIGREARWKYLGVYFTPEGRTKCRPTEVLTPLLENLGKAPLKPQQRLYALRTVALPRLYYQLALGAVTVGTLNKVDKLVRSAMRKWLALPHDVPTSYFHASIKDGGLGIPAMRWCAPLQRRGRIIAAKRTHHQQGFSEYASNEIAQCNRRLTDHGTTHTTQQMVNDRWKRKLYDSVDGSGLKDSSKTPHQHQWVADGTRFLSGKDYINCVKMRISAMPTKSRTTRGRTGDRRCRAGCLAQETLNHVLQQCHRTHAQRIRRHDAVPAYITRRISSGGYAVHKEPHLQTTEGLRKPDLVAVLGETAVVIDAQIVSEQTDLDRAHKKKVEYYSHPATTNAIKREYGVRTIIVGSATLSWKGIWSAKSAEQLRMLGFITTGDLKILTSRTLIGGIAEYRTFNASTLVGRRIGIG

SEQ ID NO: 7350 - protein, 1548 aa, Centruroides sculpturatus
MDSIVSSPSSNSNIHGLVHPTVDENTQPTNVTNGVRHVDPYEAGTGYASSASILTSAPTRRSSRRKNCPPSNPIKDIGNKSTAENSLSTKPTVNIRRQRGRPRKSARPCTEINDSTTPVVPNLPDTTISDPDQSPVVPIRNPSIQVSSNTVYNHTVGCTFDRNSAVFPCLAADCKKVFFSLHSLMSHSGMVHNSHLNPLWSCNSCQLSFKTRLKLLEHEFSAHQIDFPYKANPITPEGLPTGSRAIDYIVRKGVNKFPCLFGCEIVTDRKDSLIGHTLTAHDTLLRIIIKCDACCFTTIDSNEFSSHKAKRCPVSLPGPPNSTLTLDRIKDHLRDAVGLVGWNPVNVRHFLELRDIHLDPEAISKGLESLREAPNAIIPIKKSNMARCQKSIQAVNNHPVGSQTLISNATNGVQGGTVPSLPGTPPLPAPPVQVAGPRQVCTVHIETTAPQPPPSEAYPPILPPPTQDIDASSCSALAATIPPTVRSSPPSLAEAVSPSSRSIHLNSSPSSNARNASVTTSPHNITQTPAPGITLQSPIHPQYSSLTVAPHSRWQLRNPIIKSAEEWDKACSTIAELTRAYVIFDEDPWEEVERKDRDLREALYSCIWSLTHPSTQTDGTVSHHDVSHSGHIPQDNSSTDREVNSVQQEILDINARLNQRNLTFRQRGELLRRRRKLLSDRSASFWRRKFNFRPKQVFEELIAGSSSPRCLLTLSTIEEAFRARYSQEIDGNTPPAESFGECRFQLRPPSLDDIDHVLKKTHGSSSAGYDGIPYAIWKRFPALKPWLLVLFARCWKEKRIPEAWKISKTILLYKKGDLNSINNWRPITIQLTIAKLYSSCIARSIRECCIQNDIISSNQKGFMPTPGCIQHDYLIHSAIRKAKRCKSSVFICSYDFQDAFGSIDHSLIRKSLNNLGFGRDSTDIVMSLYSNINFWVETPSGKTQLIPQKRGVKQGDPSSPLVFNLVLENLSRALNKLPKTSQGFNHLLYADDLTIISETPQHLIQLHESVINFNTNSGLSLNINKCKLLACKGTKNSIKGTLSSRDLDISLKVGNHTIKPIPSKDSFRYLGNKLGKLRNGIWSSFWELLNDTKALLDKTASSPLLIHQKHHLLRTFICPRWEYYIRLNGLGTSYAKKLGEALRDAVRKYVGLPKQTARATFHSLPEDGGLNIPDPWTWCCATQISHIIDLLNCDDALVRSAIRDEIILLIKTRYRPSPDAYTDNDGLMLDYLNSHLEHRKRAKFIDCSDPTAMIPNYIRDANVRISLQEGQFRITQPDGTEFRNRYRNNITKQLKTLLKSRMADDWCSREGGQGKAMATCRNTVSNSWINSPCLSKGTYAFALKARLDLLPTKANLFRWKKSPTSLCSHCGERETMHHILSKCHQYMPLRRELHNKILTRISKTIHYNNKGPDVTVAIDKSIDELGDDNLRPDIVIRNEKEKKIIIIDLAITSQYGKDCINASRQNKIEKYRHIGDHFAARGYNVVNDAIVFGSMRGTDSRNTKLFKTCGSPVKFSAKMHKFIISDILKFAHKIWGQRCGPRITPAIR

SEQ ID NO: 7351 - protein, 985 aa, Panagrolaimus sp.
MAMESLKITDHTQFNRLVYCVGTVLSERFKRKEDEGQKEWERNHKEAKHILSKYLRWAQALKDIPEEQLYMHTMSVRQWNAWRTIRDKYQAQHPKECIEIIKMDLFAVKKMGAIRKRKEKLKKTHALTGKRVCAQKTMPMGMEAGRLRNFWEPIVGIGKPFLSSSEYEEWFEECTRKTWKQEMGNVPNEFLAALKKISPWKAPGPDGIQAFWYKKFKALYEKLQELVERTLNSELEMPKWLCGGRVVSIPKGGNVDDCNNYRPISCLNTAYKLLTGTINGMVRRYCECNEVLPLEQRACRKGEWATTRGLVQDAAFRANVRHNAMQATMAWVDYSKAYDSVSHEYMFRVLKAINLPEQLISVIGKIMKKWHVRYIGANNEKSGELKIRRGVLQGDTLSPQLFCICLAPISYIINHHVSKVNIRGVQFNHQYYMDDLILYCKLYEIMDAVKLVKEVSAKVGLEMNLRKCAVNLEKNVNTLEGIPSLSEIGVYKYLGMHCNEVTQQQVTYEAAMKSLTEKRDRILSSDASYKQKRILYNSQIITKLSYINTHVITGNSTFRGDLAQMETFDGLLPAWLRSTDRRLMQFNANSKRLFLPREMGGLGFNSARDDLCKQTIRCYIYIKFHKDLQGIDELLTALAKRGKRNVMSDFEQIGTIWPELKLNIECLRGQTIVVNGKTYTTLKTACQATAKILEQYFAEERQEEWKSKGASGELLRHSNINIAQSFRYLDLHFSMGAVLNAMAIQEKAIICRGHPAKRAEPVRKCRKCIKMKMLKPMFETIQHIMTGCPVGRVTTMVTRHDEVVNHLARELRKHYNFKKLHYTEPIPKSDKSEDGKNVMFVDCPQPVTKEIISRKPDIVLVTEKMVYIIEIGIAWFSILDKQSAWKYCKYAQNSKLTYLEYAQNEGGEDFCSKDTLLNRLRELYSKDAKVIPLVIGACGEITDKTLGHFKELPLPANRIDRVQLLMQRAAMLGSHYVLKSHMASK

SEQ ID NO: 7352 - protein, 992 aa, Macrocentrus cingulum
MNAPNLEAPDGRVPCRKPGCGLSFSTTRGRGVHENRMHKAWRDARIVDEDRTYKPHWSAEELSILARQEAMLTRDRVRFLNQALLPLFPNRSLEGIKGVRKTQKHRDLVLQYLRELEEGDGAPNGVAQVDPEVEPPDDEDHQLHDQLKEFIFTLPPLDVDGYDVLELNTMCRCISRWSSERMVAEIGRYLKRTFPLTPSGPKRNVQLEPPASKRKARRAEYAITQRAWKRNPCKCLNIILKGKTAAVTPPEEVMLPFWRAVMTGVENVSPGVGLKRPLVGGLWEPISGEEIEKAYPELTTSPGPDGVTARQLKAMPVGVLVRLFNLLMWCERLPEHLLESKTTLIPKKDGAIEPGDFRPITVSSVISRAFHKVLANRLLKNIALDQRQKAFLPVDGCAANTFDLDMLLRYHRQNFLPLFMASVDVAKAFDSVTHETIKDTLTNMGVPSPMVRYIVGVYQVSCTKLVCGNWASDVKIKPTCGVKQGDPLSPMLFNMVIDRLLQQLPPDVGVKVEGRTFNAFAFADDLILVASTPIGLQMVIDQTAEFLASCGLMINAGKSFTVAIRSFPHIKKTVVDKRTTFTCRGRRMPALTREDEWKYLGIPFSPEGRLIGNPALQLGEALEMLKKAPLKPQQRLFALRVVLLPSLYHRLVLGGTTLSMLKKLDCAIRKSVRLWLGLPHSLVNAYFHSSVRDGGLGVPSLRWLMPLKRLQRLQRIAGPNPGQYFEGEIQKARRRLVDEHGNVDNNRALFKRWAELLHASVDGIALKDSARVPQQHQWVAGGTGFLTGRDFVNSVKLRVNALPTKSRTSRGRHCDRLCRAGCNNIETLNHVLQQCHRTHGARIKRHNALVSYVQRNLESTHQRVDVEPHFQTDEGLRKPDLVAKRDRLAIVIDAQVVSEQTDLARAHRKKVDYYAGLEQRIKERYGVEEVRFSSITLSCRGIWSSSSADDLLSLGAVKKKDLKVLSSRVLIGGLAAFWIFSKSTAVARRRGR

SEQ ID NO: 7353 - protein, 1675 aa, Trypanosoma theileri
MAQDLRGRGLTQRTHNRGSPRPHFLGGSDRQNEMKTGPYQSATRYSETANITRIVQTVLAALQKETKNQYQAPRRPPRERRDLPKNDKTTRWSPTEWPRGTANVTTKTLQQQLQSTQSTPPPVTKTTWAQVARQPKEPMKRKVNPGPRPPHPFPPRPSANEIRPQYPHKPQWAPPHAEPATRKLAHKQAAPVKRRVTWRTPMDDSFAREAMELKVIQDKFQMFATECRKRATWWTTMRHGENNYHCRVCAFSSPRMGAVADHFKAAHAALRWSTPYQLRPHGPKIWPADHACSVTSTLAALSLYPEEGRFAPELRRPYVDPSADSTAEFVTALNVLTPMAPVTALEAMMANDPAVAALFASKIVVASCCKRCGAATQDTPDLGMIERGIISISPEKDAPITITSASLRQYYYNEELDSTRSCDGSAKSKIHPPSSINVITTKLFGDAVAIYVNSWGSHVVGAEQVPTSIDLPHGNGSAEYVLMGVVATTSDKHVATFLPINPGSNIWDVVDGMSHTRAPKGLDPTKAVLLFYRRVETAEELAEDDDEESEEAEIDAANEEEEHATAPKEHLTPPATPRDQFGRHAFGHFDDPTANEEATSHKRPRENDDAAEEDEEHPTATQGEAHQATPRRETQTPYDPFLATQDDDSDEEDTESTTSQHLEDSLVETQEGAPHTDQTGTRTSQGQRPSGGPVVFSHAVKTPLARPLRCLAGCCHKVFKHKRRGELLRSHIHTKHTKQERREIPSDDLQAEGLVRCETCCEIFSASEQARTAHLTRCGQFSTRTDRSREARDHFRASTGGKYAQQAVVRETPASTDWPAERHTDPLTDPWLHQRIPTRRWLHKREWPNWLDVCRTVFLGYTASENQERWRKQVQIFDLVRQHLRIQKEPRDTRTTLPEDNAGAPRDAVTVGEKIERPISDNAEGDPDGLPAHVRAKVRRIETMCMLQATGRAASLLTAEDAPPVEYSKEMVQSLDALYPQEDPSTYPTPPVTGPLVTLDAKDVSRLINHTLARAVSPGLDGWTRELLCPLTRDKQLLVELTTLLTDMANGQVPPEVAHRLRATSLTVLRKKNKKFRPIGAECVWAKAISLLAVGTVMPALQTRFKDLQFGVGNNIELAIEKIRKDFRVRGSVAMLDGRNAYNAISRSAILKATYGDEVWQPLWSVSRLLLGAPGVVGFYDKGQMVHSWKSTRGVRQGMVLGPVLFSIGTLAALKRLQAKFPTAAFTAYLDDVTIAAPPDKMREVVEATTKEMESLGIEINSEKTEVLDPRGLTGLPVEPLDFARVLGAGVAVNQDSTLITDFVRQKAEETDRLFKAIVEYPFPKCTQWRLLSVSALPRLTFLLRTHKPIHTRAAATWFDDRVTEVLGALLDLPVTKRARDIAALPIRMGGCGLRRQVDVAELAHECLGKKGLQRTKTAELEIERQCDLYESLQGPDRRVFIANRATGAGRPLTDPQVRTDDRSFVVYLRERLLLRVLPEGQNCVCGADATNFHVHTCERLHQQPRTIRHDMINMAFANGLRLCGFQCGLEPRLTEVSRRRPDILVVGLDTYAITDVTVTYPGRAYTTADPENLEDTDPFRAARTRFTEKRQKYRHWAIGNHLDFDPFVIQTNGSILPASRQWLQRVLGNQDHRLTVTNAYDFIIADTLSAVLRGNTHIYNAACGREGSARRALG

SEQ ID NO: 7354 - protein, 1618 aa, Trypanosoma cruzi
MGRGPWSPPAGARGRLHRIHNPYNMVMELHELEQQATQDKYQFYGEAINAIQKWWIALYQSGAQNFHCPLCSFNRPGEQAVFQHCRQAHPTHDKCYPYRLYINGHVTDVAEKSCSLNAVLAILSYYEEESHFTQEVRNTYTAPCRENTERIIRAMGVNLPLAPVSALEQLIKNDPMLRRMFSTTLVAGVHCEACGWALPMEEAYPSYSETLQKEPAIITLQPGKRAPIQLTQKLLMQQYRSTWVTEEHVCTGEKRERLHAPWHMTATKSHKYDDAVALEFGHWDKQVMGVEEVPFVILLPHHNGTAEYGLVGLVATNAPNHVVAYIPSTLQKDTTWVMIDGMVQKVQRKPINTHKVILCLYRRLMPEMVPEEDEVENEQGMHGRKGEWEGRKQRSPYEDSSHHHTLHTQEEEPADSSLTDEWGRCGYGQPPGSVPHSSQSLASVSSSQTVTQDPFLTPLGPRKRSRRKEGPSTKEKEEGRRDEVIICEEDEEAQGTPAVPPLPPPLSAHNLQDSQGHFLDEEEEEITLRRTQPQETPHTNKDETPPHQQSSLPQEAVEMEEEGVGGEEGDSETPRDTTGQEDGGHPFSHDKTPALLDPVWCLAGGCHHKFSGPRRGEHLRSHIHAVHRKQERMDITNEALISQGLVRCDACGEVCSASLRARAAHRPRCGQYTCRKENMATQREEYRASVTGSHYTKTAAFLERTPAVEWPTTPATDPRQDPWLQERVPTRRYLHKREWPNWLDVCRTVMLGYNASAPEERSRKQVAIMDLVRQHLRLPENPRSRRHAARTNHDKQHTTDPPPDHGNTTTVVRGAMATTKDGEESVSDETEQQDTTTHQPERILTASDIYKTRRVETLCTLQATGRAAALLTAAEAEPVVFSPELVQSLDDLYPQEDTSLYPEPAVSAPLVTFDSKDVAKIIGSRLTRGAAPGLDGWTRELLYPLTKDKALLMEITAILTDMANGNVAPEVAHRLRATNLTVLRKPNKKFRPIGAECVWAKAISLMAVDAVMPALKTCFKNLQYGVGNNIELAIQKIRRDFHLKGSVAMLDGRNAYNAISRTAILSAVYGNTAWSPLWRVTRLLLGTEGLVGFYEKGQLVHSWKSTRGVRQGMVLGPVLFSIGTIATLRQLESSFSNASFTAYLDDVTVAAPPGMLGKVCEATSRAMRALGIETNEDKTEVLNKGGPVEMPAEYIRPFARVLGAGVANDPESELITQFVQRKAEETDRLFRAIVELPFAKHTQWRLLSVSALPRVTFLLRTHAPAHTRAAAEWFDDRVTGVLGVIMDGPVTKRARDIAALPVRRGGCGLRRQREIAEFAYACLGEKGKQRAMTDELDAKHQSDLYETLQGPDRKVFVSNTAAGAGRPLTDPQVHADDRGFSTYLRERLLVRVLPEGQKCVCGADASNEHVHTCTRLQQNPRTTRHDMINMTFANGLRLCGFQCGMEPRLTEASRRRPDILIVGLDTYAITDVTVTYAGRVTAYVSEESMEEADPLRAARDRLTQKRQKYRHWALANGLDFEPFVMLTNGAIHPASRRWLRRILGNQDHRLTITNAYDMIVADTLAAMLRGNVHVFNAACGRAGRVIPPRVGECPGDPSGSREAMNTEVKETTETETHK

SEQ ID NO: 7355 - protein, 1773 aa, Trypanosoma cruzi
MAYSKRGVPMPFDFRNGKRDTGGEKGWQRQQPQRQSTTFASPRGPMVHRGNLDPTSFKNIIAEATKEVVDQVTRSLILPKSGRMGYYPRQSRGLLPNARHMELPQRMPQQTQGGPQGAQSWDRPRKYNETQPRHYIPRSNSVGTHTQAQTPPRPQQEARWGNKVARRGTSQGKREPHLPTATPASPEKWEGGPWSPPAGARGRLHRIHNPYNMVMELHELEQQATQDKYQFYGEAINAIQKWWIALYQSGAQNFHCPLCSFNRPGEQAVFQHCRQAHPTHDKCYPYRLYINGHVTDVAEKSCSLNAVLAILSYYEEESHFTQEVRNTYTAPCRENTERIIRAMGVNLPLAPVSALEQLIKNDPMLRRMFSTTLVAGVHCEACGWALPMEEAYPSYSETLQKEPAIITLQPGKRAPIQLTQKLLMQQYRSTWVTEEHVCTGEKRERLHAPWHMTATKSHKYDDAVALEFGHWDKQVMGVEEVPFVILLPHHNGTAEYGLVGLVATNAPNHVVAYIPSTLQKDTTWVMIDGMVQKVQRKPINTHKVILCLYRRLMPEMVPEEDEVENEQGMHGRKGEWEGRKQRSPYEDSSHHHTLHTQEEEPADSSLTDEWGRCGYGQPPGSVPHSSQSLASVSSSQTVTQDPFLTPLGPRKRSRRKEGPSTKEKEEGRRDEVIICEEDEEAQGTPAVPPLPPPLSAHNLQDSQGHFLDEEEEEITLRRTQPQETPHTNKDETPPHQQSSLPQEAVEMEEEGVGGEEGDSETPRDTTGQEDGGHPFSHDKTPALLDPVWCLAGGCHHKFSGPRRGEHLRSHIHAVHRKQERMDITNEALISQGLVRCDACGEVCSASLRARAAHRPRCGQYTCRKENMATQREEYRASVTGSHYTKTAAFLERTPAVEWPTTPATDPRQDPWLQERVPTRRYLHKREWPNWLDVCRTVMLGYNASAPEERSRKQVAIMDLVRQHLRLPENPRSRRHATRTNHDKQHTTDPPPDHGNTTTVVRGAMATTKDGEESVSDETEQQDTTTHQPERILTASDIYKTRRVETLCTLQATGRAAALLTAAEAEPVVFSPELVQSLDDLYPQEDTSLYPEPAVSAPLVTFDSKDVAKIIGSRLTRGAAPGLDGWTRELLYPLTKDKALLMEITAILTDMANGNVAPEVAHRLRATNLTVLRKPNKKFRPIGAECVWAKAISLMAVDAVMPALKTCFKNLQYGVGNNIELAIQKIRRDFHLKGSVAMLDGRNAYNAISRTAILSAVYGNTAWSPLWRVTRLLLGTEGLVGFYEKGQLVHSWKSTRGVRQGMVLGPVLFSIGTIATLRQLESSFSNASFTAYLDDVTVAAPPGMLGKVCEATSRAMRALGIETNEDKTEVLNKGGPVEMPAEYIRPFARVLGAGVANDPESELITQFVQRKAEETDRLFRAIVELPFAKHTQWRLLSVSALPRVTFLLRTHAPAHTRAAAEWFDDRVTGVLGVIMDGPVTKRARDIAALPVRRGGCGLRRQREIAEFAYACLGEKGKQRAMTDELDAKHQSDLYETLQGPDRKVFVSNTAAGAGRPLTDPQVHADDRGFSTYLRERLLVRVLPEGQKCVCGADASNEHVHTCTRLQQNPRTTRHDMINMTFANGLRLCGFQCGMEPRLTEASRRRPDILIVGLDTYAITDVTVTYAGRVTAYVSEESMEEADPLRAARDRLTQKRQKYRHWALANGLDFEPFVMLTNGAIHPASRRWLRRILGNQDHRLTITNAYDMIVADTLAAMLRGNVHVFNAACGRAGTG

SEQ ID NO: 7356 - protein, 962 aa, Trypanosoma cruzi
MQSTISRNGWTSPMKRSSHRDWFGATHAGKCCSASLRARAAHRPRCGQYTCRKENMATQREEYRASVTGSHYTKTAAFLERTPAVEWPTTPATDPRQDPWLQERVPTRRYLHKREWPNWLDVCRTVMLGYNASAPEERSRKQVAIMDLVRQHLRLPENPRSRRQATRTNHDKQHTTDPPPDHYNATTVVRGAMETTKDGEESVSDETEQQDTTAHQPERILTASDIYKTRRVETLCTLQATGRAAALLTAAEAEPVVFSPELVQSLDDLYPQEDTSLYPEPAVSAPLVTFDSKDVAKIIGSRLTRGAAPGLDGWTRELLYPLTKDKALLMEITAILTDMANGNVAPEVAHRLRATNLTVLRKPNKKFRPIGAECVWAKAISLMAVDAVMPALKTCFKNLQYGVGNNIELAIQKIRRDFHLKGSVAMLDGRNAYNAISRTAILSAVYGNTAWSPLWRVTRLLLGTEGLVGFYEKGQLVHSWKSTRGVRQGMVLGPVLFSIGTIATLRQLESSFSNASFTAYLDDVTVAAPPGMLGKVCEATSRAMRALGIETNEDKTEVLNKGGPVDMPAEYIRPFARVLGAGVANDPESELITQFVQRKAEETDRLFRAIVELPFAKHTQWRLLSVSALPRVTFLLRTHAPAHTRAAAEWFDDRVTGVLGVIMDGPVTKRARDIAALPVRRGGCGLRRQREIAEFAYACLGEKGKQRAMTDELDAKHQSDLYETLQGPDRKVFVSNTAAGAGRPLTDPQVHADDRGFSTYLRERLLVRVLPEGQKCVCGADASNEHVHTCTRLQQNPRTTRHDMINMTFANGLRLCGFQCGMEPRLTEASRRRPDILIVGLDTYAITDVTVTYAGRVTAYVSEESMEEADPLRAARDRLTQKRQKYRHWALANGLDFEPFVMLTNGAIHPASRRWLRRILGNQDHRLTITNAYDMIVADTLAAMLRGNVHVFNAACGRAGTG

SEQ ID NO: 7357 - protein, 1769 aa, Trypanosoma cruzi
MAYSNRGMPMPFDFRNGRTDSDRTTGGKRQQPPRYMTRSAAASRTPFIHRDSVDPSQLQDIITAATTEAIKRLTSPTKGRYTDNNGNRSWRSRSGRPPRRDAEILWRSQPPQGGPQMMQGGNRSWQYRDQQPRRYRSQSSLERNNTPAQVPRRTQQEVRSGSQGVRRGASHEQRGPQSSTATPSFPGRREVAQGLPHAGFRGQLTRPKNPHAAIAALAELELQAYQEKHQRYIGATKTLVPWWTALYQSGAQNYHCPLCSFNRPGEHDVFYHCRQAHPTYDKCYPYRLHLNGHCTFPVEKSCSLNAVLAVLSHYEDESQLSQEVRSTYTVPCRENTERIIRAMDVNLPLAPVSALELLIKNDSKLRRMFSTTAVAGIHCEACGWTLPMADAYPSYSETLQDEPAVITLQPGKRAPIQLTQKLLMQQYRSTWVTEEHVCTGEKRERHHTPWHMTATKSRKFEDAVALEFGHWDKQAMGVEEIPFVILLPHQNGTAEYGLVGLVATNAPNHVVAYIPSALRKDTEWVMIDGMVQKMQRKPLNTHKVILCLYRRLMPETGPEEDEEDDEQEPQARNREQDGRTLATAPKGSRRPKSQKWEEAPDDSSMVDGFGKNGYGQPPGSATHSSPPASSSPSTQTITQDPFLTPIATRKRGRRGKDQEEESEGEGNKGEGIVCEEDEEGLLQPSVPPTSSQPYQQAPQVHFLDEEEEEITLRRTQPQETPHTNKDETPPHHQSSLPQEAVEMEEEGVGGDEGDSETPRHTTGQEDGGHPFSHDKTPALLDPVWCLAGGCHHKFSGPRRGEHLRSHIHAVHHKQERMDITNEALISQGLVRCDACGEVCSASLRARAAHRPRCGQYTCRKENMATQREEYRASVTGSHYTKTAAFLERTPAVEWPTTPATDPRQDPWLQKRVPTRRYLHKREWPNWLDVCRTVMLGYNASAPEERSRKQVAIMDLVRQHLRLPENPRSRRHATRTNHDKQHTTDPPPDHGNTTTVVRGAMATTKDGEESVSDETEQQDTTTHQPERILTASDIYKTRRVETLCTLQATGRAAALLTAAEAEPVVFSPELVQSLDDLYPQEDTSLYPEPAVSAPLVTFDSKDVAKIIGSRLTRGAAPGLDGWTRELLYPLTKDKALLMEITAILTDMANGNVAPEVAHRLRATNLTVLRKPNKKFRPIGAECVWAKAISLMAVDAVMPALKTCFKNLQYGVGNNIELAIQKIRRDFHLKGSVAMLDGRNAYNAISRTAILSAVYGNTAWSPLWRVTRLLLGTEGLVGFYEKGQLVHSWKSTRGVRQGMVLGPVLFSIGTIATLRQLESSFSNASFTAYLDDVTVAAPPGMLGKVCEATSRAMRALGIETNEDKTEVLNKGGPVEMPAEYIRPFARVLGAGVANDPESELITQFVQRKAEETDRLFRAIVELPFAKHTQWRLLSVSALPRVTFLLRTHAPAHTRAAAEWFDDRVTGVLGVIMDGPVTKRARDIAALPVRRGGCGLRRQREIAEFAYACLGEKGKQRAMTDELDAKHQSDLYETLQGPDRKVFVSNTAAGAGRPLTDPQVHADDRGFSTYLRERLLVRVLPEGQKCVCGADASNEHVHTCTRLQQNPRTTRHDMINMTFANGLRLCGFQCGMEPRLTEASRRRPDILIVGLDTYAITDVTVTYAGRVTAYVSEESMEETDPLRAARDRLTQKRQKYRHWALANGLDFEPFVMLTNGAIHPASRRWLRRILGNQDHRLTITNAYDMIVADTLAAMLRGNVHVFNAACGRAGTG

SEQ ID NO: 7358 - protein, 1027 aa, Trypanosoma cruzi
MEEEGVGGEEGESETPRHTTGQEDGGHPFSHDKTPALLDPVWCLAGGCHHKFSGPRRGEQLRSHIHAVHHKQERMDITNEALISQGLVRCDACGEVCSASLRARAAHRPRCGQYTCRKENMATQREEYRASVTGSHYTKTAAFLERTPAVEWPTTPATDPRQDPWLQERVPTRRYLHKREWPNWLDVCRTVMLGYNASAPEERSRKQVAIMDLVRQHLRLPENPRSRRQATRTNHDKQHTTDPPPDHYNATTVVRGAMETTKDGEESVSDETEQQDTTAHQPERILTASDIYKTRRVETLCTLQATGRAAALLTAAEAEPVVYSPELVQSLDDLYPQEDTSLYPEPAVSAPLVTFDSKDVAKIIGSRLTRGAAPGLDGWTRELLYPLTKDKALLMEITAILTDMANGNVAPEVAHRLRATNLTVLRKPNKKFRPIGAECVWAKAISLMAVDAVMPALKTCFKNLQYGVGNNIELAIQKIRRDFHLKGSVAMLDGRNAYNAISRTAILSAVYGNTAWSPLWRVTRLLLGTEGLVGFYEKGQLVHSWKSTRGVRQGMVLGPVLFSIGTIATLRQLESSFSNASFTAYLDDVTVAAPPGMLGKVCEATSRAMRALGIETNEDKTEVLNKGGPVDMPAEYIRPFARVLGAGVANDPESELITQFVQRKAEETDRLFRAIVELPFAKHTQWRLLSVSALPRVTFLLRTHAPAHTRAAAEWFDDRVTGVLGVIMDGPVTKRARDIAALPVRRGGCGLRRQREIAEFAYACLGEKGKQRAMTDELDAKHQSDLYETLQGPDRKVFVSNTAAGAGRPLTDPQVHADDRGFSTYLRERLLVRVLPEGQKCVCGADASNEHVHTCTRLQQNPRTTRHDMINMTFANGLRLCGFQCGMEPRLTEASRRRPDILIVGLDTYAITDVTVTYAGRVTAYVSEESMEEADPLRAARDRLTQKRQKYRHWALANGLDFEPFVMLTNGAIHPASRRWLRRILGNQDHRLTITNAYDMIVADTLAAMLRGNVHVFNAACGRAGTG

SEQ ID NO: 7359 - protein, 1769 aa, Trypanosoma cruzi
MAYSNRGMPMPFDFRNGRTDSDWTTGGKRQQPPRYMTRSSAASRTPFIHRDSVDPSQLQDIITAATTEAIKRLTSPTNGRYTDNNGNRSWRSRSGRPPRRDAEILWRSQPPQGGPQMMQGGNRSWQYRDQQPRRYRSQSSLERHNTTAQVPRRTQQEVRSGSQGVRRGASHEQRGPQSSTATPSFPGRREVAQGLPHAGFRGQLTRPKNPHAAIAALAELELQAYQEKHQRYIGATKTLVPWWTALYQSGAQNYHCPLCSFNRPGEHDVFYHCRQAHPTYDKCYPYRLHLNGHCTFPVEKSCSLNAVLAVLSHYEDESQLSQELRSTYTVPCRENTERIIRAMDVNLPLAPVSALELLIKNDSKLRRMFSTTAVAGTQCEVCGWALPMAEAYPSYSETLQDEPAVITLQPGKRAPIHLTQTLLMQQYRSTWISEEHVCTGEQLARHHPQWAMTATKSRKFDDAVALEFGHWDKQAMGVEEIPFVILLPHQNGTAEYGLVGLVATNAPNHVVAYIPSTLHKDTEWVMIDGMVQKVQRKPINTHKVILCLYRRRMPETGPEEDEEDDEHEPQARNREQDGRTLASAPKGSRRPKSQKWEEAPDDSSMVDGFGKNGYGQPPGSATHSSPPASSSPSTQTITQDPFLTPIAPRKRGRRGEDQEEESEGDGNKGEGIVCEEDEEGLLQPSVPPTSSQPYQQAPQVHFLDEEEEEITLRRTQPQEPPHTNKDETPPHQQSSLPQEAVEMEEEGVGGEEGESETPRHTTGQEDGGHPFSHDKTPALLDPVWCLAGGCHHKFSGPRRGEQLRSHIHAVHHKQERMDITNEALISQGLVRCDACGEVCSASLRARAAHRPRCGQYTCRKENMATQREEYRASVTGSHYTKTAAFLERTPAVEWPTTPATDPRQDPWLQERVPTRRYLHKREWPNWLDVCRTVMLGYNASAPEERSRKQVAIMDLVRQHLRLPENPRSRRQATRTNHDKQHTTDPPPDHYNATTVVRGAMETTKDGEESVSDETEQQDTTAHQPERILTASDIYKTRRVETLCTLQATGRAAALLTAAEAEPVVFSPELVQSLDDLYPQEDTSLYPEPAVSAPLVTFDSKDVAKIIGSRLTRGAAPGLDGWTRELLYPLTKDKALLMEITAILTDMANGNVAPEVAHRLRATNLTVLRKPNKKFRPIGAECVWAKAISLMAVDAVMPALKTCFKNLQYGVGNNIELAIQKIRRDFHLKGSVAMLDGRNAYNAISRTAILSAVYGNTAWSPLWRVTRLLLGTEGLVGFYEKGQLVHSWKSTRGVRQGMVLGPVLFSIGTIATLRQLESSFSNASFTAYLDDVTVAAPPGMLGKVCEATSRAMRALGIETNEDKTEVLNKGGPVDMPAEYIRPFARVLGAGVANDPESELITQFVQRKAEETDRLFRAIVELPFAKHTQWRLLSVSALPRVTFLLRTHAPAHTRAAAEWFDDRVTGVLGVIMDGPVTKRARDIAALPVRRGGCGLRRQREIAEFAYACLGEKGKQRAMTDELDAKHQSDLYETLQGPDRKVFVSNTAAGAGRPLTDPQVHADDRGFSTYLRERLLVRVLPEGQKCVCGADASNEHVHTCTRLQQNPRTTRHDMINMTFANGLRLCGFQCGMEPRLTEASRRRPDILIVGLDTYAITDVTVTYAGRVTAYVSEESMEEADPLRAARDRLTQKRQKYRHWALANGLDFEPFVMLTNGAIHPASRRWLRRILGNQDHRLTITNAYDMIVADTLAAMLRGNVHVFNAACGRAGTG

SEQ ID NO: 7360 - protein, 1666 aa, Trypanosoma cruzi
MAYSNRGMPMPFDFRNGRTDSDWTTGGKRQQPPRYMTRSSAASRTPFIHRDSVDPSQLQDIITAATTEAIKRLTSPTNGRYTDNNGNRSWRSRSGRPPRRDAEILWRSQPPQGGPQMMQGGNRSWQYRDQQPRRYRSQSSLERHNTTAQVPRRTQQEVRSGSQGVRRGASHEQRGPQSSTATPSFPGRREVAQGLPHAGFRGQLTRPKNPHAAIAALAELELQAYQEKHQRYIGATKTLVPWWTALYQSGAQNYHCPLCSFNRPGEHDVFYHCRQAHPTYDKCYPYRLHLNGHCTFPVEKSCSLNAVLAVLSHYEDESQLSQEVRSTYTVPCRENTERIIRAMEVNLPLAPVSALELLIKNDSKLRRMFSTTAVAGVQCEVCGWALPMADAYPSYSEILQDEPAVITLQPGKRAPIHLTQTLMMQQYRSTWISEEHVCAGEQLARHHPQWAMTATKSRKFDDAVALEFGHWDKQAMGVEEIPFVILLPHQNGTAEYGLVGLVATNAPNHVVAYIPSALRKDTEWVMIDGMVQKVQRKPLNTHKVILCLYRRLMPETGPEEDEEDDEQEPQARNREQDGRTLATAPKGSRRPQSQKWEEAPDDSSMVDGFGKNGYGQPPGSATHSSPPASSSPSTQTITQDPFLTPIAPRKRGRRGEDQEEESEGEGNKGGGIVCEEDEEGLLQPSVPPTSSQPNQQAPQVHFLDEEEEEITLRRTQPQETPHNNKDDTPPHQQSSLPQEEVEMEEEGVGGDEGDSETPRDTTGQEDGGHPFSHDKTPALLDPVWCLAGGCHHKFSGPRRGEHLRSHIHAVHHKQERMDITNEALISQGLVRCDACGEVCSASLRARAAHRPRCGQYTCRKENMATQREEYRASVTGSHYTKTAAFLERTPAVEWPTTPATDPRQDPWLQERVPTRRYLHKREWPNWLDVCRTVMLGYNASAPEERSRKQVAIMDLVRQHLRLPENPRSRRHATRTNHDKQHTTDPPPDHGNTTTVVRGAMETTKDGEESVSDETEQQDTTAHQPERILTASDIYKTRRVETLCTLQATGRAAALLTAAEAEPVVFSPELVQSLDDLYPQEDTSLYPEPAVSAPLVTFDSKDVAKIIGSRLTRGAAPGLDGWTRELLYPLTKDKALLMEITAILTDMANGNVAPEVAHRLRATNLTVLRKPNKKFRPIGAECVWAKAISLMAVDAVMPALKTCFKNLQYGVGNNIELAIQKIRRDFHLKGSVAMLDGRNAYNAISRTAILSAVYGNTAWSPLWRVTRLLLGTEGLVGFYEKGQLVHSWKSTRGVRQGMVLGPVLFSIGTIATLRQLESSFSNASFTAYLDDVTVAAPPGMLGKVCEATSRAMRALGIETNEDKTEVLNKGGPVDMPAEYIRPFARVLGAGVANDPESELITQFVQRKAEETDRLFRAMVELPFAKHTQWRLLSVSALPRVTFLLRTHAPAHTRAAAEWFDDRVTGVLGVIMDGPVTKRARDIAALPVRRGGCGLRRQREIAEFAYACLGEKGKQRAMTDELDAKHQSDLYETLQGPDRKVFVSNTAAGAGRPLTDPQVHADDRGFSTYLRERLLVRVLPEGQKCVCGADASNEHVHTCTRLQQNPRTTRHDMINMTFANGLRLCGFQCGMEPRLTEASRRRPDILIVGLDTYAITDVTVTYAGRVTA

SEQ ID NO: 7361 - protein, 1027 aa, Trypanosoma cruzi
MEEEGVGGEEGESETPRHTTGQEDGGHPFSHDKTPALLDPVWCLAGGCHHKFSGPRRGEQLRSHIHAVHHKQERMDITNEALISQGLVRCDACGEVCSASLRARAAHRPRCGQYTCRKENMATQREEYRASVTGSHYTKTAAFLERTPAVEWPTTPATDPRQDPWLQERVPTRRYLHKREWPNWLDVCRTVMLGYNASAPEERSRKQVAIMDLVRQHLRLPENPRSRRQATRTNHDKQHTTDPPPDHYNATTVVRGAMETTKDGEESVSDETEQQDTTAHQPERILTASDIYKTRRVETLCTLQATGRAAALLTAAEAEPVVFSPELVQSLDDLYPQEDTSLYPEPAVSAPLVTFDSKDVAKIIGSRLTRGAAPGLDGWTRELLYPLTKDKALLMEITAILTDMANGNVAPEVAHRLRATNLTVLRKPNKKFRPIGAECVWAKAISLMAVDAVMPALKTCFKNLQYGVGNNIELAIQKIRRDFHLKGSVAMLDGRNAYNAISRTAILSAVYGNTAWSPLWRVTRLLLGTEGLVGFYEKGQLVHSWKSTRGVRQGMVLGPVLFSIGTIATLRQLESSFSNASFTAYLDDVTVAAPPGMLGKVCEATSRAMRALGIETNEDKTEVLNKGGPVDMPAEYIRPFARVLGAGVANDPESELITQFVQRKAEETDRLFRAIVELPFAKHTQWRLLSVSALPRVTFLLRTHAPAHTRAAAEWFDDRVTGVLGVIMDGPVTKRARDIAALPVRRGGCGLRRQREIAEFAYACLGEKGKQRAMTDELDAKHQSDLYETLQGPDRKVFVSNTAAGAGRPLTDPQVHADDRGFSTYLRERLLVRVLPEGQKCVCGADASNEHVHTCTRLQQNPRTTRHDMINMTFANGLRLCGFQCGMEPRLTEASRRRPDILIVGLDTYAITDVTVTYAGRVTAYVSEESMEEADPLRAARDRLTQKRQKYRHWALANGLDFEPFVMLTNGAIHPASRRWLRRILGNQDHRLTITNAYDMIVADTLAAMLRGNVHVFNAACGRAGTG

SEQ ID NO: 7362 - protein, 1061 aa, Trypanosoma cruzi
MRGRQPQREPQEHADEIPPRQQPTPSPNAKEGEEEEGVGDEEGEVPTPRQNTTGQDDRGHPFSHDKTNALLDPVWCLAGGCHHKFSGPRRGEHLRSHIHAVHRKQERMDITNEALISQGLVRCDACGEICAASVRARAAHRPRCGQYTCRKENIAAQREEYRESVTGSYYTRTAACLELAPSVEWPTTPATDPLQDPWLQERVPTRRYLHKREWPNWLDVCRTVMLGYNASAPDERSRKQVAIMDLVRLHLRLPEKQRRRQATRTNHDKQRRKDPPIAHVHDTADGAVLSDSESMQDGERSVGEENEQRDSTAHHTERILTASDIYKARRAETLCTLQATGRAAALLTAAEAEPVVFSPELVKSLDDLYPQEDTSLYPEPAVSAPLVTFDSKDVAKMIGSRLTRGAAPGLDGWTRELLYPLTMDKALLMEITAILTDMANGNVAPEVAHRLRATNLTVLRKPNKKFRPIGAECVWAKAISLMAVDAVMPALKTCFKDLQYGVGNNIELAIEKIRRDFQIKGSVAMLDGRNAYNAISRTAILAAVYGNPTWRPLWRVTRLLLGTEGLVGFYEKGQLVHAWKSTRGVRQGMVLGPVLFSIGTIATLRRLQSSFPNASFTAYLDDVTVAAPPGLLGKVCEATSRAMRTLGIETNEDKTEVLNRGGPVDMPAEYIRPFARVLGAGIANDPESELITQFVQRKAEETDRLFRAIVELPFAKHTQWRLLSVSALPRVTFLLRTHAPVHTRAAAGWFDDRVTGVLGVIMDGPVTKRARDVSALPVRRGGCGLRRQREIAEFAYACLGEKGKQRALTDELDAKHQSDLYETLQGPDRKVFVSNTASGAGRPLTDPQVHADDRGFATYLRERLLVRVLPEGQQCICGADASNEHVHTCSRLSQNPRTTRHDMINMTFANGLRLCGFQCGMEPRLTEASRRRPDILIVGLDTYAVTDVTVTYAGRVTAYRSEESMEEADPFRSARDRLTQKRQKYRHWALANGLDFEPFVMLTNGAIHPASRRWLRRILGNQDHRLTITNAYDLIVAETLAAMLRGNVHVFNAACGRAGLG

SEQ ID NO: 7363 - protein, 953 aa, Trypanosoma cruzi
MDITNEALISQGLVRCDACGEVCSASLRARAAHRPRCGQYTCRKENMATQREEYRASVTGSHYTKTAAFLERTPAVEWPTTPATDPRQDPWLQERVPTRRYLHKREWPNWLDVCRTVMLGYNASAPEERSRKQVAIMDLVRQHLRLPENPRSRRHATRTNHDKQHTTDPPPDHGNTTTVVRGAMETTKDGEESVSDETEQQDTTAHQPERILTASDIYKTRRVETLCTLQATGRAAALLTAAEAEPVVFSPELVQSLDDLYPQEDTSLYPEPAVSAPLVTFDSKDVAKIIGSRLTRGAAPGLDGWTRELLYPLTKDKALLMEITAILTDMANGNVAPEVAHRLRATNLTVLRKPNKKFRPIGAECVWAKAISLMAVDAVMPALKTCFKNLQYGVGNNIELAIQKIRRDFHLKGSVAMLDGRNAYNAISRTAILSAVYGNTAWSPLWRVTRLLLGTEGLVGFYEKGQLVHSWKSTRGVRQGMVLGPVLFSIGTIATLRQLESSFSNASFTAYLDDVTVAAPPGMLGKVCEATSRAMRALGIETNEDKTEVLNKGGPVDMPAEYIRPFARVLGAGVANDPESELITQFVQRKAEETDRLFRAMVELPFAKHTQWRLLSVSALPRVTFLLRTHAPAHTRAAAEWFDDRVTGVLGVIMDGPVTKRARDIAALPVRRGGCGLRRQREIAEFAYACLGEKGKQRAMTDELDAKHQSDLYETLQGPDRKVFVSNTAAGAGRPLTDPQVHADDRGFSTYLRERLLVRVLPEGQKCVCGADASNEHVHTCTRLQQNPRTTRHDMINMTFANGLRLCGFQCGMEPRLTEASRRRPDILIVGLDTYAITDVTVTYAGRVTAYVSEESMEEADPLRAARDRLTQKRQKYRHWALANGLDFEPFVMLTNGAIHPASRRWLRRILGNQDHRLTITNAYDMIVADTLAAMLRGNVHVFNAACGRAGTG

SEQ ID NO: 7364 - protein, 1769 aa, Trypanosoma cruzi
MAYSNRGMPMPFDFRNGRTDSDWTTGGKRQQPPRYMTRSSAASRTPFIHRDSVDPSQLQDIITAATTEAIKRLTSPTNGRYTDNNGNRSWRSRSGRPPRRDAEILWRSQPPQGGPQMMQGGNRSWQYRDQQPRRYRSQSSLERHNTTAQVPRRTQQEVRSGSQGVRRGASHEQRGPQSSTATPSFPGRREVAQGLPHAGFRGQLTRPKNPHAAIAALAELELQAYQEKHQRYIGATKTLVPWWTALYQSGAQNYHCPLCSFNRPGEHDVFYHCRQAHPTYDKCYPYRLHLNGRCTFPVEKSCSLNAVLAVLSHYEDESQLSQEVRSTYTVPCRENTERIIRAMEVNLPLAPVSALELLIKNDSKLRRMFSTTAVAGVQCEVCGWALPMADAYPSYSEILQDEPAVITLQPGKRAPIHLTQTLIMQQYRSTWISEEHVCAGEQLARHHPQWAMTATKSRKFDDAVALEFGHWDKQAMGVEEIPFVILLPHQNGTAEYGLVGLVATNAPNHVVAYIPSALRKDTEWVMIDGMVQKVQRKPLNTHKVILCLYRRLMPETGPEEDEEDDEQEPQARNREQDGRTLATAPKGSRRPKSQKWEEAPDDSSMVDGFGKNGYGQPPGSATHSSPPASSSPSTQTITQDPFLTPIAPRKRGRRGEDQEEESEGEGNKGEGIVCEEDEEGLLQPSVPPTSSQPHQQAPQVHFLDEEEEEITLRRTQPQEPPHTNKDETPPHHQSSLPQETVEMEEEGVGGEEGESETPRHTTGQEDGGHPFSHDKTPALLDPVWCLAGGCHHKFSGPRRGEQLRSHIHAVHHKQERMDITNEALISQGLVRCDACGEVCSASLRARAAHRPRCGQYTCRKENMATQREEYRASVTGSHYTKTAAFLERTPAVEWPTTPATDPRQDPWLQERVPTRRYLHKREWPNWLDVCRTVMLGYNASAPEERSRKQVAIMDLVRHHLRLPENPRSRRHATRTNHDKQHTTDPPPDHGNTTTVVQGTMETTKDGEESVSDETEQQDPTAHQPERILTASDIYKTRRVETLCTLQATGRAAALLTAAEAEPVVYSPELVQSLDDLYPQEDTSLYPEPAVSAPLVTFDSKDVAKIIGSRLTRGAAPGLDGWTRELLYPLTKDKALLMEITAILTDMANGNVAPEVAHRLRATNLTVLRKPNKKFRPIGAECVWAKAISLMAVDAVMPALKTCFKNLQYGVGNNIELAIQKIRRDFHLKGSVAMLDGRNAYNAISRTAILSAVYGNTAWSPLWRVTRLLLGTEGLVGFYEKGQLVHSWKSTRGVRQGMVLGPVLFSIGTIATLRQLESSFSNASFTAYLDDVTVAAPPGMLGKVCEATSRAMRALGIETNEDKTEVLNKGGPVDMPAEYIRPFARVLGAGVANDPESELITQFVQRKAEETDRLFRAIVELPFAKHTQWRLLSVSALPRVTFLLRTHAPAHTRAAAEWFDDRVTGVLGVIMDGPVTKRARDIAALPVRRGGCGLRRQREIAEFAYACLGEKGKQRAMTDELDAKHQSDLYETLQGPDRKVFVSNTAAGAGRPLTDPQVHADDRGFSTYLRERLLVRVLPEGQKCVCGADASNEHVHTCTRLQQNPRTTRHDMINMTFANGLRLCGFQCGMEPRLTEASRRRPDILIVGLDTYAITDVTVTYAGRVTAYVSEESMEEADPLRAARDRLTQKRQKYRHWALANGLDFEPFVMLTNGAIHPASRRWLRRILGNQDHRLTITNAYDMIVADTLAAMLRGNVHVFNAACGRAGTG

SEQ ID NO: 7365 - protein, 1770 aa, Trypanosoma cruzi
MAYSKRGVPMPFDFRNGKRDTGGEKGWQRQHPQRQSTTVASPRGPMVHRGNLDPASFKNIIAEATKEVVDQVTRSLILPNSGRMGYYPRQSRGLLPNTRHRELPQRMPQQTQGGPQGAQSWDRPRKYNETQPRHYVPRSNSVGTHKQAQAPSRPQQEARWGNKVARRGTSQGKREPHLPTATPASPEKWEGGPWSPPAGARGRLHRLQNPYNMVKELHELEQQATLDKYQFYGEAINAIQKWWIALYQSGAQNFHCPLCSFNRPGEQAVFQHCRQAHPTHDKCYPYRLYINGHVTDVAEKSCSLNAVLAILSYYEEESHFTQEVRNTYTVPCRENTERIIRAMGVNMPLAPISALEQLIKNDPMLRRMFSTTIVAGVHCEACGWALPMEEAYPSYSETLQKEPAIITLQPEKRAPIQLTQKLLMQQYRSTWVTEEHVCTGEKRERHHTPWHMTATKSHKYDDAVALEFGHWDKQVMGVEEVPFVILLPHHNGTAEYGLVGLVATTAPNHVVAYIPSTLHKDTEWVMIDGMVQKVQRKPINTHKVILCLYRRLMPEMVPEEDEVDNEQGMHGRKGEWESWKQRSPYEDSHNHHTSHTQEEEPADSSLTDEWGRCGYGQPPGSVPHSSQSLTSVSSSPTMTQDPFLTPIGPRKRSRRKEEPSTLEKEEGRRDEVVICEEDEEGLLQPSVPPTSSQPHQQAPQVHFLDEEEEEITLRRTQPQETPHTNKDETPPHQQSSLPQEAVEMEEEGVGGEEGESETPRHTTVQEDGGHPFSHDKTPALLDPVWCLAGGCHHKFSGPRRGEHLRSHIHAVHHKQERMDITNEALISQGLVRCDACGEVCSASLRARAAHRPRCGQYTCRKENMATQREEYRASVTGSHYTKTAAFLERTPAVEWPTTPATDPRQDPWLQERVPTRRYLHKREWPNWLDVCRTVMLGYNASAPEERSRKQVAIMDLVRQHLRLPENPRSRRQATRTNHDKQHTTDPPPDHGNTTPVVRGAMETTKDGEESVSDETEQQDTTAHQPERILTASDIYKTRRVETLCTLQATGRAAALLTAAEAEPVVFSPELVQSLDDLYPQEDTSLYPEPAVSAPLVTFDSKDVAKIIGSRLTRGAAPGLDGWTRELLYPLTKDKALLMEITAILTDMANGNVAPEVAHRLRATNLTVLRKPNKKFRPIGAECVWAKAISLMAVDAVMPALKTCFKNLQYGVGNNIELAIQKIRRDFHLKGSVAMLDGRNAYNAISRTAILSAVYGNTAWSPLWRVTRLLLGTEGLVGFYEKGQLVHSWKSTRGVRQGMVLGPVLFSIGTIATLRQLESSFSNASFTAYLDDVTVAAPPGMLGKVCEATSRAMRALGIETNEDKTEVLNKGGPVDMPAEYIRPFARVLGAGVANDPESELITQFVQRKAEETDRLFRAIVELPFAKHTQWRLLSVSALPRVTFLIRTHAPAHTRAAAEWFDDRVTGVLGVIMDGPVTKRARDIAALPVRRGGCGLRRQREIAEFAYACLGEKGKQRAMTDELDAKHQSDLYETLQGPDRKVFVSNTAAGAGRPLTDPQVHADDRGFSTYLRERLLVRVLPEGQKCVCGADASNEHVHTCTRLQQNPRTTRHDMINMTFANGLRLCGFQCGMEPRLTEASRRRPDILIVGLDTYAITDVTVTYAGRVTAYVSEESMEEADPLRAARDRLTQKRQKYRHWALANGLDFEPFVMLTNGAIHPASRRWLRRILGNQDHRLTITNAYDMIVADTLAAMLRGNVHVFNAACGRAGTG

SEQ ID NO: 7366 - protein, 1773 aa, Trypanosoma cruzi
MAYSKRGVPMPFDFRNGKRDTGGEKGWQRQQPQRQSTTFASPRGPMVHRGNLDPTSFKNIIAEATKEVVDQVTRSLILPKSGRMGYYPRQSRGLLPNARHMELPQRMPQQTQGGPQGAQSWDRPRKYNETQPRHYIPRSNSVGTHTQAQTPPRPQQEARWGNKVARRGTSQGKREPHLPTATPASPEKWEGGPWSPPAGARGRLHRIHNPYNMVMELHELEQQATQDKYQFYGEAINAIQKWWIALYQSGAQNFHGPLCSFNRPGEQAVFQHCRQAHPTHDKCYPYRLYINGHVTDVAEKSCSLNAVLAILSYYEEESHFTQEVRNTYTAPCRENTERIIRAMGVNLPLAPVSALEQLIKNDPMLRRMFSTTLVAGVHCEACGWALPMEEAYPSYSETLQKEPAIITLQPGKRAPIQLTQKLLMQQYRSTWVTEEHVCTGEKRERLHAPWHMTATKSHKYDDAVALEFGHWDKQVMGVEEVPFVILLPHHNGTAEYGLVGLVATNAPNHVVAYIPSTLQKDTTWVMIDGMVQKVQRKPINTHKVILCLYRRLMPEMVPEEDEVENEQGMHGRKGEWEGRKQRSPYEDSSHHHTLHTQEEEPADSSLTDEWGRCGYGQPPGSVPHSSQSLASVSSSQTVTQDPFLTPLGPRKRSRRKEGPSTKEKEEGRRDEVIICEEDEEAQGTPAVPPLPPPLSAHNLQDSQGHFLDEEEEEITLRRTQPQETPHTNKDETPPHQQSSLPQEAVEMEEEGVGGEEGDSETPRDTTGQEDGGHPFSHDKTPALLDPVWCLAGGCHHKFSGPRRGEHLRSHIHAVHHKQERMDITNEALISQGLVRCDACGEVCSASLRARAAHRPRCGQYTCRKENMATQREEYRASVTGSHYTKTAAFLERTPAVEWPTTPATDPRQDPWLQERVPTRRYLHKREWPNWLDVCRTVMLGYNASAPEERSRKQVAIMDLVRQHLRLPENPRSRRHATRTNHDKQHTTDPPPDHGNTTTVVRGAMATTKDGEESVSDETEQQDTTTHQPERILTASDIYKTRRVETLCTLQATGRAAALLTAAEAEPVVFSPELVQSLDDLYPQEDTSLYPEPAVSAPLVTFDSKDVAKIIGSRLTRGAAPGLDGWTRELLYPLTKDKALLMEITAILTDMANGNVAPEVAHRLRATNLTVLRKPNKKFRPIGAECVWAKAISLMAVDAVMPALKTCFKNLQYGVGNNIELAIQKIRRDFHLKGSVAMLDGRNAYNAISRTAILSAVYGNTAWSPLWRVTRLLLGTEGLVGFYEKGQLVHSWKSTRGVRQGMVLGPVLFSIGTIATLRQLESSFSNASFTAYLDDVTVAAPPGMMGKVCEATSRAMRALGIETNEDKTEVLNKGGPVDMPAEYIRPFARVLGAGVANDPESELITQFVQRKAEETDRLFRAIVELPFAKHTQWRLLSVSALPRVTFLLRTHAPAHTRAAAEWFDDRVTGVLGVIMDGPVTKRARDIAALPVRRGGCGLRRQREIAEFAYACLGEKGKQRAMTDELDAKHQSDLYETLQGPDRKVFVSNTAVGAGRPLTDPQVHADDRGFSTYLRERLLVRVLPEGQKCVCGADASNEHVHTCTRLQQNPRTTRHDMINMTFANGLRLCGFQCGMEPRLTEASRRRPDILIVGLDTYAITDVTVTYAGRVTAYVSEESMEEADPLRAARDRLTQKRQKYRHWALANGLDFEPFVMLTNGAIHPASRRWLRRILGNQDHRLTITNAYDMIVADTLAAMLRGNVHVFNAACGRAGTG

SEQ ID NO: 7367 - protein, 1768 aa, Trypanosoma cruzi
MAYSNRGMPMPFDFRNGRTDSDWTTGGKRQQPPRYMTRSAAASRTPFIHRDSVDPSQLQDIITAATTEAIKRLTSPTNGRYTDNNGNRSWRSRSGRPPRRDAEILWRSQPPQGGPQMMQGGNRSWQYRDQQPRRYRSQSSLERNNTPAQVPRRTQQEVRSGSQGVRRGASHEQRGPQSSTATPSLPGRREVAQGLPHAGFRGQLTRPKNPHAAIAALAELELQAYQEKHQRYIGATKTLVPWWTALYQSGAQNYHCPLCSFNRPGEHDVFYHCRQAHPTYDKCYPYRLHLNGHCTFPVEKSCSLNAVLAVLSHYEDESQLSQEVRSTYTVPCRENTERIIRAMDVNLPLAPVSALELLIKNDSRLRRMFSTTAVAGVQCEVCGWALPMAEAYPSYSETLQDEPAVITLQPGKRAPIHLTQTLMMQQYRSTWISEEHVCAGEQLARHHPQWAMTATKSRKFDDAVALEFGHWDKQAMGVEEIPFVILLPHQNGTAEYGLVGLVATNAPNHVVAYIPSALLKDTEWVMIDGMVQKMQRKPINTHKVILCLYRRLMPETGPEEDEEDDEQEPQARNREQDGRTLATAPKGSRRPKSQTWEEAPDDSSMVDGFGKNGYGQPPGSATHSSPPASSSPSTQTITQDPFLTPIAPRKRGRRGKDQEEESEGEGNKGGVIVCEEDEEGLLQPSVPPTSSQPYQQAPQVHFLDEEEEEITLRRTQPQETPHNNKDETPPHQQSSLPQEAVEMEEEGVGGEEGESETPRHTTGQEDGGHPFSHDKTPALLDPVWCLAGGCHHKFSGPRRGEHLRSHIHAVHHKQERMDITNEALISQGLVRCDACGEVCSASLRARAAHRPRCGQYTCRKENMATQREEYRASVTGSHYTKTAAFLERTPAVEWPTTPATDPRQDPWLQERVPTRRYLHKREWPNWLDVCRTVMLGYNASAPEERSRKQVAIMDLVRQHLRLPENPRSRQATRTNHDKQHTTDPPPAHGNTTTVVRGAMETTKDGEESVSDETEQQDTTAHQPERILTASDIYKTRRVETLCTLQATGRAAALLTAAEAEPVVFSPELVQSLDDLYPQEDTSLYPEPAVSAPLVTFDSKDVAKIIGSRLTRGAAPGLDGWTRELLYPLTKDKALLMEITAILTDMANGNVAPEVAHRLRATNLTVLRKPNKKFRPIGAECVWAKAISLMAVDAVMPALKTCFKNLQYGVGNNIELAIQKIRRDFHLKGSVAMLDGRNAYNAISRTAILSAVYGNTAWSPLWRVTRLLLGTEGLVGFYEKGQLVHSWKSTRGVRQGMVLGPVLFSIGTIATLRQLESSFSNASFTAYLDDVTVAAPPGMLGKVCEATSRAMRALGIETNEDKTEVLNKGGPVDMPAEYIRPFVRVLGAGVANDPESELITQFVQRKAEETDRLFRAIVELPFAKHTQWRLLSVSALPRVTFLLRTHAPAHTRAAAEWFDDRVTGVLGVIMDGPVTKRARDIAALPVRRGGCGLRRQREIAEFAYACLGEKGKQRAMTDELDAKHQSDLYETLRGPDRKVFVSNTAAGAGRPLTDPQVHADDRGFSTYLRERLLVRVLPEGQKCVCGADASNEHVHTCTRLQQNPRTTRHDMINMTFANGLRLCGFQCGMEPRLTEASRRRPDILIVGLDTYAITDVTVTYAGRVTAYVSEESMEEADPLRAARDRLTQKRQKYRHWALANGLDFEPFVMLTNGAIHPASRRWLRRILGNQDHRLTITNAYDMIVADTLAAMLRGNVHVFNAACGRAGTG

SEQ ID NO: 7368 - protein, 1773 aa, Trypanosoma cruzi
MAYSKRGVPMPFDFRNGKRDTGGEKGWQRQQPQRQSTTFASPRGPMVHRGNLDPTSFKNIIAEATKEVVDQVTRSLILPKSGRMGYYPRQSRGLLPNARHMELPQRMPQQTQGGPQGAQSWDRPRKYNETQPRHYIPRSNSVGTHTQAQTPPRPQQEARWGNKVARRGTSQGKREPHLPTATPASPEKWEGGPWSPPAGARGRLHRIHNPYNMVMELHELEQQATQDKYQFYGEAINAIQKWWIALYQSGAQNFHCPLCSFNRPGEQAVFQHCRQAHPTHDKCYPYRLYINGHVTDVAEKSCSLNAVLAILSYYEEESHFTQEVRNTYTAPCRENTERIIRAMGVNLPLAPVSALEQLIKNDPMLRRMFSTTLVAGVHCEACGWALPMEEAYPSYSETLQKEPAIITLQPGKRAPIQLTQKLLMQQYRSTWVTEEHVCTGEKRERLHAPWHMTATKSHKYDDAVALEFGHWDKQVMGVEEVPFVILLPHHNGTAEYGLVGLVATNAPNHVVAYIPSTLQKDTTWVMIDGMVQKVQRKPINTHKVILCLYRRLMPEMVPEEDEVENEQGMHGRKGEWEGRKQRSPYEDSSHHHTLHTQEEEPADSSLTDEWGRCGYGQPPGSVPHSSQSLASVSSSQTVTQDPFLTPLGPRKRSRRKEGPSTKEKEEGRRDEVIICEEDEEAQGTPAVPPLPPPLSAHNLQDSQGHFLDEEEEEITLRRTQPQETPHTNKDETPPHQQSSLPQEAVEMEEEGVGGEEGDSETPRDTTGQEDGGHPFSHDKTPALLDPVWCLAGGCHHKFSGPRRGEHLRSHIHAVHHKQERMDITNEALISQGLVRCDACGEVCSASLRARAAHRPRCGQYTCRKENMATQREEYRASVTGSHYTKTAAFLERTPAVEWPTTPATDPRQDPWLQERVPTRRYLHKREWPNWLDVCRTVMLGYNASAPEERSRKQVAIMDLVRQHLRLPENPRSRRHATRTNHDKQHTTDPPPDHGNTTTVVRGAMATTKDGEESVSDETEQQDTTTHQPERILTASDIYKTRRVETLCTLQATGRAAALLTAAEAEPVVFSPELVQSLDDLYPQEDTSLYPEPAVSAPLVTFDSKDVAKIIGSRLTRGAAPGLDGWTRELLYPLTKDKALLMEITAILTDMANGNVAPEVAHRLRATNLTVLRKPNKKFRPIGAECVWAKAISLMAVDAVMPALKTCFKNLQYGVGNNIELAIQKIRRDFHLKGSVAMLDGRNAYNAISRTAILSAVYGNTAWSPLWRVTRLLLGTEGLVGFYEKGQLVHSWKSTRGVRQGMVLGPVLFSIGTIATLRQLESSFSNASFTAYLDDVTVAAPPGMLGKVCEATSRAMRALGIETNEDKTEVLNKGGPVDMPAEYIRPFARVLGAGVANDPESELITQFVQRKAEETDRLFRAIVELPFAKHTQWRLLSVSALPRVTFLLRTHAPAHTRAAAEWFDDRVTGVLGVIMDGPVTKRARDIAALPVRRGGCGLRRQREIAEFAYACLGEKGKQRAMTDELDAKHQSDLYETLQGPDRKVFVSNTAAGAGRPLTDPQVHADDRGFSTYLRERLLVRVLPEGQKCVCGADASNEHVHTCTRLQQNPRTTRHDMINMTFANGLRLCGFQCGMEPRLTEASRRRPDILIVGLDTYAITDVTVTYAGRVTAYVSEESMEEADPLRAARDRLTQKRQKYRHWALANGLDFEPFVMLTNGAIHPASRRWLRRILGNQDHRLTITNAYDMIVADTLAAMLRGNVHVFNAACGRAGTG

SEQ ID NO: 7369 - protein, 1769 aa, Trypanosoma cruzi
MAYSNRGMPMPFDFRNGRTDSDWTTGGKRQQPPRYMTRSSAASRTPFIHRDSVDPSQLQDIITAATTEAIKRLTSPTNGRYTDNNGNRSWRSRSGRPPRRDAEILWRSQPPQGGPQMMQGGNRSWQYRDQQPRRYRSQSSLERHNTTAQVPRRTQQEVRSGSQGVRRGASHEQRGPQSSTATPSFPGRREVAQGLPHAGFRGQLTRPKNPHAAIAALAELELQAYQEKHQRYIGATKTLVPWWTALYQSGAQNYHCPLCSFNRPGEHDVFYHCRQAHPTYDKCYPYRLHLNGHCTFPVEKSCSLNAVLAVLSHYEDESQLSQEVRSTYTVPCRENTERIIRAMEVNLPLAPVSALELLIKNDSKLRRMFSTTAVAGVQCEVCGWALPMADAYPSYSEILQDEPAVITLQPGKRAPIHLTQTLMMQQYRSTWISEEHVCAGEQLARHHPQWAMTATKSRKFDDAVALEFGHWDKQAMGVEEIPFVILLPHQNGTAEYGLVGLVATNAPNHVVAYIPSALRKDTEWVMIDGMVQKVQRKPLNTHKVILCLYRRLMPETGPEEDEEDDEQEPQARNREQDGRTLATAPKGSRRPQSQKWEEAPDDSSMVDGFGKNGYGQPPGSATHSSPPASSSPSTQTITQDPFLTPIAPRKRGRRGEDQEEESEGEGNKGGGIVCEEDEEGLLQPSVPPTSSQPNQQAPQVHFLDEEEEEITLRRTQPQETPHNNKDDTPPHQQSSLPQEEVEMEEEGVGGDEGDSETPRDTTGQEDGGHPFSHDKTPALLDPVWCLAGGCHHKFSGPRRGEHLRSHIHAVHHKQERMDITNEALISQGLVRCDACGEVCSASLRARAAHRPRCGQYTCRKENMATQREEYRASVTGSHYTKTAAFLERTPAVEWPTTPATDPRQDPWLQERVPTRRYLHKREWPNWLDVCRTVMLGYNASAPEERSRKQVAIMDLVRQHLRLPENPRSRRHATRTNHDKQHTTDPPPDHGNTTTVVRGAMETTKDGEESVSDETEQQDTTAHQPERILTASDIYKTRRVETLCTLQATGRAAALLTAAEAEPVVFSPELVQSLDDLYPQEDTSLYPEPAVSAPLVTFDSKDVAKIIGSRLTRGAAPGLDGWTRELLYPLTKDKALLMEITAILTDMANGNVAPEVAHRLRATNLTVLRKPNKKFRPIGAECVWAKAISLMAVDAVMPALKTCFKNLQYGVGNNIELAIQKIRRDFHLKGSVAMLDGRNAYNAISRTAILSAVYGNTAWSPLWRVTRLLLGTEGLVGFYEKGQLVHSWKSTRGVRQGMVLGPVLFSIGTIATLRQLESSFSNASFTAYLDDVTVAAPPGMLGKVCEATSRAMRALGIETNEDKTEVLNKGGPVDMPAEYIRPFARVLGAGVANDPESELITQFVQRKAEETDRLFRAMVELPFAKHTQWRLLSVSALPRVTFLLRTHAPAHTRAAAEWFDDRVTGVLGVIMDGPVTKRARDIAALPVRRGGCGLRRQREIAEFAYACLGEKGKQRAMTDELDAKHQSDLYETLQGPDRKVFVSNTAAGAGRPLTDPQVHADDRGFSTYLRERLLVRVLPEGQKCVCGADASNEHVHTCTRLQQNPRTTRHDMINMTFANGLRLCGFQCGMEPRLTEASRRRPDILIVGLDTYAITDVTVTYAGRVTAYVSEESMEEADPLRAARDRLTQKRQKYRHWALANGLDFEPFVMLTNGAIHPASRRWLRRILGNQDHRLTITNAYDMIVADTLAAMLRGNVHVFNAACGRAGTG

SEQ ID NO: 7370 - protein, 1773 aa, Trypanosoma cruzi
MAYSKRGVPMPFDFRNGKRDTGGEKGWQRQQPQRQSTTFASPRGPMVHRGNLDPTSFKNIIAEATKEVVDQVTRSLILPKSGRMGYYPRQSRGLLPNARHMELPQRMPQQTQGGPQGAQSWDRPRKYNETQPRHYIPRSNSVGTHTQAQTPPRPQQEARWGNKVARRGTSQGKREPHLPTATPASPEKWEGGPWSPPAGARGRLHRIHNPYNMVMELHELEQQATQDKYQFYGEAINAIQKWWIALYQSGAQNFHCPLCSFNRPGEQAVFQHCRQAHPTHDKCYPYRLYINGHVTDVAEKSCSLNAVLAILSYYEEESHFTQEVRNTYTAPCRENTERIIRAMGVNLPLAPVSALEQLIKNDPMLRRMFSTTLVAGVHCEACGWALPMEEAYPSYSETLQKEPAIITLQPGKRAPIQLTQKLLMQQYRSTWVTEEHVCTGEKRERLHAPWHMTATKSHKYDDAVALEFGHWDKQVMGVEEVPFVILLPHHNGTAEYGLVGLVATNAPNHVVAYIPSTLQKDTTWVMIDGMVQKVQRKPINTHKVILCLYRRLMPEMVPEEDEVENEQGMHGRKGEWEGRKQRSPYEDSSHHHTLHTQEEEPADSSLTDEWGRCGYGQPPGSVPHSSQSLASVSSSQTVTQDPFLTPLGPRKRSRRKEGPSTKEKEEGRRDEVIICEEDEEAQGTPAVPPLPPPLSAHNLQDSQGHFLDEEEEEITLRRTQPQETPHTNKDETPPHQQSSLPQEAVEMEEEGVGGEEGDSETPRDTTGQEDGGHPFSHDKTPALLDPVWCLAGGCHHKFSGPRRGEHLRSHIHAVHRKQERMDITNEALISQGLVRCDACGEVCSASLRARAAHRPRCGQYTCRKENMATQREEYRASVTGSHYTKTAAFLERTPAVEWPTTPATDPRQDPWLQERVPTRRYLHKREWPNWLDVCRTVMLGYNASAPEERSRKQVAIMDLVRQHLRLPENPRSRRHATRTNHDKQHTTDPPPDHGNTTTVVRGAMATTKDGEESVSDETEQQDTTTHQPERILTASDIYKTRRVETLCTLQATGRAAALLTAAEAEPVVFSPELVQSLDDLYPQEDTSLYPEPAVSAPLVTFDSKDVAKIIGSRLTRGAAPGLDGWTRELLYPLTKDKALLMEITAILTDMANGNVAPEVAHRLRATNLTVLRKPNKKFRPIGAECVWAKAISLMAVDAVMPALKTCFKNLQYGVGNNIELAIQKIRRDFHLKGSVAMLDGRNAYNAISRTAILSAVYGNTAWSPLWRVTRLLLGTEGLVGFYEKGQLVHSWKSTRGVRQGMVLGPVLFSIGTIATLRQLESSFSNASFTAYLDDVTVAAPPGMLGKVCEATSRAMRALGIETNEDKTEVLNKGGPVDMPAEYIRPFARVLGAGVANDPESELITQFVQRKAEETDRLFRAIVELPFAKHTQWRLLSVSALPRVTFLLRTHAPAHTRAAAEWFDDRVTGVLGVIMDGPVTKRARDIAALPVRRGGCGLRRQREIAEFAYACLGEKGKQRAMTDELDAKHQSDLYETLQGPDRKVFVSNTAAGAGRPLTDPQVHADDRGFSTYLRERLLVRVLPEGQKCVCGADASNEHVHTCTRLQQNPRTTRHDMINMTFANGLRLCGFQCGMEPRLTEASRRRPDILIVGLDTYAITDVTVTYAGRVTAYVSEESMEEADPLRAARDRLTQKRQKYRHWALANGLDFEPFVMLTNGAIHPASRRWLRRILGNQDHRLTITNAYDMIVADTLAAMLRGNVHVFNAACGRAGTG

SEQ ID NO: 7371 - protein, 979 aa, Trypanosoma cruzi
MRRHHTTNHHCPRKQWRWRRKVWEAMRGTQKHRDTLRARKTVDTHSHTTRHPRCWIPCGVWQVGATTSSRDRVGGNTYDRTFMQSTISRNGWTSPMKRSSHRDWFGATHAGKFARPACEHGRHIAHAVASTHVVRKNMATQREEYRASVTGSHYTKTAAFLERTPAVEWPTTPATDPRQDPWLQKRVPTRRYLHKREWPNWLDVCRTVMLGYNASAPEERSRKQVAIMDLVRQHLRLPENPRSRRHATRTNHDKQHTTDPPPDHGNTTTVVRGAMATTKDGEESVSDETEQQDTTTHQPERILTASDIYKTRRVETLCTLQATGRAAALLTAAEAEPVVFSPELVQSLDDLYPQEDTSLYPEPAVSAPLVTFDSKDVAKIIGSRLTRGAAPGLDGWTRELLYPLTKDKALLMEITAILTDMANGNVAPEVAHRLRATNLTVLRKPNKKFRPIGAECVWAKAISLMAVDAVMPALKTCFKNLQYGVGNNIELAIQKIRRDFHLKGSVAMLDGRNAYNAISRTAILSAVYGNTAWSPLWRVTRLLLGTEGLVGFYEKGQLVHSWKSTRGVRQGMVLGPVLFSIGTIATLRQLESSFSNASFTAYLDDVTVAAPPGMLGKVCEATSRAMRALGIETNEDKTEVLNKGGPVEMPAEYIRPFARVLGAGVANDPESELITQFVQRKAEETDRLFRAIVELPFAKHTQWRLLSVSALPRVTFLLRTHAPAHTRAAAEWFDDRVTGVLGVIMDGPVTKRARDIAALPVRRGGCGLRRQREIAEFAYACLGEKGKQRAMTDELDAKHQSDLYETLQGPDRKVFVSNTAAGAGRPLTDPQVHADDRGFSTYLRERLLVRVLPEGQKCVCGADASNEHVHTCTRLQQNPRTTRHDMINMTFANGLRLCGFQCGMEPRLTEASRRRPDILIVGLDTYAITDVTVTYAGRVTAYVSEESMEEDRPTTRGTGSPHAKTTKVPSLGPGQRAGL

SEQ ID NO: 7372 - protein, 1773 aa, Trypanosoma cruzi
MAYSKRGVPMPFDFRNGKRDTGGEKGWQRQQPQRQSTTFASPRGPMVHRGNLDPTSFKNIIAEATKEVVDQVTRSLILPKSGRMGYYPRQSRGLLPNARHMELPQRMPQQTQGGPQGAQSWDRPRKYNETQPRHYIPRSNSVGTHTQAQTPPRPQQEARWGNKVARRGTSQGKREPHLPTATPASPEKWEGGPWSPPAGARGRLHRIHNPYNMVMELHELEQQATQDKYQFYGEAINAIQKWWIALYQSGAQNFHCPLCSFNRPGEQAVFQHCRQAHPTHDKCYPYRLYINGHVTDVAEKSCSLNAVLAILSYYEEESHFTQEVRNTYTAPCRENTERIIRAMGVNLPLAPVSALEQLIKNDPMLRRMFSTTLVAGVHCEACGWALPMEEAYPSYSETLQKEPAIITLQPGKRAPIQLTQKLLMQQYRSTWVTEEHVCTGEKRERLHAPWHMTATKSHKYDDAVALEFGHWDKQVMGVEEVPFVILLPHHNGTAEYGLVGLVATNAPNHVVAYIPSTLQKDTTWVMIDGMVQKVQRKPINTHKVILCLYRRLMPEMVPEEDEVENEQGMHGRKGEWEGRKQRSPYEDSSHHHTLHTQEEEPADSSLTDEWGRCGYGQPPGSVPHSSQSLASVSSSQTVTQDPFLTPLGPRKRSRRKEGPSTKEKEEGRRDEVIICEEDEEAQGTPAVPPLPPPLSAHNLQDSQGHFLDEEEEEITLRRTQPQETPHTNKDETPPHQQSSLPQEAVEMEEEGVGGEEGDSETPRDTTGQEDGGHPFSHDKTPALLDPVWCLAGGCHHKFSGPRRGEHLRSHIHAVHRKQERMDITNEALISQGLVRCDACGEVCSASLRARAAHRPRCGQYTCRKENMATQREEYRASVTGSHYTKTAAFLERTPAVEWPTTPATDPRQDPWLQERVPTRRYLHKREWPNWLDVCRTVMLGYNASAPEERSRKQVAIMDLVRQHLRLPENPRSRRHATRTNHDKQHTTDPPPDHGNTTTVVRGAMATTKDGEESVSDETEQQDTTTHQPERILTASDIYKTRRVETLCTLQATGRAAALLTAAEAEPVVFSPELVQSLDDLYPQEDTSLYPEPAVSAPLVTFDSKDVAKIIGSRLTRGAAPGLDGWTRELLYPLTKDKALLMEITAILTDMANGNVAPEVAHRLRATNLTVLRKPNKKFRPIGAECVWAKAISLMAVDAVMPALKTCFKNLQYGVGNNIELAIQKIRRDFHLKGSVAMLDGRNAYNAISRTAILSAVYGNTAWSPLWRVTRLLLGTEGLVGFYEKGQLVHSWKSTRGVRQGMVLGPVLFSIGTIATLRQLESSFSNASFTAYLDDVTVAAPPGMLGKVCEATSRAMRALGIETNEDKTEVLNKGGPVEMPAEYIRPFARVLGAGVANDPESELITQFVQRKAEETDRLFRAIVELPFAKHTQWRLLSVSALPRVTFRLRTHAPAHTRAAAEWFDDRVTGVLGVIMDGPVTKRARDIAALPVRRGGCGLRRQREIAEFAYACLGEKGKQRAMTDELDAKHQSDLYETLQGPDRKVFVSNTAAGAGRPLTDPQVHADDRGFSTYLRERLLVRVLPEGQKCVCGADASNEHVHTCTRLQQNPRTTRHDMINMTFANGLRLCGFQCGMEPRLTEASRRRPDILIVGLDTYAITDVTVTYAGRVTAYVSEESMEEADPLRAARDRLTQKRQKYRHWALANGLDFEPFVMLTNGAIHPASRRWLRRILGNQDHRLTITNAYDMIVADTLAAMLRGNVHVFNAACGRAGTG

SEQ ID NO: 7373 - protein, 1769 aa, Trypanosoma cruzi
MAYSNRGMPMPFDFRNGRTDSDRTTGGKRQQPPRYMTRSAAASRTPFIHRDSVDPSQLQDIITAATTEAIKRLTSPTKGRYTDNNGNRSWRSRSGRPPRRDAEILWRSQPPQGGPQMMQGGNRSWQYRDQQPRRYRSQSSLERHNTTAQVPRRTQQEVRSGSQGVRRGASHEQRGPQSSTATPSFPGRREVAQGLPHAGFRGQLTRPKNPHAAIAALAELELQAYQEKHQRYIGATKTLVPWWTALYQSGAQNYHCPLCSFNRPGEHDVFYHCRQAHPTYDKCYPYRLHLNGHCTFPVEKSCSLNAVLAVLSHYEDESQLSQEVRSTYTVPCRENTERIIRAMDVNLPLAPVSALELLIKNDSKLRRMFSTTAVAGIHCEACGWTLPMADAYPSYSETLQDEPAVITLQPGKRAPIQLTQKLLMQQYRSTWVTEEHVCTGEKRERHHTPWHMTATKSRKFDDAVALEFGHWDKQVMGVEEIPFVILLPHQNGTAEYGLVGLVATNAPNHVVAYIPSALRKDTEWVMIDGMVQKMQRKPLNTHKVILCLYRRLMPETGPEEDEEDDEQEPQARNREQDGRTLATAPKGSRRPKSQKWEEAPDDSSMVDGFGKNGYGQPPGSATHSSPPASSSPSTQTITQDPFLTPIATRKRGRRGKDQEEESEGEGNKGEGIVCEEDEEGLLQPSVPPTSSQPYQQAPQVHFLDEEEEEITLRRTQPQETPHTNKDETPPHHQSSLPQEAVEMEEEGVGGDEGDSETPRHTTGQEDGGHPFSHDKTPALLDPVWCLAGGCHHKFSGPRRGEHLRSHIHAVHHKQERMDITNEALISQGLVRCDACGEVCSASLRARAAHRPRCGQYTCRKENMATQREEYRASVTGSHYTKTAAFLERTPAVEWPTTPATDPRQDPWLQERVPTRRYLHKREWPNWLDVCRTVMLGYNASAPEERSRKQVAIMDLVRHHLRLPENPRSRRQATRTNHDKQHTTDPPPDHYNTTTVVRGAMETTKDGEESVSDETEQQDTTAHQPERILTASDIYKTRRVETLCTLQATGRAAALLTAAEAEPVVFSPELVQSLDDLYPQEDTSLYPEPAVSAPLVTFDSKDVAKIIGSRLTRGAAPGLDGWTRELLYPLTKDKALLMEITAILTDMANGNVAPEVAHRLRATNLTVLRKPNKKFRPIGAECVWAKAISLMAVDAVMPALKTCFKNLQYGVGNNIELAIQKIRRDFHLKGSVAMLDGRNAYNAISRTAILSAVYGNTAWSPLWRVTRLLLGTEGLVGFYEKGQLVHSWKSTRGVRQGMVLGPVLFSIGTIATLRQLESSFSNASFTAYLDDVTVAAPPGMMGKVCEATSRAMRALGIETNEDKTEVLNKGGPVDMPAEYIRPFARVLGAGVANDPESELITQFVQRKAEETDRLFRAIVELPFAKHTQWRLLSVSALPRVTFLLRTHAPAHTRAAAEWFDDRVTGVLGVIMDGPVTKRARDIAALPVRRGGCGLRRQREIAEFAYACLGEKGKQRAMTDELDAKHQSDLYETLQGPDRKVFVSNTAVGAGRPLTDPQVHADDRGFSTYLRERLLVRVLPEGQKCVCGADASNEHVHTCTRLQQNPRTTRHDMINMTFANGLRLCGFQCGMEPRLTEASRRRPDILIVGLDTYAITDVTVTYAGRVTAYVSEESMEETDPLRAARDRLTQKRQKYRHWALANGLDFEPFVMLTNGAIHPASRRWLRRILGNQDHRLTITNAYDMIVADTLAAMLRGNVHVFNAACGRAGTG

SEQ ID NO: 7374 - protein, 1769 aa, Trypanosoma cruzi
MAYSNRGMPMPFDFRNGRTDSDWTTGGKRQQPPRYMTRSSAASRTPFIHRDSVDPSQLQDIITAATTEAIKRLTSPTNGRYTDNNGNRSWRSRSGRPPRRDAEILWRSQPPQGGPQMMQGGNRSWQYRDQQPRRYRSQSSLERHNTTAQVPRRTQQEVRSGSQGVRRGASHEQRGPQSSTATPSFPGRREVAQGLPHAGFRGQLTRPKNPHAAIAALAELELQAYQEKHQRYIGATKTLVPWWTALYQSGAQNYHCPLCSFNRPGEHDVFYHCRQAHPTYDKCYPYRLHLNGHCTFPVEKSCSLNAVLAVLSHYEDESQLSQEVRSTYTVPCRENTERIIRAMEVNLPLAPVSALELLIKNDSKLRRMFSTTAVAGVQCEVCGWALPMADAYPSYSEILQDEPAVITLQPGKRAPIHLTQTLLMQQYRSTWISEEHVCAGEQLARHHPQWAMTATKSRKFDDAVALEFGHWDKQAMGVEEIPFVILLPHQNGTAEYGLVGLVATNAPNHVVAYIPSTLHKDTEWVMIDGMVQKVQRKPINTHKVILCLYRRRMPETGPEEDEEDDEHEPQARNREQDGRTLASAPKGSRRPKSQKWEEAPDDSSMVDGFGKNGYGQPPGSATHSSPPASSSPSTQTITQDPFLTPIAPRKRGRRGEDQEEESEGDGNKGEGIVCEEDEEGLLQPSVPPTSSQPYQQAPQVHFLDEEEEEITLRRTQPQEPPHTNKDETPPHQQSSLPQEAVEMEEEGVGGEEGESETPRHTTGQEDGGHPFSHDKTPALLDPVWCLAGGCHHKFSGPRRGEHLRSHIHAVHHKQERMDITNEALISQGLVRCDACGEVCSASLRARAAHRPRCGQYTCRKENMATQREEYRASVTGSHYTKTAAFLERTPAVEWPTTPATDPRQDPWLQERVPTRRYLHKREWPNWLDVCRTVMLGYNASAPEERSRKQVAIMDLVRQHLRLPENPRSRRHATRTNHDKQHTTDPPPDHGNTTTVVRGAMETTKDGEESVSDETEQQDTTAHQPERILTASDIYKTRRVETLCTLQATGRAAALLTAAEAEPVVFSPELVQSLDDLYPQEDTSLYPEPAVSAPLVTFDSKDVAKIIGSRLTRGAAPGLDGWTRELLYPLTKDKALLMEITAILTDMANGNVAPEVAHRLRATNLTVLRKPNKKFRPIGAECVWAKAISLMAVDAVMPALKTCFKNLQYGVGNNIELAIQKIRRDFHLKGSVAMLDGRNAYNAISRTAILSAVYGNTAWSPLWRVTRLLLGTEGLVGFYEKGQLVHSWKSTRGVRQGMVLGPVLFSIGTIATLRQLESSFSNASFTAYLDDVTVAAPPGMLGKVCEATSRAMRALGIETNEDKTEVLNKGGPVDMPAEYIRPFVRVLGAGVANDPESELITQFVQRKAEETDRLFRAIVELPFAKHTQWRLLSVSALPRVTFLLRTHAPAHTRAAAEWFDDRVTGVLGVIMDGPVTKRARDIAALPVRRGGCGLRRQREIAEFAYACLGEKGKQRAMTDELDAKHQSDLYETLQGPDRKVFVSNTAAGAGRPLTDPQVHADDRGFSTYLRERLLVRVLPEGQKCVCGADASNEHVHTCTRLQQNPRTTRHDMINMTFANGLRLCGFQCGMEPRLTEASRRRPDILIVGLDTYAITDVTVTYAGRVTAYVSEESMEEADPLRAARDRLTQKRQKYRHWALANGLDFEPFVMLTNGAIHPASRRWLRRILGNQDHRLTITNAYDMIVADTLAAMLRGNVHVFNAACGRAGTG

SEQ ID NO: 7375 - protein, 1769 aa, Trypanosoma cruzi
MAYSNRGMPMPFDFRNGRTDSDWTTGGKRQQPPRYMTRSSAASRTPFIHRDSVDPSQLQDIITAATTEAIKRLTSPTNGRYTDNNGNRSWRSRSGRPPRRDAEILWRSQPPQGGPQMMQGGNRSWQYRDQQPRRYRSQSSLERHNTTAQVPRRTQQEVRSGSQGVRRGASHEQRGPQSSTATPSFPGRREVAQGLPHAGFRGQLTRPKNPHAAIAALAELELQAYQEKHQRYIGATKTLVPWWTALYQSGAQNYHCPLCSFNRPGEHDVFYHCRQAHPTYDKCYPYRLHLNGHCTFPVEKSCSLNAVLAVLSHYEDESQLSQEVRSTYTVPCRENTERIIRAMEVNLPLAPVSALELLIKNDSKLRRMFSTTAVAGVQCEVCGWALPMADAYPSYSEILQDEPAVITLQPGKRAPIHLTQTLMMQQYRSTWISEEHVCAGEQLARHHPQWAMTATKSRKFDDAVALEFGHWDKQAMGVEEIPFVILLPHQNGTAEYGLVGLVATNAPNHVVAYIPSALRKDTEWVMIDGMVQKVQRKPLNTHKVILCLYRRLMPETGPEEDEEDDEQEPQARNREQDGRTLASAPKGSRRPKSQKWEEAPDDSSMVDGFGKNGYGQPPGSATHSSPPASSSPSTQTITQDPFLTPIAPRKRGRRGEDQEEESEGDGNKGEGIVCEEDEEGLLQPSVPPTSSQPHQQAPQVHFLDEEEEEITLRRTQPQETPHTNKDETPPHHQSSLPQETVEMEEEGVGGEEGDSETPRHTTGQEDGGHPFSHDKTPALLDPVWCLAGGCHHKFSGPRRGEHLRSHIHAVHHKQERMDITNEALISQGLVRCDACGEVCSASLRARAAHRPRCGQYTCRKENMATQREEYRASVTGSHYTKTAAFLERTPAVEWPTTPATDPRQDPWLQERVPTRRYLHKREWPNWLDVCRTVMLGYNASAPEERSRKQVAIMDLVRHHLRLPENPRSRRHATRTNHDKQHTTDPPPDHGNTTTVVQGTMETTKDGEESVSDETEQQDPTAHQPERILTASDIYKTRRVETLCTLQATGRAAALLTAAEAEPVVYSPELVQSLDDLYPQEDTSLYPEPAVSAPLVTFDSKDVAKIIGSRLTRGAAPGLDGWTRELLYPLTKDKALLMEITAILTDMANGNVAPEVAHRLRATNLTVLRKPNKKFRPIGAECVWAKAISLMAVDAVMPALKTCFKNLQYGVGNNIELAIQKIRRDFHLKGSVAMLDGRNAYNAISRTAILSAVYGNTAWSPLWRVTRLLLGTEGLVGFYEKGQLVHSWKSTRGVRQGMVLGPVLFSIGTIATLRQLESSFSNASFTAYLDDVTVAAPPGMLGKVCEATSRAMRALGIETNEDKTEVLNKGGPVDMPAEYIRPFARVLGAGVANDPESELITQFVQRKAEETDRLFRAMVELPFAKHTQWRLLSVSALPRVTFLLRTHAPAHTRAAAEWFDDRVTGVLGVIMDGPVTKRARDIAALPVRRGGCGLRRQREIAEFAYACLGEKGKQRAMTDELDAKHQSDLYETLQGPDRKVFVSNTAAGAGRPLTDPQVHADDRGFSTYLRERLLVRVLPEGQKCVCGADASNEHVHTCTRLQQNPRTTRHDMINMTFANGLRLCGFQCGMEPRLTEASRRRPDILIVGLDTYAITDVTVTYAGRVTAYVSEESMEEADPLRAARDRLTQKRQKYRHWALANGLDFEPFVMLTNGAIHPASRRWLRRILGNQDHRLTITNAYDMIVADTLAAMLRGNVHVFNAACGRAGTG

SEQ ID NO: 7376 - protein, 1769 aa, Trypanosoma cruzi
MAYSNRGMPMPFDFRNGRTDSDWTTGGKRQQPPRYMTRSSAASRTPFIHRDSVDPSQLQDIITAATTEAIKRLTSPTNGRYTDNNGNRSWRSRSGRPPRRDAEILWRSQPPQGGPQMMQGGNRSWQYRDQQPRRYRSQSSLERHNTTAQVPRRTQQEVRSGSQGVRRGASHEQRGPQSSTATPSFPGRREVAQGLPHAGFRGQLTRPKNPHAAIAALAELELQAYQEKHQRYIGATKTLVPWWTALYQSGAQNYHCPLCSFNRPGEHDVFYHCRQAHPTYDKCYPYRLHLNGHCTFPVEKSCSLNAVLAVLSHYEDESQLSQELRSTYTVPCRENTERIIRAMDVNLPLAPVSALELLIKNDSKLRRMFSTTAVAGTQCEVCGWALPMAEAYPSYSETLQDEPAVITLQPGKRAPIHLTQTLLMQQYRSTWISEEHVCTGEQLARHHPQWAMTATKSRKFDDAVALEFGHWDKQAMGVEEIPFVILLPHQNGTAEYGLVGLVATNAPNHVVAYIPSTLHKDTEWVMIDGMVQKVQRKPINTHKVILCLYRRRMPETGPEEDEEDDEHEPQARNREQDGRTLASAPKGSRRPKSQKWEEAPDDSSMVDGFGKNGYGQPPGSATHSSPPASSSPSTQTITQDPFLTPIAPRKRGRRGEDQEEESEGDGNKGEGIVCEEDEEGLLQPSVPPTSSQPYQQAPQVHFLDEEEEEITLRRTQPQEPPHTNKDETPPHQQSSLPQEAVEMEEEGVGGEEGESETPRHTTGQEDGGHPFSHDKTPALLDPVWCLAGGCHHKFSGPRRGEQLRSHIHAVHHKQERMDITNEALISQGLVRCDACGEVCSASLRARAAHRPRCGQYTCRKENMATQREEYRASVTGSHYTKTAAFLERTPAVEWPTTPATDPRQDPWLQERVPTRRYLHKREWPNWLDVCRTVMLGYNASAPEERSRKQVAIMDLVRQHLRLPENPRSRRQATRTNHDKQHTTDPPPDHYNATTVVRGAMETTKDGEESVSDETEQQDTTAHQPERILTASDIYKTRRVETLCTLQATGRAAALLTAAEAEPVVFSPELVQSLDDLYPQEDTSLYPEPAVSAPLVTFDSKDVAKIIGSRLTRGAAPGLDGWTRELLYPLTKDKALLMEITAILTDMANGNVAPEVAHRLRATNLTVLRKPNKKFRPIGAECVWAKAISLMAVDAVMPALKTCFKNLQYGVGNNIELAIQKIRRDFHLKGSVAMLDGRNAYNAISRTAILSAVYGNTAWSPLWRVTRLLLGTEGLVGFYEKGQLVHSWKSTRGVRQGMVLGPVLFSIGTIATLRQLESSFSNASFTAYLDDVTVAAPPGMLGKVCEATSRAMRALGIETNEDKTEVLNKGGPVDMPAEYIRPFARVLGAGVANDPESELITQFVQRKAEETDRLFRAIVELPFAKHTQWRLLSVSALPRVTFLIRTHAPAHTRAAAEWFDDRVTGVLGVIMDGPVTKRARDIAALPVRRGGCGLRRQREIAEFAYACLGEKGKQRAMTDELDAKHQSDLYETLQGPDRKVFVSNTAAGAGRPLTDPQVHADDRGFSTYLRERLLVRVLPEGQKCVCGADASNEHVHTCTRLQQNPRTTRHDMINMTFANGLRLCGFQCGMEPRLTEASRRRPDILIVGLDTYAITDVTVTYAGRVTAYVSEESMEEADPLRAARDRLTQKRQKYRHWALANGLDFEPFVMLTNGAIHPASRRWLRRILGNQDHRLTITNAYDMIVADTLAAMLRGNVHVFNAACGRAGTG

SEQ ID NO: 7377 - protein, 1769 aa, Trypanosoma cruzi
MAYSNRGMPMPFDFRNGRTDSDWTTGGKRQQPPRYMTRSSAASRTPFIHRDSVDPSQLQDIITAATTEAIKRLTSPTNGRYTDNNGNRSWRSRSGRPPRRDAEILWRSQPPQGGPQMMQGGNRSWQYRDQQPRRYRSQSSLERHNTTAQVPRRTQQEVRSGSQGVRRGASHEQRGPQSSTATPSFPGRREVAQGLPHAGFRGQLTRPKNPHAAIAALAELELQAYQEKHQRYIGATKTLVPWWTALYQSGAQNYHCPLCSFNRPGEHDVFYHCRQAHPTYDKCYPYRLHLNGHCTFPVEKSCSLNAVLAVLSHYEDESQLSQELRSTYTVPCRENTERIIRAMDVNLPLAPVSALELLIKNDSKLRRMFSTTAVAGTQCEVCGWALPMAEAYPSYSETLQDEPAVITLQPGKRAPIHLTQTLIMQQYRSTWISEEHVCAGEQLARHHPQWAMTATKSRKFDDAVALEFGHWDKQAMGVEEIPFVILLPHQNGTAEYGLVGLVATNAPNHVVAYIPSALRKDTEWVMIDGMVQKVQRKPLNTHKVILCLYRRLMPETGPEEDEEDDEQEPQARNREQDGRTLATAPKGSRRPKSQKWEEAPDDSSMVDGFGKNGYGQPPGSATHSSPPASSSPSTQTITQDPFLTPIAPRKRGRRGEDQEEESEGEGNKGEGIVCEEDEEGLLQPSVPPTSSQPHQQAPQVHFLDEEEEEITLRRTQPQEPPHTNKDETPPHHQSSLPQETVEMEEEGVGGEEGESETPRHTTGQEDGGHPFSHDKTPALLDPVWCLAGGCHHKFSGPRRGEQLRSHIHAVHHKQERMDITNEALISQGLVRCDACGEVCSASLRARAAHRPRCGQYTCRKENMATQREEYRASVTGSHYTKTAAFLERTPAVEWPTTPATDPRQDPWLQERVPTRRYLHKREWPNWLDVCRTVMLGYNASAPEERSRKQVAIMDLVRHHLRLPENPRSRRHATRTNHDKQHTTDPPPDHGNTTTVVQGTMETTKDGEESVSDETEQQDPTAHQPERILTASDIYKTRRVETLCTLQATGRAAALLTAAEAEPVVYSPELVQSLDDLYPQEDTSLYPEPAVSAPLVTFDSKDVAKIIGSRLTRGAAPGLDGWTRELLYPLTKDKALLMEITAILTDMANGNVAPEVAHRLRATNLTVLRKPNKKFRPIGAECVWAKAISLMAVDAVMPALKTCFKNLQYGVGNNIELAIQKIRRDFHLKGSVAMLDGRNAYNAISRTAILSAVYGNTAWSPLWRVTRLLLGTEGLVGFYEKGQLVHSWKSTRGVRQGMVLGPVLFSIGTIATLRQLESSFSNASFTAYLDDVTVAAPPGMLGKVCEATSRAMRALGIETNEDKTEVLNKGGPVDMPAEYIRPFARVLGAGVANDPESELITQFVQRKAEETDRLFRAIVELPFAKHTQWRLLSVSALPRVTFLLRTHAPAHTRAAAEWFDDRVTGVLGVIMDGPVTKRARDIAALPVRRGGCGLRRQREIAEFAYACLGEKGKQRAMTDELDAKHQSDLYETLQGPDRKVFVSNTAAGAGRPLTDPQVHADDRGFSTYLRERLLVRVLPEGQKCVCGADASNEHVHTCTRLQQNPRTTRHDMINMTFANGLRLCGFQCGMEPRLTEASRRRPDILIVGLDTYAITDVTVTYAGRVTAYVSEESMEEADPLRAARDRLTQKRQKYRHWALANGLDFEPFVMLTNGAIHPASRRWLRRILGNQDHRLTITNAYDMIVADTLAAMLRGNVHVFNAACGRAGTG

SEQ ID NO: 7378 - protein, 978 aa, Sitophilus oryzae
MVRLHAEWGRMHPEHETITAQNLRNCATRLRSQGFIRVQLQMETNETVVNIQPAEVSRSSDHLPIPEMPLTPINEQAIFESRRALHRIKALKPLEITRMDESLSDTLPNNPNIWQLNSTVYDVVKRTCQPIITHARATPEIRAQRRIKKMEAKIQLARQKASRIQCVIEYQIQGTPFTRRVRKTAAELRRNHHTLNQGILLAAKQHYIDRIKVLMISKRQLAEKTKAIMENKMFREKPGRLFSPPMAQIENPPTTEEVENFWKDLYGEVRPLRYNTPALEQFKVFAQNHRTANEPKHQITEEEVQQALQGTKNFSAPGPDCINAYWWKKLTSTHLHLARIFDTWLHGNQQIPSWVVEGRTVLIPKSGDLSQPKNYRPITCLNACYKIFTRILYARLLSAIKTALDEIHEQRGSKRGVAGCKENLLIDRSITQDSMQYQRNLSMAWIDYRKAFDSTSHELILRLLRTLEAPEAVVDCIERLMPLWKTRVCINNGTTKICTDAIQLRRGVFQGDSLSPLLFCISLLPLSIALRNTRGYKCGKPGIRGHKVTHLFYMDDLKLYTAGERDLKISLRIVEEFTSAIGMELGLNKCAVIHLKRGRNENYGEDVQLVDGSTIQKLTDDETYTYLGIEQRHFQETQKVKDSLCERYRKRLRQIWSSSLSGVNKTLATNILATPIITYSFGVIKWTENELHQLDVITRKMMHMEKSLHTKSSVPRLYLPREQGGRGLLSLESLHQRVILSTAYTLLKTQDPLLVMVRDHEKEEIGGFIFKEAKKAANKLNLIFDLQRQHPESITEHSATQVVNRIRSAQNRRFLQNHVEKPVHGAFYNIMTQQQLSERLSFAFLRSSGLRSETEGFILACQDGVYGSLVYRSRIMGQQIEDIRCRACHQAPETLWHILSACPTYAASAYTQRHNAALRVIYYHLHHMHGFDETPVLPQTPKEIESLVENETTKIYWNYPFQAFGQIRANRPDIVLRI

SEQ ID NO: 7379 - protein, 868 aa, Pissodes strobi
MAKKRELIERTRAITENKIFQERPARLFNPPSPTIENPPSVEQVEQFWTDLYGKSQPFRADIPALRQFEVFCRGFPAAERQYQPITLEEVQHALQGAKNFAAPGPDGINTYWWKKSTVVHHHLARIFDSWLSGEQQIPAWVVQGRTVLLPKKGDLSQANNYRPITCLNACYKLFTRTLYMRVLKSVSRIFREIHEQRGSKRGVAGCRENLLIDRCITQDSMQYQRNLSMAWIDYRKAFDSTNHKLILHLLRVMSVPDPVVRCIQQLMPLWKTQFHITSRATKVSTNIVPFRRGVFQGDSLSPLLFCISLLPLSVALRNTRGYHCGIPGNRGHKVTHLFYMDDLKIYTAGERDLKLSLRIVEQYTQAVGMELGLDKCAVIHIRRGRNGDFGEDAQLVDGGAIHKLGVGETYTYLGIGQSHFQEVSQVKESLRGRYQHRLRQIWSSRLSGKNKAMATNLLAIPILAYSFGVIKWTKNELSQLDIKTRKMMHMHKSLHTKSSVPRLYLPREQGGRGLLSLECLHNRMVLSTTCAILRSSDPLLLMVRDHEQQTLGGFIFKAAERAAEELGLRFDSAQQDPASITRLGDSQLKKIIESAENGVLLHKHKEKPVHGAFYGIISQQNLSEKYTFGFLRSSGLRSETEGFILACQDGVFNSLVYQSRIVGLVIEDVRCRACHQVPETLWHLLSACPSYAASSYTHRHNAALRVIYYHLRHSYGIDKTLRLPQIPGEIESVVENDRCRIYWNYPFPTSRPIQANRPDIVLLDHANKVIYVIEFSAPSEKNINTKEEEKHTKYQDLLLELRRMYRGHSVRLVVLIIGSLGGMKDTLLKQIKIIPACRNVAELLALRMQKAVILGSLRLLRAHEMRTQ

SEQ ID NO: 7380 - protein, 933 aa, Sitophilus oryzae
MEAKIQLARQKASRIQCVIEYKIQGTPFTRRVRKIAAELRRNHHTLNQGILLAAKQHYIDRIKVLMISKRQLAEKTKAIMENKMFREKPGRLFSPPMAQIENPPTTEEVENFWKDLYGEVRPLRYNTPALEQFKVFAQNHRTANEPKHQITEEEVQQALQGTKNFSAPGPDCINAYWWKKLTSTHLHLARIFDTWLHGNQQIPSWVVEGRTVLIPKSGDLSQPKNYRPITCLNACYKIFTRILYARLLSAIKTALDEIHEQRGSKRGVAGCKENLLIDRSITQDSMQYQRNLSMAWIDYRKAFDSTSHELILRLLRTLEAPEAVVDCIERLMPLWKTRVCINNGTTKICTDAIQLRRGVFQGDSLSPLLFCISLLPLSIALRNTRGYKCGKPGIRGHKVTHLFYMDDLKLYTAGERDLKISLRIVEEFTSAIGMELGLNKCAVIHLKRGRNENYGEDVQLVDGSTIQKLTDDETYTYLGIEQRHFQETQKVKDSLCERYRKRLRQIWSSSLSGVNKTLATNILATPIITYSFGVIKWTENELHQLDVITRKMMHMEKSLHTKSSVPRLYLPREQGGRGLLSLESLHQRVILSTAYTLLKTQDPLLVMVRDHEKEEIGGFIFKEAKKAANKLNLIFDLQRQHPESITEHSATQVVNRIRSAQNRRFLQNHVEKPVHGAFYNIMTQQQLSERLSFAFLRSSGLRSETEGFILACQDGVYGSLVYRSRIMGQQIEDIRCRACHQAPETLWHILSACPTYAASAYTQRHNAALRVIYYHLRHMHGFDETPVLPQTPKEIESLVENETTKIYWNYTFQAFGQIRANRPDIVLQDIAKKIIYVIEFSAPSEKNIISKEEEKREKYQELLEQMRRMYADHSVRLVVLVIGSLGGVKDTLLQQLKLIPACYNVAERLAASMQKAVILGSLKILRAHDTRIQ

SEQ ID NO: 7381 - protein, 1016 aa, Galerucella calmariensis
MSLSNNEEKCRQLLKFCSCGGPDDGNPMILCDVCYKWFHAACVNLLEWDIEELEKDDNSWLCNSCAEVTTQTLDDPALGNPASENQCPECFRIFKGRKGVKIHKRRCHPQLTPDTDGASSDQNFSFEETIMNMKSSVRLLRRIPRGARVTVADKLAQIINRCTTTNSIHAWEELFTFAFLVLNIPQNKSQKESLTAIIKQRVKLLSSSKPVPTNLKPAKSSLWRRIESKVADGDIRGAVRLISSDDTLAPNDHQTLEALRQKHPKPSRPLTFPDPPCDTDEACLVVSNDDVYKAILSFPNGSAGGMDGIRPQHLKDLLFRALGEASTRLLTAITSLCNLMLAGKVNQEACKYLYGASLCALNKKDGGVRPIAVGCTLRRLVSKLGCLHIKAVLGEYFRPKQMGFGINGGCEAMTHAARLYRMTPSDFTKVILKIDVKNAFNSLERDTLLQAVKQKTPQLFPYLWQCYATPSQLLYNHALISSEVGSQQGDPLGPMTFSLAIHPIIETLNSELNIWYLDDGCLGGPADCVLEDLKRIIELFKSIGLELNFNKCEIHFCSSSPSDDLQSILNSFQEVTPGIRLVRDEDLILLGAPILEDAMPAIFEAKLHNYYLMSQRLQNLQPHVALYLLRHCFALPKLTYLLRTTPSWKSSDILDEFDRTTAQNLESILNIKLDERQITQATLPIKFGGLGIRRAADFAIPAFLASSHFVSNLVGSILPPSFCDGEISYVKEATDLWKTVCPDTEFPECPRIQKNWDLPMVKKQFDSLLNLSSVDDARLLASIEKESSAWLHAVPSSNIGTLLDGTSLRIGISLRLGAPLCEEHVCVCGALVSRLGHHGLSCPRSAGRQQRHAALNEIIKRALSSSGIPSILEPPGLSRDDGKRPDGLTLIPWSMGKALLWDATCVDTLAPSHIGSTSKKSGSAANSAEDFKHRRYSCLIPNYHFLALGVETLGPWGEDAKALVKEIGAKLSFSSGETRSTFYLTQRISLAIQRGNAASVLGTLPDTVSMDEVFYL

SEQ ID NO: 7382 - protein, 1074 aa, Galerucella calmariensis
MCYGMSITTNCYELDKLSHLQLQYSIFMSYELKLCSHKKNYAYASAKSTLNKYIFTLNMSLSNNEEKCRQLLKFCSCGGPDDGNPMILCDVCYKWFHAACVNLLEWDIEELEKDDNSWLCNSCAEVTTQTLDDPALGNPASENQCPECFRIFKGRKGVKIHKRRCHPQLTPDTDGASSDQNFSFEETIMNMKSSVRLLRRIPRGARVTVADKLAQIINRCTTTNSIHAWEELFTFAFLVLNIPQNKSQKESLTAIIKQRVKLLSSSKPVPTNLKPAKSSLWRRIESKVADGDIRGAVRLISSDDTLAPNDHQTLEALRQKHPKPSRPLTFPDPPCDTDEACLVVSNDDVYKAILSFPNGSAGGMDGIRPQHLKDLLFRALGEASTRLLTAITSLCNLMLAGKVNQEACKYLYGASLCALNKKDGGVRPIAVGCTLRRLVSKLGCLHIKAVLGEYFRPKQMGFGINGGCEAMTHAARLYRMTPSDFTKVILKIDVKNAFNSLERDTLLQAVKQKTPQLFPYLWQCYATPSQLLYNHALISSEVGSQQGDPLGPMTFSLAIHPIIETLNSELNIWYLDDGCLGGPADCVLEDLKRIIELFKSIGLELNFNKCEIHFCSSSPSDDLQSILNSFQEVTPGIRLVRDEDLILLGAPILEDAMPAIFEAKLHNYYLMSQRLQNLQPHVALYLLRHCFALPKLTYLLRTTPSWKSSDILDEFDRTTAQNLESILNIKLDERQITQATLPIKFGGLGIRRAADFAIPAFLASSHFVSNLVGSILPPSFCDGEISYVKEATDLWKTVCPDTEFPECPGIQKNWDLPMVKKQFDSLLNLSSVDDARLLASIEKESSAWLHAVPSSNIGTLLDGTSLRIGISLRLGAPLCEEHVCVCGALVSRLGHHGLSCPRSAGRQQRHAALNEIIKRALSSSGIPSILEPPGLSRDDGKRPDGLTLIPWSMGKALLWDATCVDTLAPSHIGSTSKKSGSAANSAEDFKHRRYSCLIPNYHFLALGVETLGPWGEDAKALVKEIGAKLSFSSGETRSTFYLTQRISLAIQRGNAASVLGTLPDTVSMDEVFYL

SEQ ID NO: 7383 - protein, 1045 aa, Galerucella calmariensis
MIINDFKFQILRGGTVFPRFLYVCIYLFIMSLSNNEEKCRQLLKFCSCGGPDDGNPMILCDVCYKWFHAACVNLLEWDIEELEKDDNSWLCNSCAEVTTQTLDDPALGNPASENQCPECFRIFKGRKGVKIHKRRCHPQLTPDTDGASSDQNFSFEETIMNMKSSVRLLRRIPRGARVTVADKLAQIINRCTTTNSIHAWEELFTFAFLVLNIPQNKSQKESLTAIIKQRVKLLSSSKPVPTNLKPAKSSLWRRIESKVADGDIRGAVRLISSDDTLAPNDHQTLEALRQKHPKPSRPLTFPDPPCDTDEACLVVSNDDVYKAILSFPNGSAGGMDGIRPQHLKDLLFRALGEASTRLLTAITSLCNLMLAGKVNQEACKYLYGASLCALNKKDGGVRPIAVGCTLRRLVSKLGCLHIKAVLGEYFRPKQMGFGTNGGCEAMTHAARLYRMTPSDFTKVILKIDVKNAFNSLERDTLLQAVKQKTPQLFPYLWQCYATPSQLLYNHALISSEVGSQQGDPLGPMTFSLAIHPIIETLNSELNIWYLDDGCLGGPADCVLEDLKRIIELFKSIGLELNFNKCEIHFCSSSPSDDLQSILNSFQEVTPGIRLVRDEDLILLGAPILEDAMPAIFEAKLHNYYLMSQRLQNLQPHVALYLLRHCFALPKLTYLLRTTPSWKSSDILDEFDRTTAQNLESILNIKLDERQITQATLPIKFGGLGIRRAADFAIPAFLASSHFVSNLVGSILPPSFCDGEISYVKEATDLWKTVCPDTEFPECPGIQKNWDLPMVKKQFDSLLNLSSVDDARLLASIEKESSAWLHAVPSSNIGTLLDGTSLRIGISLRLGAPLCEEHVCVCGALVSRLGHHGLSCPRSAGRQQRHAALNEIIKRALSSSGIPSILEPPGLSRDDGKRPDGLTLIPWSMGKALLWDATCVDTLAPSHIGSTSKKSGSAANSAEDFKHRRYSCLIPNYHFLALGVETLGPWGEDAKALVKEIGAKLSFSSGETRSTFYLTQRISLAIQRGNAASVLGTLPDTVSMDEVFYL

SEQ ID NO: 7384 - protein, 1016 aa, Galerucella calmariensis
MSLSNNEEKCRQLLKFCSCGGPDDGNPMILCDVCYKWFHAACVNLLEWDIEELEKDDNSWLCNSCAEVTTQTLDDPALGNPASENQCPECFRIFKGRKGVKIHKRRCHPQLTPDTDGASSDQNFSFEETIMNMKSSVRLLRRIPRGARVTVADKLAQIINRCTTTNSIHAWEELFTFAFLVLNIPQNKSQKESLTAIIKQRVKLLSSSKPVPTNLKPAKSSLWRRIESKVADGDIRGAVRLISSDDTLAPNDHQTLEALRQKHPKPSRPLTFPDPPCDTDEACLVVSNDDVYKAILSFPNGSAGGMDGIRPQHLKDLLFRALGEASTRLLTAITSLCNLMLAGKVNQEACKYLYGASLCALNKKDGGVRPIAVGCTLRRLVSKLGCLHIKAVLGEYFRPKQMGFGINGGCEAMTHAARLYRMTPSDFTKVILKIDVKNAFNSLERDTLLQAVKQKTPQLFPYLWQCYATPSQLLYNHALISSEVGSQQGDPLGPMTFSLAIHPIIETLNSELNIWYLDDGCLGGPADCVLEDLKRIIELFKSIGLELNFNKCEIHFCSSSPSDDLQSILNSFQEVTPGIRLVRDEDLILLGAPILEDAMPAIFEAKLHNYYLMSQRLQNLQPHVALYLLRHCFALPKLTYLLRTTPSWKSSDILDEFDRTTAQNLESILNIKLDERQITQATLPIKFGGLGIRRAADFAIPAFLASSHFVSNLVGSILPPSFCDGEISYVKEATDLWKTVCPDTEFPECPGIQKNWDLPMVKKQFDSLLNLSSVDDARLLASIEKESSAWLHAVPSSNIGTLLDGTSLRIGISLRLGAPLCEEHVCVCGALVSRLGHHGLSCPRSAGRQQRHAALNEIIKRALSSSGIPSILEPPGLSRDDGKRPDGLTLIPWSMGKALLWDATCVDTLAPSHIGSTSKKSGSAANSAEDFKHRRYSCLIPNYHFLALGVETLGPWGEDAKALVKEIGAKLSFSSGETRSTFYLTQRISIAIQRGNAASVLGTLPDTVSMDEVFYL

SEQ ID NO: 7385 - protein, 1016 aa, Galerucella calmariensis
MSLSNNEEKCRQLLKFCSCGGPDDGNPMILCDVCYKWFHAACVNLLEWDIEELEKDDNSWLCNSCAEVTTQTLDDPALGNPASENQCPECFRIFKGRKGVKIHKRRCHPQLTPDTDGASSDQNFSFEETIMNMKSSVRLLRRIPRGARVTVADKLAQIINRCTTTNSIHAWEELFTFAFLVLNIPQNKSQKESLTAIIKQRVKLLSSSKPVPTNLKPAKSSLWRRIESKVADGDIRGAVRLISSDDTLAPNDHQTLEALRQKHPKPSRPLTFPDPPCDTDEACLVVSNDDVYKAILSFPNGSAGGMDGIRPQHLKDLLFRALGEASTRLLTAITSLCNLMLAGKVNQEACKYLYGASLCALNKKDGGVRPIAVGCTLRRLVSKLGCLHIKAVLGEYFRPKQMGFGINGGCEAMTHAARLYRMTPSDFTKVILKIDVKNAFNSLERDTLLQAVKQKTPQLFPYLWQCYATPSQLLYNHALISSEVGSQQGDPLGPMTFSLAIHPIIETLNSELNIWYLDDGCLGGPADCVLEDLKRIIELFKSIGLELNFNKCEIHFCSSSPSDDLQSILNSFQEVTPGIRLVRDEDLILLGAPILEDAIPAIFEAKLHNYYLMSQRLQNLQPHVALYLLRHCFALPKLTYLLRTTPSWKSSDILDEFDRTTAQNLESILNIKLDERQITQATLPIKFGGLGIRRAADFAIPAFLASSHFVSNLVGSILPPSFCDGEISYVKEATDLWKTVCPDTEFPECPGIQKNWDLPMVKKQFDSLLSLSSVDDARLLASIEKESSAWLHAVPSSNIGTLLDGTSLRIGISLRLGAPLCEEHVCVCGALVSRLGHHGLSCPRSAGRQQRHAALNEIIKRALSSSGIPSILEPPGLSRDDGKRPDGLTLIPWSMGKALLWDATCVDTLAPSHIGSTSKKSGSAANSAEDFKHRRYSCLIPNYHFLALGVETLGPWGEDAKALVKEIGAKLSFSSGETRSTFYLTQRISIAIQRGNAASVLGTLPDTVSMDEVFYL

SEQ ID NO: 7386 - protein, 1016 aa, Galerucella tenella
MSLSNNEEKCRQLLKFCSCGGPDDGNPMILCDVCYKWFHAACVNLLEWDIEELEKDDNSWLCNSCAEVTTQTLDDPALGNPASENQCPECFRIFKGRKGVKIHKRRCHPQLTPDTDGASSDQNFSFEETIMNMKSSVRLLRRIPRGARVTVADKLAQIINRCTTTNSIHAWEELFTFAFLVLNIPQNKSQKESLTAIIKQRVKLLSSSKPVPTNLKPAKSSLWRRIESKVADGDIRGAVRLISSDDTLAPNDHQTLEALRQKHPKPSRPLTFPDPPCDTDEACLVVSNDDVYKAILSFPNGSAGGMDGIRPQHLKDLLFRALGEASTRLLTAITSLCNLMLAGKVNQEACKYLYGASLCALNKKDGGVRPIAVGCTLRRLVSKLGCLHIKAVLGEYFRPKQMGFGINGGCEAMTHAARLYRMTPSDFTKVILKIDVKNASNSLERDTLLQAVKQKTPQLFPYLWQCYATPSQLLYNHALISSEVGSQQGDPLGPMTFSLAIHPIIETLNSELNIWYLDDGCLGGPADCVLEDLKRIIELFKSIGLELNFNKCEIHFCSSSPSDDLQSILNSFQEVTPGIRLVRDEDLILLGAPILEDAMPAIFEAKLHNYYLMSQRLQNLQPHVALYLLRHCFALPKLTYLLRTTPSWKSSDILDEFDRTTAQNLESILNIKLDERQITQATLPIKFGGLGIRRAADFAIPAFLASSHFVSNLVGSILPPSFCDGEISYVKEATDLWKTACPDTEFPECPGIQKNWDLPMVKKQFDSLLNLSSVDDARLLASIEKESSAWLHAVPSSNIGTLLDGTSLRIGISLRLGAPLCEEHVCVCGALVSRLGHHGLSCPRSAGRQQRHAALNEIIKRALSSSGIPSILEPPGLSRDDGKRPDGLTLIPWSMGKALLWDATCVDTLAPSHIGSTSKKSGSAANSAEDFKHRRYSCLIPNYHFLALGVETLGPWGEDAKALVKEIGAKLSFSSGETRSTFYLTQRISLAIQRGNAASVLGTLPDTVSMDEVFYL

SEQ ID NO: 7387 - protein, 1016 aa, Galerucella calmariensis
MSLSNNEEKCRQLLKFCSCGGPDDGNPMILCDVCYKWFHAACVNLLEWDIEELEKDDNSWLCNSCAEVTTQTLDDPALGNPASENQCPECFRIFKGRKGVKIHKRRCHPQLTPDTDGASSDQNFSFEETIMNMKSSVRLLRRIPRGARVTVADKLAQIINRCTTTNSIHAWEELFTFAFLVLNIPQNKSQKESLTAIIKQRVKLLSSSKPVPTNLKPAKSSLWRRIESKVADGDIRGAVRLISSDDTLAPNDHQTLEALRQKHPKPSRPLTFPDPPCDTDEACLVVSNDDVYKAILSFPNGSAGGMDGIRPQHLKDLLFRALGEASTRLLTAITSLCNLMLAGKVNQEACKYLYGASLCALNKKDGGVRPIAVGCTLRRLVSKLGCLHIKAVLGEYFRPKQMGFGINGGCEAMTHAARLYRMTPSDFTKVILKIDVKNAFNSLERDTLLQAVKQKTPQLFPYLWQCYATPSQLLYNHALISSEVGSQQGDPLGPMTFSLAIHPIIETLNSELNIWYLDDGCLGGPADCVLEDLKRIIELFKSIGLELNFNKCEIHFCSSSPSDDLQSILNSFQEVTPGIRLVRDEDLILLGAPILEDAMPAIFEAKLHNYYLMSQRLQHLQPHVALYLLRHCFALPKLTYLLRTTPSWKSSDILDEFDRTTAQNLESILNIKLDERQITQATLPIKFGGLGIRRAADFAIPAFLASSHFVSNLVGSILPPSFCDGEISYVKEATDLWKTVCPDTEFPECPGIQKNWDLPMVKKQFDSLLNLSSVDDARLLASIEKESSAWLHAVPSSNIGTLLDGTSLRIGISLRLGAPLCEEHVCVCGALVSRLGHHGLSCPRSAGRQQRHAALNEIIKRALSSSGIPSILEPPGLSRDDGKRPDGLTLIPWSMGKALLWDATCVDTLAPSHIGSTSKKSGSAANSAEDFKHRRYSCLIPNYHFLALGVETLGPWGEDAKALVKEIGAKLSFSSGETRSTFYLTQRISLAIQRGNAASVLGTLPDTVSMDEVFYL

SEQ ID NO: 7388 - protein, 886 aa, Galerucella calmariensis
MNMKSSVRLLRRIPRGARVTVADKLAQIINRCTTTNSIHAWEELFTFAFLVLNIPQNKSQKESLTAIIKQRVKLLSSSKPVPTNLKPAKSSLWRRIESKVADGDIRGAVRLISSDDTLAPNDHQTLEALRQKHPKPSRPLTFPDPPCDTDEACLVVSNDDVYKAILSFPNGSAGGMDGIRPQHLKDLLFRALGEASTRLLTAITSLCNLMLAGKVNQEACKYLYGASLCALNKKDGGVRPIAVGCTLRRLVSKLGCLHIKAVLGEYFRPKQMGFGTNGGCEAMTHAARLYRMTPSDFTKVILKIDVKNAFNSLERDTLLQAVKQKTPQLFPYLWQCYATPSQLLYNHALISSEVGSQQGDPLGPMTFSLAIHPIIETLNSELNIWYLDDGCLGGPADCVLEDLKRIIELFKSIGLELNFNKCEIHFCSSSPSDDLQSILNSFQEVTPGIRLVRDEDLILLGAPILEDAMPAIFEAKLHNYYLMSQRLQNLQPHVALYLLRHCFALPKLTYLLRTTPSWKSSDILDEFDRTTAQNLESILNIKLDERQITQATLPIKFGGLGIRRAADFAIPAFLASSHFVSNLVGSILPPSFCDGEISYVKEATDLWKTVCPDTEFPECPGIQKNWDLPMVKKQFDSLLNLSSVDDARLLASIEKESSAWLHAVPSSNIGTLLDGTSLRIGISLRLGAPLCEEHVCVCGALVSRLGHHGLSCPRSAGRQQRHAALNEIIKRALSSSGIPSILEPPGLSRDDGKRPDGLTLIPWSMGKALLWDATCVDTLAPSHIGSTSKKSGSAANSAEDFKHRRYSCLIPNYHFLALGVETLGPWGEDAKALVKEIGAKLSFSSGETRSTFYLTQRISLAIQRGNAASVLGTLPDTVSMDEVFYL

SEQ ID NO: 7389 - protein, 935 aa, Galerucella tenella
MLKISSLNKGLGSMPLQHFKIHKRRCHPQLTPDTDGASSDQNFSFEETIMNMKSSVRLLRRIPRGARVTVADKLAQIINRCTTTNSIHAWEELFTFAFLVLNIPQNKSQKESLTAIIKQRVKLLSSSKPVPTNLKPAKSSLWRRIESKVADGDIRGAVRLISSDDTLAPNDHQTLEALRQKHPKPSRPLTFPDPPCDTDEACLVVSNDDVYKAILSFPNGSAGGMDGIRSQHLKDLLFRALGEASTRLLTAITSLCNLMLAGKVNQEACKYLYGASLCALNKKDGGVRPIAVGCTLRRLVSKLGCLHIKAVLGEYFRPKQMGFGTNGGCEAMTHAARLYRMTPSDFTKVILKIDVKNAFNSLERDTLLQAVKQKTPQLFPYLWQCYATPSQLLYNHALISSEVGSQQGDPLGPMTFSLAIHPIIETLNSELNIWYLDDGCLGGPADCVLEDLKRILELFKSIGLELNFNKCEIHFCSSSPSDDLQSILNSFQEVTPGIRLVRDEDLILLGAPILEDAMPAIFEAKLHNYYLMSQRLQNLQPHVALYLLRHCFALPKLTYLLRTPPSWKSSDILDEFDRTTAQNLESILNIKLDERQITQATLPIKFGGLGIRRAADFAIPAFLASSHFVSNLVGSILPPSFCDGEISYVKEATDLWKTVCPDTEFPECPGIQKNWDLPMVKKQFDSLLNLSSVDDARLLASIEKESSAWLHAVPSSNIGTLLDGTSLRIGISLRLGAPLCEEHVCVCGSLVSRLGHHGLSCPRSAGRQQRHAALNEIIKRALSSSGIPSILEPPGLSRDDGKRPDGLTLIPWSMGKALLWDATCVDTLAPSHIGSTSKKSGSAANSAEDFKHRRYSCLIPNYHFLALGVETLGPWGEDAKALVKEIGAKLSFSSGETRSTFYLTQRISLAIQRGNAASVLGTLPDTVSMDEVFYL

SEQ ID NO: 7390 - protein, 1014 aa, Galerucella tenella
MSNNEEKCRQLLKFCSCGGPDDGNPMILCDVCYKWFHAACVNLLEWDIEELEKDDNSWLCNSCAEVTTQTLDDPALGNPASENQCPECFRIFKGRKGVKIHKRRCHPQLTPDTDGASSDQNFSFEETIMNMKSSVRLLRRIPRGARVTVADKLAQIINRCTTTNSIHAWEELFTFAFLVLNIPQNKSQKESLTAIIKQRVKLLSSSKPVPTNLKPAKSSLWRRIESKVADGDIRGAVRLISSDDTLAPNDHQTLEALRQKHPKPSRPLTFPDPPCDTDEACLVVSNDDVYKAILSFPNGSAGGMDGIRPQHLKDLLFRALGEASTRLLTAITSLCNLMLAGKVNQEACKYLYGASLCALNKKDGGVRPIAVGCTLRRLVSKLGCLHIKAVLGEYFRPKQMGFGTNGGCEAMTHAARLYRMTPSDFTKVILKIDVKNAFNSLERDTLLQAVKQKTPQLFPYLWQCYATPSQLLYNHALISSEVGSQQGDPLGPMTFSLAIHPIIETLNSELNIWYLDDGCLGGPADCVLEDLKRIIELFKSIGLELNFNKCEIHFCSSSPSDDLQSILNSFQEVTPGIRLVRDEDLILLGAPILEDAMPAIFEAKLHNYYLMSQRLQNLQPHVALYLLRHCFALPKLTYLLRTTPSWKSSDILDEFDRTTAQNLESILNIKLDERQITQATLPIKFGGLGIRRAADFAIPAFLASSHFVSNLVGSILPPSFCDGEISYVKEATDLWKTVCPDTEFPECPGIQKNWDLPMVKKQFDSLLNLSSVDDARLLASIEKESSAWLHAVPSSNIGTLLDGTSLRIGISLRLGAPLCEEHVCVCGALVSRLGHHGLSCPRSAGRQQRHAALNEIIKRALSSSGIPSILEPPGLSRDDGKRPDGLTLIPWSMGKALLWDATCVDTLAPSHIGSTSKKSGSAANSAEDFKHRRYSCLIPNYHFLALGVETLGPWGEDAKALVKEIGAKLSFSSGETRSTFYLTQRISLAIQRGNAASVLGTLPDTVSMDEVFYL

SEQ ID NO: 7391 - protein, 1011 aa, Galerucella tenella
MEVEGQSQAKFCSCGGPDDGNPMILCDGCYKWFHAACVNLLEWDIEELEKDDNSWLCNSCVEVTTQTLDDPALGNPASENQCPECFRIFKGRKGVKIHKRRCHPQLTPDTDGASSDQNFSFEETIMNMKSSVRLLRRIPRGARVTVADKLAQIINRCTTTNSIHAWEELFTFAFLVLNIPQNKSQKESLTAIIKQRVKLLSSSKPVPTNLKPAKSSLWRRIESKVADGDIRGAVRLISSDDTLAPNDHQTLEALRQKHPKPSRPLTFPDPPCDTDEACLVVSNDDVYKAILSFPNGSAGGMDGIRPQHLKDLLFRALGEASTRLLTAITSLCNLMLAGKVNQEACKYLYGASLCALNKKDGGVRPIAVGCTLRRLVSKLGCLHFKADLGEYFRPKQMGFGTNGGCEAMTHAARLYRMTPSDFTKVILKLDVKNAFNSLERDTLLQAVKQKTPQLFPYLWQCYATPSQLLYNHALISSEVGSQQGDPLGPMTFSLAIHPIIETLNSELNIWYLDDGCLGGPADCVLEDLKRIIELFKSIGLELNFNKCEIHFCSSSPSDDLQSTLNSFQEVTPGIRLVRDEDLILLGAPILEDAMPAIFEAKLHNYYLMSQRLQNLQPHVALYLLRHCFALPKLTYLLRTTPSWKSSDILDEFDRTTAQNLESILNIKLDERQITQATLPIKFGGLGIRRAADFAIPAFLASSHFVSNLVGSILPPSFCDGEISYVKEAMDLWKTVCPDTEFPECPGIQKNWDLPMVEKQFDSLLNLSSVDDARLLASIEKESSAWLHAVPSSNIGTLLDGTSLRIGISLRLGAPLCEEHVCVCGALVSRLGHHGLSCPRSAGRQQRHAALNEIIKRALSSSGIPSILEPPGLSRDDGKRPDGLTLIPWSMGKALLWDATCVDTLAPSHIGSTSKKSGSAANSAEDFKHRRYSCLIPNYHFLALGVETLGPWGEDAKALVKEIGAKLSFSSGETRSTFYLTQRISLAIQRGNAASVLGTLPDTVSMDEVFYL

SEQ ID NO: 7392 - protein, 1016 aa, Galerucella tenella
MSLSNNEEKCRQLLKFCSCGGPDDGNPMILCDVCYKWFHAACVNLLEWDIEELEKDDNSWLCNSCAEVTTQTLDDPALGNPASENQCPECFRIFKGRKGVKIHKRRCHPQLTPDTDGASSDQNFSFEETIMNMKSSVRLLRRIPRGARVTVADKLAQIINRCTTTNSIHAWEELFTFAFLVLNIPQNKSQKESLTAIIKQRVKLLSSSKPVPTNLKPAKSSLWRRIESKVADGDIRGAVRLISSDDTLAPNDHQTLEALRQKHPKPSRPLTFPDPPCDTDEACLVVSNDDVYKAILSFPNGSAGGMDGIRPQHLKDLLFRALGEASTRLLTAITSLCNLMLAGKVNQEACKYLYGASLCALNKIDGGVRPIAVGCTLRRLVSKLGCLHIKAVLGEYFRPKQMGFGTNGGCEAMTQAARLYRMTPSDFTKVILKIDVKNAFNSLERDTLLQAVKQKTPQLFPYLWQCYATPSQLLYNHALISSEVGSQQGDPLGPLTFSLAIHPIIETLNSELNIWYLDDGCLGGPADCVLEDLKRIIELFKSIGLELNFNKCEIHFCSSSPSDDLQSILNSFQEVTPGIRLVRDEDLILLGAPILEDAMPAIFEAKLHNYYLMSQRLQNLQPHVALYLLRHCFALPKLTYLLRTTPSWKSSDILDEFDRTTAQNLESILNIKLDERQITQATLPIKFGGLGIRRAADFAIPAFLASSHFVSNLVGSILPPSFCDGEISYVKEATDLWKTVCPDTEFPDCPGIQKNWDLPMVKKQFDSLLNLSSVDDARLLASIEKESSAWLHAVPSSNIGTLLDGTSLRIGISLRLGAPLCEEHVCVCGALVSRLGHHGLSCPRSAGRQQRHAALNEIIKRALSSSGIPSILEPPGLSRDDGKRPDGLTLIPWSMGKALLWDATCVDTLAPSHIGSTSKKSGSAANSAEDFKHRRYSCLIPNYHFLALGVETLGPWGEDAKALVKEIGAKLSFSSGETRSTFYLTQRISLAIQRGNAASVLGTLPDTVSMDEVFYL

SEQ ID NO: 7393 - protein, 1016 aa, Galerucella pusilla
MSLSNNEEKCRQLLKFCSCGGPDDGNPMILCDVCYKWFHAACVNLLEWDIEELEKDDKSWLCNSCAEVTTQTLDDPALGNPASENQCPECFRIFKGRKGVKIHKRRCHPQLTPDTDGASSDQNFSFEETIMNMKSSVRLLRRIPRGARVTVADKLAQIINRCTTTNSIHAWEELFTFAFLVLNIPQNKSQKESLTAIIKQRVKLLSSSKPVPTNLKPAKSSLWRRIESKVADGDIRGAVRLISSDDTLAPNDHQTLEALRQKHPKPSRPLTFPDPPCDTDEACLVVSNDDVYKAILSFPNGSAGGMDGIRPQHLKDLLFRALGEASTRLLTAITSLCNLMLAGKVNQEACKYLYGASLCALNKKDGGVRPIAVGCTLRRLVSKLGCLHIKAVLGEYFRPKQMRFGTNGGCEAMTHAARLYRMTPSDFTKVILKIDVKNAFNSLERDTLLQAVKQKTPQLFPYLWQCYATPSQLLYNHALISSEVGSQQGDPLGPMTFSLAIHPIIETLNSELNIWYLDDGCLGGPADCVLEDLKRIIELFKSIGLELNFNKCEIHFCSSSPSDDLQSILNSFQEVTPGIRLVRDEDLILLGAPILEDAMPAIFEAKLHNYYLMSQRLQNLQPHVALYLLRHCFALPKLTYLLRTTPSWKSSDILDEFDRTTAQNLESILNIKLDERQITQATLPIKFGGLGIRRAADFAIPAFLASSHFVSNLVGSILPPSFCDGEISYVKEATDLWKTVCPDTEFPECPGIQKNWDLPMVKKQFDSLLNLSSVDDARLLASIEKESSAWLHAVPSSNIGTLLDGTSLRIGISLRLGAPLCEEHVCVCGALVSRLGHHGLSCPRSAGRQQRHAALIEIIKRALSSSGIPSILEPPGLSRDDGKRPDGLTLIPWSMGKALLWDATCVDTLAPSHIGSTSKKSGSAANSAEDFKHRRYSCLIPNYHFLALGVETLGPWGEDAKALVKEIGAKLLFSSGETRSTFYLTQRISLAIQRGNAASVLGTLPDTVSMDEVFYL

SEQ ID NO: 7394 - protein, 1129 aa, Nysson spinosus
MTLLIRPNGFVGLPTRRALSTTGPNNEKQYNLRRGPRLVGPVVTSSPSPNPPSRTVADHRPGPSVPSAPSSQGLPLACPNCARSFKTKTGLGVHRHHAHPEEANAEVNIARIKRHWSAEELRLMAREEALAVTRGVRFINQHLCAVVPNRSLEAIKGARRGQLYRALVAAALTDIEATSTRASSSSSPPSSCPPSTPSIPPLVSHPTSIRAGSSSSSPPIRPPPTSSTVPLSFPCRARPSRSSFSTSPPSVHWASWYGDFHSAIRILVPVVDNIRGWDTVTLSQIASDHIQGRDVRARIGAWLGNIFPPANTILRRPPILRIVNPGRKVLRRLEYARIQRLFRTNMSRAAREILDSPGDIGSSVPDVETMARHWGPYVTQESVSAPRLRPPPLNSSLEYLWAPVSCEEVSSTKIPTLSAPGPDGIKVRQWGAVPASVKALVFNLVLSSGGFPPSLLTSRTVFVPKKGTASTPADFRPISIMSVVVRHLHKILAERLRASGLVDLRQRCFDDGCGDNVAVLASLLYEARRSLRELHIASLDVAKAFDSVSHHAIYNVLCKFGVPHGLIEYIKHLYRNSSTLFEVNGNRSELFKINRGVRQGDPLSPILFCLVIDELLKSIPPGIGFETSGVRINSIAYADDILLFATTTWGLQSSIGTVEGKANERGLLFNVKKCAVLSLVPSGKDKKIRIVTSPTFRLANGAFILQSSSTSEWRYLGVDFNSSGPKKVRTCISSYLNNISKAPLKPQQRLKILRTFLLPRMYHSLVLGKATLGKLRSLDLQVRAAVRNWLRLPKDVPIGFIHAPVAEGGLGVPSLSTGVPGQMLDRLHRLCSSNCEAIRAISESTWVTQRIQWATRALTRDGHLLASKYLRDKWWSARLHSSADGFELRECHRSPLSSGWVDGSSFSIPGRDFIQYVRVRIAALPTAVRTSRGIRRAGRIITCRAGCSSTETAAHVIQGCFRSHGGRVLRHNAVCRTLASGLRKLGWVVHEEPLFDTTEGKRKPDLILQKGQDVKIIDAQVVSGVPPLDVSHDNKVQYYANNLSLVESICSRYKTGKENLVFSSCSVSWRGIWSSKSAEWLLSLGLTKGLLRGITTRVLQGSHTNWSRWNQMTTHISSTSLLSERVGVG

SEQ ID NO: 7395 - protein, 974 aa, Nysson spinosus
MMAREEALAVTRGVRFINQHLVSVVPNRTLEGIKGIRRGQNYRNLVAAALTDLEATSICSDSPAPAPSMRPPPSPTTPLAPASRVPLPPPSTTSPSTAQWAHMYGDFITAIHSLIPVVRNIRGWDSSILSEIAQDYVEGCDVRSRIGAWLSGVFPPPVTQPRRLRRFNIVNPSKKALRRAEYARIQRMFRSNMSRAAREILDSPGGAESSVPDVQSMAAHWGPYVTQDSVPTPHSVPPPCNESLEYLWGPISCEEVTSTKLPLLSAPGPDGIKVRQWRAVPSSIVALLYNIILAAGGFPPSYLASRTVFVPKKGHSSSPADFRPISIMSVVVRHLHKIIAERLRTSGLVDLRQRCFDDGCSENVAVLASLLHESRSLRRELHIASLDLAKAFDSVSHFAIFNTLCRLGVPRDMIEYFKFLYSNSTTTFEVNGERSNLFKINRGVRQGDPLSPILFCLVVDELLHSIPPQIGFEIAGQRINSIAYADDILIFASTKWGLQSCLEAVERTANQRGLSFNAQKCAALSLVPSGRDKKVKIISTQSFHLANGAFIPQTTSSVEWRYLGVDFSPSGPKSSRVDLSLYLDRITRAPLKPQQRLKIVRSFLLPRVYHSLVLGNTTLGKLRSLDLQIRAAVRKWVHLPHDVPISFIHATVSEGGLGIPALSTNIPGLMLGRLRNLSNSNSIAIRAIYESAWVSRRIRWATRALTRDNNVLATKYLRDRWWASLLHCSADGFELRECRNSPLSSRWVDAFAHAIPGRDFIQHVRVRIAALPSAVRTSRGIRRLGRDIRCRAGCSSTETAAHIIQGCFRTHGGRILRHNAICRVLAANLRKLGWAVHEEPVFHTQEGCRKPDLLLVRPNEVNVIDAQIVSGVPPLNDSHERKVRYYANNASLVERIVMEHNVPKDNVTFSSCTISWRGIWASRSAEWLLRLGLSMGVLRGITTRVLQGSHTNWNRWNRLTHHLPSNAFERQGIG

SEQ ID NO: 7396 - protein, 974 aa, Nysson spinosus
MMAREEALAVTRGVRFINQHLVSVVPNRTLEGIKGIRRGQNYRNLVAAALTDLEATSICSDSPAPAPSMRPPPSPTTPLAPVSRVPLPPPSTTSPSTAQWAHMYGDFITAIHSLIPVVRNIRGWDSSILSEIAQDYVEGCDVRSRIGAWLSGVFPPPVTQPRRLRRFNIVNPSKKALRRAEYARIQRMFRSNMSRAAREILDSPGGAESSVPDVQSMAAHWGPYVTQDSVPTPHSVPPPCNESLEYLWGPISCEEVTSTKLPLLSAPGPDGIKVRQWRAVPSSIVALLYNIILAAGGFPPSYLASRTVFVPKKGHSSSPADFRPISIMSVVVRHLHKIIAERLRTSGLVDLRQRCFDDGCSENVAVLASLLHESRSLRRELHIASLDLAKAFDSVSHFAIFNTLCRLGVPRDMIEYFKFLYSNSTTTFEVNGERSNLFKINRGVRQGDPLSPILFCLVVDELLHSIPPQIGFEIAGQRINSIAYADDILIFASTKWGLQSCLEAVERTANQRGLSFNAQKCAALSLVPSGRDKKVKIISTQSFHLANGAFIPQTTSSVEWRYLGVDFSPSGPKSSRVDLSLYLDRITRAPLKPQQRLKIVRSFLLPRVYHSLVLGNTTLGKLRSLDLQIRAAVRKWVHLPHDVPISFIHATVSEGGLGIPALSTNIPGLMLGRLRNLSNSNSIAIRAIYESAWVSRRIRWATRALTRDNNVLATKYLRDRWWASLLHCSADGFELRECRNSPLSSRWVDAFAHAIPGRDYIQHVRVRIAALPSAVRTSRGIRRLGRDIRCRAGCSSTETAAHIIQGCFRTHGGRILRHNAICRVLAANLRKLGWAVHEEPVFHTQEGCRKPDLLLVRPNEVNVIDAQIVSGVPPLNDSHERKVRYYANNASLVERIVMEHNVPKDNVTFSSCTISWRGIWASRSAEWLLRLGLSMGVLRGITTRVLQGSHTNWNRWNRLTHHLPSNAFERQGIG

SEQ ID NO: 7397 - protein, 994 aa, Nysson spinosus
MNEEIDVSRSKRHWSAEELRMMAREEALAVTRGVRFINQHLLSVVPNRTLEGIKGIRRGQNYRSLVASALTDLEATSVCSNSPTPAPSMHPPPSPTSPPPPASCESPPLPSSISPSTAHWAHMYGDFSSAIHALIPVVRNIRGWESSTLSQIAQDHVEGSEVLPRISAWLGRVFPPPPLLPRRPRQFNTVNPSKKALRRIEYARIQRMFRSNMSRASREILDSPGGAGSSVPNVSSMAAHWGPYVTQESVPAPCSVPPPFNKELEFLWGPVSCEEVTSTKLPLLSAPGPDGIKVRQWRAVPPSIIALLYNTILSSGGFPPSFLASRTVFVPKKGRSASPADFRPISIMSVVVRHLHKVIAERLRSSGLVDFRQRCFDDGCSENVAVLASVLHESRSLRRELHIASLDLAKAFDSVSHYAIFNTLGRLGVPRGMIDYFKFLYDNSSTTFEVNGERSNLFKINRGVRQGDPLSPILFCLVVDELLHSIPAEVGFEISGYRINSIAYADDILVFASTSWGLQVCLDMIEKTASARGLQFNAQKCAALSLVPSGRDKKIKIISTPSFHLASGVYIPQTSSSAEWRYLGVDFSPSGPKSSRVDLSLYLDRITRAPLKPQQRLKIVRSFLLPRIYHSLVLGSTTLGKLRSLDLQIRAAVRKWVHLPHDVPISFIHASVSEGGLGIPALSTSIPGQMLGRLRNLSNSHSAAIRAVFESAWVSRRIRWATRALTRGDKILSSKHLRDKWWASLLHSSADGFEVRECHDSPLSSRWVESFAHAIPGRDFVQHVRVRISALPSAVRTSRGTRRVGRDIRCRAGCASTETAAHIIQGCFRTHGGRILRHNAICRVLAANLRKLGWAVREEPIFQTHQGCRKPDLLLVRPNEVNIIDAQIVSGVPPLNESHERKVRYYASNTSLVETIQKEHNVPKENIRFSSCTLSWRGIWSSRSADFLLKLGLTNGVLRGITTRVLQGSHTNWSRWNRLTHHLPSSVMERQGVG

SEQ ID NO: 7398 - protein, 974 aa, Nysson spinosus
MMAREEALAVTRGVRFINQHLVSVVPNRTLEGIKGIRRGQNYRNLVAAALTDLEATSICSDSPAPAPSMRPPPSPTTPLAPASRVPLPPPSTTSPSTAQWAHMYGDFITAIHSLIPVVRNIRGWDSSILSEIAQDYVEGCDVRSRIGAWLSGVFPPPVTQPRRLRRFNIVNPSKKALRRAEYARIQRMFRSNMSRAAREILDSPGGAESSVPDVQSMAAHWGPYVTQDSVPTPHSVPPPCNESLEYLWGPISCEEVTSTKLPLLSAPGPDGIKVRQWRAVPSSIVALLYNMILAAGGFPPSYLASRTVFVPKKGHSSSPADFRPISIMSVVVRHLHKIIAERLRTSGLVDLRQRCFDDGCSENVAVLASLLHESRSLRRELHIASLDLAKAFDSVSHFAIFNTLCRLGVPRDMIEYFKFLYSNSTTTFEVNGERSNLFKINRGVRQGDPLSPILFCLVVDELLHSIPPQIGFEIAGQRINSIAYADDILIFASTKWGLQSCLEAVERTANQRGLSFNAQKCAALSLVPSGRDKKVKIISTQSFHLANGAFIPQTTSSVEWRYLGVDFSPSGPKSSRVDLSLYLDRITRAPLKPQQRLKIVRSFLLPRVYHSLVLGNTTLGKLRSLDLQIRAAVRKWVHLPHDVPISFIHATVSEGGLGIPALSTNIPGLMLGRLRNLSNSNSIAIRAIYESAWVSRRIRWATRALTRDNNVLATKYLRDRWWASLLHCSADGFELRECRNSPLSSRWVDAFAHAIPGRDFIQHVRVRIAALPSAVRTSRGIRRLGRDIRCRAGCSSTETAAHIIQGCFRTHGGRILRHNAICRVLAANLRKLGWAVHEEPVFHTQEGCRKPDLLLVRPNEVNVIDAQIVSGVPPLNDSHERKVRYYANNASLVERIVMEHNVPKDNVTFSSCTISWRGIWASRSAEWLLRLGLSMGVLRGITTRVLQGSHTNWNRWNRLTHHLPSNAFERQGIG

SEQ ID NO: 7399 - protein, 994 aa, Nysson spinosus
MNEEIDVSRSKRHWSAEELRMMAREEALAVTRGVRFINQHLLSVVPNRTLEGIKGIRRGQIYRSLVASALTDLEATSVCSNSPTPAPSMHPPPSPTSPPPPASCESPPLPSSISPSTAHWAHMYGDFSSAIHALIPVVRNIRGWESSTLSQIAQDHVEGSEVLPRISAWLGRVFPPPPLLPRRPRQFNTVNPSKKALRRIEYARIQRMFRSNMSRASREILDSPGGAGSSVPNVSSMAAHWGPYVTQESVPAPCSVPPPFNKELEFLWGPVSCEEVTSTKLPLLSAPGPDGIKVRQWRAVPPSIIALLYNTILSSGGFPPSFLASRTVFVPKKGRSASPADFRPISIMSVVVRHLHKVIAERLRSSGLVDFRQRCFDDGCSENVAVLASVLHESRSLRRELHIASLDLAKAFDSVSHYAIFNTLGRLGVPRGMIDYFKFLYDNSSTTFEVNGERSNLFKINRGVRQGDPLSPILFCLVVDELLHSIPAEVGFEISGYRINSIAYADDILVFASTSWGLQVCLDMIEKTASARGLQFNAQKCAALSLVPSGRDKKIKIISTPSFHLASGVYIPQTSSSAEWRYLGVDFSPSGPKSSRVDLSLYLDRITRAPLKPQQRLKIVRSFLLPRIYHSLVLGSTTLGKLRSLDLQIRAAVRKWVHLPHDVPISFIHASVSEGGLGIPALSTSIPGQMLGRLRNLRNSHSAAIRAVFESAWVSRRIRWATRALTRGDKILSSKHLRDKWWASLLHSSADGFEVRECHDSPLSSRWVESFAHAIPGRDFVQHVRVRISALPSAVRTSRGIRRVGRDIRCRAGCASTETAAHIIQGCFRTHGGRILRHNAICRVLAANLRKLGWAVQEEPIFQTHQGCRKPDLLLVRPNEVNIIDAQIVSGVPPLNESHERKVRYYASNTSLVETIQKEHNVPKENIRFSSCTLSWRGIWSSRSADFLLKLGLTNGVLRGITTRVLQGSHTNWSRWNRLTHHLPSSVMERQGVG

SEQ ID NO: 7400 - protein, 975 aa, Nysson spinosus
MMAREEALAVARGIRFINQHLAAIVPNRTLDAIKGVRRGQRYRALVAAATVDIEATSTCADPRPSSLSMCPPPASPSPPHSSNIPLPMSSPSSPISARWSSMYGDFSTAIRSLIPVVGNIRGWDSLALIQLAQSHLEGSDVRVKAGEWLSGVFPEPSFSPRRPRNFQIVNPSRKTLRRMEYARIQRLFRTNMSRAAREILDPPGDTGSSVPGVELMADHWGPFVTQESVLTPYPAPPPTDRNLEFLWSPISCEEVLSTKLSILSAAGSDGIRVRQWRAIPASIKALFYNTILSSGGFPPSLLVSRTVFVPKKGKSSNPADFRPISVMSVVVRHLHKIIAERLRASGLVDLRQRCFDDGCGDNVSVLASVLHESRSTLSELHIASLDVAKAFDSVSHHAILGVLRKLGVPRGLTSYIQHLYENSSTIFEANGARSGLFKINRGVRQGDPLSPVLFCLVVDELLNAIPSEIGFKMCDTQINGIAYADDILIFASTTWGLQSSLVAVERVARARGLLFNPQKCVALSLVPSGKDKKIKVQSSPTFLLSDGSFIPQTTSTAEWRYLGVDFQPTGPKKLRISLTQYLNNISKAPLKPQQRLKIVRCFLLPRLYHSLVLGKVTLGKLRALDLQVRSSVRHWLRLPKDIPISFIHSPVAQGGLGIPALATSVPGQMRDRLLRLSVSSSAAIRAVAESTWVVRRTQWATRALTRDGHLLASKYLRDKWWASRLHDSADGFEVRECHRSPLSSRWVDSTAHAIPGRDFIQFVRVRIAALPTAVRTSRGLRRSSQEIRCRAGCASTETAAHVIQGCFRTHGGRILRHNAVCRVLASGFRKLGWSVLEEPVFVTSEGRRKPDLVLAKGQEVKVLDAQIVSGVPPLDESHAKKVQYYAGNSSLAECICRQLNTQKENVAFSSCTLSWRGIWSARSAEWLLSQGLTSGLLRGITTRVLQGSHTNWTRWNCMTTNIASTSNVWNREGVG

SEQ ID NO: 7401 - protein, 914 aa, Harmonia axyridis
MVNIIMDRHRQHTTYDPNNENAQQILDTLKQKLSVYSERLRRYNESYRRKQDNMIFENSERKFYRMLNNNMSATPGSYPTVEDIENFWTDQLATPTPYNSQADWIRNEEKSCETMEQMPHNAVSIEEFHEILKNTHNWKSPGPDGIHNFWLKKFWCIHGRLVETINDVISNPTEMPKFLTTGTTYLLPKDMQHTADPSKYRPITCLPTIYKIVTSCIASRIYKHCETNNIMTAQQKGCSKNALGSKELLIIDSIICNQAFKKHRNLFMTYFDYKKAFDSIPHGWLTKILEIYKIDPITINFLKYAMCNWRTNIELSTANITTKDIPIKRGIFQGDSLSPLWFCLALNPLSKQLNATEKGFNVKGNRNNIALNHLLYMDDLKLITGNKNHLQIMVKLVENFSEDVGMKFGLDKCRTISVVRGKIQDEPIALSNGQEIEAMKSDDLYKYLGMKQNRRINHQRMKEDLTTEFIRRINKILKTNLNSKNMTRAINTYACSILTYSFGIIPWTKTDMENLQRKMRTLLTKAHKHHPKSSIERTTLPRNKGGRGLLDIMELAHGQIECLRTYFKDKSGTSEIYKVLCEADESTPLQLHKEQLSYNHQTIQEKLQRWREKPLHGRHFNEVNQDHVDIEASNYWLTSGAMYPETEGFLLAIQDQVISTKNYCKHIIKDRTITDDRCRYGCPTNETIQHITGGCQMFAGNKYKERHDAVGKILHQEMATKLTLINSEKVPYYKYRPETILENERYKLYWDRTVLTDKTVPHNRPDILLVDKQQKAAILIDVAIPNNNNMRQKEVEKISKYRDLEFQIKRQWGMISTRTIPIIISTTGIVPKNLKRNIKQLGLSEYVCNIMQKAVLLGTARTVRKFLGSEGQVQGSRVRGPEVRREPEVRREPGGPQRPDTTELCPSDILNIWD

SEQ ID NO: 7402 - protein, 1268 aa, Harmonia axyridis
MMVNLRNRNIEPLPEVRQGVSGAGAGHDSMRDVGDRVLRRRASVEQNATPPQSQHSRRRITRVSPTAEGATQDPQPALTQAGLPRRRMKWTSSINETIMRIYYEVTNMEEDKIGYRQKLFAEFHRNYPELQVSEQRVADQYRVILRNKLVPDERLNTIKNEVQLRLQNRNLTNNETTIEENYDCAENQHNINAQMNSEEQNNTDMIAISDAQRRNIYAAPVENPEEDQRELLERLFATMNRCVIDFEGSDPLRRPLLPRLRTSKKLSHLLVMTNKEIIPKYLSDYHDLESLHLIIYCAAFSIATVLGVKPKPKSQQPAREQQQNKPHWQKRLEDKVHSIRQDIGRLTQFAKGSPSRRLQRMVNIIMDRHRQHTTYDPNNENAQQILDTLKQKLSVYSERLRRYNESYRRKQDNMIFENSERKFYRMLNNNMSATPGSYPTVEDIENFWTDQLATPTPYNSQADWIRSEEKSCETIEQMSHNAVSIEEFHEILKNTHNWKSPGPDGIHNFWLKKFWCIHGRLVETINGVISNPTEMPKFLTTGTTYLLPKDMQHTADPSKYRPITCLPTIYKIITSCIASRIYKHCETNNIMTAQQKGCSKNALGSKELLIIDSIICNQAFKKHRNLFMTYFDYKKAFDSIPHGWLTKILEIYKIDPITINFLKYAMCNWRTNIELSTANITTKDIPIKRGIFQGDSLSPLWFCLALNPLSKQLNATGKGFNVKGNRNTIALNHLLYMDDLKLITGNKNHLQIMVKLVENFSEDVGMKFGLDKCRTISVVRGKIQDEPIALSNGQEIEAMKSDDLYKYLGMKQNRRINHQRMKEDLTTEFIRRINKILKTNLNSKNMTRAINTYACSILTYSFGIIPWTKTDIENLQRKMRTLMTKAHKHHPKSSIERTTLPRNKGGRGLLDIMELAHGQIECLRTYFKDKSGMSEIYKVLCEADESTPLQLHKEQLSYNHQTIQEKLQRWREKPLHGRHFNEVNQDHVDIEASNYWLTSGAMYPETEGFLLAIQDQVISTKNYCKHIIKDRTITDDRCRYGCPTNETIQHITGGCQMFAGNEYKERHDAVGKILHQEMATKLTLIHSEKVPYYKYRPETILENERYKLYWDRTVLTDKTVPHNRPDILLVDKHQKSALLIDVAIPNNNNMRQKEVEKISKYRDLEFQIKRQWGMISTRTIPIIISTTGIVPKNLKRNIKQLGLSEYICNIMQKAVLLGTARTVRKFLGNEGQVQGTRVRGPEVRREPGGPQGPDTTELYPSDILNIWD

SEQ ID NO: 7403 - protein, 1268 aa, Harmonia axyridis
MMVNLRNRNIEPLPEVRQGVSGAGAGHDSMRDVGDRVLRRRASVEQNATPPQSQHSRRRITRVSPTAEGAAQDPQPALTQAGLPRRRMKWTSSINETIMRIYYEVTNMEEDKIGYRQKLFAEFHRNYPELQVSEQRVADQYRVILRNKLVPDEKLNTIKNEVQLRLQNRNLTNNETTIEENYDCAENQHNINAQMNSEEQNNADVLAISDAQRRNIYAAPVVNPEEDQRELLERLFATMNRCVIDFEGTDPLRRPTLPRLRTSKKLSHLLVMTNKEIIPKYLSDYHDLESLHLIIYCAAFSIATVLGVKPKPKSQQPAREKQQNKPHWQKRLEDKVHSIRQEIGRLTQFAKGSPSRRLQKMVHILMDRHRQHTTYDPNNENAQQILDTLKQKLSVYSERLRRYNESYRRKHDNMIFENSERKFYRMLNNNMSATPGSYPTVEDIENFWTDQLATPTPYNSQADWIRNEEKSCETMEQMPHNAVSIEEFHEILKNTHNWKSPGPDGIHNFWLKKFWCIHGRLVETINDVISNPTEMPKFLTTGTTYLLPKDMQHTADPSKYRPITCLPTIYKIITSCIASRIYKHCETNNIMTAQQKGCSKNALGSKELLIIDSIICNQAFKKHRNLFMTYFDYKKAFDSIPHGWLTKILEIYKIDPITINFLKYAMCNWRTNIELSTANITTKDIPIKRGIFQGDSLSPLWFCLALNPLSKQLNATEKGFNVKGNRNNIALNHLLYMDDLKLITGNKNHLQIMVKLVENFSEDVGMKFGLDKCSTISVVRGKIQDEPIALSNGQEIEAMKSDDLYKYLGMKQNRRINHQRMKEDLTTEFIRRINKILKTNLNSKNMTRAINTYACSILTYSFGIIPWTKTDMENLQRKMRTLMTKAHKHHPKSSIERTTLPRNKGGRGLLDIMELAHGQIECLRTYFKDKSGTSEIYKVLCEADESTPLQLHKEQLSYNHQTIQEKLQRWREKPLHGRHFNEVNQDHVDIEASNYWLTSGAMYPETEGFLLAIQDQVISTKNYCKHIIKDRTITDDRCRYGCPTNETIQHITGGCQMFAGNEYKERHDAVGKILHQEMATKLTLINSEKVPYYKYRPETILENERYKLYWDRTVLTDKTVPHNRPDILLVDKQQKAAILIDVAIPNNNNMRQKEVEKISKYRDLEFQIKRQWGMISTRTIPIIISTTGIVPKNLKRNIKQLGLSEYICNIMQKAVLLGTARTVRKFLGSEGQVQGSRVRGPEVRREPGGPQGPDTTELSPSDILNIWD

SEQ ID NO: 7404 - protein, 1267 aa, Harmonia axyridis
MVNLRNRNIEPLPEVRQGVSGAGAGHDSMRDVGDRVLRRRASVEQNATPPQSQQSRRRITRVSPTAEGAAQDPQPALTQAGPPRRRMKWTSSINETIMRIYYEVTNMEEDKIGYRQKLFAEFHRNYPELQVSEQRVADQYRVILRNKLVPDERLNTIKNEVQLRLQNRNLTNNETTIEENYDCAENQHNINAQMNSEEQNNADVLAISDAQRRNIYAAPVVNPEEDQRELLERLFATMNRCVIDFEGTDPLRRPILPRLRTSKKLSHLLVMTNKEIIPKYLSDYHDLESLHLIIYCAAFSIATVLGVKPKPKSKQPAREKQQNKPHWQKRLEDKVHSIRQEIGRLTQFAKGSPSRRLQKMVNIIMDRHRQHTTYDPNNENAQQILDTLRQKLSVYSERLRRYNESYRRKQDNVIFENSERKFYRMLNNNISATPRSYPTVEDIENFWTDQLATPTPYNSQADWIRNEEKSYETMEQMPHNAVSIEEFHEVLKNTHNWKSPGPDGIHNFWLKKFWCIHGRLVETINDVISNPTEMPKFLTTGTTYLLPKDMQHTADPSKYRPITCLPTIYKIITSCIASRIYKHCETNNIMTAQQKGCSKNALGSKELLIIDSIICNQAFKKHKNLFMTYFDYKKAFDSIPHGWLTKILEIYKIDPITINFLKYAMCNWRTNIELSAANITTKDIPIKRGIFQGDSLSPLWFCLALNPLSKQLNATEKGFNVKGNRNNIALNHLLYMDDLKLITGNKNHLQIMVKLVENFSEDVGMKFGLDKCRTISVVRGKIQDEPIALSNGQEIEAMKSDDLYKYLGMKQNRRINHQRMKEDLTTEFIRRINKILKTNLNSKNMTRAINTYACSILTYSFGIIAWTKTDMENLQRKMRTLMTKAHKHHPKSSIERTTLPRNKGGRGLLDLMELAHAQIECLRTYFKDKSGTSEIYKILCEADESTLLQLHKEQLSYNHQTIQEKLQRWREKPLHGRHFNEVNQDHVDIEASNYWLTSGAMYPETEGFLLAIQDQVISTKNYCKHIIKDRTITDDRCRYGCPTNETIQHITGGCQMFAGNEYKEGHDAVGKILHQEMATKLTLIHSEKVPYYKYRPETILENERYKLYWDRTVLTDKTVPHNRPDILLVDKQQKAAILIDVAIPNNNNMRQKEVEKISKYRDLEFQIKRQWGMISTRTIPIIISTTGIVPKNLKRNIKQLGLSEYICNIMQKAVLLGTARTVRKFLGSEGQVQGSRVRGPEVRREPGGPQGPDTTELCPSDILNIWD

SEQ ID NO: 7405 - protein, 1268 aa, Harmonia axyridis
MMVNLRNRNIEPLPEVRQGVSGAGAGHDSMRDVGDRVLRRRASVDQNATPPQSQHSRRRITRVSPTAEGAVQDPQPALTQAGLPRRRMKWTSSINETIMRIYYEVTNMEEDKIGYRQKLFAEFHRNYPELQVSEQRVADQYRVILRNKLVPDERLNTIKNEVQLRLQNRNPTNNEVTIEENYDCAENQHNINAQINTEEQNSGDLALARDEQWRNIQTATMENREESRRDLLEQLSVTMNRYFIEFEGTDPLKRPILPRLKTSKKLSHILHIMNKEIIPPFFSNDQNLESLHLITYCAASTISAVLGVKPKPRSEQPAQKKQHNKPHWQNRLEAKVHSLRQDIGRLTQFEKGSLSRKLQKIVDAIMDRHRRHANYDDNNESAQETLDTLKQKLSVYSERLRRYNESYKRKHDNMIFENSEKNFYRMLNEQTSTKLVSPPSAEDMESFWTDQLSTPTPFNSKAHWIRREEKSCETIENMPHSVITSEELQEILKNTHNWKSPGPDGIHNFWLKKFWCLHGRLVEYINNIIHNPTEMPTFLTTGITYLIPKDFQNTMDPSKYRPITCLPTIYKIITSCLASRIYKHCEKNKIITTQQKGCSKNAQGSKEQLVIDSIICNQAFKKHRNLFMTYFDYKKAFDSLPHDWLKKILEIYKIDPIITNFLKLAMDNWKTNIELSTANIKTKLIPIKRGIFQGDSMSPLWFCLALNPLSKQLNATEKGFNIKGNNNTTTLNHLLYMDDLKLITGNKNHLEIMVKLVEHFSKDVGMEFGLDKCRTLSVVRGRIQDEPITLANGQQIEAMKLDDLYKYLGMKQNRRINHQRMKQDLTTEFIRRTKKILKTNLNSRNMTRAINTYACSILTYSFGIVPWSKTDIENLQRKMRTLMTKANKHHPKSSIERTTLPRNKGGRGLTDIMELASGQIESLREYFRDQASTSEFYKILCEADESTPLQLHKEQFSYNHQTNQEKLDRWREKPLHGRHFNEVNQDHVDIEASNYWLTSGAMYPETEGFLLAIQDQVISTRNYCRHIIKDRTITDDRCRYGCPTNETIQHITGGCQMFAGIEYKERHDAVGKILHQEMATKLTLIQSEKVPYYRYRPETILENERYKLYWDRTVLTDKTVPHNRPDILLVDKHQKAAILIDVAIPNNNNLRQKEVEKISKYRDLEFQIKRQWGMISTRTIPIIISTTGIVPKNLKRNIKQLGLSEYICNVMQKAVLLGTARTVRKFLGSEGQVQGSRVRGPEVRRQPGGPQGPDTTELYPSDILNIWD

SEQ ID NO: 7406 - protein, 903 aa, Harmonia axyridis
MDRHRRHANYDANNESAQETLDTLKQKLSVYSERLRRYNESYKRKHDNMIFENSEKNFYRMLNEQTSTKLVSPPSAEDMESFWTDQLSTPTPFNSKAHWIRREEKSCETIENMPHSVITSEELQEILKNTHNWKSPGPDGIHNFWLKKFWCLHGRLVEYINNIIHNPTEMPTFLTTGITYLIPKDFQNTMDPSKYRPITCLPTIYKIITSCLASRIYKHCEKNKIITTQQKGCSKNAQGSKEQLVIDSIICNQAFKKHRNLFMTYFDYKKAFDSLPHGWLKKILEIYKIDPIITNFLKLAMDNWKTNIELSTANIKTKLIPIKRGIFQGDSMSPLWFCLALNPLSKQLNATEKGFNIKGNNNTTTLNHLLYMDDLKLITGNKNHLEIMVKLVEHFSKDVGMEFGLDKCRTLSVVRGRIQDEPIILANGQQIEAMKLDDLYKYLGMKQNRRINHQRMKQDLTTEFIRRTKKILKTNLNSRNMTRAINTYACSILTYSFGIVPWSKTDIENLQRKMRTLMTKANKHHPKSSIERTTLPRNKGGRGLTDIMELASGQIESLREYFRDQASTSEFYKILCEADESTPLQLHKEQFSYNHQTNQEKLDRWREKPLHGRHFNEVNQDHVDIEASNYWLTSGAMYPETEGFLLAIQDQVISTRNYCRHIIKDRTITDDRCRYGCPTNETIQHITGGCQMFAGNEYKERHDAVGKILHQEMATKLTLIQSEKVPYYKYRPETILENERYKLYWDRTVLTDKTVPHNRPDILLVDKHQKAAILIDVAIPNNNNLRQKEVEKISKYRDLEFQIKRQWGMISTRTIPIIISTTGIVPKNLKRNIKQLGLSEYICNVMQKAVLLGTARTVRKFLGSEGQVQGSRVRGPEVRRQPGGPQGPDTTELYPSDILNIWD

SEQ ID NO: 7407 - protein, 1268 aa, Harmonia axyridis
MMVNLRNRNIEPLPEVRQGVSGAGAGHDSMRDVGDRVLRRRASVEQNATPPQSQHSRRRITRVSPTAEGAAQDPQPALTQAGLPRRRMKWTSSINETIMRIYYEVTNMEEDKIGYRQKLFAEFHRNYPELQVSEQRVADQYRVILRNKLVPDERLNTIKNEVQLRLQNRNLTNNETTIEENYDCAENQHNINAQMNSEEQNKADVIAISDAQRRNIYAAPVVNPEEDQRELLERLFATMNRCVIDFEGTDPLRRPILPRLRTSKKLSHLLAMTNKEIIPKYLSDYHDLESLHLIIYCAAFSIATMLGVKPKPKSQQPAREKQQNKPHWQKRLEDKVHSIRQEIGRLTQFAKGSPSRRLQQMVNIIMDRHRQHTTYDPNNENAQQILDTLKQKLSVYSERLRRYNESYRRKQDNMIFENSERKFYRMLNNNMSATPGSYPTVEDIENFWTDQLATPTPYNSQADWIRNEEKSCETMEQMPHNAVSIEEFHEILKNTHNWKSPGPDGIHNFWLKKFWCIHGRLVETINDVISNPTEMPKFLTTGTTYLLPKDMQHTADPSKYRPITCLPTIYKIITSCIASRIYKHCETNNIMTAQQKGCSKNALGSKELLIIDSIICNQAFKKHRNLFMTYFDYKKAFDSIPHGWLTKILEIYKIDPITINFLKYAMCNWRTNIELSTANITTKDIPIKRGIFQGDSLSPLWFCLALNPLSKQLNATEKGFNVKGNRNNIALNHLLYMDDLKLITGNKNHLQIMVKLVENFSEDVGMKFGLDKCRTISVVRGKIQDEPIALSNGQEIEAMKSDDLYKYLGMKQNRRINHQRMKEDLTTEFIRRINKILKTNLNSKNMTRAINTYACSILTYSFGIIPWTKTDMENLQRKMRTLMTKAHKHHPKSSIERTTLPRNKGGRGLLDIMELAHGQIECLRTYFKDKSGTSEIYKVLCEADESTPLQLHKEQLSYNHQTIQEKLQRWREKPLHGRHFNEVNQDHVDIEASNYWLTSGAMYPETEGFLLAIQDQVISTKNYCKHIIKDRTITDDRCRYGCPTNETIQHITGGCQMFAGNEYKERHDAVGKILHQEMATKLTLINSEKVPYYKYRPETILENERYKLYWDRTVLTDKTVPHNRPDILLVDKQQKAAILIDVAIPNNNNIRQKEVEKISKYRDLEFQIKRQWGMISTRTIPIIISTTGIVPKNLKRNIKQLGLSEYICNIMQKAVLLGTARTVRKFLGSEGQVQGSRVRGPEVRREPGGPQGPDTTELSPSDILNIWD

SEQ ID NO: 7408 - protein, 1268 aa, Harmonia axyridis
MMVNLRNRNIEPLPEVRQGVSGAGAGHDSMRDVGDRVLRRRASVEQNATPPQSQHSRRRITRVSPTAEGAAQDPQPALTQAGLPRRRMKWTSSINETIMRIYYEVTNMEEDKIGYRQKLFAEFERNYPELQVSEQRIADQYRVILRNKLVPDERLNTIKNEVQLRLQNRDLTNNERTIEENYECAENQQNINAQMNTEEQNNADVIAISDAQRRKIYAAPVENPEEDQRELLERLSATMNRCVIDFEGTDPLRRPILPRLRTSKKLSHLLVMTNKEIIPKYLSDYHDLESLHLIIYCAAFSIATVLGVKPKPKSQQPAREKQQNKPHWQKRLENKVHSIRQDIGRLTQFAKGSPSRKLQKMVNIMMDRHRQHTTYDPNNENAQQILDTLKQKLSVYSERLRRYNESYRRKQDNMIFENSERKFYRMLNNNMSATPGSYPIVEDIENFWTDQLASTTPYNSQADWIRSEEKSCETIEHMPHNAVSIEEFHEILKNAHNWKSPGPDGIHNFWLKKFWCIHGRLVETINEVMRNPTEMPKFLTTGTTYLLPKDLQHTADPSKYRPITCLPTIYKIITSCIASRIYKHCETNNIMTAQQKGCSKNALGSKELLIIDSIICNQAFKKHRNLFMTYFDYKKAFDSIPHGWLTKILEIYKIDPITINFLKYAMCNWRTNIELSTTNITTKEIPIKRGIFQGDSLSPLWFCLALNPLSKQLNATEKGFNVKGNRNTIALNHLLYMDDLKLITGNKNHLQIMVKLVENFSKDVGMKFGLDKCRTISVVRGKIQDEPIALSNGQEIEAMKSDDLYKYLGMKQNRRINHQRMKEDFTTEFIRRINKILKTNLNSKNMTRAINTYACSILTYSFGIIPWSKTDMENLQRKMRTLMTKAHKHHPKSSIERTTLPRNKGGRGLLDIMELANGQIECLRTYFKDKSGTSEIYKVLCEADESTPLQLHKEQLSCNHQTIQEKMQRWREKPLHGRHFNEVNQDQVDIEASNYWLTSGAMYPETEGFLLAIQDQVISTRNYCKHIIKDRTITDDRCRYGCPTNETIQHITGGCQMFAGNEYKERHDAVGKILHQEMATKLTLIHSEKVPYYKYRPETILENERYKLYWDRTVLTDKTVPHNRPDILLVDKHQKAAILIDVAIPNNNNMRQKEVEKISKYRDLEFQIKRQWGMISTRTIPIIISTTGIVPKNLKRNIKQLGLSEYICNIMQKAVLLGTARTVRKFLGSEGQVQGSRVRGPEVRREPGGPQRPDTTELCPSDILNIWD

SEQ ID NO: 7409 - protein, 1266 aa, Harmonia axyridis
MMVNLRNRNIEPLPEVRQGVSGAGAGHDSMRDVGDRVLRRRASVEQNATPPQSQHSRRRITRVSPTAEGAAQDPQPALTQAGLPRRRMKWTSSINETIMRIYYEVTNMEEDKIGYRQKLFAEFHRNYPELQVSEQRVADQYRVILRNKLVPDERLNTIKNEVQLRLQNRDLTNNETTIEENYDCAENQQNINAQMNTEEQNNADVIAISDAQRRNIYAAPVEHPEEDQRELLERLSATMNRCVIDFEGTDPLRRPILPRLRTSKKLSHLLVMTNKEIIPKYLSDYHDLESLHLILYCAAFSIATVLGVKPKPKSQQPAREKPQNKPHWQKRLENKVHSIRQDIGRLTQFAKGSPSRKLQNMVNIIMDRHRQHTTYDPNNEKQILDTLKQKLSVYSERLRRYNESYRRKQDNMIFENSERKFYRMLNNNMSATPGSYPTVEDIENFWTDQLASPTPYNSQADWIRSEEKSCETIEHMPHNAVSIEEFHEILKNAHNWKSPGPDGIHNFWLKKFWCIHGRLVETINEVMRNPTEMPKFLTTGTTYLLPKDLQHTADPSKYRPITCLPTIYKIITSCIASRIYKHCETNNIMTAQQKGCSKNALGSKELLIIDSIICNQAFKNHRNLFMTYFDYKKAFDSIPHGWLTKILEIYKIDPITINFLKYAMCNWRTNIELSTANITTKEIPIKRGIFQGDSLSPLWFCLSLNPLSKQLNATEKGFNVKGNRNTIALNHLLYMDDLKLITGNRNHLQIMVKLVENFSEDVGMKFGLDKCRTISVVRGKIQDEPIALSNGQEIEAMKSDDLYKYLGMKQNRRINHQRMKEDLTTEFIRRINKILKTNLNSKNMTRAINTYACSILTYSFGIIPWSKTDMENLQRKMRTLMTKAHKHLPKSSIERTTLPRNKGGRGLLDIMELAHGQIECLRTYFKHKSGTSEIYKVLCEADESTPLQLHKEQLSYNHQTIQEKMQRWREKPLHGRHFNEVNQDHVDIEASNYWLTSGAMYPETEGFLLAIQDQVISTRNYCKHIIKDRTITDDRCRYGCPTNETIQHITGGCQMFAGNEYKERHDAVGKILHQEMATKLTLIHSEKVPYYKYRPETILENERYKLYWDRTVLTDKTVPHNRPDILLVDKHQKAAILIDVAIPNNNNMRQKEVEKISKYRDLEFQIKRQWGMISTRTVPIIISTTGIVPKNLKRNIKQLGLSEYIYNIMQKAVLLGTARTVRKFLGSEGQVQGSLVRGPEVRREPGGPQGPDTTELCPSDILNIWD

SEQ ID NO: 7410 - protein, 903 aa, Harmonia axyridis
MDRHRQHTTYDPNNENAQQILDTLKQKLSVYSERLRRYNESYRRKQDNMIFENSERKFYRMLNNNMSATPGSYPTVEDIENFWTDQLATPTPYNSQADWIRNEEKSCETMEQMPHNADSIEEFHEILKNTHNWKSPGPDGIHNFWLKKFWCIYGRLVETINDVISNPTEMPKFLTTGTTYLLPKDMQHTADPSKYRPITCLPTIYKIITSCIASRIYKHCETNNIMTAQQKGCSKNALGSKELLIIDSIICNQAFKKHRNLFMTYFDYKKAFDSIPHGWLTKILEIYKIDPITINFLKYAMCNWRTNIELSTANITTKDIPIKRGIFQGDSLSPLWFCLALNPLSKQLNATEKGFNVKGNRNNIALNHLLYMDDLKLITGNKNHLQIMVKLVENFSEDVGMKFGLDKCRTISVVRGKIQDEPIALSNGQEIEAMKSDDLYKYLGMKQNRRINHQRMKEDLTTEFIRRINKILKTNLNSKNMTRAINTYACSILSYSFGIIPWSKTDMENLQRKMRTLMTKAHKHHPKSSIERTTLPRNKGGRGLLDIMELANGQIECLRTYFKDKSGTSEIYKVLCGADESTPLQLHKEQLSYNHQTIQEKMQRWREKPLHGRHFNEVNQDHVDIEASNYWLTSGAMYPETEGFLLAIQDQVISTRNYCKHIIKDRTITDDRCRYGCPTNETIQHITGGCQMFAGNEYKERHDAVGKILHQEMATKLTLIHSEKVPYYKYRPETILENERYKLYWDRTVLTDKTVPHNRPDILLVDKHQKAAILIDVAIPNNNNMRQKEVEKISKYRDLEFQIKRQWGMISTRTIPIIISTTGIVPKNLKRNIKQLGLSECICNIMQKAVLLGTARTVRKFLGSEGQVQGSRVRGPEVRREPGGPQRPDTTELCPSDILNIWD

SEQ ID NO: 7411 - protein, 1181 aa, Harmonia axyridis
MKWTSSINETIMRIYYEVTNMEEDKIGYRQKLFAEFERNYPELQVSEQRVADQYRVILRNKLVPDERLNTIKNEVQLRLQNRDLTNNERTIEENYECAENQQNINAQMNTEEQNNADVIAISDAQRRKIYAAPVENPEEDQRELLERLSATMNRCVIDFEGTDPLRRPILPRLRTSKKLSHLLVMTNKEIIPKYLSDYHDLESLHLIIYCAAFSIATVLGVKPKPKSQQPAREKQQNKPHWQKRLENKVHSIRQDIGRLTQFAKGSPSRKLQKMVNIMMDRHRQHTTYDPNNENAQQILDTLKQKLSVYSERLRRYNESYRRKQDNMIFENSERKFYRMLNNNMSATPGSYPIVEDIENFWTDQLASPTPYNSQADWIRSEEKSCETIEHMPHNAVSIEEFHAILKNAHNWKSPGPDGIHNFWLKKFWCIHGRLVETINEVMRNPTEMPKFLTTGTTYLLPKDLQHTADPSKYRPITCLPTIYKIITSCIASRIYKHCETNNIMTAQQKGCSKNALGSKELLIIDSIICNQAFKKHRNLFMTYFDYKKAFDSIPHGWLTKILEIYKIDPITINFLKYAMCNWRTNIELSTANITTKEIPIKRGIFQGDSLSPLWFCLALNPLSKQLNATEKGFNVKGNRNTIALNHLLYMDDLKLITGNKNHLQIMVKLVENFSKDVGMKFGLDKCRTISVVRGKIQDEPIALSNGQEIEAMKSDDLYKYLGMKQNRRINHQRMKEDLTTEFIRRINKILKTNLNSKNMTRAINTYACSILTYSFGIIPWSKTDMENLKRKMRTLMTKAHKHHPKSSIERTTLPRNKGGRGLLDIMELANGQIECLRTYFKDKSGTSEIYKVLCEADESTPLQLHKEQLSYNHQTIQEKMQRWREKPLHGRHFNEVNQDHVDIEASNYWLTSGAMYPETEGFLLAIQDQVISTRNYCKHIIKDRTITDDRCRYGCPTNETIQHITGGCQMFAGNEYKERHDAVGKILHQEMATKLTLIHSEKVPYYKYRPETILENERYKLYWDRTVLTDKTVPHNRPDILLVDKHQKAAILIDVAIPNNNNMRQKEVEKISKYRDLEFQIKRQWGMISTRTIPIIISTTGIVPKNLKRNIKQLGLSEYICNIMQKAVLLGTARTVRKFLGSEGQVQGSRVRGPEVRREPGGPQRPDTTELCPSDILNIWD

SEQ ID NO: 7412 - protein, 1268 aa, Harmonia axyridis
MMVNLRNRNIEPLPEVRQGVSGAGAGHDSMRDVGDRVLRRRASVEQNATPPQSQHSRRRITRVSPTAEGAAQDPQPALTQAGLLRRRMKWTSSINETIMRIYYEVTNMEEDKIGYRQKLFAEFQRNYPELQVSEQRVADQYRVILRNKFVPDERLNTIKNEVQLRLQNRDLTSNERTIEENYDCAENQQNINAQMNTEEQNNADVIAISDAQRRNIYAAPVENPEKDQRELLERLSATMNRCVIDFEGTDPLRRPILPRLRTSKKLSHLLVMTNKEIIPKYLSDYHDLESLHLIIYCAAFSIATVLGVKPKPKSQQPAREKQQNKPHWQKRLENKVHSIRQDIGRLTQFAKGSPSRKLQKMVNIIMDRHRQHTTYDPNNENAQQILDTLKQKLSVYSERLRRYNESYRRKQDNMIFENSERKFYRMLNNNMAATPGSYPIVEDIENFWTDQLASPTPYNSQADWIRSEEKSCETIEHMPHNAVSIEEFHEILKNAHNWKSPGPDGIHNFWLKKFWCIHGRLVETINEVMRNPTEMPKFLTTGTTYLLPKDLQHTADPSKYRPITCLPTIYKIITSCIASRIYKHCETNNIMTAQQKGCSKNALGSKELLIIDSIICNQAFKKHRNLFMTYFDYKKAFDSIPHGWLTKILEIYKIDPITINFLKYAMCNWRTNIELSTANITTKEIPIKRGIFQGDSLSPLWFCLALNPLSKQLNATEKGFNVKGNGNTIALNHLLYMDDLKLITGNKNHLQNMVKLVENFSKDVGMKFGLDKCRTISVVRGKIQDEPIALSNGQEIEAMKSDDFYKYLGMKQNRRINHQIMKEDLTTEFIRRINKILKTNLNSKNMTRAINTYACSILTYSFGIIPWSKTDMENLQRKMRTLMTKAHKHHPKSSIERTTLPRNKGGRGLLDIMELAHGQIECLRTYFKDKSGTSEIYKVLCEADESTPLQLHKEQLSYNHQTIQEKMQRWREKPLHGRHFNEVNQDHVDIEASNYWLTSGAMYPETEGFLLAIQDQVISTRNYCKHIIKDRTITDDRCRYGCPTNETIQHITGGCQMFAGNEYKERHDAVGKILHQEMATKSTLIHSEKVPYYKYRPETILENERYKLYWDRTVLTDKTVPHNRPDILLVDKHQKAAILIDVAIPNNNNMRQKEVEKISKYRDLEFQIKRQWGMISTRTIPIIISTTGIVPKNLKRNIKQLGLSEYICNIMQKAVLLGTARTVRKFLGSEGQVQGSRVRGPEVQREPGGPQRPDTTELCPSDILNIWD

SEQ ID NO: 7413 - protein, 1268 aa, Harmonia axyridis
MMVNLRNRNIEPLPEVRQGVSGAGAGHDSMRDVGDRVLRRRASVEQNATPPQSQHSRRRITRVSPTAEGAAQDPQPALTQAGLPRRRMKWTSSINETIMRIYYEVTNMEEDKIGYRQKLFAEFHRNYPELQVSEQRVADQYRVILRNKLVPDERLNTIKNEVQLRLQNRNLTNNETTIEENYDCAENQHNINAQMNSEEQNNADVLAISDAQRRNIYAAPVVNPEEDQRELLERLFATMNRCVIDFEGTDPLRRPILPRLRTSKKLSYLLVMTNKEIIPKYLSDYHDLESLHLIIYCAAFSIATVLGVKPKPKSQQPAREKQQNKPHWQKRLEDKVHSIRQEIGRLTQFAKGSPSRRLQKMVNIIMDRHRQHTTYDPNNENAQQILDTLKQKLSVYSERLRRYNESYRRKQDNMIFENSERKFYRMLNNNMSATPGSYPTVEDIENFWTDQLATPTPYNSQADWIRNEEKSYETMEQMPHNAVSIEEFHKVLKNTHNWKSPGPDGIHNFWLKKFWCIHGRLVETINDVISNPTEMPKFLTTGTTYLLPKDMQHTADPSKYRPITCLPTIYKIITSCIASRIYKHCETNNIMTAQQKGCSKNALGSKELLIIDSIICNQAFKKHRNLFMTYFDYKKAFDSIPHGWLTKILEIYKIDPITINFLKYAMCNWRTNIELSTANITTKDIPIKRGIFQGDSLSPLWFCFALNPLSKQLNATEKGFNVKGNRNNIALNHLLYMDDLKLITGNKNHLQIMVKLVENFSEDVGMKFGLDKCRTISVVRGKIQDEPIALSNGQEIEAMKSDDLYKYLGMKQNRRINHQRMKEDLTTEFIRRINKILKTNLNSKNMTRAINTYACSILTYSFGIIPWTKTDMENLQRKIRTLMTKAHKHHPKSSIERTTLPRNKGGRGLLDLMELAHGQIECLRTYFKDKSGTSDIYKVLCEADESTPLQLHKEQLSYNHQTIQEKLQRWREKPLHGRHFNEVNQDHVDIEASNYWLTSGAMYPETEGFLLAIQDQVISTKNYCKHIIKDRTITDDRCRYGCPTNETIQHITGGCQMFTGNEYKERHDAVGKILHQEMATKLTLINSEKVPYYKYRPETILENERYKLYWDRTVLTDKTVPHNRPDILLVDKQQKAAILIDVAIPNNNNMRQKEVEKISKYRDLEFQIKRQWGMISTRTIPIIISTTGIVPKNLKRNIKQLGLREYICNIMQKAVVLVTARTVRKFLGSEGQVQGSRVRGPEVLREPGGPQGPDTTELCPSDILNIWD

SEQ ID NO: 7414 - protein, 1269 aa, Harmonia axyridis
MMVNLRNRNIEPLPEVRQGVSGAGAGHDSMRDVGDRVLRRRASVEQNATPPQSQHSRRRITRVSPTAEGAAQDPQPALTQAGLPRRRMKWTSSINETIMRIYYEVTNMEEDKIGYRQKLFAEFHRNYPELQVSEQRVADQYRVILRNKLVPDERLNTIKNEVQLRLQNRNPTNNETTIEENYDCAENQHNINAQMNSEEQNNADVLAISDAQRRNIYAAPVVNPEEDQRELLERLFATMNRCVIDFEGTDPLRRPILPRLRTSKKLSHLLVMTNKEIIPKYLSDYHDLESLHLIIYCAAFSIATVLGVKPKPKSQQPAREKQQNKPHWQKRLEDKVHSIRQEIGRLTQFAKGSPSRRLQKMVNIIMDRHRQHTTYDPNNENAQQILDTLKQKLSVYSERLRRYNESYRRKQDNMIFENSERKFYRMLNNNMSATPGSYPTVEDIENFWTDQLATPTPYNSQADWIRNEEKSCETMEQMPHHAVSIEEFHEILKNTHNWKSPGPDGIHNFWLKKFWCIHGRLVETINNDVISNPTEMPKFLTTGTTYLLPKDMQHTADPSKYRPITCLPTIYKIITSCIASRIYKHCETNNIMTAQQKGCSKNALGSKELLIIDSIICNQAFKKHRNLFMTNFDYKKAFDSIPHGWLTKILEIYKIDPITINFLKYAMCNWRTNIELSTANITTKDIPIKRGIFQGDSLSPLWFCLALNPLSKQLNATEKGFNVKGNRNNIALNHLLYMDDLKLITGNKNHLQIMVKLVENFSEDVGMKFGLDKCRTISVVRGKIQDEPIALSNGQEIEAMKSDDLYKYLGMKQNRRINHQRMKEDLTTEFIRRINKILKTNLNSKNMTRAINTYACSILTYSFGIIPWTKTDMENLQRKMRTLMTKAHKHHPKSSIERTTLPRNKGGRGLLDIMELAHVQIECLRTYFKDKSGTSEIYKVLCEADESTPLQLHKEQLSYNHQTIQEKLQRWREKPLHGRHFNEVNQDHVDIEASNYWLTSGAMYPETEGFLLAIQDQVISTKNYCKHIIKDRTITDDRCRYGCPTNETIQHITGGCQMFAGNEYKERHDAVGKILHQEMATKLTLIQSEKVPYYKYRPETILENERYKLYWDRTVLTDKTVPHNRPDILLVDKQQRAAILIDVAIPNNNNMRQKEVEKISKYRDLEFQIKRQWGIISTRTIPIIISTTGIVPKNLKRNIKQLGLSEYICNIMQKAVLLGTARTVRKFLGSEGQVQGSRVRGPEVRRKPGGPQGPDTTELSPSDILNIWD

SEQ ID NO: 7415 - protein, 891 aa, Harmonia axyridis
MNKCTSSHEPKSKMLRRKVNNNNNNNNESYRRKQDNMIFENSERKFYRMLNNNMSATPGSYPTVEDIENFWTDQLATPTPYNSQADWIRNEEKSCETMEQMPHNAVSIEEFHEILKNTHNWKSPGPDGIHNFWLKKFWCIHGRLVETINDVISNPTEMPKLLTTGTTYLLPKDMQHTADPSKYRPITCLPTIYKIITSCIASRIYKHCETNNIMTAQQKGCSKNALGSKELLIIDSIICNQAFKKHRNLFMTYFDYKKAFDSIPHGWLTKILEIYKIDPITINFLKYAMCNWRTNIELSTANITTKDIPIKRGIFQGDSLSPLWFCLALNPLSKQLNATEKGFNVKGNRNNIALNHLLYMDDLKLITGNKNHLQIMVKLVENFSEDVGMKFGLDKCRTISVVRGKIQDEPIALSNGQDIEAMKSDDLYKYLGMKQNRRINHQRMKEDLTTEFIRRINKILKTNLNSKNMTRAINTYACSILTYSFGIIPWTKTDMENLQRKMRTLMTKAHKHHPKSSIERTTLPRNKGGRGLLDIMELVHGQIECLRTYFKDKSGTSEIYKVLCEADESTPLQLHKEQLSYNHQTIQEKLQRWREKPLHGRHFNEVNQDHVDIEASNYWLTSGAMYPETEGFLLAIQDQVISTKNYCKHIIKDRTITDDRCRYGCPTNETIQHITGGCQMFAGNEYKERHNAVGKILHQEMATKLTLINSEKVPYYKYRPETILENERYKLYWDRTVLTDKTVPHNRPDILLVDKQQKAAILIDVAIPNNKNMRQKEVEKISKYRDLEFQIKRQWGMISTRTIPIIISTTGIVPKNLKRNIKQLGLSEYICNIMQKAVLLGTARTVRKFLGSEGQVQGSRVRGPEVRREPGGPQGPDTTELSPSDILNIWD

SEQ ID NO: 7416 - protein, 1268 aa, Harmonia axyridis
MMVNLRNRNIEPLPEVRQGVSGAGAGHDSMRDVGDRVLRRRASVDQNATPPQSQHSRRRITRVSPTAEGAVQGPQPALTQAGLPRRRMKWTSSINETIMRIYYEVTNMEEDKIGYRQKLFAEFHRNYPELQVSEQRVADQYRVILRNKLVPDERLNTIKNEVQLRLQNRNPTNNEVTIEENYDCAENQHNINAQINTEEQNSGDLALARDEQWRNIQTATMENREESRRDLLEQLSVTMNRYFIEFEGTDPLKRPILPRLKTSKKLSHILHIMNKEIIPPFFSNDQNLESLHLITYCAASTMSAVLGVKPKPRSEQPAQKKQHNKPHWQNRLEAKVHSLRQDIGRLTQFEKGSPSRKLQKIVDAIMDRHRRHANYDANNESAQETLDTLKQKLSVYSERLRRYNESYKRKHDNMIFENSEKNFYRMLNEQTSTKLVSPPSAEDMESFWTDQLSTPTPFNSKAHWIRREEKSCETIENMAHSVITSEELQEILKNTHNWKSPGPDGIHNFWLKKFWCLHGRLVEYINNIIHNPTEMPTFLTTGITYLIPKDFQNTMDPSKYRPITCLPTIYKIITSCLASRIYKHCEKNKITTTQQKGCSKNAQGSKEQLVIDSIICNQAFKKHRNLFMTYFDYKKAFDSLPHGWLKKILEIYKIDPIITNFLKLAMDNWKTNIELSTANIKTKLIPIKRGIFQGDSMSPLWFCLALNPLSKQLNATEKGFNIKGNNNTTTLNHLLYMDDLKLITGNKNHLEIMVKLVEHFSKDVGMEFGLDKCRTLSVVRGRIQDEPITLANGQQIEAMKLDDLYKYLGMKQNRRINHQRMKQDLTTEFIRRTKKILKTNLNSRNMTRAINTYACSILTYSFGIVPWSKTDIENLQRKMRTLMTKANKHHPKSSIERTTLPRNKGGRGLTDIMELASGQIESLREYFRDQASTSEFYKILCEADESTPLQLHKEQFSYNHQTNQEKLDRWREKPLHGRHFNEVNQDHVDIEASNYWLTSGAMYPETEGFLLAIQDQVISTRNYCRHIIKDRTITDDRCRYGCPTNETIQHITGGCQMFAGNEYKERHDAVGKILHQEMATKLTLIQSEKVPYYKYRPETILENERYKLYWDRTVLTDKTVPHNRPDILLVDKHQKAAILIDVAIPNNNNLRQKEVEKISKYRDLEFQIKRQWGMISTRTIPIIISTTGIVPKNLKRNIKQLGLSEYICNVMQKAVLLGTARTVRKFLGSEGQVQGSRVRGPEVRRQPGGPQGPDTTELYPSDILNIWD

SEQ ID NO: 7417 - protein, 1268 aa, Harmonia axyridis
MMVNLRNRNIEPLPEVRQGVSGAGAGHDSMRDVGDRVLRRRASVEQNATPPQSQHSRRRITRVSPTAEGAAQDPQPALTQAGLPRRRMKWTSSINETIMRIYYEVTNMEEDKIGYRQKLFAEFHRNYPELQVSEQRVADQYRVILRNKLVPDEKLNTIKNEVQLRLQNRNLTNNETTIEENYDCAENQHNINAQMNSEERNNADVLAISDAQRRNIYAAPVVNPEEDQRELLERLFATMNRCVIDFEGTDPLRRPILPRLRTSKKLSHLLAMTNKEIIPKYLSDYHDLESLHLIIYCAAFSIATMLGVKPKPKSQQPAREKQQNKPHWQKRLEDKVHSIRQEIGRLTQFAKGSPSRRLQKMVNIIMDRHRQHTTYDPNNENAQQILDTLKQKLSVYSERLRRYNESYRRKQDNMIFENSERKFYRMLNNNMSATPGSYPTVEDIENFWTDQLATPTPYNSQADWIRNEEKSCETMEQMPHNAVSIEEFHEILKNTHNWKSPGPDGIHNFWLKKFWCIHGRLVETINDVISNPTEMPKFLTTGTTYLLPKDMQHTADPSKYRPITCLPTIYKIITSCIASRIYKHCETNNIMTAQQKGCSKNALGSKELLIIDSIICNQAFKKHRNLFMTYFDYKKAFDSIPHGWLTKILEIYKIDPITINFLKYAMCNWRTNIELSTANITTKDIPIKRGIFQGDSLSPLWFCLALNPLSKQLNATEKGFNVKGNRNNIALNHLLYMDDLKLITGNKNHLQIMVKLVENFSEDVGMKFGLDKCRTISVVRGKIQDEPIALSNGQEIEAMKSDDLYKYLGMKQNRRINHQRMKEDLTTEFIRRINKILKTNLNSKNMTRAINTYACSILTYSFGIIPWTKTDMENLQRKMRTLMTKAHKHHPKSSIERTTLPRNKGGRGLLDIMELAHGQIECLRTYFNDKSGTSEIYKVLCEADESTPLQLHKEQLSYNHQTIQEKLQRWREKPLHGRHFNEVNQDHVDIEASNYWLTSGAMYPETEGFLLAIQDQVISTKNYCKHIIKDRTITDDRCRYGCPTNETIQHITGGCQMFAGNEYKERHDAVGKILHQEMATKLTLINSEKVPYYKYRPETILENERYKLYWDRTVLTDKTVPHNRPDILLVDKQQKAAILIDVAIPNNNNMRQKEVEKISKYRDLEFQIKRQWGMISTRTIPIIISTTGIVPKNLKRNIKQLGLSEYICNIMQKAVLLGTARTVRKFLGSEGQVQGSRVRGPEVRREPGGPQGPDTTELSPSDILNIWD

SEQ ID NO: 7418 - protein, 1181 aa, Harmonia axyridis
MKWTSSINETIMRIYYEVTNMEEDKIGYRQKLFAEFHRNYPELQVSEQRVADQYRVILRNKLVPDERLNTIKNEVQLRLQNRNLTNNEVTIEENYDCAENQHNINAQINTEEQNSGDLELVRDEQWQNIQTATMENREESRRDLSEQLSVTMNRYFIEFEGTDPLNRPILPRLKSSKKLSHILHLMNKEIIPPFFSNDQNLESLHLITYCAASTISAVLGVKPKPRSEQPAQKKQHNKPHWQNRLEAKVHSLRQDIGRLTQFEKGSPSRKLQKIVDAIMDRHRRHANYDANNESAQETLDTLKQKLSVYSERLRRYNESYKRKHENMIFENSEKNFYRMLNEQTSTKLVSPPSAEDMESFWTDQLSTPTPFNSKARWIRREEKSCETIESMPHSVITSEELQEILKNTHNWKSPGPDGIHNFWLKKFWCLHGRLVEYINNIIHNPTEMPTFLTTGITYLIPKDFQNTMDPSKYRPITCLPTIYKIITSCLASRIYKHCEKNKIITTQQKGCSKNAQGSKEQLVIDSIICNQAFKKHRNLFMTYFDYKKAFDSLPHGWLKKILEIYKIDPIITNFLKLAMDNWKTNIELSTANIKTKLIPIKKGIFQGDSLSPLWFCLALNPLSKQLNATEKGFNIKGNNSTTTLNHLLYMDDLKLITGNKNHLEIMVKLVEHFSKDVGMEFGLDKCRTLSVVRGRIQDEPITLANGQQIEAMKSDDLYKYLGMKQNRRINHQRMKQDLTTEFIRRTKKILKTNLNSRNMTRAINTYACSILTYSFGIVPWSKTDIENLQRKMRTLMTKANKHHPKSSIERTTLPRNKGGRGLTDIMELAGGQIESLREYFRDQASTSEFYKILCEADESTPLQLHKEQFSYNHQTNQEKLDRWREKPLHGRHFNEVNQDHVDIEASNYWLTSGAMYPETEGFLLAIQDQVISTRNYCRHIIKDRTITDDRCRYGCLTNETIQHITGGCQMFAGNEYKERHDAVGKILHQEMATKLTLIQSEKVPYYKYRPETILENERYKLYWDRTVLTDKTVPHNRPDILLVDKHQKAAILIDVAIPNNNNMRQKEVEKISKYRDLEFQIKRQWGMISTRTIPIIISTTGIVPKNLKRNIKQLGLSEYICNVMQKAVLLGTARTVRKFLGSEGQVQGSRVRGPEVRRQPGGPQGPDTTELYPFDILNIWD

SEQ ID NO: 7419 - protein, 1268 aa, Harmonia axyridis
MMVNLRNRNIEPLPEVRQGVSGAGAGHDSMRDVGDRVLRRRASVEQNATPPQSQHSRRRITRVSPTAEGAAQDPQPALTQAGLPRRRMKWTSSINETIMRIYYEVTNMEEDKIGYRQKLFAEFHRNYPELQVSEQRVADQYRVILRNKLVPDERLNTIKNEVQLRLQNRNLTNNETTIEENYDCAENQNNINAQMNSKEQYNADVLAISDAQRRNIYAAPVVNPEEDQRELLERLFATMNRCVIDFEGTDPLRRPILPRLKTSKKLSHLLVMTNKEIIPRYLSDYHDLESLHLIIYCAAFSIATVLGVKPKPKSQQPAREKQQNKPHWQKRLEDKVHSIRQEIGRLTQFAKGSPSRRLQKMVNIIMDRHRQHTTYDPNNENAQQILDTLKQKLSVYSERLRRYNESYRRKQDNMIFENSERKFYRMLNNNMSATPGSYPTVEDIENFWTDQLATPTPYNSQADWIRNEEKSYETMEQMPHNAVSIEEFHEVLKNTHNWKSPGPDGIHNFWLKKFRCIHGRLVETINDVISNPTEMPKFLTTGTTYLLPKDMQHTADPSKYRPITCLPTIYKIITSCIASRIYKHCETNNIMTAQQKGCSKNALGSKELLIIDSIICNQAFKKHRNLFMTYFDYKKAFDSIPHGWLTKILEIYKIDPITINFLKYAMCNWRTNIELSTANITTKDIPIKRGIFQGDSLSPLWFCLALNPLSKQLNATEKGFNVKGNRNNIALNHLLYMDDLKLITGNKNHLQIMVKLVENFSEDVGMKIGLDKCRTISVVRGKIQDEPIALSNGQEIEAMKSDDLYKYLGMKQNRRINHQRMKEDLTTEFIWRINKILKTNLNSKNMTRAINTYACSILTYSFGIIPWTKTDMENLQRKMRTLMTKAHKHHPKSSIERTTLPRNKGGRGLLDLMELAHAQIECLRTYFKDKSGTSEIYKVLCEADESTPLQLHKEQLSYNHQTIQEKLQRWREKPLHGRHFNEVNQDHVDIEASNYWLTSGAMYPETEGFLLAIQDQVISTKNYCKHIIKDRTITDDRCRYGCPTNETIQHITGGCQMFAGNEYKERHDAVGKILHQEMATKLTLINSEKVPYYKYRPETILENERYKLYWDRTVLTDKTVPHNRPDILLVDKQQKAAILIDVAIPNNNNMRQKEVEKISKYRDLEFQIKRQWGIISTRTIPIIISTTGIVPKNLKRNIKQLGLSEYICNIMQKAVLLGTARTVRKFLGSEGQVQGSRVRGPEVRREPGGPQGPDTTELCPSDILNIWD

SEQ ID NO: 7420 - protein, 1268 aa, Harmonia axyridis
MMVNLRNRNIEPLPEVRQGVSGAGAGHDSMRDVGDRVLRRRASVDQNATPPQSQYSRRRITRVSPTAEGAVQDPQPALTQAGLPRRRMKWTSSINETIMRIYYEVTNMEEDKIGYRQKLFAEFHRNYPELQVSEQRVADQYRVILRNKLVPDERLNTIKNEVQLRLQNRNPTNNEVTIEENYDCAENQHNINAQINTEEQNSGDLALARDEQWRNIQTATMENREESRRDLLEQLSVTMNRYFIEFEGTDPLKRPILPRLKTSKKLSHILHIMNKEIIPPFFSNDQNLESLHLITYCAASTISAVLGVKPKPRSEQTAQKKQHNKPHWQNRLEAKVHSLRQDIGRLTQFEKGSPSRKLQKIVDAIMDRHRRHANYDANNESAQETLDTLKQKLSVYSERLRRYNESYKRKHDNMIFENSEKNFYRMLNEQTSTKLVSPPSAEDMESFWTDQLSTPTPFNSKAHWIRREEKSCETIENMPHSVITSEELQEILKNTHNWKSPGPDGIHNFWLKKFWCLHGRLVEYINNIIHNPTEMPTFLTTGITYLIPKDFQNTMDPSKYRPITCLPTIYKIITSCLASRIYKHCEKNKIITTQQKGCSKNAQGSKEQLVIDSIICNQAFKKHRNLFMTYFDYKKAFDSLPHGWLKKILEIYKIDPIITNFLKLAMDNWKTNIELSTANIKTKLIPIKRAIFQGDSMSPLWFCLALNPLSKHLNATEKGFNIKGNNNTTTLNHLLYMDDLKLITGNKNHLEIMVKLVEHFSKDVGMEFGLDKCRTLSVVRGRIQDEPITLANGQQIEAMKLDDLYKYLGMKQNRRINHQRMKQDLTTEFIRRTKKILKTNLNSRNMTRAINTYACSILTYSFGIVPWSKTDIENLQRKMRTLMTKANKHHPKSSIERTTLPRNKGGRGLTDIMELASGQIESLREYFRDQASTSEFYKILCEADESTPLQLHKEQFSYNHQTNQEKLDRWREKPLHGRHFNEVNQDHVDIEASNYWLTSGAMYPETEGFLLAIQDQVISTRNYCRHIIKDRTITDDRCRYGCPTNETIQHITGGCQMFAGNEYKERHDAVGKILHQEMATKLTLIQSEKVPYYKYRPETILENERYKLYWDRTVLTDKTVPHNRPDILLVDKHQKAAILIDVAIPNNNNLRQKEVEKISKYRDLEFQIKRQWGMISMRTIPIIISTTGIVPKNLKRNIKQLGLSEYICNVMQKAVLLGTARTVRKFLGSEGQVQGSRVRGPEVRRQPGGPQGPDTTELYPSDILNIWD

SEQ ID NO: 7421 - protein, 1161 aa, Harmonia axyridis
MMVNLRNRNIEPLPEVRQGVSGAGAGHDSMRDVGDRVLRRRASVEQNATPPQSQHSRRRITRVSPTAEGAAQDPQPALTQAGLPRRRMKWTSSINETIMRIYYEVTNMEEDKIGYRQKLFAEFQRNYPELQVSEQRVADQYRVILRNKLVPDERLNTIKNEVQLRLQNRDLTNNERTIEENYDCAENQQNINAQMNTEEQNNADVIAISDAQRRNIYAAPVENPEKDQRELLERLSATMNRCVIDFEGTDPLRRPILPRLRTSKKLSHLLVMTNKEIIPKYLSDYHDLESLHLIIYCAAFSIATVLGVKPKPKSQQPAREKQQNKPHWQKRLENKVHSIRQDIGRLTQFAKGSPSRKLQKMVNIIMDRHRQHTTYDPNNENAQQILDTLKQKLSVYSERLRRYNESYRRKQDNMIFENSERKFYRMLNNNMSATPGSYPIVEDIENFWTDQLASPTPYNSQADWIRSEEKSCETIEHMPHNAVSIEEFHEILKNAHNWKSPGPDGIHNFWLKKFWCIHGRLVETINEVMRNPTEMPKFLTTGTTYLLPKDLQHTADPSKYRPITCLPTIYKIITSCIASRIYKHCETNNIMTAQQKGCSKNALGSKELLIIDSIICNQAFKKHRNLFMTYFDYKKAFDSIPHGWLTKILEIYKIDPITINFLKYAMCNWRTNIELSTANITTKEIPIKRGIFQGDSLSPLWFCLALNPLSKQLNATEKGFNVKGNRNTIALNHLLYMDDLKLITGNKNHLQIMVKLVEIFSKDVGMKFGLDKCRTISVVRGKIQDEPIALSNGQEIEAMKSDDFYKYLGMKQNRRINHQRMKEDLTTEFIRRINKILKTNLNSKNMTRAINTYACSILTYSFGIIPWSKTDMENLQRKMRTLMTKAHKHHPKSSIERTTLPRNKGGRGLLDIMELSHGQIECLRAYFKDKSGTSEIYKVLCEADESTPLQLHKEQLSYNHQTIQEKMQRWREKPLHGRHFNEVNQDHVDIEASNYWLTSGAMYPETEGFLLAIQDQVISTRNYCKHIIKDRTITDDRCRYGCPTNETIQHITGGCQMFAGNEYKERHDAVGKILHQEMATKLTLIHSEKVPYYKYRPETILENERYKLYWDRTVLTDKTVPHNRPDMLLVDKHQKAAILIDVAIPNNNNMRQKEVEKISKV

SEQ ID NO: 7422 - protein, 1268 aa, Harmonia axyridis
MMVNLRNRNIEPLPEVRQGVSGAGAGHDSMRDVGDRVLRRRASVEQNATPPQSQHSRRRITRVSPTAEGAVQDPQPALTQAGLPRRRMKWTSSINETIMRIYYEVTNMEEDKIGYRQKLFAEFHRNYPELQVSEQRVADQYRVILRNKLVPDGRLNTIKNEVQLRLQNRNLTNNEVTIEENYDCAENQHNINAQINTEEQNSGDLELVRDEQWRNIQTATMENREESRRDLSEQLSVTMNRYFIEFEGTDPLNRPILPRLKSSKKLSHILHLMNKEIIPPFFSNDQNLESLHLITYCAASTISAVLGVKPKPRSEQPAQKKQHNKPHWQNRLEAKVHSLRQDIGRLTQFEKGSPSRKLQKIVDAIMDRHRRHANYDANNESAQETLDTLKQKLSVYSERLRRYNESYKRKHENMIFENSEKNFYRMLNEQTSTKLVSPPSAEDMESFWTDQLSTPTPFNSKARWIRREEKSCETIESMPHSVITSEELQEILKNTHNWKSPGPDGIHNFWLKKFWCLHGRLVEYINNIIHKPTEMPTFLTTGITYLIPKDFQNTMDPSKYRPITCLPTIYKIITSCLASRIYKHCEKNKIITTQQKGCSKNAQGSKEQLVIDSIICNQAFKKHRNLFMTYFDYKKAFDSLPHGWLKKILEIYKIDPIITNFLKLAMDNWKTNIELPTANIKTKLIPIKKGIFQGDSLSPLWFCLALNPLSKKLNATEKGFNIKGNNSTTTLNHLLYMDDLKLITGNKNHLEIMVKLVEHFSKDVGMEFGLDKCRTLSVVRGRIQDEPITLANGQQIEAMKSDDLYKYLGMKQNRRINHQRMKQDLTTEFIRRTKKILKTNLNSRNMTRAINTYACSILTYSFGIVPWSKTDIENLQRKMRTLMTKANKHHPKSSIERTTLPRNKGGRGLTDIMELAGGQIESLREYFRDQASTSEFYKILCEADESTPLQLHKEQFSYNHQTNQEKLDRWREKPLHGRHFNEVNQDHVDIEASNYWLTSGAMYPETEGFLLAIQDQVISTRNYCRHIIKDQTITDDRCRYGCLTNETIQHITGGCQMFAGNEYKERHDAVGKILHQEMATKLTLIQSEKVPYYKYRPETILENERYKLYWDRTVLTDKTVPHNRPDILLVDKHQKAAILIDVAIPNNNNMRQKEVEKISKYRDLEFQIKRQWGMISTRTIPIIISTTGIVPKNLKRNIKQLGLSEYICNVMQKAVLLGTARTVRKFLGSEGQVQGSRVRGPEVRRQPGGPQGPDTTELYPSDILNIWD

SEQ ID NO: 7423 - protein, 904 aa, Harmonia axyridis
MVNIIMDRHRQHTTYDPNNENAQQILDTLKQKLSVYSERLRRYNESYRRKQDNMIFENSERKFYRMLNNNMSATPGSYPTVEDIENFWTDQLATPTPYNSQADWIRNEETMEQMPHNAVSIEEFHKVLKNTHNWKSPGPDGIHNFWLKKFWCIHGRLVETINDVISNPTEMPKFLTTGTTYLLPKDMQHTADPSKYRPITCLPTIYKIITSCIASRIYKHCETNNIMTAQQKGCSKNALGSKELLIIDSIICNQAFKKHRNLFMTYFDYKKAFDSIPHGWLTKILEIYKIDPITINFLKYAMCNWRTNIELSTANITTKDIPIKRGIFQGDSLSPLWFCLALDPLSKQLNATEKGFNVKGNRNNIALNHLLYMDDLKLITGNKNHLQIMVKLVENFSEDVGMKFGLDKCRTISVVRGKIQDEPIALSNGQEIEAMKSDDLYKYLGMKQNRRINHQRMKEDLTTEFIRRINKILKTNLNSKNMTRAINTYACSILTYSFGIIPWTKTDMENLQRKMRTLMTKAHKHHPKSSIERTTLPRNKGGRGLLDLMELAHAQIECLRTYFKDKSGTSEIYKVLCEADESTPLQLHKEQLSYNHQTIQEKLQRWREKPLHGRHFNEVNQDHVDIEASNYWLTSGAMYPETEGFLLAIQDQVISTKNYCKHIIKDRTITDDRCRYGCPTNETIQHITGGCQMFAGNEYKERHDAVGKILHQEMATKLTLINSEKVPYYKYRPETILENERYKLYWDRTVLTDKTVPHNRPDILLVDKQQKAAILIDVAIPNNNNMRQKEVEKISKYRDLEFQIKRLWGMISTRTIPIIISTTGIVPKNLKRNIKQLGLSEYICNIMQKAVLLGTARTVRKFLGSEGQVQGSRVRGPEVRREPGGPQGPDTTELCPSDILNIWD

SEQ ID NO: 7424 - protein, 1268 aa, Harmonia axyridis
MMVNLRNRNIEPLPEVRQGVSGAGAGHDSMRDVVDRVLRRRASVEQNATPPQSQHSRRRITRVSPTAEGAAQDPQPALTQAGLPRRRMKWTSSINETIMRIYYEVTNMEEDKIGYRQKLFAEFHRNYPELQVSEQRVADQYRVILRNKLVPDERLNTIKNEVQLRLQNKNLTNNEVTIEENYDCAENQHNINAQINTEEQNSGDLPLVRDEQWRNIQTATMENREESRRDLSEQLSVTMNRYFIEFEGTDPLKRPILPRLKTSKKLSHILHIMNKEIIPPFFSNDQNLESLHLITYCAASTISAVLGVKPKPRSEQPAQKKQHNKPHWQNRLEAKVHSLRQDIGRLTQFEKGSPSRKLQKIVDAIMDRHRRHANYDANNESAQETLDTLKQKLSVYSERLRRYNESYKRKHENMIFENSEKNFYRMLNEQTSTKLVSPPSAEDMESFWTDQLSTPTPFNSKACWIRREEKSCETIESMPHSVITSEELQEILKNTHNWKSPGPDGIHNFWLKKFWCLHGRLVEYINNIIHNPTEMPTFLTTGITYLIPKDFQNTMDPSKYRPITCLPTIYKIITSCLASRIYKHCEKNKIITTQQKGCSKNAQGSKEQLVIDSIICNQAFKKHRNLFMTYFHYKKAFDSLPHGWLKKILEIYKIDPIITNFLKLAMDNWKTNIELSTANIKTKLIPIKKGIFQGDSLSPLWFCLALNPLSKQLNATEKGFNIKGNNNTTTLNHLLYMDDLKLITGNKNHLEIMVKLVEHFSKDVGMEFGLDKCRTLSVVRGRIQDEPITLANGQQIESMKSDDLYKYLGMKQNRRINHQRMKQDLTTEFIRRTKKILKTNLNSRNMTRAINTYACSILTYSFGIVPWSKTDIENLQRKMRTLMTKANKHHPKSSIERTTLPRNKGGRGLTDIMELASGQIESLREYFRDQASTSEFYKILCEADESTPLQLHKEQFSYNHQTNQEKLDRWREKPLHGRHFNEVNQDHVDIEASNYWLTSGAMYPETEGFLLAIQDQVISTRNYCRHIIKDRTITDDRCRYGCPTNETIQHITGGCQMFAGNEYKERHDAVGKILHQEMATKLTLIQSEKVPYYKYRPETILENERYKLYWDRTVLTDKTVPHNRPDILLVDKHQKAAILIDVAIPNNNNMRQKEVEKISKYRDLEFQIKRQWGMISTRTIPIIISTKGIVPKNLKRNIKQLGHSEYICNVMQKAVLLGTARTVRKFLGSEGQVQGSRVRGPEVRRQPGGPQGPDTTELYPSDILNIWD

SEQ ID NO: 7425 - protein, 1268 aa, Harmonia axyridis
MMVNLRNRNIEPLPEVRQGVSGAGAGHDSMRDVGDRVLRRRASVDQNATPPQSQHSRRRITRVSPTAEGAVQDPQPALTQAGLPRRRMKWTSSINETIMRIYYEVTNMEEDKIGYRQKLFAEFHRNYPELQVSEQRVADQYRVILRNKLVPDERLNTIKNEVQLRLQNRNPTNNEVTIEENYDCAENQHNINAQINTEEQNSGDLALARDEQWRNIQTATMENREESRRDLLEQLSVTMNRYFIEFEGTDPLKRPILPRLKTSKKLSHILHIMNKEIIPPFFSNDQNLESLHLITYCAASTISAVLGVKPKPRSEQPAQKKQHNKPHWQNRLEAKVHSLRQDIGRLTQFEKGSPSRKLQKIVDAIMDRHRRHANYDANNKSAQETLDTLKQKLSVYSERLRRYNESYKRKHDNMIFENSEKNFYRMLNEQTSTKLVSPPSAEDMESFWTDQLSTPTPFNSKAHWIRREEKSCETIENMPHSVITSEELQEILKNTHNWKSPGPDGIHNFWLKKFWCLHGRLVEYINNIIHNPTEMPTFLTTGITYLIPKDFQNTMDPSKYRPITCLPTIYKIITSCLASRIYKHCEKNKIITTQQKGCSKNAQGSKEQLVIDSIICNQAFKKHRNLFMTYFDYKKAFDSLPHGWLKKILEIYKIDPIITNFLKLAMDNWKTNIELSTANIKTKLIPIKRGIFQGDSMNPLWFCLALNPLSKQLNATEKGFNIKGNNNTTTLNHLLYMDDLKLITGNKNHLEIMVKLVEHFSKDVGMEFGLDKCRTLSVVRGRIQDEPITLANGQQIEAMKLDDLYKYLGMKQNRRINHQRMKQDLTTEFIRRTKKILKTNLNSRNMTRAINTYACSILTYSFGIVPWSKTDIENLQRKMRTLMTKANKHHPKSSIERTTLPRNKGGRGLTDIMELASGQIESLREYFRDQASTSEFYKILCEADESTPLQLHKEQFSYNHQTNQEKLDRWREKPLHGRHFNEVNQDHVDIEASNYWLTSGAMYPETEGFLLAIQDQVISTRNYCRHIIKDRTITDDRCRYGCPTNETIQHITGGCQMFAGNEYKERHDAVAKILHQEMATKLTLIQAEKVPYYKYRPETILENERYKLYWDRTVLTDKTVPHNRPDILLVDKHQKAAILIDVAIPNNNNLRQKEVEKISKYRDLEFQIKRQWGMISTRTIPIIISTTGIVPKNLKRNIKQLGLSEYICNVMQKAVLLGTARTVRKFLGSEGQVQGSRVRGPEVRRQPGGPQGPDTTELYPSDILNIWD

SEQ ID NO: 7426 - protein, 1268 aa, Harmonia axyridis
MMVNLRNRNIEPLPEVRQGVSGAGAGHDSMRDVGDRVLRRRASVEQNATPPQSQHSRRRITRVSPTAEGAAQDPQPALTQAGLPRRRMKWTSSINETIMRIYYEVTNMEEDKIGYRQKLFAEFHRNYPELQVSEQRVADQYRVILRNKLVPDERLNTIKNEVQLRLQNRNLTNNETTIEENYDCAENQHNINAQMNSEEQNNADVLAISDAQRRNIYAAPVVNPEEDQRELLERLFATMNRCVIDFEGTDPLRRPILPRLRTSKKLSHLLVMTNKEIIPKYLSDYHDLESLHLIIYCAAFSIATVLGVKPKPKSQQPAREKQQNKPHWQKRLEDKVHSIRQEIGRLTQFAKGSPSSRLQKMVNIIMDRHRQHTTYDPNNENAQQILDTLKQKLSVYSERLRRYNESYRRKQDNMIFENSERKFYRMLNNNMSATPGSYPTVEDIENFWTDQLATPTPYNSQADWIRNEEKSCETMEQMPHNAVSIEEFHEILKNTHNWKSPGPDGIHNFWLKKFWCIHGRLVETINDVISNPTEMPKFLTTGTTYLLPKDMQHTADPSKYRPITCLPTIYKIVTSCIASRIYKHCETNNIMTAQQKGCSKNALGSKELLIIDSIICNQAFKKHRNLFMTYFDYKKAFDSIPHGWLTKILEIYKIDPITINFLKYAMCNWRTNIELSTANITTKDIPIKRGIFQGDSLSPLWFCLALNPLSKQLNATEKGFNVKGNRNNIALNHLLYMDDLKLITGNKNHLQIMVKLVENFSEDVGMKFGLDKCRTISVVRGKIQDEPIALSNGQEIEAMKSDDLYKYLGMKKNRRINHQRMKEDLTTEFIRRINKILKTNLNSKNMTRAINTYACSILTYSFGIIPWTKTDMENLQRKMRTLMTKAHKHHPKSSIERTTLPRNKGGRGLLDIMELAHGQIECLRTYFKDKSGTSEIYKVLCEADESTPLQLHKEQLSYNHQTIQEKLQRWREKPLHGRHFNEVNQDHVDIEASNYWLTSGAMYPETEGFLLAIQDQVISTKNYCKHIIKDRTITDDRCRYGCPTNETIQHITGGCQMFAGNEYKERHDAVGKILHQEMATKLTLINSEKVPYYKYRPETILENERYKLYWDRTVLTDKTVPHNRPDILLVDKQQKAAILIDVAIPNNNNMRQKEVEKFSKYRDLEFQIKRQWGMISTRTIPIIISTTGIVPKNLKRNIKQLGLSEYVCNIMQKAVLLGTARTVRKFLGSEGQVQGSRVRGPEVRREPGGPQRPDTTELCPSDILNIWD

SEQ ID NO: 7427 - protein, 1273 aa, Harmonia axyridis
MRKSLKCRRYMWTRGRCGQFKFTARLALLLVLAYMGKLTYHYNNNNNNNNNNNNQSQSQHSRRRITRVSPTAEGAAQDPQPALTQAGLPRRRMKWTSSINETIMRIYYEVTNMEEDKIGYRQKLFAEFERNYPELQVSEQRVADQYRVILRNKLVPDERLNTIKNEVQLRLQNRDLTNNERTIEENYECAENQQNINAQMNTEEQNNADVIAISDAQRRKIYAAPVENPEEDQRELLERLSATMNRCVIDFEGTDPLRRPILPRLRTSKKLSHLLVMTNKEIIPKYLSDYHDLESLHLIIYCAAFSIATVLGVKPKPKSQQPAREKQQNKPHWQKRLENKVHSIRQDIGRLTQFAKGSPSRKLQKMVNIMMDRHRQHTTYDPNNENAQQILDTLKQKLSVYSERLRRYNESYRRKQDNMIFENSERKFYRMLNNNMSATPGSYPIVEDIENFWTDQLASPTPYNSQADWIRSEEKSCETIEHMPHNAVSIEEFHEILKNAHNWKSPGPDGIHNFWLKKFWCIHGRLVETINEVMRNPTEMPKFLTTGTTYLLPKDLQHTADPSKYRPITCLPTIYKIITSCIASRIYKHCETNNIMTAQQKGCSKNALGSKELLIIDSIICNQAFKKHRNLFMTYFDYKKAFDSIPHGWLTKILEIYKIDPITINFLKYAMCNWRTNIELSTANITTKEIPIKRGIFQGDSLSPLWFCLALNPLSKQLNATEKGFNVKGNRNTIALNHLLYMDDLKLITGNKNHLQIMVKLVENFSKDVGMKFGLDKCRTISVVRGKIQDEPIALSNGQEIEAMKSDDLYKYLGMKQNRRINHQRMKEDLTTEFIRRINKILKTNLNSKNMTRAINTYACSILTYSFGIIPWSKTDMENLQRKMRTLMTKAHKHHPKSSIERTTLPRNKGGRGLLDIMELANGQIECLRTYFKDKSGTSEIYKVLCEADESTPLQLHKEQLSYNHQTIQEKMQRWREKPLHGRHFNEVNQDHVDIEASNYWLTSGAMYPETEGFLLAIQDQVISTRNYCKHIIKDRTITDDRCRYGCPTNETIQHITGGCQMFAGNEYKERHDAVGKILHQEMATKLTLIHSEKVPYYKYRPETILENERYKLYWDRTVLTDKTVPHNRPDILLVDKHQKAAILIDVAIPNNNNMRQKEVEKISKYRDLEFQIKRQWGMISTRTIPIIISTTGIVPKNLKRNIKQLGLSEYICNIMQKAVLLGTARTVRKFLGSEGQVQGSRVRGPEVRREPGGPQRPDTTELCPSDILNIWD

SEQ ID NO: 7428 - protein, 1268 aa, Harmonia axyridis
MMVNLRNRNIEPLPEVRQGVSGAGAGHDSMRDVGDRVLRRRASVEQNATPPQSQHSRRRITRVSPTAEGAAQDPQPALTQAGLPRRRMKWTSSINETIMRIYYEVTNMEEDKIGYRQKLFAEFHRNYPELQVSEQRVADQYRVILRNKLVPDERLNTIKNEVQLRLQNRNLTNNETTIEENYDCAENQHNINARMNSEEQNNADVLAISDDQRRNIYAAPVVNPEEDQRELLDRLFATMNRCVIDFEGTDPLRRPILPRLRTSKKLSHLLVMTNKEIIPKYLSDYHDLESLHLIIYCAAFSIATVLGVKPKPKIQQPAREKQQNKPHWQKRLEHKVHSIRQEIGRLTQFAKGSPSRRLQKMVNIIMDRHRQHTTYDPNNENAQQILDTLKQKLSVYSERLRRYNESYRRKQDNMIFENSERKFYRMLNNNMSATPGSYPTVEDIENFWTDQLATPTPYNSQADWIRNEEKSYETMEQMPHNAVSIEEFHEVLKNTHNWKSPGPDGIHNFWLKKFWCIHGRLVETINDVISNPTEMPKFLTTGTTYLLPKDMQHTADPSKYRPITCLPTIYKIITSCIASRIYKHCETNNIMTAQQKGCSKNALGSKELLIIDSIICNQAFKKHRNLFMTYFDYKKAFDSIPHGWLTKILEIYKIDPITINFLKYAMCNWRTNIELSTANITTKDIPIKRGIFQGDSLSPLWFCLALNPLSKQLNATEKGFNVKGNRNNIALNHLLYMDDLKLITGNKNHLQIMVKLVENFSEDVGMKFGLDKCRTISVVRGKIQDEPIALSNGQEIEAMKSDDLYKYLGMKQNRRINHQRMKEDLTTEFIRRINKILKTNLNSKNMTRAINTYACSILTYSFGIIPWTKTDMENLQRKMRTLMTKAHKHHPKSSIERTTLPRNKGGRGLLDLMELAHAQIECLRTYFKDKSGTSEIYKVLCEADESTPLQLHKEQLSYNHQTIQEKLQRWREKPLHGRHFNEVNQDHVDIEASNYWLTSGAMYPETEGFLLAIQDQVISTKNYCKHIIKDRTITDDRCRYGCPTNETIQHITGGCQMFAGNEYKERHDAVGKILHQEMATKLTLINSEKVPYYKYRPETILENERYKLYWDRTVLTDKTVPHNRPDILLVDKQQKAAILIDVAIPNNNNMRQKEVEKISKYRDLEFQIKRQWGMISTRTIPIIISTTGIVPKNLKRNIKQLGLSEYICNIMQKAVLLGTARTVRKFLGNEGQVQGSRVRGPEVRREPGGPQGPDTTELCPSDILNIWD

SEQ ID NO: 7429 - protein, 1268 aa, Harmonia axyridis
MMVNLRNRNIEPLPEVRQGVSGAGAGHDSMRDVGDRVLRRRASVEQNATPPQSQHSRRRITRVSPTAEGAAQDPQPALTQAGLPRRRMKWTSSINETIMRIYYEVTNMEEDKIGYRQKLFAEFERNYPELQVSEQRVADQYRVILRNKLVPDERLNTIKNEVQLRLQNRDLTNNERTIEENYECAENQQNINAQMNTEEQNNADVIAISDAQRRKIYAAPVENPEEDQRELLERLSATMNRCVIDFEGTDPLRRPILPRLRTSKKLSRLLVMTNKEIIPKYLSDYHDLESLHLIIYCAAFSIATVLGVKPKPKSQQPAREKQQNKPHWQKRLENKVHSIRQFIGRLTQFAKGSPSRKLQKMVNIMMDRHRQHTTYDPNNENAQQILDTLKQKLSVYSERLRRYNESYRRKQDNMIFENSERKFYRMLNNNMSATPESFPIVEDIENFWTDQLASPTPYNFQADWIRSEEKSCETIEHMPHNAVSIEEFHEILKNAHNWKSPGPDGIHNFWLKKFWCIHGRLVETINEVMRNPTEMPKFLTTGTTYLLPKDLQHTADPSKYRPITCLPTIYKIITSCIASRIYKHCETNNIMTAQQKGCSKNALGSKELLIIDSIICNQAFKKHRNLFMTYFDYKKAFDSIPHGWLTKILEIYKIDPITINFLKYAMCNWRTNIELSTANITTKEIPIKRGIFQGDSLSPLWFCLALNPLSKQLNATEKGFNVKGNRNTIALNHLLYMDDLKLITGNKNHLQIMVKLVENFSKDVGMKFGLDKCRTISVVRGKIQDEPIALSNGQEIEAMKSDDLYKYLGMKQNRRINHQRMKEDLTTEFIRRINKILKTNLNSKNMTRAINTYACSILSYSFGIIPWSKTDMENLQRKMRTLMTKAHKHHPKSSIERTTLPRNKGGRGLLDIMELANGQIECLRTYFKDKSGTSEIYKVLCEADESTPLQLHKEQLSYNHQTIQEKMQRWREKPLHGRHFNEVNQDHVDIEASNYWLTSGAMYPETEGFLLAIQDQVISTRNYCKHIIKDRTITDDRCRYGCPTNETIQHITGGCQMFAGNEYKERHDAVGKILHQEMATKLTLIHSEKVPYYKYRPETILENERYKLYWDRTVLTDKTVPHNRPDILLVDKHQKAAILIDVAIPNNNNMRQKEVEKISKYRDLEFQIKRQWGMISTRTIPIIISTTGIVPKNLKRNIKQLGLSECICNIMQKAVLLGTARTVRKFLGSEGQVQGSRVRGPEVRREPGGPQRPDTTELCPSDILNIWD

SEQ ID NO: 7430 - protein, 1026 aa, Harmonia axyridis
MENREESRRDLLEQLSVTMNRYFIEFEGTDPLKRPILPRLKTSKKLSHILHIMNKEIIPPFFSNDQNLESLHLITYCAASTISAVLGVKPKPRSEQPAQKKQHNKPHWQNRLEAKVHSLRQDIARLTQFEKGSPSRKLQKIVDAIMDRHRRHANYDANNQSAQETLDTLKQKLSVYSERLRRYNESYKRKHDNMIFENSEKNFYRMLNEQTSTKLVSPPSAEDMESFWTDQLSTPTPFNSKAHWIRREGKSCETIENMPHSVITSEELQEILKNTHNWKSPGPDGIHNFWLKKFWCLHGRLVEYINNIIHNPTEMPTFLTTGITYLIPKDFQNTMDPSKYRPITCLPTIYKIITSCLASRIYKHCEKNKIITTQQKGCSKNAQGSKEQLVIDSIICNQAFKKHRNLFMTYFDYKKAFDSLPHGWLKKILEIYKIDPIITNFLKLAMDNWKTNIELSTANIKTKLIPIKRGIFQGDSMSPLWFCLALNPLSKQLNATEKGFNIKGNNNTTTLNHLLYMDDLKLITGNKNHLEIMVKLVEHFSKDVGMEFGLDKCRTLSVVRGRIQDEPITLANGQQIEAMKLDDLYKYLGMKQNRRINHQRMKQDLTTEFIRRTKKILKTNLNSRNMTRAINTYACSILTYSFGIVPWSKTDIENLQRKMRTLMTKANKHHPKSSIERTTLPRNKGGRGLTDIMELASGQIESLREYFRDQASTSEFYKILCEADESTPLQLHKEQFSYNHQTNQEKLDRWREKPLHGRHFNEVNQDHVDIEASNYWLTSGAMYPETEGFLLAIQDQVISTRNYCRHIIKDRTITDDRCRYGCPTNETIQHITGGCQMFAGNEYKERHDAVGKILHQEMATKLTLIQSEKVPYYKYRPETILENERYKLYWDRTVLTDKTVPHNRPDILLVDKHQKAAILIDVAIPNNNNLRQKEVEKISKYRDLEFQIKRQWGMISTRTIPIIISTTGIVPKNLKRNIKQLGLSEYICNVMQKAVLLGTARTVRKFDDNQGDHKDRTRPSSTLLIF

SEQ ID NO: 7431 - protein, 1268 aa, Harmonia axyridis
MMVNLRNRNIEPLPEVRQGVSGAGAGHDSMRDVGDRVLRRRASVEQNATPPQSQHSRRRITRVSPTAEGAAQDPQPALTQAGLPRRRMKWTSSINETIMRIYYEVTNMEEDKIGYRQKLFAEFHRNYPELQVSEQRVADQYRVILRNKLVPDERLNTIKNEVQLRLQNRNLTNNETTIEENYDCAENQHNINAQMNSEEQNNADVLAISDAQRRNIYAAPVVNPEEDQRELLERLFATMNRCVIDFEGTDPLRRPILPRLRTSKKLSHLLVMTNKEIIPKYLSDYHDLESLHLIIYCAAFSIATVLGVKPKPKSQQPAREKQQNKPHWQKRLEDKVHSIRQEIGRLTQFAKGSPSRRLQKMVNIIMDRHRQHTTYDPNNENAQQILDTLKQKLSVYSERLRRYNESYRRKQDNMIFENSERKFYRMLNNNMSATTGSYPTVEDIENFWTDQLATPTPYNSQADWIRNEEKSCETMEQMPHNAVSIEEFHEILKNTHNWKSPGPDGIHNFWLKKFWCIHGRLVETINDVISNPTEMPKFLTTGTTYLLPKDMQHTADPSKYRPITCLPTIYKIITSCIASRIYKHCETNNIMTAQQKGCSKNALGSKELLIIDSIICNQAFKKHRNLFMTYFDYKKAFDSIPHGWLTKILEIYKIDPITINFLKYAMCNWRTNIELSTANIITKDIPIKRGIFQGDSLSPLWFCLALNPLSKQLNATEKGFNVKGNRNNIALNHLLYMDDLKLITGNKNHLQIMVKLVENFSEDVGMKFGLDKCRTISVVRGKIQDEPIALSNGQEIEAMKSDDLYKYLGMKQNRRINHQRMKEDLTTEFIRRINKILKTNLNSKNMTRAINTYACSILTYSFGIIPWTKTDMENLQRKMRTLMTKAHKHHPKSSIERTTLPRNKGGRGLLDIMELAHGQIECLRTYFKDKSGTSEIYKVLCEADESTHLQQHKEQLSYNHQTIQEKLQRWREKPLHGRHFNEVNQDHVDIEASNYWLTSGAMYPETEGFLLAIQDQVISTKNYCKHIIKDRTITDDRCRYGCPTNETIQHITGGCQMFAGNEYKERHDAVGKILHQEMATKLTLINSEKVPYYKYRPETILENERYKLYWDRTVLTDKTVPHNRPDILLVDKQQKAAILIDVAIPNNNNMRQKEVEKISKYRDLEFQIKRQWGMISTRTIPIIISTTGIVPKNLKRNIKQLGLSEYICNIMQKAVLLGTARTVRKFLGSEGQVQGSRVRGPEVRREPGGPQGPDTTELCPSDILNIWD

SEQ ID NO: 7432 - protein, 1268 aa, Harmonia axyridis
MMVNLRNRNIEPLPEVRQGVSGAGAGHDSMRDVGDRVLRRRASVEQNATPPQSQHSRRRITRVSPTAEGAAQDPQPALTQAGLPRRRMKWTSSINETIMRIYYEVTNMEEDKIGYRQKLFAEFHRNYPELQVSEQRVADQYRVILRNKLVPDERLNTIKNEVQLRLQNRDLTNNETTIEENYDCAENQQDINAQMNTEEQNNADVIAISDAHRRNIYAAPVENPEEAQRELLERLSATMNRCVIDFEGTDPLRRPILPRLRTSKKLSHLLVMTNKEIIPKYLPDYHDLESLHLIIYCAAFSIATVLGVKPKPKSQQPAREKQQNKPHWQKRLENKVHSIRQDIGRLTQFAKGSPSRKLQKMVNIIMDHHRQHTTYDPNNENAQQILDTLKQKLSVYSERLRRYNESYRRKQDNMIFENSERKFYRMLNNNMSATPGSYPTVEDIENFWTDQLASPTPYNSQADWIRSEEESCETIEHMPHNAVSIEEFHEILKNAHNWKSPGPDGIHNFWLKKFWCIHGRLVETINEVMRNPTEMPKFLTTGTTYLLPKDLQHTADPSKYRPITCLPTIYKIITSCIASRIYKHCETNNIMTAQQKGCSKNALGSKELLIIDSIICNQAFKKHRNLFMTYFDYKKAFDSIPHGWLTKILEIYKIDPITINFLKYAMCNWRTNIELSTANITTKEIPIKRGIFQGDSLSPLWFCLALNPLSKQLNATEKGFNVKGNRNTIALNHLLYMDDLKLITGNKNHLQIMVKLVENFSKDVGMKFGLDKCRTISVVRGKIQDEPIALSNGQEIEAMKSDDLYKYLGMKQNRRVNHQRMKEDLTTEFIRRINKILKTNLNSKNMTRAINTYACSILTYSFGIIPWSKTDMENLQRKMRTSMTKAHKHHPKSSIERTTLPRNKGGRGLLDIMELAHGQIECLRTYFKDKSGTSEIYKVLCEADESTPLLLHKEQLSYNHQTIQEKMQRWREKPLHGRHFNEVNQDHVDIEASNYWLTSGAMYPETEGFLLAIQDQVISTKNYCKHIIKDRTITDDRCRYGCPTNETIQHITGGCQMFAGNEYKERHDAVGKILHQEMATKLTLIHSEKVPYYKYRPETILENERYKLYWDRTVLTDKTVPHNRPDILLVDKHQKAAILIDVAIPNNNNMRQKEVEKISKYRDLEFQIKRQWGMISTRTIPIIISTTGIVPKNLKRNIKQLGLSEYIYNIMQKAVLLGTARTVRKFLGSEGQVQGSRVRGPEVRREPGGPQGPDTTELCPSDILNIWD

SEQ ID NO: 7433 - protein, 1268 aa, Harmonia axyridis
MMVNLRNRNIEPLPEVRQGVSGAGAGHDSMRDVGDRVLRRRASVEQNATPPQSQHSRRRIARVSPTAEGAAQDPQPALTQAGLPRRRMKWTSSINETIMRIYYEVTNMEEDKIGYRQKLFAEFHRNYPELQVSEQKVADQYRVILRNKLVPDERLNTIKNEVQLRLQNRNLTNNETTIEENYDCAENQHNINAQMNSEEQNNADVLAISDAQRRNIYAAPVVNPEEDQRELLERLFATMNRCVIDFEGTDPLRRPILPRLRTSKKLSHLLAMTNKEIIPKYLSDYHDLESLHLIIYCAAFSIATMLGVKPKPKSQQPAREKQQNKPHWQKRLEDKVHSIRQEIGRLTQFAKGSPSRRLQKMVNIIMDRHRQHTTYDPNNENAQQILDTLKQKLSVYSERLRRYNESYRRKQDNMIFENSERKFYRMLNNNMSATPGSYPTVEDIENFWTDQLATPTPYNSQADWIRNEEKSCETMEQMPHNAVSIEEFHEILKNTHNWKSPGPDGIHNFWLKKFWCIHGRLVETINDVISNPTEMPKFLTTGTTYLLPKDMQHTADPSKYRPITCLPTIYKIITSCIASRIYKHCETNNIMTAQQKGCSKNALGSKELLIIDSIICNQAFKKHRNLFMTYFDYKKAFDSIPHGWLTKILEIYNIDPITINFLKYAMCNWRTNIELSTANITTKDIPIKRGIFQGDSLSPLWFCLALNPLSKQLNATEKGFNVKGNRNNIALNHLLYMDDLKLITGNKNHLQIMVKLVENFSEDVGMKFGLDKCRTISVVRGKIQDEPIALSNGQEIEAMKSDDLYKYLGMKQNRRINHQRMKEDLTTEFIRRINKILKTNLNSKNMTRAINTYACSILTYSFGIIPWTKTDMENLQRKMRTLMTKAHKHHPKSSIERTTLPRNKGGRGLLDIMELAHGQIECLRTYFKDKSGTSEIYKVLCEADESTPLQLHKEQLSYNHQTIQEKLQRWREKPLHGRHFNEVNQDHVDIEASNYWLTSGAMYPETEGFLLAIQDQVISTKNYCKHIIKDRTITDDRCRYGCPTNETIQHITGGCQMFAGNEYKERHDAVGKILHQEMATKLTLINSEKVPYYKYRPETILENERYKLYWDRTVLTDKTVPHNRPDILLVDKQQKAAILIDVAIPNNNNMRQKEVEKISKYRDLEFQIKRQWGMISTRTIPIIISTTEIVPKNLKRNIKQLGLSEYICNIMQKAVLLGTARTVRKFLGSEGQVQGSRVRGPEVRREPGGPQGPDTTELSLSDILNIWD

SEQ ID NO: 7434 - protein, 1268 aa, Harmonia axyridis
MMVNLRNRNIEPLPEVRQGVSGAGAGHDSMRDVGDRVLRRRASVEQNATPPQSQHSRRRITRVSPTAEGAAQDPQPALTQAGLPRRRMKWTSSINETIMRIYYEVTNMEEDKIGYRQKLFAEFHRNYPELQVSEQRVADQYRVILRNKLVPDERLNTIKNEVQLRLQNRNLTNNETTIEENYDCAENQHNINAQMNSEEQNNADVLAISDAQRRNIYAAPVVNPEEDQRELLERLFATMNRCVIDFEGTDPLRRPILPRLRTSKKLSHLLVMTNKEIIPKYLSDYHDLESLHLIIYCAAFSIATVLGVKPKPKSQQPAREKQQNKPHWQKRLEDKVHSIRQEIGRLTQFAKGSPSRRLQKMVNIIMDRHRQHTTYDPNNENAQQILDTLKQKLSVYSERLRRYNESYRRKQDNMIFENSERKFYRMLNNNMSATPGSYPTVEDIENFWTDQLATPTPYNSQADWIRNEEKSCETMEQMPHNAVSIEEFHEILKNTHNWKSPGPDGIHNFWLKKFWCIHGRLVETINDVISNPTEMPKFLTTGTTYLLPKDVQHTADPSKYRPITCLPTIYKIVTSCIAYRIYKHCETNNIMTAQQKGCSKNALGSKELLIIDSIICNQAFKKHRNLFMTYFDYKKAFDSIPHGWLTKILEIYKIDPITINFLKYAMCNWRTNIELSTANIITKDISIKRGIFQGDSLSPLWFCLALNPLSKQLNATEKGFNVKGNRNNIALNHLLYMDDLKLITGNKNHLQIMVKLVENFSEDVGMKFGLDKCRTISVVRGKIQDEPIALSNGQGIEAMKSDDLYKYLGMKQNRRINHQRMKEDLTTEFIRRINKILKTNLNSKNMTRAINTYACSILTYSFGIIPWTKTDMENLQRKMRTLMTKAHKHHPKSSIERTTLPRNKGGRGLLDIMELAHGQIECLRTYFKDKSGTSEIYKVLCEADESTPLQLHKEQLSYNHQTIQEKLQRWREKPLHGRHFNEVNQDHVDIEASNYWLTSGAMYPETEGFLLAIQDQVISTKNYCKHIIKDRTITDDRCRYGCPTNETIQHITGGCQMFAGNEYKERHDAVGKILHQEMATKLTLINSEKVPYYKYRPETILENERYKLYWDRTVLTDKTVPHNRPDILLVDKQQKAAILIDVAIPNNNNMRQKEVEKISKYRDLEFQIKRQWGMISTRTIPIIISTTGIVPKNLKRNIKQLGLSEYICNIMQKAVLLGTARTVRKFLGSEGQVQGSRVRGPEVRREPGGPQGPDTTELSPSDILNIWD

SEQ ID NO: 7435 - protein, 1267 aa, Harmonia axyridis
MVNLRNRNIEPLPEVRQGVSGAGAGHDSMRDVGDRVLGRRASVEQNATPPQSQHSRRRITRVSPTAEGAAQDPQPALTQAGLPRRRMKWTSSINETIMRIYYEVTNMEEDKIGYRQKLFAEFHRNYPELQVSEQRVADQYRVILRNKLVPDERLNTIKNEVQLRLQNRNLTNNETTIEENYDCAENQHNINAQMNSEEQNNADVLAISDAQRRNIYAAPVVNPEEDQRELLERLFATMNRCVIDFEGTDPLRRPILPRLRTSKKLSHLLVMTNKEIIPKYLSDYHDLESLHLIIYCAAFSIATVLGVKPKPKSQQPAREKQQNKPHWQKRLEDKVHSIRQEIGRLTQFAKGSPSRRLQKMVNIIMDRHRQHTTYDPNNENAQQILDTLKQKLSVYSERLRRYNESYSRKQDNMIFENSERKFYRMLNNNMSATPGSYPTVEDIENFWTDQLATPTPYNSQADWIRNEEKSCETMEQMPHNAVSIEEFHEILKNTHNWKSPGPDGIHNFWLKKFWCLHGRLVETINDVISNPTEMPKFLTTGTTYLLPKDMQHTADPSKYRPITCLPTIYKIVTSCIASRIYKHCETNNIMTAQQKGCSKNALGSKELLIIDSIICNQAFKKHRNLFMTYFDYKKAFDSIPHGWLTKILEIYKIDPITINFLKYAMCNWRTNIELSTANITTKDISIKRGIFQGDSLSPLWFCLALNPLSKQLNATEKGFNVKGNRNNIALNHLLYMDDLKLITGNKNHLQIMVKLVENFSEDVGMKFGLDKCRTISVVRGKIQDEPIALSNGQEIEAMKSDDLYKYLGMKQNRRINHQRMKEDLTTEFIRRINKILKTNLSSKNMTRAINTYACSILTYSFGIIPWTKTDMENLQRKMRTLMTKAHKHHPKSSIERTTLPRNKGGRGLLDIMELAHGQIECLRTHFKDKSGTSEIYKVLCEADESTPLQLHKEQLSYNHQTIQEKLQRWREKPLHGRHFNEVNQDHVDIEASNYWLTSGAMYPETEGFLLAIQDQVISTKNYCKHIIKDRTITDDRCRYGCPTNETIQHITGGCQMFAGNEYKERHDAVGKILHKEMATKLTLINSEKVPYYKYRPETILENERYKLYWDRTVLTDKTVPHNRPDILLVDKQQKAAILIDVAIPNNNNMRQKEVEKISKYRDLEFQIKRQWGMISTRTIPIIISTTGIVPKNLKRNIKQLGLSEYVCNIMQKAVLLGTARTVRKFLGSEGQVQGSRVRGPEVRREPGGPQRPDTTELCPSDILNIWD

SEQ ID NO: 7436 - protein, 1268 aa, Harmonia axyridis
MMVNLRNRNIEPLPEVRQGVSGAGAGHDSMRDVGDRVLRRRASVEQNATPPQSQHSRRRITRVSPTAEGAAQDPQPALTQAGLPRRRMKWTSSINETIMRIYYEVTNMEEDKIGYQQKLFAEFHRNYPELQVSEQRVADQYRVILRNKLVPDERLNTIKNEVQLRLQNRDLTNNETTIEENYDCAENQQNINAQKNTEEQNNADVIAISDAQRRNIYAAPVENPEEDQRELLERLSATMNRCVIDFEGTDPLRRPILPRLRTSKKLSHLLVMTNKEIIPKYLSDYHDLESLHLILYCAAFSIATVLGVKPKPKSQQPAREKQQNKPHWQKRLENKVHSIRQDIGRLTQFAKGSPSRKLQKMVNIIMDRHRQHTTYDPNNENAQQILDTLKQKLSVYSERLRRYNESYRRKQDNMIFENSERKFYRMLNNNMSATPGSYPTVEDIENFWTDQLASPTPYNSQADWIRSEEKSCETIEHMPHNAVSIEEFHEILKNAHNWKSPGPDGIHNFWLKKFWCIHGRLVETINEVMRNPTEMPKFLTTGTTYLLPKDLQQTADPSKYRPITCLPTIYKIITSCIASRIYKHCETNNIMTAHQKGCSKNALGSKELLIIDSIICNQAFKKHRNLFMTYFDYKKAFDSIPHGWLTKILEIYKIDPITINFLKYAMCNWRTNIELSTANITTKEIPIKRGIFQGDSLSPLWFCLALNPLSKQLNVTEKGFNVKGNRNTIALNHLLYMDDLKLITGNRNHLQIMVKLVENFSEDVGMKFGLDKCRTISVVRGKIQDEPIALSNGQEIEAMKSDDLYKYLGMKQNRRINHQRMKEDLTTEFIRRINKILKTNLNSKNMTRAINTYACSILTYSFGIIPWSKTDMENLQRKMRTLMTKAHKHHPKSSIERTTLPRNKGGRGLLDIMELAHGQIECLRTYFKHKSGTSEIYKVLCEADESTPLQLHKEQLSYNHQTIQEKMQRWREKPLHGRHFNEVNQDHVDIEASNYWLTSGAMYPETEGFLLAIQDQVISTRNYCKHIIKDRTITDDRCRYGCPTNETIQHITGGCQMFAGNEYKERHDAVGKILHQEMATKLTLIHSEKVPYYKYRPETILENERYKLYWDRTVLTDKTVPHNRPDILLVDKHQKAAILIDVAIPNNNNMRQKEVEKISKYRDLEFQIKRQWGMISTRTIPIIISTTGIVPKNLKRNIKQLGLSEYICNIMQKAVLLGTARTVRKFLGSEGQVQGSRVRGPEVRREPGGPQRPDTTELCPSDILNIWD

SEQ ID NO: 7437 - protein, 1263 aa, Harmonia axyridis
MMVNLRNRNIEPLPEVRQGVSGAGAGHDSMRDVGDRVLRRRASVEQNATPPQSQHSRRRITRVSPTAEGAAQDPQPALTQAGLPRRRMKWTSSINETIMRIYYEVTNMEEDKIGYRQKLFAEFHRNYPELQVSEQRVADQYRVILRNKLVPDERLNIIKNEVQLRLQNRDFTNNETTIEENYDCAENQHNINAQMNTEEQNNADVIAISDAQRRNIYAAPVENPEEDQREILERLSATMNRCVIDFEGTDPLRRPILPRLRTSKKLSHLLVMTNKEIIPKYLSDYHDLESLHLIIYCAAFSIATVLGVKPKPKSQQPAREKQQNKPHWQKRLENKVHSIRQDIGRLTQFAKGSPSRKLQKMVNIIMDRHRQHTTYDPNNENAQQILDTLKQKLSVYSERLRRYNESYRRKQDNMIFENSERKFYRMLNNNMSATPGSYPTVEDIENFWTDQLATPTPYNSQADWIRSEEKSCETIEHMPHNAVSIEEFHEILKNTHNWKSPGPDGIHNFWLKKFWCIHDRLVETINDVIRNPTEMPKFLTAGTTYLLPKNLQNTADPSKYRPITCLPTIYKIITSCIASRIYKHCETNNIMTAQQKGCSKNALGSKELLIIDSIICNQAFKKHRNLFMTYFDYKKAFDSIPHGWLTKILEIYKINPITINFLKYAMCNWRTNIELSTANITTKEIPIKRGIFQGDSLSPLWFCLALNPLSKKLNATEKGFNVKGNRNTIALNHLLYMDDLKLITGNKNHLQIMVELVENFSKDVGMKFGLDKCRTISVVRGKIQDEPIALSNGQEIEAMKSDDLYKYLGIKQNRRINHQRMKEDLTTEFIRRINKILKTNLNSKNMTRAINTYACSILTYSFGIIPWTKTDMENLQRKMRTLMTKAHKHHPKSSIERTTLPRNKGGRGLLDIMELANGQIECLRTYFKDKSGTSEIYKVLCEADESTPLQLHKEQLSYNHQTIQEKLQRWREKPLHGRHFNEVNQDHVDIEASNYWLTSGVMYPETEGFLLAIQDQVISTRNYCKHIIKDRTITDDRCRYGCPTNETIQHITGGCQMFAGNEYKERHDAVGKILHQEMATKLTLINSEKMPHYKYRPETILENERYKLYWDRTVLTDKTVPHNRPDILLVDKHQKAAILIDVAIPNNNNMRQKEVEKISKYRDLEFQIKRQWGMISTRTIPIIISTTGIVPKNLKRNIKQLGLSEYICNIMQKAVLLGTARTVRKFLGSEGQVQGSRVRGPEVRRDPGDHKDRTRPSSALLIF

SEQ ID NO: 7438 - protein, 1268 aa, Harmonia axyridis
MMVNLRNRNIEPLPEVRQGVSGAGAGHDSMRDVGDRVLRRRASVDQNATPPQSQNSRRRITRVSPTAEGAVQDPQPALTQAGLPRRRMKWTSSINETIMRIYYEVTNMEEDKIGYRQKLFAEFHRNYPELQVSEQRVADQYRVILRNKLVPDERLNTIKNEVQLRLQNRNPTNNEVTIEENYDCAENQHNINAQINTEEQNSGDLALARDEQWRNIQTATMENREESRRDLLEQLSVTMNRYFIEFEGTDPLKRPILPRLKTSKKLSHILHIMNKEIIPPFFSNDQNLESLHLITYCAASTISAVLGVKPKPRSEQPAQKKQHNKPHWQNRLEAKVHSLRQDIGRLTQFEKGSPSRKLQKIVDAIMDRHRRHANYDANNESAPETLDTLKQKLSVYSERLRRYNESYKRKHDNMIFENSEKNFYRMLNEQTSTKLVSPPSAEDMESFWTDQLSTPTPFNSKAHWIRREEKSCETIENMPHSVITSEELQEILKNTHNWKSPGPDGIHNFWLKKFWCLHGRLVEYINNIIHNPTEMPTFLTTGITYLIPKDFQNTMDPSKYRPITCLPTIYKIITSCLASRIYKHCEKNKIITTQQKGCSKNAQGSKEQLVIDSIICNQAFKKHRNLFMTYFDYKKAFDSLPHGWLEKILEIYKIDPIITNFLKLAMDNWKTNIELSTANIKTKLIPIKRGIFQGDSMSPLWFCLALNPLSKQLNATEKGFNIKGNNNTTTLNHLLYMDDLKLITGNKNHLEIMVKLVEHFSKDVGMEFGLDKCRTLSVVRGRIQDEPITLANGQQIEAMKLDDLYKYLGMKQNRRINHQRMKQDLTTEFIRRTKKILKTNLNSRNMTRAINTYACSILTYSFGIVPWSKTDIENLQRKMRTLMTKANKHHPKSSIERTTLPRNKGGRGLTDIMELASGQIESLREYFRDQASTSEFYKILCEADESTPLQLHKEQFSYNHQTNQEKLDRWREKPLHGRHFNEVNQDHVDIEASNYWLTSGAMYPETEGFLLAIQDQVISTRNYCRHIIKDRTITDDRCRYGCPTNETIQHITGGCQMFAGNEYKERHDAVGKILHQEMATKLTLIQSGKVPYYKYRPETILENERYKLYWDRTVLTDKTVPHNRPDILLVDKHQKSAILIDVALPNNNNLRQKEVEKISKYRDLEFQIKRQWGMISTRSIPIIISTTGIVPKNLKRNIKQLGLSEYICNVMQKAVLLGTARTVRKFLGSEGQVQGSRVRGPEVRRQPGGPQGPDTTELYPSDILNIWD

SEQ ID NO: 7439 - protein, 1266 aa, Harmonia axyridis
MMVNLRNRNIEPLPEVRQGVSGAGAGHDSMRDVGDRVLRRRASVEQNATPPQSQHSRRRITRVSPTAEGAAQDPQPALTQAGLPRRRMKWTSSINETIMRIYYEVTNMEEDKIGYRQKLFAEFERNYPELQVSEQRVADQYRVILRNKLVPDERLNTIKNEVQLRLQNRVLTNNERTIEENYECAENQQNINAQMNTEEQNNADVIAISDAQRRKIYAAPVENPEEDQLLERLSATMNRCVIDFEGTDPLRRPILPRLRTSKKLSHLLVMTNKEIIPKYLSNYHDLESLHLIIYCAAFSIATVLGVKPKPKSQQPAREKQQNKPHWQKRLENKVHSIRQDIGRLTQFAKGSPSRKLQQMVNIMMDRHRQHTTYDPNNENAQQILDTLKQKLSVYSERLRRYNESYRRKQDNMIFENSERKFYRMLNNNMSATPGSYPIVEDIENFWTDQLASPTPYNSQADWIRSEEKSCETIEHMPHNAVSIEEFHEILKNAHNWKSPGPDGIHNFWLKKFWCIHGRLVETINEVMRNPTEMPKFLTTGTTYLLPKDLQHTADPSKYRPITCLPTIYKIITSCIASRIYKHCETNNIMTAQQKGCSKNALGSKELLIIDSIICNQAFKKHRNLFMTYFDYKKAFDSIPHGWLTKILEIYKIDPITINFLKYAMCNWRTNIELSTANITTKEIPIKRGIFQGDSLSPLWFCLALNPLSKQLNDTEKGFNVKGNRNTIALNHLLYMDDLKLITGNKNHLQIMVKLVENFSKDVGMKFGLDKCRTISVVRGKIQDEPIALSNGQEIEAMKSDDLYKYLGMKQNRRINHQRMKEDLTTEFIRRINKILKTNLNSKNMTRAINTYACSVLTYSFGIIPWSKTDMENLQRKMRTLMTKAHKHHPKSSIERTTLPRNKGGRGLLDIMELANGQIECLRTYFKDKSGTSEIYKVLCEADESTPLQLHKEQLSYNHQTIQEKMQRWREKPLHGRHFNEVNQDHVDIEASNYWLTSGAMYPETEGFLLAIQDQVISTRNYCKHIIKDRTTTDDRCRYGCPTNETIQHITGGCQMFAGNEYKERHDAVGKILHQEMATKLTLIHSEKVPYYKYRPETILENERYKLYWDRTVLTDKTVPHNRPDILLVDKHQKAAILIDVAIPNNNNMRQKEVEKISKYRDLEFQIKRQWGMISTRTIPIIISTTGIVPKNLKRNIKELGLSEYICNIMQKAVLLGTARTVRKFLGSEGQVQGSRVRGPEVRREPGGPQRPDTTELCPSDILNIWD

SEQ ID NO: 7440 - protein, 1268 aa, Harmonia axyridis
MMVNLRNRNIEPLPEVRQGVSGAGAGHDSMRDVGDRVLRRRASVEQNATPPQSQHSRRRITRVSPTAEGAAQDPQPALTQAGLPRRRMKWTSSINETIMRIYYEVTNMEEDKIGYRQKLFAEFHRNYPELQVSEQRVADQYRVILRNKLVPDERLNTIKNEVQLRLQNRNLTNNEVTIEENYDCAENQHNINAQINTEEQNSGDLPLVRDEQWRNIQTATIENREESRRDLLEQLSVTMNRYFIEFEGTDPLKRPILPRLKTSKKLSHILHIMNKEIIPPFFSNDQNLESLHLITYCAASTISAVLGVKPKPRSEQPAQKKQHNKPHWQNRLEAKVHSLRQDIGRLTQFKKGSPSRKLQKIVDAIMDRHRRHANYDANNESAQETLDTLKQKLSVYSERLRRYNESYKRKHENMIFENSEKNFYRMLNEQTSTKLVSPPSAEDMESFWTDQLSTPTPFNSKACWIRREEKSCETIESMPHSVITSEEIQEILKNTHNWKSPGPDGIHNFWLKKFWCLHGRLVEYINNIIHNPTEMPTFLTTGITYLIPKDFQNTMDPSKYRPITCLPTIYKIITSCLASRIYKHCEKNKIITTQQKGCSKNAQGSKEQLVIDSIICNQAFKKHRNLFMTYFDYKKAFDSLPHGWLKKILEIYKIDPIITNFLKLAMDNWKTNIELSTANIKTKLIPIKKGIFQGDSLSPLWFCLALNPLSKQLNATEKGFNIKGNNNTTTLNHLLYMDDLKLITGNKNHLEIMVKLVEHFSKDVGMEFGLDKCRTLSVVRGRIQDEPITLANGQQIESMKSDDLYKYLGVKQNRRINHQRMKQDLTTEFIRRTKKILKTNLNSRNMTRAINTYACSILTYSFGIVPWSKTDIENLQRKMRTLMTKANKHHPKSSIERTTLPRNKGGRGLTDIMELASGQIESLREYFRDQASTSEFYKILCEADESTPLQLHKEQFSYNHQTNQEKLDRWREKPLHGRHFNEVNQDHVDIEASNYWLTSGAMYPETEGFLLAIQDQVISTRNYCRHIIKDRTITDDRCRYGCPTNETIQHITGGCQMFAGNEYKERHDAVGKILHQEMATKLTLIQSEKVPYYKYRPETILENERYKLYWDRTVLTDKTVPHNRPDILLVDKHQKAAILIDVAIPNNNNMRQKEVEKISKYRDLEFQIKRQWGMISTRTIPIIISTTGIVPKNLKRNIKQLGLSEYICNVMQKAVLLGTARTVRKFLGSEGQVQGSRVRGPEVRRQPGGPQGPDTTELYPSDILNIWD

SEQ ID NO: 7441 - protein, 1268 aa, Harmonia axyridis
MMVNLRNRNIEPLPEVRQGVSGAGAGHDSMRDVGDRVLRRRASVEQNATPPQSQHSRRRITRVSPTAEGAAQDPQPALTQAGLPRRRMKWTSSINETIMRIYYEVTNMEEDKIGYRQKLFAEFHRNYPELQVSEQRVADQYRVILRNKLVPDERLNTIKNEVQLRLQNRNLTNNEVTIEENYDCAENQHNINAQINTEEQNSGDLPLVRDEQWRNIQTATMENREESRRDLLEQLSVTMNRYFIEFEGTDPLKRPILPRLKTSKKLSHILHIMNKEIIPPFFSNDQNLESLHLITYCAASTISAVLGVKPKPRSEQPAQKKQHNKPHWQNRLEAKVHSLRQDIGRLTQFEKGSPSRKLQKIVDAIMDRHRRHANYDANNESAQETLDTLKQKLSVYSERLRRYNESYKRKHENMIFENSEKNFYRMLNEQTSTKLVSPPSAEDMESFWTDQLSTPTPFNSKAFWIRREEKSCETIESMPHSVITSEELQEILKNTHNWKSPGPDGIHNFWLKKFWCLHGRLVEYINNIIHNPTEMPTFLTTGITYLIPKDFQNTMDPSKYRPITCLPTIYKIITSCLASRIYKHCEKNKIITTQQKGCSKNAQGSKEQLVIDSIICNQAFKKHRNLFMTYFDYKKAFDSLPHGWLKKILEIYKIDPIITNFLKLAMDNWKTNIELSTANIKTKLIPIKKGIFQGDSLSPLWFCLALNPLSKQLNATEKGFNIKGNNNTTTLNHLLYMDDLKLITGNKNHLEIMVKLVEHFSKDVGMEFGLDKCRTLSVVRGRIQDEPITLANGQQIESMKSDDLYKYLGMKQNRRINHQRMKQDLTTEFIRRTKKILKTNLNSRNMTRAINTYACSILTYSFGIVPWSKTDIENLQRKMRTLMTKANKHHPKSSIERTTLPRNKGGRGLTDIMELASGQIESLREYFRDQASTSEFYKILCEADESTPLQLHKEQFSYNHQTNQEKLDRWREKPLHGRHFNEVNQDHVDIEASNYWLTSGAMYPETEGFLLAIQDQVISTRNYCRHIIKDRTITDDRCRYGCPTNETIQHITGGCQMFAGNEYKERHDAVGKILHQEMATKLTLIQSEKVPYYKYRPETILENERYKLYWDRTVLTDKTVPHNRPDILLVDKHQKAAILIDVAIPNNNNMRQKEVEKISKYRDLEFQIKRQWGMISTRTIPIIISTTGIVPKNLKRNIKQLGLSEYICNVMQKAVLLGTARTVRKFLGSEGQVQGSRVRGPEVRRQPGGPQGPDTTELYPSDILNIWD

SEQ ID NO: 7442 - protein, 1268 aa, Harmonia axyridis
MMVNLRNRNIEPLPEVRQGVSGAGAGHDSMRDVGDRVLRRRASVEQNATPPQSQHSRRRITRVSPTAEGAAQDPQPALTQAGLPRRRMKWTSSINETIMRIYYEVTNMEEDKIGYRQKLFAEFERNYPELQVSEQRVADQYRVILRNKLVPDERLNTIKNEVQLRLQNRDLTNNERTIEQNYECAENQQNINAQMNTEEQNNADVIAISDAQRRKIYAAPVENPEEDQRELLERLSATMNRCVIDFEGTDPLRRPILPRLRTSKKLSHLLVMTNKEIIPKYLSDYHDLESLHLIIYCAAFSIATVLGVKPKPKSQQPAREKQQNKPHWQKRLENKVHSIRQDIGKLTQFAKGSPSRKLQKMVNIMMDRHRQHTTYDPNNENAQQILDTLKQKLSVYSERLRRYNESYRRKQDNMIFENSERKFYRMLNNNMSATPGSYPIVEDIENFWTDQLASPTPYNSQADWIRSEEKSCETIEHMPHNAVSIEEFHEILKNAHNWKSPGPDGIHNFWLKKFWCIHGRLVETINEVMRNPTEMPKFLTTGTTYLLPKDLQHTADPSKYRPITCLPTIYKIITSCIASRIYKHCETNNIMTAQQKGCSKNALGSKELLIIDSIICNQAFKKHRNLFMTYFDYKKAFDSIPHGWLTKILEIYKIDPITINFLKYAMCNWRTNIELSTANITTKEIPIKRGIFQGDSLSPLWFCLALNPLSKQLNATEKGFNVKGNRNTITLNHLLYMDDLKLITGNKNHLQIMVKLVENFSKDVGMKFGLDKCRTISVVRGKIQDEPIALSNGQEIEAMKSDDLYKYLGMKQNRRINHQRMKEDLTTEFIRRINKILKTNLNSKNMTRAINTYACSILTYSFGIIPWSKTDMENLQRKMRTLMTKAHKHHPKSSIERTTLPRNKGGRGLLDIMELANGQIECLRTYFKDKSGTSEIYKVLCEADESTPLQLHKEQLSYNHQTIQEKVQRWREKPLHGRHFNEVNQDHVDIEASNYWLTSGAMYPETEGFLLAIQDQVISTRNYCKHIIKDRTITDDRCRYGCPTNETIQHITGGCQMFAGNEYKERHDAVGKILHQEMATKLTLIHSEKVPYYKYRPETILENERYKLYWDRTVLTDKTVPHNRPDILLVDKHQKAAILIDVAIPNNNNMRQKEVEKISKYRDLEFQIKRQWGMISTRTIPIIISTTGIVPKNLKRNIKELGLSEYICNIMQKAVLLGTARTVRKFLGSEGQVQGSRVRGPEVRREPGGPQRPDTTELCPSDILNIWD

SEQ ID NO: 7443 - protein, 1030 aa, Harmonia axyridis
MNRCVIDFEGTDPLRRPILPRLRTSKKLSHLLVMTNKEIIPKYLSDYHDLESLHLIIYCAAFSIATVLGVKPKPKSQQPAREKQQNKPHWQKRLEDKVHSIRQEIGRLTQFAKGSPSRRLQKMVNIIMDRHRQHTTYDPNNENAQQILDTLKQKLSVYSERLRRYNESYRRKQDNMIFENSERKFYRMLNNNMSATPGSYPTVEDIENFWTDQLATPTPYNSQADWIRNEEKSYETMEQMPHNAVSIEEFHKVLKNTHNWKSPGPDGIHNFWLKKFWCIHGRLVETINDVISNPTEMPKFLTTGTTYLLPKDMQHTADPSKYRPITCLPTINKIITSCIASRIYKHCETNNIMTAQQKGCSKNALGSKELLIIDSIICNQAFKKHRNLFMTYFDYKKAFDSIPHGWLTKILEIYKIDPITINFLKYAMCNWRTNIELSTANITTKDIPIKRGIFQGDSLSPLWFCLALNPLSKQLNATEKGFNVKGNRNNIALNHLLYMDDLKLITGNKNHLQIMVKLVENFSEDVGMKFGLDKCRTISVVRGKIQDEPIALSNGQEIEAMKSDDLYKYLGMKQNRRINHQRMKEDLTTEFIRRINKILKTNLNSKNMTRAINTYACSILTYSFGIIPWTKTDMENLQRKMRTLMTKAHKHHPKSSIERTTLPRNKGGRGLLDLMELAHAQIECLRTYFKDKSGTSEIYKVLCEADESTPLQLHKEQLSYNHQTIQEKLQRWREKPLHGRHFNEVNQDHVDIEASNYWLTSGAMYPETEGFLLAIQDQVISTKNYCKHIIKDRTITDDRCRYGCPTNETIQHITGGCQMFAGNEYKERHDAVGKILHQDMATKLTLINSEKVPYYKYRPETILENERYKLYWDRTVLTDKTVPHNRPDILLVDKQQKAAILIDVAIPNNNNMRQKEVEKISKYRDLEFQIKRQWGMISTRTIPIIISTTGIVPKNLKRNIKQLGLSEYICNIMQKAVLLGTARTVRKFLGSEGQVQGSRVRGPEVRREPGGPQGPDTTELCPSDILNIWD

SEQ ID NO: 7444 - protein, 1268 aa, Harmonia axyridis
MMVNLRNRNIEPLPEVRQGVSGAGAGHDSMRDVGDRVLRRRASVEQNATPPQSQHSRRRITRVSPTAEGAVQDPQPALTQAGLPRRRMKWTSSINETIMRIYYEVTNMEEDKIGYRQKLFAEFHRNYPELQVSEQRVADQYRVILRNKLVPDERLNTIKNEVQLRLQNRNLTNNETTIEENYDCAENQHNINAQMNSEEQNNADVLAISDAQRRNIYAAPVVNPEEDQRELLERLFATMNRCIIDFEGTDPLRRPILPRLRTSKKLSHLLVMTNKEIIPKYLSDYHDLESLHLIIYCAAFSIATVLGVKPKPKSQQPAREKQQNKPHWQKRLEDKVHSIRQEIGRLTQFAKGSPSRRLQKMVNIIMDRHRQHTTYDPNNENAQQILDTLKQKLSVYSERLRRYNESYRRKQDNMIFENSERKFYRMLNNNMSATPGSYPTVEDIENFWTDQLATPTPYNSQADWIRNEEKSCETMEQMPHNAVSIEEFHEVLINTHNWKSPGPDGIHNFWLKKFWCIHGRLVETINDVISNPTEMPKFLTTGTTYLLPKDMQHTADPSKYRPITCLPTIYKIITSCIASRIYKHCETNNIMTAQQKGCSKNALGSKELLIIDSIICNQAFKKHRNLFMTYFDYKKAFDSIPHGWLTKILEIYKIDPITINFLKYAMCNWRTNIELSTANITTKDIPIKRGIFQGDSLSPLWFCLALNPLSKQLNATEKGFNVKGNRNNIALNHLLYMDDLKLITGNKNHLQIMVKLVENFSEDVGMKFGLDKCRTISVVRGKIEDEPIALSNGQEIEAMKSDDLYKYLGMKQNRRINHQRMKGDLTKEFIRRIDKILKTNLNSKNMTRAINTYACSILTYSFGIIPWTKTDMENLQRKMRTLMTKAHKHHPKSSIERTTLPRNKGGRGLLDIMELAHGQIKCLRTYFKDKSGTSEIYKVLCEADESTPLQLHKEQLSYNHQTIQEKLQRWREKPLHGRHFNEVNQDHVDIEASNYWLTSGAMYPETEGFLLAIQDQVISTKNYCKHIIKDRTITDDRCRYGCPTNETIQHITGGCQMFAGNEYKERHDAVGKILHQEMATKLALINSEKVPYYKYRPETILENERYKLYWDRTVLTDKTVPHNRPDILLVDKQQKAAILIDVAIPNNNNMRQKEVEKISKYRDLEFQIKRQWGMISTRTIPIIISTTGIVPKNLKRNIKQLGLSEYICNIMQKAVLLGTARTVRKFLGSEGQVQGSHIRGPEVRREPGGPQEPDTTELCPSDILNIWD

SEQ ID NO: 7445 - protein, 1268 aa, Harmonia axyridis
MMVNLRNRNIEPLPEVRQGVSGAGAGHDSMRDVGDRVLRRRASVEQNATPPQSQHSRRRITRVSPTTEGAAQDPQPALTQAGLPRRRMKWTSSINETIMRIYYEVTNMEEDKIGYRQKLFAEFHRNYPELQVSEQRVADQYRVILRNKLVPDERLNTIKNEVQLRLQNRDLTNNETTIEENYDCAENQQNINAQMNTEEQNNADVIAISDAQRRNIYVAPVENPEEDQRELLERLSATMNRCVIDFEGTNPLRRPILPRLRTSKKLSHLLVMTNKEIIPKYLSDYHDLESLHLIIYCAAFSIATVLGVKPKPKSQQPAREKQQNKPHWQKRLENKVHSIRQDIGRLTQFAKGSPSRKLQKMVNIIMDRHRQHTTYDPNNENAQQILDTLKQKLSVYSERLRRYNESYRRKQDNMIFENSERKFYRMLNNNMSATPGSYPTVEDIENFWTDQLASPTPYNSQADWIRSEEKSCETIEHMPHNAVSVEEFHEILKNAHNWKSPGPDGIHNFWLKKFWCIHGRLVETINEVMRNPTEMPKFLTTGTTYLLPKDLQHTADPSKYRPITCLPTIYKIITSCIASRIYKHCETNNIMTAQQKGCSKNALGSKELLIIDSIRCNQAFKKHRNLFMTYFDYKKAFDSIPHGWLTKILEIYKIDPITINFLKYAMCNWRTNIELSTANITTKEIPIKRGIFQGDSLSLLWFCLALNPLSKQLNATERGFNVKGNRNTIALNHLLYMDDLKLITGNRNHLQIMVKLVENFSKDVGMKFGLDKCRTISVVRGKIQDEPIALSNGQEIEAMKSDDLYKYLGMKQNRRINHQRMKEDLTTEFIRRINKILKTNLNSKNMTRAINTYACSILTYSFGIIPWSKTDMENLKRKMRTLMTKAHKHHPKSSIERTTLPRNKGGRGLLDIMELAHGQIECLRTYFKHKSGTSEIYKVLCEADESTPLQLHKEQLSYNHQTIQEKLQRWREKPLHGRHFNEVNQDHVDIEASNYWLTSGAMYPETEGFLLAIQDQVISTRNYCKHIIKDRTITDDRCRYGCPTNETIQHITGGCQMFAGNEYKERHDAVGKILHQEMATKLTLIHSEKVPYYKYRPETILENERYKLYWDRTVLTDKTVPHNRPDILLVDKHQKAAILIDVAIPNNNNMRQKEVEKISKYRDLEFQIKRQWGMISTRTIPIIISTTGIVPKNLKRNIKQLGLSEYIYNIMQKAVLLGTARTVRKFLGSEGQVQGSLVRGPEVRREPGGPQGPDTTELCPSDILNIWD

SEQ ID NO: 7446 - protein, 1268 aa, Harmonia axyridis
MMVNLRNRNIEPLPEVRQGVSGAGAGHDSMRDVGDRVLRRRASVEQNATPPQSQHSRRRITRVSPTAEGAAQDPQPALTQAGLPRRRMKWTSSINETIMRIYYEVTNMEEDKIGYRQKLFAEFHRNYPELQVSEQRVADQYRVILRNKLVPDEKLNTIKNEVQLRLQNRNLTNNETTIEENYDCAENQHNINAQMNSEEQNNADVLAISDAQRRNIYAAPVVNPEEDQRELLERLFATMNRCVIDFEGTDPLRRPTLPRLRTSKKLSHLLVMTNKEIIPKYLSDYHDLESLHLIIYCAAFSIATVLGVKPKPKSQQPAREKQQNKPHWQKRLEDKVHSIRQEIGRLTQFAKGSPSRRLQKMVHILMDRHRQHTTYDPNNENAQQILDTLKQKLSVYSERLRRYNESYRRKHDNMIFENSERKFYRMLNNNMSATPGSYPTVEDIENFWTDQLATPTTYNSQADWIRNEEKSCETMEQMPHNAVSIEEFHEILKNTHNWKSPGPDGIHNFWLKKFWCIHGRLVETINDVISNPTEMPKFLTTGTTYLLPKDMQHTADPSKYRPITCLPTIYKIITSCIASRIYKHCETNNIMTAQQKGCSKNALGSKELLIIDSIICNQAFKKHRNLFMTYFDYKKAFDSIPHGWLTKILEIYKIDPITINFLKYAMCNWRTNIELSTANITTKDIPIKRGIFQGDSLSPLWFCLALNPLSKQLNATEKGFNVKGNRNNIALNHLLYMDDLKLITGNKNHLQIMVKLVENFSEDVGMKFGLDKCRTISVVRGKIQDEPIALSNGQEIEAMKSDDLYKYLGMKQNRRINHQRMKEDLTTEFIRRINKILKTNLNSKNMTRAINTYACSILTYSFGIIPWTKTDMENLQRKMRTLMTKAYKHHPKSSIERTTLPRNKGGRGLLDIMELAHGQIECLRTYFKDKSGTSEIYKVLCEADESTPLQLHKKQLSYNHQTIQEKLQRWREKPLHGRHFNEVNQDHVDIEASNYWLTSGAMYPETEGFLLAIQDQVISTKNYCKHIIKDRTITDDRCRYGCPTNETIQHITGGCQMFAGNEYKERHDAVGKILHQEMATKLTLINSEKVPYYKYRPETILENERYKLYWDRTVLTDKTVPHNRPDILLVDKQQKAAILIDVAIPNNNNMRQKEVEKISKYRDLEFQIKRQWGMISTRTIPIIISTTGIVPKNLKRNIKQLGLSEYICNIMQKAVLLGTARTVRKFLGSEGQVQGSRVRGPEVRREPGGPQGPDTTELSPSDILNIWD

SEQ ID NO: 7447 - protein, 1181 aa, Harmonia axyridis
MKWTSSINETIMRIYYEVTNMEEDKIGYRQKLFAEFHRNYPELQVSEQRVADQYRVILRNKLVPDERLNIIKNEVQLRLQNRDLTNNETTIEENYDCAENQHNINAQMNTEEQNNADVIAISDAQRRNIYAAPVENPEEDQREILERLSATMNRCVIDFEGTDPLRRPILPRLRTSKKLSHLLVMTNKEIIPKYLSDYHDLESLHLIIYCAAFSIATVLGVKPKPKSQQPAREKQQNKPHWQKRLENKVHSIRQDIGRLTQFAKGSPSRKLQKMVNIIMDRHRQHTTYDPNNENAQQILDTLKQKLSVYSERLRRYNESYRRKQDNMIFENSERKFYRMLNNNMSATPGSYPTVEDIENFWTDQLATLTPYNSQADWIRSEEKSCETIEHMPHNAVSIEEFHEILKNTHNWKSPGPDGIHNFWLKKFWCIHDRLVETINDVIRNPTEMPKFLTAGTTYLLPKNLQNTADPSKYRPITCLPTIYKIITSCIASRIYKHCETNNIMTAQQKGCSKNALGSKELLIIDSIICNQAFKKHRNLFMTYFDYKKAFDSIPHGWLTKILEIYKINPITINFLKYAMCNWRTNIELSTANITTKEIPIKRGIFQGDSLSPLWFCLALNPLSKQLNATEKGFNVKGNRNTIALNHLLYMDDLKLITGNKNHLQIMVELVENFSKDVGMKFGLDKCRTISVVRGKIQDEPIALSNGQEIEAMKSDDLYKYLGMKQNRRINHQRMKEDLTTEFIRRINKILKTNLNSKNMTRAINTYACSILTYSFGIIPWTKTDMENLQRKMRTLMTKAHKHHPKSSIERTTLPRNKGGRGLLDIMELANGQIECLRTYFKDKSGTSEIYKVLCEADESTPLQLHKEQLSYNHQTIQEKLQRWREKPLHGRHFNEVNQDHVDIEASNYWLTSGVMYPETEGFLLAIQDQVISTRNYCKHIIKDRTITDDRCRYGCPTNETIQHITGGCQMFAGNEYKERHDAVGKILHQEMATKLTLINSEKMPYYKYRPETILENERYKLYWDRTVLTDKTVPHNRPDILLVDKHQKAAILIDVAIPNNNNMRQKEVEKISKYRDLEFQIKRQWGMISTRTIPIIISTTGIVPKNLKRNIKQLGLSEYICNIMQKAVLLGTARTVRKFLGSEGQVQGSRVRGPEVRRDPGGPQGPDTTELCPSDILNIWD

SEQ ID NO: 7448 - protein, 1268 aa, Harmonia axyridis
MMVNLRNRNIEPLPEVRQGVSGAGAGHDSMRDVGDRVLRRRASVEQNATPPQSQHSRRRITRVSPTAEGAAQDPQPALTQAGLPRRRMKWTSSINETIMRIYYEVTNMEEDKIGYRQKLFAEFHRNYPELQVSEQRVADQYRVILRNKLVPDERLNTIKNEVQLRLQNRNLTNNETTIEENYDCAENQHNINAQMNSEEQNNADVLAISDAQRRNIYAAPVVNPEEDQRELLERLFATMNRCVIDFEGTDPLRRPILPRLRTSKKLSHLLVMTNKKIIPKYLSDYHDLESLHLIIYCAAFSIATVLGVKPKPKSQQPAREKQQNKPHWQKRLEDKVHSIRQEIGRLTQFAKGSPSRRLQKMVNIIMDRHRQHTTYDPNNENAQQILDTLKQKLSVYSERLRRYNESYRRKQDNMIFENSERKFYRMLNNNMSATPGSYPTVEDIENFWTDQLATPTPYNSQADWIRNEEKSCETMEQMAHNAVSIEEFHEILKNTHNWKSPGPDGIHNFWLKKFWCIHGRLVETINDVISNPTEMPKFLTTGTTYLLPKDMQHTADPSKYRPITCLPTIYKIITSCIAFRIYKHCETNNIMTAQQKGCSKNALGSKELLIIDSIICNQAFKKHRNLFMTYFDYKKAFDSIPHGWLTKILEIYKIDPITINFLKYAMCNWRTNIELSTANITTKDIPIKRGIFQGDSLSPLWFCLALNPLSKQLNATEKGFNVKGNRNNIALNHLLYMDDLKLITGNKNHLQIMVKLVENFSEDVGMKFGLDKCRTISVVRGKIQDEPIALSNGQEIEAMKSDDLYKYLGMKQNRRINHQRMKEDLTTEFTRRINKILKTNLNSKNMTRAINTYACSILTYSFGIIPWTKTDMENLQRKMRTLMTKAHKHHPKSSIERTTLPRNKGGRGLLDIMELAHGQIECLRTYFKDKSGTSEIYKVLCEADESTPLQLHKEQLSYNHQTIQEKLQRWREKPLHGRHFNEVNQDHVDIEASNYWLTSGAMYPETEGFLLAIQDQVISTKNYCKHIIKDRTITDDRCRYGCPTNETIQHITGGCQMFAGNEYKERHDAVGKILHQEMATKLTLINSEKVPYYKYRPETILENERYKLYWDRTVLTDKTVPHNRPDILLVDKQQKAAILIDVAIPNNNNMRQKEVEKISKYRDLEFQIKRQWGMISTRTIPIIISTTGIVPKNLKRNIKQLGLSEYICNIMQKAVLLGTARTVRKFLRSEGQVQGSRVSGPEVRREPGGPQGPDTTELSPSDILNIWD

SEQ ID NO: 7449 - protein, 908 aa, Harmonia axyridis
MVNIIMDRHRQHTTYDPNNENAQQILDTLKQKLSVYSERLRRYNESYRRKQDNMIFENSERKFYRMLNNNMSATPGSYPTVEDIENFWTDQLATPTPYNSQADWIRNEEKSCETMEQMLHNAVSIEEFHEILKNTHNWKSPGPDGIHNFWLKKFWCIHGRLVETINDVISNPTEMPKFLTTGTTYLLPKDVQHTADPSKYRPITCLPTIYKIVTSCIASRIYKHCETNNIMTAQQKGCSKNALGSKELLIIDSIICNQAFKKHRNLFMTYFDYKKAFDSIPHGWLTKILEIYKIDPITINFLKYAMCNWRTNIELSTANITTKDIPIKRGIFQGDSLSPLWFCLALNPLSKQLNATEKGFNVKGNRNNIALNHLLYMDDLKLITGNKNHLQIMVKLVENFSEDVGMKFGLDKCRTISVVRGKIQDEPIALSNGQEIEAMKSDDLYKYLGMKQNRRINHQRMKEDLTTEFIRRINKILKTNLNSKNMTRAINTYACSILTYSFGIIPWTKTDMENLQRKMRTLMTKAHKHHPKSSIERTTLPRNKGGRGLLDIMELAHGQIECLRTYFKDKSGTSEIYKVLCEADESTPLQLHKEQLSYNHQTIQEKLQRWREKPLHGRHFNEVNQDHVDIEASNYWLTSGAMYPETEGFLLAIQDQVISTKNYCKHIIKDRTITDDRCRYGCPTNETIQHITGGCQMFAGNEYKERHDAVGKILHQEMATKLTLINSEKVPYYKYRPETILENERYKLYWDRTVLTDKTVPHNRPDILLVDKQQKAAILIDVAIPNNNNMRQKEVEKISKYRDLEFQIKRQWGMISTRTIPIIISTTGIVPKNLKRNIKQLGLSEYICNIMQKAVLLGTARTVRKFLGSEGQVQGSRVRGPEVRREPGGPQGPDTTELSPSDILNIWD

SEQ ID NO: 7450 - protein, 1268 aa, Harmonia axyridis
MMVNLRNRNIEPLPEVRQGVSGAGAGHDSMRDVGDRVLRRRASVEQNATPPQSQHSRRRITRVSPTAEGAAQDPQPALTQAGLPRRRMKWTSSINETIMRIYYEVTNMEENKIGYRQKLFAEFHRNYPELQVSEQRVADQYRVILRNKLVPDERLNTIKNEVQLRLQNRNLTNNETTIEENYDCAENQHNINAQMNSEEQNNADVIAISDAQRRNIYAAPVVNPEEDQRELLERLFATMNRCVIDFEGTDPLRRPILPRLRTSKKLSHLLVMTNKEIIPKYLSDYHDLESLHLIIYCAAFSIATVLGVKPKPISQQPAREKQQNKPHWQKRLEDKVHSIRQEIGRLTQFAKGSPSRRLQKMVNIIMDRHRQHTTYEPNNENAQQILDTLKQKLSVYSERLRRYNESYRRKQDNMIFENSERKFYRMLNNNMSATPGSYPTVEDIENFWTDQLATPTPYNSQADWIRNEEKSCETMEQMPHNAVSIEEFHEILKNTHNWKSPGPDGIHNFWLKKFWCIHGRLVETINDVISNPTEMPKFLTTGTTYLLPKDMQHTADPSKYRPITCLPTIYKIITSCIASRIYKHCETNNIMTAQQKGCSKNALGSKELLIIDSIICNQAFKKHRNLFMTYFDYKKAFDSIPHGWLTKILEIYKIDPITINFLKYAMCNWRTNIELSTANITTKDIPIKRGIFQGDSLSPLWFCLALNPLSKQLNATEKGFNVKENRNNIALNHLLYMDDLKLITGNKNHLQIMVKLVENFSEDVGMKFGLDKCRTISVVRGKIQDEPIALSNGQEIEAMKSDDLYKYLGMKQNRRINHQRMKEDLTTEFIRRINKILKTNLNSKNMTRAINTYACSILTYSFGIIPWTKIDMENLQRKMRTLMTKAHKHHPKSSIERTTLPRNKGGRGLLDIMELAHGQIECLRTYFKDKSGTSEIYKVLCEADESTPLQLHKEQLSYNHQTIQEKLQRWREKPLHGRHFNEVNQDHVDIEASNYWLTSGAMYPETEGFLLAIQDQVISTKNYCKHIIKDRTITDDRCRYGCPTNETIQHITGGCQMFAGNEYKERHDAVGKILHQEMATKLTLINSEKVPYYKYRPETILENERYKLYWDRTVLTDKTVPHNRPDILLVDKQQKAAILIDVAIPNNNNMRQKEVEKISKYRDLEFQIKRQWGMISTRTIPIIISTTGIVPKNLKRNIKQLGLSEYICNIMQKAVLLGTARTVRKFLGSEGQVQGSRVRGPEVRREPGGPQGPDTTELSPSDILNIWD

SEQ ID NO: 7451 - protein, 1268 aa, Harmonia axyridis
MMVNLRNRNIEPLPEVRQGVSGAGAGHDSMRDVGDRVLRRRASVEQNATPPQSQHSRRRITRVSPTAEGAAQDPQPALTQAGLPRRRMKWTSSINETIMRIYYEVTNMEEDKIGYRQKLFAEFQRNYPELQVSEQRVADQYRVILRNKLVPDERLNTIKNEVQLRLQNRDLTNNERTIEKNYDCAENQQNINAQMNTEEQNNADVIAISDAQRRNIYAAPVENPEEDQRELLERLSDTMNRCVIDFEGTDPLRRPILPRLRTSKKLSHLLVMTNKEIIPKYLSDYHDLESLHLIIYCAAFSIATVLGVKPKPKSQQPAREKQQNKPHWQKRLENKVHSICQDIGRLTQFAKGSPSRKLQKMVNIIMDRHRQHSTYDPNNENAQQILDTLKQKLSVYSERLRRYNESYRRKQDNMIFENSERKFYRMLNNNMSATPGSYPIVEDIENFWTDQLASPTPYNSQADWIRSEEKSCETIEHMPHNAVSIEEFHEILKKAHNWKSPGPDGIHNFWLKRFWCIHGRLVETINEVMRNPTEMPKFLTTGTTYLLPKDLQHTADPSKYRPFTCLPTIYKIITSCIASRIYKHCETNNIMTAQQKGYSQNALGSKELLIIDSIICNQAFKKHRNLFMTYFDYKKAFDSIPHGWLTKILEIYKIDPITINFLKYAMCNWRTNIELSTANITTKEIPIKRGIFQGDSLSPLWFCLALNPLSKQLNATEKGFNVKGNRNTIALNHLLYMDDLKLITGNKNHLQIMVKLVENFSKDVGMKFGLDKCRTISVVRGKIQDEPIALSNGQEIEAMKSDDLYKYLGMKQNRRINHQRMKEDLTTEFIRRINKILKTNLNSKNMTRAINTYACSILTYSFGIIPWSKADMENLQRKMRTLMTKAHKHHPKSSIERTTLPRNKGGRGLLDIMELAHGQIECLRTYFKDKSGTSEIYKVLCEADESTPLQLHKEQLSCNHQTIQEKMQRWREKPLHGRHFNEVNQDHVDIEASNYWLTSGAMYPETEGFLLAIQDQVISTRNYCKHIIKDRTITDDRCRYGCPTNETIQHITGGCQMFAGNEYKERHDAVGNILHQEMATKLTLIHSEKVPYYKYRPETILENERYKLYWDRTVLTDKTVPHNRPDILLVDKHQKAAILIDVAIPNNNNMRQKEVEKISKYRDLEFQIKRQWGMISTRTIPIIISTTGIIPKNLKRNIKQLGLSEYVCNIMQKAVLLGTARTVRKFLGSEGQVRGSRVRGPEVRREPGGPQRPDTTELCPSDILNIWD

SEQ ID NO: 7452 - protein, 1268 aa, Harmonia axyridis
MMVNLRNRNIEPLPEVRQGVSGTGAGHDSMRDVGDRVLRRRASVDQNATPPQSQHSRRRITRVSPTAEGAVQDPQPALTQAGLPRRRMKWTSSINETIMRIYYEVTNMEEDKIGYRQKLFAEFHRNYPELQVSEQRVADQYRVILRNKLVPDERLNTIKNEVQLRLQNRNPTNNEVTIEENYDCAENQHNINAQINTEEQNSGDLALARDDQWRNIQTATMENREESRRDLLEQLSVTMNRYFIEFEGTDPLKRPILPRLKTSKKLSHILHIMNKEIIPPFFSNDQNLESLHLITYCAASTISAVLGVKPKPRSEQPAQKKQHNKPHWQNRLEAKVHSLRQDIGRLTQFEKGSPSRKLQKIVDAIMDRYRRHANYDANNESAQETLDTLKQKLSVYSERLRRYNESYKRKHDNMIFENSEKNFYRMLNEQTSTKLVSPPSAEDMESFWTDQLSTPTPFNSKAHWIRREEKSCETIENMPHSVITSEELQEILKNTHNWKSPGPDGIHNFWLKKFWCLHGRLVEYINNIIHNPTEMPTFLTTGITYLIPKDFQNTMDPSKYRPITCLPTIYKIITSFLASRIYKHCEKNKIITTQQKGCSKNAQGSKEQLVIDSIICNQAFKKHRNLFMTYFDYKKAFDSLPHGWLKKILEIYKIDPIITNFLKLAMDNWKTNIELSTANIKTKLIPIKRGIFQGDSKSPLWFCLALNPLSKQLNATEKGFNIKGNNNTTTLNHLLYMDDLKLITGNKNHLEIMVKLVEHFSKDVGMDFGLDKCRTLSVVRGRIQDEPITLANGQQIEAMKLDDLYKYLGMKQNRRINHQRMKQDLTTEFIRRTKKILKTNLNSRNMTRAINTYACSILTYSFGIVPWSKTDIENLQRKMRTLMTKANKHHPKSSIERTTLPRNKGGRGLTYIMELASGQIESLREYFRDQASTSEFYKILCEADESTPLQLHKDQFSYNHQTNQEKLDRWREKPLHGRHFNEVNQDHVDIEASNYWLTSGAMYPETEGFLLAIQDQVISTRNYCRHIIKDRTITDDRCRYGCPTNETIQHITGGCQMFAGNEYKERHDAVGKILHQEMATKLTLIQSEKVPYYKYRPETILENERYKLYWDRTILTDKTVPHNRPDILLVDKHQKAAILIDVAIPNNNNLRQKEVEKISKYRDLEFQIKRQWGMISTRTIPIIISTTGIVPKNLKRNIKQLGLSEYICNVMQKAVLLGTARTVRKFLGSEGQVQGSRVRGPEVRRQPGGPQGPDTTELYPSDILNIWD

SEQ ID NO: 7453 - protein, 1268 aa, Harmonia axyridis
MMVNLRNRNIEPLPEVRQGVSGAGAGHDSMRDVGDRVLRRRASVEQNATPPQSQHSRRRITRVSPTAEGAAQDPQPALTQAGLPRRRMKWTSSINETIMRIYYEVTNMEEDKIGYRQKLFAEFHRNYPELQVSEQRVADQYRVILRNKLVPDERLNTIKNEVQLRLQNRDLTNNETTIEENYDCAENQQNINAQMNTEEQNNADVIAISDAQRRNIYAAPVENPEEDQRELLERLSATMNRCVIDFEGTDPLRRPILPRSRTSKKLSHLLVMTNKEIIPKYLSDYHDLESLHLILYCAAFSIATVLGVKPKPKSQQPAREKQQNKPHWQKRLENKVHSIRQDIGRLTQFAKGSPSRKLQKMVNIIMDRHRQHTTYDPNNENAQQILDTLKQKLSVYSERLRRYNESYRRKQDNMIFENSERKFYRMLNNNMSATPGSYPTVEDIENFWTDQLASPTPYNSQADWIRSEEKSCETIEHMPHNAVSLEEFHEILKNAHNWKSPGPDGIHNFWLKKFWCIHGRLVETINEVMRNPTEMPKFLTTGTTYLLPKDLQHTADPSKYRPITCLPTIYKIITSCIASRIYKHCETNNIMTAQQKGCSKNALGSKELLIIDSIICNQAFKKHRNLFMTYFDYKKAFDSIPHGWLTKILEIYKIDPITINFLKYAMCNWRTNIELSTANITTKEIPIKRGIFQGDSLSPLWFCLALNPLSKQLNATEKGFNVKGNRNTIALNHLLYMDDLKLITGNRNHLQIMVKLVENFSEDVGMKFGLDKCRTISVVRGKIQDEPIALSNGQEIEAMKSDDLYKYLGMKQNRRINHQRMKEDLTTEFIRRINKILKTNLNSKNMTRAINTYACSILTYSFGIIPWSKTDMENLQRKMRTLMTKAHKHHPKSSIERTTLPRNKGGRGLLDIMELAHGQIECLRTYFKHKSGTSEIYKVLCEADESTPLQLHKEQLSYNHQTIQEKMQRWREKPLHGRHFNEVNQDHVDIEASNYWLTSGAMYPETEGFLLAIQDQVISTRNYCKHIIKDRTITDDRCRYGCPTNETIQHITGGCRMFAGNEYKERHDAVGKILHQEMATKLTLIHSEKVPYYKYRPETILENERYKLYWDRTVLTDKTVPHNRPDILLVDKHQKAAILIDVAIPNNNNMRQKEVEKISKYRDLEFQIKRQWGMISTRTIPIIISTTGIVPKNLKRNIKQLGLSEYIYNIMQKAVLLGTARTVRKFLGSEGQVQGSLVRGPEVRREPGGPQGPDTTELCPSDILNIWD

SEQ ID NO: 7454 - protein, 1268 aa, Harmonia axyridis
MMVKLRNRNIEPLPEVRQGVSGAGAGHDSMRDVGDRVLRRRASVEQNATPPQSQHSRRRITRVSPTAEGAAQDPQPALTQAGLPRRRMKWTSSINETIMRIYYEVTNMEEDKIGYRQKLFAEFHRNYPELQVSEQRVADQYRVILRNKLVPDERLNTIKNEVQLRLQNRNLTNNETTIEENYDCAENQHNINAQMNSEEQNNADVLAISDAQRRNIYAAPVVNPEEDQRELLERLFATMNRCVIDFEGTDPLRRPILPRLRTSKKLSHLLVMTNKEIIPKYFSDYHDLESLHLIIYCAAFSIATVLGVKPKPKSQQPAREKQQNKPHWQKRLEDKVHSIRQEIGRLTQFAKGSPSRRLQKMVNIIMDRHRQHTTYDPNNENAQQILDTLKQKLSVYSERLRRYNESYRRKQDNMIFENSERKFYRMLNNNMSATPGSYPTVEDIENFWTDQLATPTPYNSQADWIRNEEKSYETMEQMPHNAVSIEEFHEVLKNTHNWKSPGPDGIHNFWLKKFWCIHGRLVETINDVISNPTEMPKFLTTGTTYLLPKDMQHTADPSKYRPITCLPTIYKITTSCIASRIYKHCETNNIMTAQQKGCSKNALGSKELLIIDSIICNQAFKKHRNLFMTYFDYKKAFDSIPHGWLTKILEIYKIDPITINFLKYAMCNWRTNIELSTANITTKDIPIKRGIFQGDSLSPLWFCLALNPLSKQLNATEKGFNVKGNRNNIALNHLLYMDDLKLITGNKNHLQIMVKLVENFSEDVGMKFGLDKCRTISVVRGKIQDEPIALSNGQEIEAMKSDDLYKYLGMKQNRRINHQRMKEDLTTEFIRRINKILKTNLNSKNMTRAINTYACSILTYSFGIIPWTKTDMENLQRKMRTLMTKAHKHHPKSSIERTTLPRNKGGRGLLDLMELAHAQIECLRTYFKDKSGTSEIYKVLCEADESTPLQLHKEQLSYNHQTIQEKLQRWREKPLHGRHFNEVNQDHVDIEASNYWLTSGAMYPETEGFLLAIQDQVISTKNYCKHIIKDRTITDDRCRYGCPTNETIQHITGGCQMFAGNEYKERHDAVGKILHQEMATKLTLINSEKVPYYKYRPETILENERYKLYWDRTVLTDKTVPHNRPDILLVDKQQKAAILIDVAIPNNNNMRQKEVEKISKYRDLEFQIKRQWGMISTRTIPIIISTTGIVPKNLKRNIKQLGLSEYICNIMQKAVLLGTARTVRKFLGSEGQVQGSRVRGPEVRREPGEPQGPDTTELCPSDILNIWD

SEQ ID NO: 7455 - protein, 1268 aa, Harmonia axyridis
MMVNLRNRNIEPLPEVRQGVSGAGAGHDSMRDVGDRVLRRRASVDQNATPPQSQHSRRRITRVSPTAEGAVQDPQPALTQAGLPRRRMKWTSSINETIMRIYYEVTNMEEDKIGYRQKLFAEFHRNYPELQVSEQRVADQYRVILRNKLVPDERLNTIKNEVQLRLQNRKPTINEVTIEENYDCAENQHNINAQINTEEQNSGDLALARDERWRNIQTATMENRVESRRDLLEQLSVTMNRYFIEFEGTDPLKRPILPRLKTSKKLSHILHIMNKEIIPPFFSNDQNLESLHLITYCAASTISAVLGVKPKPRSEQPAQKKQHNKPHWQNRLEAKVHSLRQDIGRLTQFEKGSPSRKLQKIVDAIMDRHRRHANYDANNESAQETLDTLKQKLSVYSERLRRYNESYKRKHDNMIFENSEKNFYRMLNEQTSTKLVSPPSAEDMESFWTDQLSTPTPFNSKAHWIRREEKSCETIENMPHSVITSEELQEILKNTHSWKSPGPDGIHNFWLKKFWCLHGRLVEYINNIIHNPTEMPTFLTTGITYLIPKDFQNTMDPSKYRPITCLPTIYKIITSCLASRIYKHCEKNKIITTQQKGCSKNAQGSKEQLVIDSIICNQAFKKHRNLFMTYFDYKKAFDSLPHGWLKKILEIYKIDPIITNFLKLAMDNWKTNIELSTANIKTKLIPIKRGIFQGDSMSPLWFCLALNPLSKQLNATEKGFNIKGNNNTTTLNHLLYMDDLKLITGNKNHLEIMVKLVEHFSKDVGMEFGLDKCRTLSVVRGRIQDEPITLANGQQIEAMKLDDLYKYLGMKQNRRINHQRMKQDLTTEFIRRTKKILKTNLNSRNMTRAINTYACSILTYSFGIVPWSKTDIENLQRKMRTLMTKANKHHPKSSIERTTLPRNKGGRGLTDIMGLASGQIESLREYFRDQASTSEFYKILCEADESTPLQLHKEQFSYNHQTNQEKLDRWREKPLHGRHFNEVNQDHVDIEASNYWLTSGAMYPETEGFLLAIQDQVISTRNYCRHIIKDRTITDDRCRYGCPTNETIQHITGGCQMFAGNEYKERHDAVGKILHQEMATKLTLIQSEKVPYYKYRPETILENERYKLYWDRTVLTDKTVPHNRPDILLVDKHQKAAILIDVAIPNNNNLRQKEVEKISKYRDLEFQIKRQWGMISTRTIPIIISTTGIVPKNLKRNIKQLGLSEYICNVMQKAVLLGTARTVRKFLGSEGQVQGSRVRGPEVRRQPGGPQGPDTTELYPSDILNIWD

SEQ ID NO: 7456 - protein, 1267 aa, Harmonia axyridis
MVNLRNRNIEPLPEVRQGVSGAGAGHDSMRDVGDRVLGRRASVEQNATPPQSQHSRRRITRVSPTAEGAAQDPQPALTQAGLPRRRMKWTSSINETIMRIYYEVTNMEEDKIGYRQKLFAEFHRNYPELQVSEQRVADQYRVILRNKLVPDERLNTIKNEVQLRLQNRNLTNNETTIEENYDCAENQHNINAQMNSEEQNNADVLAISDAQRRNIYSAPVVNPEEDQRELLERLFATMNRCVIDFEGTDPLRRPILPRLRTSKKLSHLLVMTNKEIIPKYLSDYHDLESLHLIIYCAAFSIATVLGVKPKPKSQQPAREKQQNKPHWQKRLEDKVHSIRQEIGRLTQFAKGSPSRRLQKMVNIIMDRHRQHTTYDPNNENAQQILDTLKQKLSVYSERLRRYNESYRRKQDNMIFENSERKFYRMLNNNMSATPGSYPTVEDIENFWTDQLATPTPYNSQADWIRNEEKSCETMEQMPHNAVSIEEFHEILKNTHNWKSPGPDGIHNFWLKKFWCLHGRLVETINDVISNPTEMPKFLTTGTTYLLPKDMQHTADPSKYRPITCLPTIYKIVTSCIASRIYKHCETNNIMTAQQKGCSKNALGSKELLIIDSIICNQAFKKHRNLFMTYFDYKKAFDSIPHGWLTKILEIYKIDPITINFLKYAMCNWRTNIELSTANITTKDISIKRGIFQGDSLSPLWFCLALNPLSKQLNATEKGFNVKGNRNNIALNHLLYMDDLKLITGNKNHLQIMVKLVENFSEDVGMKFGLDKCRTISVVRGKIQDEPIALSNGQEIEAMKSDDLYKYLGMKQNRRINHQRMKEDLTTEFIRRINKILKTNLSSKNMTRAINTYACSILTYSFGIIPWTKTDMENLQRKMRTLMTKAHKHHPKSSIERTTLPRNKGGRGLLDIMELAHGQIECLRTHFKDKSGTSEIYKVLCEADESTPLQLHKEQLSYNHQTIQEKLQRWREKPLHGRHFNEVNQDHVDIEASNYWLTSGAMYPETEGFLLAIQDQVISTKNYCKHIIKDRTITDDRCRYGCPTNETIQHITGGCQMFAGNEYKERHDAVGKILHQEMATKLTLINSEKVPYYKYRPETILENERYKLYWDRTVLTDKTVPHNRPDILLVDKQQKAAILIDVAIPNNNNMRQKEVEKISKYRDLEFQIKRQWGMISTRTIPIIISTTGIVPKNLKRNIKQLGLSEYVCNIMQKAVLLGTARTVRKFLGSEGQVQGSRVRGPEVRREPGGPQRPDTTELCPSDILNIWD

SEQ ID NO: 7457 - protein, 1268 aa, Harmonia axyridis
MMVNLRNRNIEPLPEVRQGVSGAGAGHDSMRDVGDRVLRRRASVEQNATPPQSQHSRRRITRVSPTAEGAAQDPQPALTQAGLPRRRMKWTSSINETIMRIYYEVTNMEEDKIGYRQKLFAEFRRNYPELQVSEQRVADQYRVILRNKLVPDERLNTIKNEVQLRLQNRNLTNNETTIEENYDCAENQHNINAQMNSEEQNNADVLAISDAQRRNIYAAPVVNPEEDQRELLERLFATMNRCVIDFEGTDPLRRPILPRLRTSKKLSHLLVMTNKEIIPKYLSDCHDLESLHLIIYCAAFSIATVLGVKPKPKSQQPAREKQQNKPHWQKRLEDKVHSIRQEIGRLTQFAKGSPSRRLQKMVNIIMDRHRQHTTYDPNNENAQQILDTLKQKLSVYSERLRRYNESYRRKQDNMIFENSERKFYRMLNNNVSATPGSYPTVEDIENFWTDQLATPTPYNSQADWIRNEEKSCGTIEQMPHNAVSTEEFLEILKNTHNWKSPGPDGIHNFWLKKFWCIHGRLVETINDVISNPTEMPKFLTTGTTYLLPKDMQHTADPSKYRPITCLPTIYKIITSCIASRIYKHCETNNIMTTQQKGCSKNALGSKELLIIDSIICNQAFKKHRNLFITYFDYKKAFDSIPHGWLTKILEIYKIDPITINFLKYAMCNWRTNIELSTANITTKDIPIKRGIFQGDSLSPLWFCLALNPLSKQLNATEKGFNLKGNRNNIALNHLLYMDDLKLITGNKNHLQIMVKLVENFSEDVGMKFGLDKCRTISVVRGKIQDEPIALSNGQEIEAMKSDDLYKYLGMKQNRRINHQRMKEDLTTEFIRRINKILKTNLNSKNMTRAINTYACSILTYSFGIIPWTKTDMENLQRKMRTLMTKAHKHHPKSSIERTTLPRNKGGRGLLDIMKLAHGQIECLRTYFKDKSGTSEIYKVLCEADESTPLQLHKEQLSNNHQTIQEKLQRWREKPLHGRHFNEVNQDHVDIEASNYWLTSGAMYPETEGFLLAIQDQVISTKNYCKHIIKDRTITDDRCRYGCPTNETIQHITGGCQMFAGNEYKERHDAVGKILHQEMATKLTLINSEKVPYYKYRPETILENDRYKLYWDRTVLTDKTVPHNRPDILLVDKQQKAAILIDVAIPNNNNMRQKEVEKISKYRDLEFQIKRQWGMISTRTIPIIISTTGIVPKNLKRNIKQLGLSEYICNIMQKAVLLGTARTVRKFLGSEGQVQGSRVRGPEVRREPGGPQGPDTTELCPSDILNIWD

SEQ ID NO: 7458 - protein, 1268 aa, Harmonia axyridis
MMVNLRNRNIEPLPEVRQGVSGAGAGHDSMRDVGDRVLRRRASVEQNATPPQSQHSRRRITRVSPTAEGAAQDPQPALTQAGLPRRRMKWTSSINETIMRIYYEVTNIKEDKIGYRQKLFAEFHRNYPELQVSEQRVADQYRVILRNKLVPDERLNTIKNEVQLRLQNRNLTNNETTIEENYDCAENQHNINAQMNSEEQNNADLLAISDAQRRNIYAAPVVNPEEDQRELLERLFATMNRCVIDFEGTDPLRRPILPRLRTSKKLSHLLVMTNKEIIPKYLSDYHDLESLHLIIYCAAFSIATVLGVKPKPKSQQPAREKQQNKPHWQKRLEDKVHSIRQEIGRLTQFAKGSPSRRLQKMVNIIMDRHRQHTTYDPNNENAQQIVDTLKQKLSVYSERLRRYNESYRRKQDNMIFENSERKFYRMLNNNMSATTGSYPTVEDIENFWTDQLATPTPYNSQADWIRNEEKSCETMEQMPHNAVSIEEFHEILKNTHNWKSPGPDGIHNFWLKKFWCIHGRLVETINDVISNPTEMPKFLTTGTTYLLPKDMQHTADPSKYRPITCLPTIYKIITSCIASRIYKHCETNNIMTAQQKGCSKNALGSKELLIIDSIICNQAFKKHRNLFMTYFDYKKAFDSIPHGWLTKILEIYKIDPITINFLKYAMCNWRTNIELSTANIITKDIPIKRGIFQGDSLSPLWFCLALNPLSKQLNATEKGFNVKGNRNNIALNHLLYMDDLKLITGNKNHLQIMVKLVENFSEDVGMKFGLDKCRTISVVRGKIQDEPIALSNGQEIEAMKSDDLYKYLGMKQNRRINHQRMKEDLTTEFIRRINKILKTNLNSKNMTRAINTYACSILTYSFGIIPWTKTDMENLQRKMRTLMTKAHKHHPKSSIERTTLPRNKGGRGLLDIMELAHGQIECLRTYFKDKSGTSEIYKVLCEADESTPLQLHKEQLSYNHQTIQEKLQRWREKPLHGRHFNEVNQDHVDIEASNYWLTSGAMYPETEGFLLAIQDQVISTKNYCKHIIKDRTITDDRCRYGCPTNETIQHITGGCQMFAGNEYKERHDAVGKILHQEMATKLTLINSEKVPYYKYRPETILENERYKLYWDRTVLTDKPVPHNRPDILLVDKQQKATILIDVAIPNNNNMRQKEVEKISKYRDLEFQIKRQWGMISTRTIPIIISTTGIVPKNLKRNIKQLGLSEYICNIMQKAVLLGTARTVRKFLGSEGQVQGSRVRGPEVRREPGGPQGPDTTELSPSDILNIWD

SEQ ID NO: 7459 - protein, 1268 aa, Harmonia axyridis
MMVNLRNRNIEPLPEVRQGVSGAGAGHDSMRDVGDRVLRRRASVEQNATPPQSQHSRRRITRVSPTAEGAAQDPQPALTQAGLPRRRMKWTSSINETIMRIYYEVTNMEEDKIGYRQKLFAEFHRNYPELQVSEQRVADQYRIILRNKLVPDERLNTIKNEVQLRLQNRDLTNNETTIEEIYDCAENQQNINAQMNTKEQNNADVIAISDAQRRNIYAAPVENPEEDQRELLERLSATMNRCVIDFEGTDPLRRPILPRLRTSKKLSHLLVMTNKEIIPKYLSDYHDLESLHLIIYCAAFSIATVLGVKPKPKSQQPAREKQQNNPHWQKRLENKVHSIRQDIGRLTQFAKGSPSRKLQKMVNIIMDRHRQHTTYDPNNENAQQILDTLKQKLSVYSERLRRYNESYRRKQDNMIFENSERKFYRMLNNNMSATLGSYPTVEDIENFWTDQLASPTPYNSQADWIRSEEKSCETIEHMPHNAVSIEEFHEILKNAHNWKSPGPDGIHNFWLKKFWCIHGRLIETINEVMRNPTEMPKFLTTGTTYLLPKDLQHTADPSKYRPITCLPTIYKIITSCIASRIYKHCETNNIMTAQQKGCSKNALGSKELLIIDSIICNQAFKKHRNLFMTYFDYKKAFDSIPHGWLTKILEIYKIDPITINFLKCAMYNWRTNIELSTANITTKEIPIKRGIFQGDSLSPLWFCLALNPLSKQLNATEKGFNVKGNRNTIALNHLLYMDDLKLITGNKNHLQIMVKLVENFSKDVGMKFGLDKCRTISVVRGKIQDEPIALSNGQEIEAMKSDDLYKYLGMKQNRRINHQRMKEDLTTEFIRRINKILKTNLNSKNMTRAINTYACSILTYSFGIIPWSKTDMENLQRKMRTLMTKAHKHHPKSSIERTTLPRNKGGRGLLDIMELAHGQIECLRTYFKDKSGTSEIYKVLCEADESTPLQLHKEQLSYNHQTIQEKMQRWREKPLHGRHFNEVNQDHVDIEASNYWLTSGAMYPETEGFLLAIQDQVISTRNYCKHIIKDRTITDDRCRYGCPTNETIQHITGGCQMFAGNEYKERHDAVGKILHQEMATKLTLIHSEKVPYYKYRPETILENERYKLYWDRTVLTDETVPHNRPDILLVDKHQKAAILIDVAIPNNNNMRQKEVEKISKYRDLEFQIKRQWGMISTRTIPIIISTTGIVPKNLKRNIKQLGLSEYIYNIMQKAVLLGTARTVRKFLGSEGQVHGSRVRGPEVRREPGGPQGPDTTELCPSDILNIWD

SEQ ID NO: 7460 - protein, 1268 aa, Harmonia axyridis
MMVNLRNRNIEPLPEVRQGVSGAGAGHDSMRDVGDRVLRRRASVDQNATPPQSQHSRRRITRVSPTAEGAVQDPQPALTQAGLPRRRMKWTSSINETIMRIYYEVTNMEEDKIGYRQKLFAEFHRNYPELQVSEQRIADQYRVILRNKLVPDERLNTIKNEVQLRLQNRNPTNNEVTIEENYDCAENQHNINAQINTEEQNSGDLALARDEQWRNIQTATMENREESRRDLLEQLSVTMNRYFIEFEGTDPLKRPILPRLKTSKKLSHILHIMNKEIIPPFFSNDQNLESLHLITYCAASTISAVLGVKPKPRSEQPAQKKQHNKPHWQNRLEAKVHSLRQDIGRLTQFEKGSPSRKLQKIVDAIMDRHRRHANYDANNESAQETLDTLKQKLSVYSERLRRYNESYKRKHDNMIFENSEKNFYRMLNEQTSTKLVSPPSAEDMESFWTDQLSTPTPFNSKAHWIRREEKSCETIENMPHSVITSEELQEILKNTHNWKSPGPDGIHNFWLKKFWCLHGRLVEYINNIIHNPTEMPTFLTTGITYLIPKDFQNTMDPSKYRPITCLPTIYKIITSCLASRIYKHCEKNKIITTQQKGCSKNAQGSKKQLVIDSIICNQAFKKHRNLFMTYFDYKKAFDSLPHGWLKKILEIYKIDPIITNFLKLAMDNWKTNIELSTANIKTKLIPIKRGIFQGDSMSPLWFCLALNPLSKQLNATEKGFNIKGNNNTTTLNHLLYMDDLKLITGNKNHLEIMVKLVEHFSKDVGMEFGLDKCRTLSVVRGRIQDEPITLANGQQIEAMKLDDLYKYLGMKQNRRINHQRMKQDLTTEFIRRTKKILKTNLNSRNMTRAINTYACSILTYSFGIVPWSKTDIENLQRKMRTLMTKANKHHPKSSIERTTLPRNKGGRGLTDIMELASGQIESLREYFRDQASTSEFYKILCEADESTPLQLHKEQFSYNHQTNQEKLDRWREKPLHGRHFNEVNQDHVDIEASNYWLTSGAMYPETERFILAIQDQVISTRNYCRHIIKDRTITDDRCRYGCPTNETIQHITGGCQMFAGNEYKERHDAVGKILHQEMATKLTLIQSEKVPYYKYRPETILENERYKLYWDRTVLTDKTVPHNRPDILLVDKHQKAAILIDVAIPNNNNLRQKEVEKISKYRDLEFQIKRQWGMISTRTIPIIISTTGIVPKNLKRNIKQLGLSEYICNVMQKAVLLGTARTVRKFLGSEGQVQGSRVRGPEVRRQPGGPQGPDTTELYPSDILNIWD

SEQ ID NO: 7461 - protein, 1268 aa, Harmonia axyridis
MMVNLRNRNIEPLPEVRQGVSGAGAGHDSMRDVGDRVLRRRASVEQNATPPQSQHSRRRITRVSPTAEGAAQDPQPALTQAGLPRRRMKWTSSINETIMRIYYEVTNMEEDKIGYRQKLFAEFHRNYPELQVSEQRVADQYRVILRNKLVPDERLNTIKNEVQLRLQNRNLTNNETTIEENYDCAENQHNINAQMNSEEQNNADVLAISDAQRRNIYAAPVVNPEEDQRELLERLFATMNRCVIDFEGTDPLRRPILPRLRTSKKLSHLLVMTNKEIIPKYLSDYHDLESLHLIIYCAAFSIATVLGVKPKPKSQQPAREKQQNKPHWQKRLEDKVHSIRQEIGRLTQFAKGSPSRRLQKMVNIIMDRHRQHTTFDPNNENAQQILDTLKQKLSVYSERLRRYNESYRRKQDNMIFENSERKFYRMLNNNMSATPESYPTVEDIENFWTDQLATPTPYNSQADWIRNEEKSCETMDQMPHNAVSIEEFHEILKNIHNWKSPGPDGIHNFWLKKFWCIHGRLVETINDVISNPTEMPKFLTTGTTYLLPKDMQHTADPSKYRPITCLPTIYKIITSCIASRIYKHCETNNIMTAQQKGCSKNALGSKELLIIDSIICNQAFKKHRNLFMTYFDYKKAFDSIPHGWLTKILEIYKIDPITINFLKYAMCNWRTNIELSTANITTKDIPIKRGIFQGDSLSPLWFCLALNPLSKQLNATEKGFNVKGNRNNIALNHLLYMDDLKLITGNKNHLQIMVKLVENFSEDVGMQFGLDKCRTISVVRGKIQDEPIALSNGQEIEAMKSDDLYKYLGMKQNRRINHQRMKEDLTTEFIRRINKILKTNLNSKNMTRAINTYACSILTYSFGIIPWTKTDMENLQRKMRTLMTKAHKHHPKSSIERTTLPRNKGGRGLLDIMELAHGQIECLRTYFKDKSGTSEIYKVLCEADESTPLQLHKEQLSYNHQTIQEKLQRWREKPLHGRHFNEVNQDHVDIEASNYWLTSGAMYPETEGFLLAIQDQVISTKNYCKHIIKDRTITDDRCRYGCPTNETIQHITGGCQMFAGNEYKERHDAVGKILHQEMATKLTLINSEKVPYYKYRPETILENERYKLYWDRTVLTDKTVPHNRPDILLVDKQQKAAILIDVAIPNNNNMRQKEVEKISKYRDLEFQIKRQWGMISTRTIPIIISTTGIVPKNLKRNIKQLGLSEYICNIMQKAVLLGTARTVRKFLGNEGQVQGSRVRGPEVRREPGGPQGPDTTELCPSDILNIWD

SEQ ID NO: 7462 - protein, 1185 aa, Harmonia axyridis
MDNIMKWTSSINETIMRIYYEVTNMEEDKIGYRQKLFAEFHRNYPELQVSEQRVADQYRVILRNKLVPDERLNTIKNEVQLRLQNRNLTNNEVTIEENYDCAENQHNINAQINTEEQNSGDLPLVRDEQWRNIQTATMENREESRRDLLGQLSVTMNRYFIEFEGTDPLKRPILPRLKTSKKLSHILHIMNKEIIPPFFSNDQNLESLHLITYCAASTISAVLGVKPKPRSEQPAQKKQHNKPHWQNRLEAKVHSLRQDIGRLTQFEKGSPSRKLQKIVDAIMDRHRRHANYDANNESAQETLDTLKQKLSVYSERLRRYNESYKRKHENMIFENSEKNFYRMLNEQTSTKLVSPPSAEDMESFWTDQLSTPTPFNSKACWIRREEKSCETIESMPHSVITSEELQEILKNTHNWKSPGPDGIHNFWLKKFWCLHGRLVEYINNIIHNPTEMPTFLTTGITYLIPKDFQNTMDPSKYRPITCLPTIYKIITSCLASRIYKHCEKNKIITTQQEGCSKNAQGSKEQLVIDSIICNQAFKKHRNLFMTYFDYKKAFDSLPHGWLKKILEIYKIDPIITNFLKLAMDNWKTNIELSTANIKTKLIPIKKGIFQGDSLSPLWFCLALNPLSKQLNATEKGFNIKGNNNTTTLNHLLYMDDLKLITGNKNHLEIMVKLVEHFSKDVGMEFGLDKCRTLSVVRGRIQDEPITLANGQQIESMKSDDLYKYLGMKQNRRINHQRMKQDLTTEFIRRTKKILKTNLNSRNMTRAINTYACSILTYSFGIVPWSKTDIENLQRKMRTLMTKANKHHPKSSIERTTLPRNKGGRGLTDIMELASGQIESLREYFRDQASTSEFYKILCEADESTPLQLHKEQFSYNHQTNQEKLDRWREKPLHGRHFNEVNQDHVDIEGSNYWLTSGAMYPETEGFLLAIQDQVISTRNYCRHIIKDRTITDDRCRYGCPTNETIQHITGGCQMFAGNEYKERHDAVGKILHQEMATKLTLIQSEKVPYYKYRPETILENERYKLYWDRTVLTDKTVPHNRPDILLVDKHQKAAILIDVAIPNNNNMRQKEVEKISKYRDLEFQIKRQWGMISTRTIPIIISTTGIVPKNLKRNIKQLGLSEYICNVMQKAVLLGTARTVRKFLGSEGQVQGSRVRGPEVRRQPGGPQGPDTTELYPSDILNIWD

SEQ ID NO: 7463 - protein, 1259 aa, Harmonia axyridis
MMVNLRNRNIEPLPEVRQGVSGAGAGHDSMRDVDDRVLRRRASVEQNATPPQSQHSRRRITRVSPTAEGAAQDPQPALTQAGLPRRRMKWTSSINETIMRIYYEVTNMEEDKIGYRQKLFAEFERNYPELQVSEQRVADQYRVILRNKLVPDERLNTIKNEVQLRLQNRDLTNNERTIEENYECAENQQNINAQMNTEEQNNADVIAISDAQRRKIYAAPVENPEEDQRELLERLSATMNRCVIDFEGTDPLRRPILPRLRTSKKLSHLLVMTNKEIIPKYLSDYHDLESLHLIIYCAAFSIATVLGVKPKPKSQQPTREKQQNKPHWQKRLENKVHSIRQDIGRLTQFAKGSPSRKLQKMVNIMMDRHRQHTTYDPNNENAQQILDTLKQKLSVYSERLRRYNESYRRKQDNMIFENSERKFYRMLNNNMSATPGSYPIVEDIENFWTDQLASPTPYNSQADWIRSEEKSCETIEHMPHNAVSIEEFHEILKNAHNWKSPGPDGIHNFWLKKFWCIHGRLVETINEVMRNPTEMPKFLTTGTTYLLPKDLQHTACLPTIYKIITSCIASRIYKHCETNNIMTAQQKGCSKNALGSKELLIIDSIICNQAFKKHRNLFMTYFDYKKAFDSIPHGWLTKILEIYKIDPITINFLKYAMCNWRTNIELSTANITTKEIPIKRGIFQGDSLSPLWFCLALNPLSKQLNATEKGFNVKGNRNTIALNHLLYMDDLKLITGNKNHLQIMVKLVENFSKDVGMKFGLDKCRTISVVRGKIQDEPIALSNGQEIEAMKSDDLYKYLGMKQNRRINHQRMKEDLTTEFIRRINKILKTNLNSKNMTRAINTYACSILTYSFGIIPWSKTDMENLQRKMRTLMTKAHKHHPKSSIERTTLPRNKGGRGLLDIMELANGQIECLRTYFKDKSGTSEIYKVLCEADESTPLQLHKEQLSYNHQTIQEKMQRWREKPLHGRHFNEVNQDHVDIEASNYWLTSGAMYPETEGFLLAIQDQVISTRNYCKHIIKDRTITDDRCRYGCPTNETIQHITGGCQMFAGNEYKERPDAVGKILHQEMATKLTLIHSEKVPYYKYRPETILENERYKLYWDRTVLTDKTVPHNRPDILLVDKHQKAAILIDVAIPNNNNMRQKEVEKISKYRDLEFQIKRQWGMISTRTIPIIISTTGIVPKNLKRNIKQLGLSEYICNIMQKAVLLGTARTVRKFLGSEGQVQGSRVRGPEVRREPGGPQRPDTTKLCPSDILNIWD

SEQ ID NO: 7464 - protein, 1268 aa, Harmonia axyridis
MMVNLRNRNIEPLPEVRQGVSGAGAGHDSMRDVGDRMLRRRASVEQNATPPQSQHSRRRITRVSPTAEGAAQDPQPALTQAGLPRRRMKWTSSINETIMRIYYEVTNMEEDKIGYRQKLFAEFHRNYPELQVSEQRVADQYRVILRNKLVPDERLNTIKNEVQLRLQNRNLTNNETTIEENYDCAENQHNINAQMNSEEQNNADVLAISDAQRRNIYAAPVVNPEEDQRELLERLFATMNRCVIDFEGTDPLRRPILPRLRTSKKLSHLLVMTNKEIIPKYLTDYHDLESLHLIIYCAAFSIATVLGVKPKPKSQKPAREKQQNKPHWQKRLEDKVHSIRQEIGRLTQFAKGSPSRRLQKMVNIIMDRHRQHTTYDPNNENAQQILDTLKQKLSVYSERLRRYNESYRRKQDNMIFENSERKFYRMLNNNMSATPGSYPTVEDIENFWTDQLATPTPYNSQADWIRNEEKSYETMEQMPHNAVSIEEFHKVLKNTHNWKSPGPDGIHNFWLKKFWCIHGRLVETINDVISNPTEMPKFLTTGTTYLLPKDMQHTADPSKYRPITCLPTIYKIITSCIASRIYKHCETNNIMTAQQKGCSKNALGSKELLIIDSIICNQAFKKHRNLFMTYFDYKKAFDSIPHGWLTKILEIYRIDPITINFLKYAMCNWRTNIELSTANITTKDIPIKRGIFQGDSLSPLWFCLALNPLSKQLNATEKGFNVKGNRNNIALNHLLYMDDLKLITGNKNHLQIMVKLVENFSEDVGMKFGLDKCRTISVVRGKIQDELIALSNGQEIEAMKSDDLYKYLGMKQNRRINHQRMKEDLTTEFIRRINKILKTNLNSKNMTRAINTYACSILTYSFGIIPWTKTDMENLQRKMRTLMTKAHKHHPKSSIERTTLPRNKGGRGLLDLMELAHAQIECLRTYFKDKSGTSEIYKVLCETDESTPLQLHKEQLSYNHQTIQEKLQRWREKPLHGRHFNEVNQDHVDIEASNYWLKSGAMYPETEGFLLAIQDQVISTKNYCKHIIKDRTITDDRCRYGCPTNETIQHITGGCQMFAGNEYKEGHDAVGKILHQEMATKLTLINSEKVPYYKYRPETILENERYKLYWDRTVLTDKTVPHNRPDILLVDKQQKAAILIDVAIPNNNNMRQKEVEKISKYRDLEFQIKRQWGMISTRTIPIIISTTGIVPKNLKRNIKQLGLSEYICNIMQKAVLLGTARMVRKFLGSEGQVQGSRVRGPEVRREPGGPQGPDTTELCPSDILNIWD

SEQ ID NO: 7465 - protein, 1268 aa, Harmonia axyridis
MMVNLRNRNIEPLPEVRQGVSGAGAGHDSMRDVGDRVLRRRASVDQNATPPQSQHSRRRITRVSPTAEGAVQDPQPALTQAGLPRRRMKWTSSINETIMRIYYEVTNMEEDKIGYRQKLFAEFHRNYPELQVSEQRVADQYRVILRNKLVPDERLNTIKNEVQLRLQNRNPTNNEVTIEENYDCAENQHNINAQINTEEQNSGDLALARDEQWRNIQTATMENREESRRDLLEQLSVTMNRYFIEFEGTDPLKRPILPRLKTSKKLSHILHIMNKEIIPPFFSNDQNLESLHLITYCAASTISAVLGVKPKPRSEQPAQKKQHNKPHWQNRLEAKVHSLRQDIGRLTQFEKGSPSRKLQKIVDAIMDRHRRHANYDANNESAQETLDTLKQKLSVYSERLRRYNESYKRKHDNMIFENSEKNFYRMLNEQTSTKLVSPPSAEDMESFWTDQLSTPTPFNSKAHWIRREEKSCETIENMPHSVITSEELQEILKNTHNWKSPGPDGIHNFWLKKFWCLHGRLVEYINNIIHNPTEMPTFLTTGITYLIPKDFQNTMDPSKYRPITCLPTIYKIITSCLASRIYKHCEKNKIITTQQKGCSKNAQGSKEQLVIDSIICNQAFKKHRNLFMTYFDYKKAFDSLPHGWLKKILEIYKIDPIITNFLKLAMDNWKTNIELSTANIKTKLIPIKRGIFQGDSMSPLWFCLALNPLSKQLNATEKGFNIKGNNNTTTLNHLLYMDDLKLITGNKNHLEIMVKLVEHFSKDVGMEFGLDKCRTLSVVKGRIQDEPITLANGQQIEAMKLDDLYKYLGMKQNRRINHQRMKQDLTTEFIRRTKKILKTNLNSRNMTRAINTYACSILTYSFGIVPWSKTDIENLQRKMRTLMTKANKHHPKSSIERTTLPRNKGGRGLTDIMELVSGQIESLREYFRDQASTSEFYKILCEADESTPLQLHKEQFSYNHQTNQEKLDRWREKPLHGRHFNEVNQDHVDIEASNYWLTSGAMYPETEGFLLAIQDQVISTRNYCRHIIKDRTITDDRCRYGCPTNETIQHITGGCQMFAGNEYKERHDAVGKILHQEMATKLTLIQSEKVPYYKYRPETILENERYKLYWDRTVLTDKTVPHNRPDILLVDKHQKAAILIDVAIPNNNNLRQKEVEKISKYRDLEFQIKRQWGMISTRTIPIIISTTGIVPKNLKRNIKQLGLSEYICNVMQKAVLLGTARTVRKFLGSEGQVQGSRVRGPEVRRQPGGPQGPDTTELYPSDILNIWD

SEQ ID NO: 7466 - protein, 1268 aa, Harmonia axyridis
MMVNLRNRNIEPLPEVRQGVSGAGAGHDSMRDVGDRVLRRRASVEQNATPPQSQHSRRRITRVSPTAEGAAQDPQPALTQAGLPRRRMKWTSSINETIMRIYYEVTNMEEDKIGYRQKLFAEFHRNYPELQVSEQRVADQYRVILRNKLVPDERLNTIKNEVQLRLQNRNLTNNETTIEENYDCAENQHNINAQMNSEEQNNADVLAISDAQRRNIYAAPVVNPEEDQRELLERLFATMNRCVIDFEGTDPLRRPILPRLKTSKKLSHLLVMTNKEIIPKYLSDYHDLESLHLIIYCAAFSIATVLGVKPKPKSQQPAREKQQNKPHWQKRLEDKVHSIRQEIGRLTQFAKGSPSSRLQKMVNIIMDRHRQHTTYDPNNENAQQILDTLKQKLSVYSERLRRYNESYRRKQDNMIFENSERKFYRMLNNNMSATPGSYPTVEDIENFWTDQLATPTPYNSQADWIRNEEKSCETMEQMPHNAVSIEEFHEILKNTHNWKSPGPDGIHNFWLKKFWCIHGRLVETINDVISNPTEMPKFLTTGTTYLLPKDMQHTADPSKYRPITCLPTIYKIVTSCIASRIYKHCETNNIMTAQQKGCSKNALGSKELLIIDSIICNQAFKKHRNLFMTYFDYKKAFDSIPHGWLTKILEIYKIDPITINFLKYAMCNWRTNIELSTANITTKDIPIKRGIFQGDSLSPLWFCLALNPLSKQLNATEKGFNVKGNRNNIALNHLLYMDDLKLITGNKNHLQIMVKLVENFSEDVGMKFGLDKCRTISVVRGKIQDEPIALSNGQEIEAMKSDDLYKYLGMKQNRRINHQRMKEDLTTEFIRRINKILKTNLNSKNMTRAINTYACSILTYSFGIIPWTKTDMENLQRKMRTLMTKAHKHHPKSSIERTTLPRNKGGRGLLDIMELAHGQIECLRTYFKDKSGTSEIYKVLCEADESTPLQLHKEQLSINHQTIQEKLQRWREKPLHGRHFNEVNQDHVDIEASNYWLTSGAMYPETEGFLLAIQDQVISTKNYCKHIIKDRTITDDRCHYGCPTNETIQHITGGCQMFAGNEYKERHDAVGKILHQEMATKLTLINSEKVPYYKYRPETILENERYKLYWDRTVLTDKTVPHNRPDILLVDKQQKAAILIDVAIPNNNNMRQKEVEKISKYRDLEFQIKRQWGMISTRTIPIIISTTGIVPKNLKRNIKQLGLSEYVCNIMQKAVLLGTARTVRKFLGSEGQVQGSRVRGPEVRREPGGPQRPDTTELCPSDILNIWD

SEQ ID NO: 7467 - protein, 903 aa, Harmonia axyridis
MDRHRRHANYDANNESAQETLDTLKQKLSVYSERLRRYNESYKRKHDNMIFENSEKNFYRMLNEQTSTKLVSPPSAEDMESFWTDQLSTPTPFNSKAHWIRREEKSCETIKIMPHSVITSEELQEILKNTHNWKSPGPDGIHNFWLKKFWCLHGRLVEYINNIIHNPTEMPTFLTTGITYLIPKDFQNTMDPSKYRPITCLPTIYKIISSCLASRIYKHCEKNKIITTQQKGCSKNAQGSKEQLVIDSIICNQAFKKHRNLFMTYFDYKKAFDSLPHGWLKKILEIYKIDPIITNFLKLAMDNWKTNIELSTANIKTKLIPIKRGIFQGDSMSPLWFCLALNPLSKKLNATEKGFNIKGNNNTTTLNHLLYMDDLKLITGNKNHLEIMVKLVEHFSKDVGMEFGLDKCRTLSVVRGRIQDEPITLANGQQIEAMKLDDLYKYLGMKQNRRIHHQRMKQDLTTEFIRRTKKILKTNLNSRNMTRAINTYACSILTYSFGIVSWSKTDIENLQRKMRTLMTKANKHHPKSSIERTTLPRNKGGRGLTDIMELASGQIESLREYFRDQASTSEFYKILCEADESTPLQLHKEQFSYNHQTNQEKLDRWREKPLHGRHFNEVNQDHVDIEASNYWLTSGAMYRETEGFLLAIQDQVISTRNYCRHIIKDRTITDDRCRYGCPTNETIQHITGGCQMFAGNEYKERHDAVGKILHQEIATKLTLIQSEKVPYYKYRPETILENERYKLYWDRTVLTDKTVPHNRPDILLVDKHQKAAILIDVAIPNNNNLRQKEVEKISKYRDLEFQIKRQWGMISTRTIPIIISTTGKVPKNLKRNIKQLGLSEYICNVMQKAVLLGTARTVRKFLGSEGQVQGSRVRGPEVRRQPGGPQGLDTTELYPSDILNIWD

SEQ ID NO: 7468 - protein, 1256 aa, Harmonia axyridis
MMVNLRNRNIEPLPEVRQGVSGAGAGHDSMRDVGDRVLRRRASVEQNATPPQSQHSRRRITRVSPTAEGAVQDPQPALTQAGLPRRRMKWTSSINETIMRIYYEVTNMEEDKIGYRQKLFAEFHRNYPELQVSEQRVADQYRVILRNKLVPDERLNTIKNEVQLRLQNRNLTNNEVTIEENYDCAENQHNINAQIHTEEQNSGDLELVRDEQWRNIQTATMENREESRRDLSEQLSVTMNRYFIEFEGTDPLNRPILPRLKSSKKLSHILHLMNKEIIPPFFSNDQNLESLHLITYCAASTISAVLGVKPKPRSEQPAQKKQHNKPHWQNRLEAKVHSLRQDIGRLTQFEKDSPSRKLQKIVDAIMDRHRRHANYDANNESAQETLDTLKQKLSVYSERLRRFNESYKRKHENMIFENSEKNFYRMLNEQTSTKLVSPPSAEDMESFWTDQLSTPTPFNSKARWIRREEKSCETIESMPHSVITSEELQEILKNTHNWKSPGPDGIHNYWLKKFWCLHGRLVEYKNNIIHNPTEMPTFLTTGITYLIPKDFQNTMDPSKYRPITCLPTIYKIITSCLASRIYKHCEKNKIITTQQKGCSKNAQGSKEQLVIDSIICNQAFKKHRNLFMTYFDYKKAFDSLPHGWLKKILEIYKIDPIITNFLKLAMDNWKTNIELSTANIKTKLIPIKKGIFQGDSLSPLWFCLALNPLSKQLNATEKGFNIKGNNSTTTLNHLLYMDDLKLITGNKNHLEIMVKLVEHFSKDVGMEFGLDKCRTLSVVRGRIQDEPITLANGQQIEAMKSDDLYKYLGMKQNRRINHQRMKQDLTTEFIRRTKKILKTNLNSRNMTRAINTYACSILTYSFGIVPWSKTDIENLQRKMRTLMTKANKHHPKSSIERTTLPRNKGGRGLTDIMELAGGQIESLREYFRDQASTSEFYKILCEADESTPLQLHKEQFSYNHQTNQEKLDRWREKPLHGRHFNEVNQDHVDIEASNYWLTSGAMYPETEGFLLAIQDQVISTRNYCRHIIKDRTITDDRCRYGCPTNETIQHITGGCQMFAGNEYKERHDAVGKILHQEMATKLTLIQSEKVPYYKYRPETILENERYKLYWDRTVLTDKTVPHNRPDILLVDKHQKAAILIDVAIPNNNNMRQKEVEKISKYRDLEFQIKRQWGMISTRTIPIIISTTGIVPKNLKRNIKQLGLSEYICNVMQKAVLLGTARTVRKFLGSEGQVQGSRVRGPEVRRQPGGPQGPDTT

SEQ ID NO: 7469 - protein, 1268 aa, Harmonia axyridis
MMVNLRNRNIEPLPEVRQGVSGAGAGHDSMRDVGDRVLRRRASVEQNATPPQSQHSRRRITRVSPTAEGAAQDPQPALTQAGLPRRRMKWTSSINETIMRIYYEVTNMEEDKIGYRQKLFAEFHRNYPELQVSEQRVADQYRVILRNKLVPDERLNTIKNEVQLRLQNRNLTNNETTIEENYDCAENQHNINAQMNSEEQNNADVLAISDAQRRNIYAAPVVNPEEDQRELLERLFATMNRCVIDFEGTDPLRRPILPRLRTSKKLSHLLVMTNKKIIPKYLSDYHDLESLHLIIYCAAFSIATVLGVKPKPKSQQPAREKQQNKPHWQKRLEDKVHSIRQEIGRLTQFAKGSPSRRLQKMVNIIMDRHRQHTTYDPNNENAQQILDTLKQKLSVYSERLRRYNESYRRKQDNMIFENSERKFYRMLNNYMSATPGSYPTVEDIENFWTDQLATPTPYNSQADWIRNEEKSCETMEQMPHNAVSIEEFHEILKNTHNWKSPGPDGIHNFWLKKFWCIHGRLVETINDVISNPTEMPKFLTTGTTYLLPKDMQHTADPSKYRPITCLPTIYKIITSCIAFRIYKHCETNNIMTAQQKGCSKNALGSKELLIIDSIICNQAFKKHRNLFMTYFDYKKAFDSIPHGWLTKILEIYKIDPITINFLKYAMCNWRTNIELSTANITTKDIPIKRGIFQGDSLSPLWFCLALNPLSKQLNATEKGFNVKGNRNNIALNHLLYMDDLKLITGNKNHLQIMVKLVENFSEDVGMKFGLDKCRTISVVRGKIQDEPIALSNGQEIEAMKSDDLYKYLGMKQNRRINHQRMKEDLTTEFTRRINKILKTNLNSKNMTRAINTYACSILTYSSGIIPWTKTDMENLQRKMRTLMTKAHKHHPKSSIERTTLPRNKGGRGLLDIMELAHGQIECLRTYFKDKSGTSEIYKVLCEADESTPLQLHKEQLSYNHQTIQEKLQRWREKPLHGRHFNEVNQDHVDIEASNYWLTSGAMYPETEGFLLAIQDQVISTKNYCKHIIKDRTITDDRCRYGCPTNETIQHITGGCQMFAGNEYKERHDAVGKILHQEMATKLTLINSEKVPYYKYRPETILENERYKLYWDRTVLTDKTVPHNRPDILLVDKQQKAAILIDVAIPNNNNMRQKEVEKISKYRDLEFQIKRQWGMISTRTIPIIISTTGIVPKNLKRNIKQLGLTEYICNIMQKAVLLGTARTVRKFLRSEGQVQGSRVSGPEVRREPGGPQGPDTTELSPSDILNIWD

SEQ ID NO: 7470 - protein, 1268 aa, Harmonia axyridis
MMVNLRNRNIEPLPEVRQGVSGAGAGHDSMRDVGDRVLRRRASVDQNATPPQSQYSRRRITRVSPTAEGAVQDPQPALTQAGLPRRRMKWTSSINETIMRIYYEVTNMEEDKIGYRQKLFAEFHRNYPELQVSEQRVADQYRVILRNKLVPDERLNTIKNEVQLRLQNRNPTNNEVTIEENYDCAENQHNINAQINTEEQNSGDLALARDEQWRNIQTATMENREESRRDLLEQLSVTMNRYFIEFEGTDPLKRPILPRLKTSKKLSHILHIMNKEIIPPFFSNDQNLESLHLITYCAASSISAVLGVKPKPRSNQPAQKKQHNKPHWQNRLEAKVHSLRQDIGRLTQFEKGSPSRKLQKIVDAIMDRHRRHANYDANNESAQETLDTLKQKLSVYSERLRRYNESYKRKHDNMIFENSEKNFYKMLNEQTSTKLVSPPSAEDMESFWTDQLSTPTPFNSKAHWIRREEKSCETIENMPHSVITSEELQEILKNTHNWKSPGPDGIHNFWLKKFWCLHGRLVEYINNIIHNPTEMPTFLTTGITYLIPKDFQNTMDPSKYRPITCLPTIYKIITSCLASRIYKHCEKNKIITTQQKGCSKNAQGSKEQLVIDSIICNQAFKKHRNLFMTYFDYKKAFDSLPHGWLKKILEIYKIDPIITNFLKLAMDNWKTNIELSTANIKTKLIPIKRGIFQGDSMSPLWFCLALNPLSKQLNATEKGFNIKGNNNTTTLNHLLYMDDLKLITGNKNHLEIMVKLVEHFSKDVGMEFGLDKCRTLSVVRGRIQDEPITLANGQQIEAMKLDDLYKYLGMKQNRRINHQRMKQDLTTEFIRRTKKILKTNLNSRNMTRAINTYACSILTYSFGIVPWSKTDIENLQRKIRTLMTKANKHHPKSSIERTTLPRNKGGRGLTDIMELASGQIESLREYFRDQASTSEFYKILCEADESTPLQLHKEQFSYNHQTNQEKLDRWREKPLHGRHFNEVNQDHVDIEASNYWLTSGAMYPETEGFLLAIQDQVISTRNYCRHIIKDRTITDDRCRYGCPTNETIQHITGGCQMFAGNEYKDRHDAVGKILHQEMATKLTLIQSEKVPYYKYRPETILENERYKLYWDRTVLTDKTVPHNRPDILLVDKHQKAAILIDVAIPNNNNLRQKEVEKISKYKDLEFQIKRQWGMISTRTIPIIISTTGIVPKNLKRNIKQLGLSEYICNVMQKAVLLGTARTVRKFLGSEGQVQGSRVRGPEVRRQPGGPQGPDTTELYPSDILNIWD

SEQ ID NO: 7471 - protein, 1268 aa, Harmonia axyridis
MMVNLRNRNIEPLPEVRQGVSGAGAGHDSMRDVGDRVLRRRASVEQNATPPQSQHSRRRITRVSPTAEGAAQDPQPALTQAGLPRRRMKWTSSINETIMRIYYEVTNMEEDKIGYRQKLFAEFQRNYPELQVSEQRVADQYRVILRNKLVPDERLNTIKNEVQLRLQNRDLTNNERTIEENYDCAENQQNINAQMNTEEQNNADVIAISDAQRRNIYAAPVENPEEDQRELLERLSDTMNRCVIDFEGTDPLRRPILPRLRTSKKLSHLLVMTNKEIIPKYLSDYHDLESLHLIIYCAAFSIATVLGVKPKPKSQQPAREKQQNKPHWQKRLENKVHSIRQDIGRLTQFAKGSPSRKLQKMVNIIMDRHRQHSTYDPNNENAQQILDTLKQKLSVYSERLRRYNESYRRKQDNMIFENSERKFYRMLNNNMSATPGSYPIVEDIENFWTDQLASPTPYNSQADWIRSEEKSCETIEHMPHNAVSIEEFHEILKNAHNWKSPGPDGIHNFWLKRFWCIHGRLVETINEVMRNPTEMPKFLTTGTTYLLPKDLQHTADPSKYRPITCLPTIYKIITSCIASRIYKHCETNNIMTAQQKGCSQNALGSKELLIIDSIICNQAFKKHRNLFMTYFDYKKAFDSIPHGWLTKILEIYKIDPITINFLRYAMCNWRTNIELSTANITTKEIPIKRGIFQGDSLSPLWFCLALNPLSKQLNATEKGFNVKGNRNTIALNHLLYMDDLKLITGNKNHLQIMVKLVENFSKDVGMKFGLDKCRTISVVRGKIQDEPIALSNGQEIEAMKSDDLYKYLGMKQNRRINHQRMKEDLTTEFIRRINKILKTNLNSKNMTRAINTYACSILTYSFGIIPWSKTDMENLQRKMRTLMTKAHKHHPKSSIERTTLPRNKGGRGLLDIMELAHGQIECLRTYFKDKSGTSEIYKVLCEADESTPLQLHKEQLSCNHQTIQEKMQRWREKPLHGRHFNEVNQDHVDIEASNYWLTSGAMYPETEGFLLAIQDQVISTRNYCKHIIKDRTITDDRCRYGCPTNETIQHITGGCQMFAGNEYKERHDAVGNILHQEMATKLTLIHSEKVPYYKYRPETILENERYKLYWDRTVLTDKTVPHNRPDILLVDKHQKAAILIDVAIPNNNNMRQKEVEKISKYRDLEFQIKRQWGMISTRTIPIIISTTGIVPKNLKRNIKQLGLSEYVCNIMQKAVLLGTARTVRKFLGSEGQVQGSRVRGPEVRREPGGPQRPDTTELCPSDILNIWD

SEQ ID NO: 7472 - protein, 1139 aa, Harmonia axyridis
MMVNLRNRNIEPLPEVRQGVSGAGAGHDSMRDVGDRVLRRRASVDQNATPPQSQHSRRRITRVSPTAEGAVQDPQPALTQAGLPRRRMKWTSSINETIMRIYYEVTNMEEDKIGYRQKLFAEFHRNYPELQVSEQRVADQYRVILRNKLVPDERLNTIKNEVQLRLQNRNPTNNEVTIEENYDCAENQHNINAQINTEEQNSGDLALARDEQWRNIQTATMENREESRRDLLEQLSVTMNRYFIEFEGTDPLKRPILPRLKTSKKLSHILHIMNKEIIPPFFSNDQNVESLHLITYCAASTISAVLGVKPKPRSEQPAQKKQHNKPHWQNRLEAKVHSLRQDIGRLTQFEKGSPSIKLQKIVDAIMDRHRRHANYDANNESAQETLDTLKQKLSVYSERLRRYNESYKRKHDNMIFENSEKNFYRMLNEQTSTKLVSPPSAEDMESFWTDQLSTPTPFNSKAHWIRREEKSCETIENMPHSVITSEELQEILKNTHNWKSPGPDGIHNFWLKKFWCLHGRLVEYINNIIHNPTEMPTFLTTGITYLIPKDFQNTMDPSKYRPITCLPTIYKIITSCLASRIYKHCEKNKIITTQQKGCSKNAQGSKEQLVIDSIICNQAFKKHRNLFMTYFDYKKAFDSLPHGWLKKILEIYKIDPIITNFLKLAMDNWKTNIELSTANIKTKLIPIKRGIFQGDSMSPLWFCLALNPLSKQLNATEKGFNIKGNNNTTTLNHLLYMDDLKLITGNKNHLEIMVKLVEHFSKDVGMEFGLDKCRTLSVVRGRIQDEPITLANGQQIEAMKLDDLYKYLGMKQNRRINHQRMKEDLTTEFIRRTKKILKTNLNSRNMTRAINTYACSILTYSFGIVPWSKTDIENLQRKMRTLMTKANKHHPKSSIERTTLPRNKGGRGLTDIMELASGQIESLREYFRDQASTSEFYKILCEADESTPLQLHKEQFSYNHQTNQEKLDRWREKPLHGRHFNEVNQDYVDIEASNYWLTSGAMYPETEGFLLAIQDQVISTRNYCRHIIKDRTITDDRCRYGCPTNETIQHITGGCQMFAGNEYKERHDAVGKILHQEMATKLTLIQSEKVPYYKYRPETILENERYKLYWDRTVLTDKTVPHNRPDILLVDNCHMTFVA

SEQ ID NO: 7473 - protein, 1268 aa, Harmonia axyridis
MMVNLRNRNIEPLPEFRQGVSGAGAGHDSMRDVGDRVLRRRASVEQNATPPQSQHSRRRITRVSPTAEGAAQDPQPALTQAGLPRRRMKWTSSINETIMRIYYEVTNMEEDKIGYRQKLFAEFHRNYPELQVSEQRVADQYRVILRNKLVPDERLNTIKNEVQLRLQNRNLTNNEVTIEENYDCAENQHNINAQINTEEQNSGDLPLVRDEQWRNIQTATIENREESRRDLLEQLSVTMNRYFIEFESTDPLKRPILPRLKTSKKLSHILHIMNKEIIPPFFSNDQNLESLHLITYCAASTISAVLGVKPKPRSEQPAQKKQHNKPHWQNRLEAKVHSLRQDIGRLTQFKKGSPSRKLQKIVDAIMDRHRRHANYDGNNESAQETLDTLKQKLSVYSERLRRYNESYKRKHENMIFENSEKNFYRMLNEQTSTKLVSPPSAEDMESFWTDQLSTPTPFNSKACWIRREEKSCETIESMPHSVITSEELQEILKNTHNWKSPGPDGIHNFWLKKFWCLHGRLVEYINNIIHNPTEMPTFLTTGITYLIPKDFQNTMDPSKYRPITCLPTIYKIITSCLASRIYKHCEKNKIITTQQKGCSKNAQGSKEQLVIDSIICNQAFKKHRNLFMTYFDYKKAFDSLPHGWLKKILEIYKIDPIITNFLKLAMDNWKTNIELSTANIKTKLIPIKKGIFQGDSLSPLWFCLALNPLSKQLNATEKGFNIKGNNNTTTLNHLLYMDDLKLITGNKNHLEIMVKLVEHFSKDVGMEFGLDKCRTLSVVRGRIQDEPITLANGQQIESMKSDDLYKYLGVKQNRRINHQRMKQDLTIEFIRRTKKILKTNLNSRNMTRAINTYACSILTYSFGIVPWSKTDIENLQRKMRTLMTKANKHHPKSSIERTTLPRNKGGRGLTDIMELASGQIESLREYFRDQASTSEFYKILCEADESTPLQLHKEQFSYNHQTNQEKLDRWREKPLHGRHFNEVNQDHVDIEASNYWLTSGAMYPETEGFLLAIQDQVISTRNYCRHIIKDRTITDDRCRYGCPTNETIQHIMGGCQMFAGNEYKERHDAVGKILHQEMATKLTLIQSEKVPYYKYRPETILENERYKLYWDRTVLTDKTVPHNRPDILLVDKHQKAAILIDVAIPNNNNMRQKEVEKISKYRDLEFQIKRQWGMISTRTIPIIISTTGIVPKNLKRNIKQLGLSEYICNVMQKAVLLGTARTVRKFLGSEGQVQGSRVRGPEVRRQPGGPQGPDTTELYPSDILNIWD

SEQ ID NO: 7474 - protein, 1268 aa, Harmonia axyridis
MMVNLRNRNIEPLPEVRQGVSGAGAGHDSMRDVGDRVLRRRASVEQNATPPQSQHSRRRITRVSPTAEGAAQDPQPALTQAGLPRRRMKWTSSINETIMRIYYEVTNMEEDKIGYRQKLFAEFHRNYPELQVSEQRVADQYRVILRNKLVPDERLNTIKNEVQLRLQNRNLTNNETTIEENYDCAENQHNINAKMNSEEQNNADVLAISDAQRRNKYAAPVVNPEEDQKELLERLFATMNRCVIDFEGTDPLRRPILPRLRTSKKLSHLLAMTNKEIIPKYLSDYHDLESLHLIIYCAAFSIATMLGVKPKPKSQQPAREKQQNKPHWQKRLEDKVHSIRQEIGRLTQFAKGSPSTRLQKMVNIIMDRHRQHTTYDPNNENAQQILDTLKQKLSVYSERLRRYNESYRRKQDNMIFENSERKFYRMLNNNMSATPGSYPTVEDIENFWTDQLATPTPYNSQADWIRNEEKSCETMEQMPHNAVSIEEFHEILKNTHNWKSPGPDGIHNFWLKKFWCIHGRLVETINDVISNPTEMPKFLTTGTTYLLPKDMQHTADPSKYRPITCLPTIYKIITSCIASRIYKHCETNNIMTAQQKGCSKNALGSKELLIIDSIICNQAFKKHRNLFMTYFDYKKAFDSIPHGWLTKILEIYKIDPNTINFLKYAMCNWRTNIELSTANITTKDIPIKRGIFQGDSLSPLWFCLALNPLSKQLNATEKGFNVKGNRNNIALNHLLYIDDLKLITGNKNHLQIMVKLVENFSEDVGMKFGLDKCRTISVVRGKIQDEPIALSNGQEIEAMKSDDLYKYLGMKQNRRINHQRMKEDLTTEFIRRINKILKTNLNSKNMTRAINTYACSILTYSFGIIPWTKTDMENLQRKMRTLMTKAHKHHPKSSIERTTLPRNKGGRGLLDIMELAHGQIECLRTYFKDKSGTSEIYKVLCEADESTPLQLHKEQLSYNHQTIQEKLQRWVEKPLHGRHFNEVNQDHVDIEASNYWLTSGAMYPETEGFLLAIQDQVISTKNYCKHIIKDRTITDDRCRYGCPTNETIQHITGGCQMFAGNEYKERHDAVGKILHQEMATKLTLINSEKVPYYKYRPETILENERYKLYWDRTVLTDKTVPHNRPDILLVDKQQKAAILIDVAIPNNNNMRQKEVEKISKYRDLEFQIKRQWGMISTRTIPIIISTTGIVPKNLKRNIKQLGVSEYICNIMQKAVLLGTARTVRKFLGSEGQVQGSRVRGPEVRREPGGPQGPDTTELSPSDILNIWD

SEQ ID NO: 7475 - protein, 1241 aa, Harmonia axyridis
MMVNLRNRNIEPLPEVRQGVSGAGAGHDSMRDVGDRVLRRRASVEQNATPPQSQHSRRRITRVSPTAEGAAQDPQPALTQAGLPRRRMKWTSSINETIMRIYYEVTNMEEDKIGYRQKLFAEFHRNYPELQVSEQRVADQYRVILRNKLVPDERLNTIKNEVQLRLQNRNLTNNETTIEENYNCAENQHNINAQMNSEEQNNADVLAISDAQRRNIYAALVVNPEEDQRELLERLFATMNRCVIDFEGTDPLRRPILPRLRTSKKLSHLLVMTNKEIIPKYLSDYHDLESLHLIIYCAAFSIATVLGVKPKPKSQQPAREKQQNKPHWQKRLEDKVHSIRQEIGKLTQFAKGSPSRRLQKMVNIIMDRHRQHTTYDPNNENAQQILDTLKQKLSVYSERLRRYNESYRRKQDNMIFENSERKFYRMLNNNMSATTGSSPTVEDIENFWTDQLATPTPYNSQADWIRNEEKSCETMEQMPHNAVSIEEFHEILKNTHNWKSPGPDGIHNFWLKKFWCIHGRLVETINDVISNPTEMPKFLTTGTTYLLPKDMQHIYKHCETNNIMTAQQKGCSKNALGSKELLIIDSIICNQAFKKHRNLFMTYFDYKKAFDSIPHGWLTKILEIYKIDPITINFLKYAMCNWRTNIELSTANIITKDIPIKRGISQGDSLSPLWFCLALNPLSKQLNATEKGFNVKGNRNNIALNHLLYMDDLKLITGNKNHLQIMVKLVENFSEDVGMKFGLDKCRTISVVRGKIQDEPIALSNGQEIEAMKSDDLYKYLGMKQNRRINHQRMKEDLTTEFIRRINKILKTNLNSKNMTRAINTYACSILTYSFGILPWTKTDMENLQRKMRTLMTKAHKHHPKSSIERTTLPRNKGGRGLLDIMELAHGKIECLRTYFKDKSGTSEIYKVLCEADESTPLQLHKEQLSYNHQTIQEKLQRWREKPLHGRHFNEVNQDHVDIEASNYWLTSGAMYPETEGFLLAIQDQVISTKNYCKHIIKDRTITDDRCRYGCPTNETIQHITGGCQMFAGNEYKERHDAVGKILHQEMATKLTLINSEKVPYYKYRLETILENERYKLYWDRTVLTDKTVPHNRPDILLVDKQQKAAILIDVAIPNNNNMRQKEVEKISKYRDLEFQMKRQWGMISTRTIPIIISTTGIVPKNLKRNIKQLGLSEYICNIMQKAVLLGTARTVRKFLGSEGQVQGSRVRGPEVRREPGGPQGPDTTELSPSDILNIWD

SEQ ID NO: 7476 - protein, 908 aa, Harmonia axyridis
MVNIIMDRHRQHTTYDPNNENAQQILDTLKQKLSVYSERLRRYNESYRRKQDNMIFENSERKFYRMLNNNMSATPGSYPTVEDIENFWTDQLATPTPYNSQADWIRNEEKSCETMEQMPHNAVSIEEFHEILKNTHNWKSPGPDGIHNFWLKKFWCIHGRLVETINDVISNPTEMPKFLTTGTTYLLPKDMQHTADPSKYRPITCLPTIYKIITSCIASRIYKHCETNNIMTAQQKGCSKNALGSKELLIIDSIICNQAFKKHRNLFMTYFDYKKAFDSIPHGWLTKILEIYKIDPITINFLKYAMCNWRTNIELSTANITTKDIPIKRGIFQGDSLSPLWFCLALNPLSKQLNATEKGFNVKGNRNNIALNHLLYMDDLKLITGNKNHLQIMVKLVENFSEDVGMKFGLDKCRTISVVRGKIQDEPIALSNGQEIEAMKSDDLYKYLGMKQNRRINHQRMKEDLTTEFIRRINKILKTNLNSKNMTRAINTYACSILTYSFGIIPWTKTDMENLQRKMRTLMTKAHKHHPKSSIERTTLPRNKGGRGLLDIMELAHGQIECLRTYFKDKSGTSEIYKVLCEADESTPLQLHKEQLSYNHQTIQEKLQRWREKPLHGRHFNEVNQDHVDIEASNYWLTSGAMYPETEGFLLAIQDQVISTKNYCKHIMKDRTITDDRCRYGCPTNETIQHITGGCQMFAGNEYKERHDAVGKILHQEMATKLTLINSEKVPYYKYRPETILENERYKLYWDRTVLTDKTVPHNRPDILLVDKQQKAAILIDVAIPNNNNMRQKEVEKISKYRDLEFQIKRQWGMISTRTIPIIISTTGIVPKNLKRNIKQLGLSEYICNIMQKAVLLGTARTVRKFLGSEGQVQGSRVRGPEVRREPGGPQGPDTTELSPSDILNIWD

SEQ ID NO: 7477 - protein, 1048 aa, Harmonia axyridis
MENREESRRDLLEQLSVTMNRYFIEFEGTDPLKRPILPRLKTSKKLSHILHIMNKEIIPPFFSNDQNLESLHLITYCAASTISAVLGVKPKPRSEQTAQKKQHNKPHWQNRLEAKVHSLRQDIGRLTQFEKGSPSRKLQKIVHAIMDRHRRHANYDANNESAQETLDTLKQKLSVYSERLRRYNESYKRKHDNMIFENSEKNFYRMLNEQTSTKLVSPPSAEDMESFWTDQLSTPTPFNSKAHWIRREEKSCETIENMPHSVITSEELQEILKNTHNWKSPGPDGIHNFWLKKFWCLHGRLVEYINNIIHNPTEMPTFLTTGITYLIPKDFQNTMDPSKYRPITCLPTIYKIITSCLASRIYKHCEKNKIITTQQKGCSKNAKGSKEQLVIDSIICNQAFKKHRNLFMTYFDYKKAFDSLPHGWLKKILEIYKIDPIITNFLKLAMDNWKTNIELSTANIKTKLIPIKRGIFQGDSMSPLWFCLALNPLSKQLNATEKGFNIKGNDNTTTLNHLLYMDDLKLITGNKNHLEIMVKLVEHFSKDVGMEFGLDKCRTLSVVRGRIQDEPITLANGQQIEAMKLDDLYKYLGMKQNRRINHQRMKQDLTTEFIRRTKKILKTNLNSRNMTRAINTYACSILTYSFGIVPWSKTDIENLQRKMRTLMTKANKHHPKSSVERTTLPRNKGGRGLTDIMELASGQIESLREYFRDQASTSEFYKILCEADESTPLQLHKEQFSYNHQTNQEKLDRWREKPLHGRHFNEVNQDHVDIEASNYWLTSGAMYPETEGFLLAIQDQVISTRNYCRHIIKDRTITDDRCRYGCPTNETIQHITGGCQMFAGIEYKERHDAVGKILHQEMATKLTLIQSEKVPYYKYRPETILENERYKLYWDRTVLTDKTVPHNRPDILLVDKHQKAAILIDVAIPNNNNLRQKEVEKISKYRDLEFQIKRQWGMTSTRTIPIIISTTGIVPKNLKRNIKQLGLSEYICNVMQKAVLLGTARTVRKFLGSEGQVQGSRVRGPEVRRQPGGPQGPDTTELYPSDILNIWD

SEQ ID NO: 7478 - protein, 1268 aa, Harmonia axyridis
MMVNLRNRNIEPLPEVRQGVSGAGAGHDSMRDVGDRVLRRRASVEQNATPPQSQHSRRRITRVSPTAEGAAQDPQPALTQAGLPRRRMKWTSSINETIMRIYYEVTNMEEDKIGYRQKLFAEFERNYPELQVSEQRVADQYRVILRNKLVPDERLNTIKNEVQLRLQNRDLTNNERTIEENYECAENQQNINAQMNTEEQNNADVIAISDAQRRNIYDAPVENPEEDQRELLERLSATMNRCVIDFEGTDPLRRPILPRLRTSKKLSHLLVMTNKEIIPKYLSDYHDLESLHLIIYCAAFSIATVLGVKPKPKSQQPAREKQQNKPHWQKRLENKVHSIRQDIGRLTQFAKGSPSRKLQKMVNIMMDRHRQHTTYDPNNENAQQILDTLKQKLSVYSERLRRYNESYRRKQDNMIFENSERKFYRMLNNNMSATPGSYPIVEDIENFWTDQLASPTPYNSQADWIRSEEKSCETIEHMPHNAVSIEEFHEILKNAHNWKSPGPDGIHNFWLKKFWCIHGRLVETINEVMRNPTEMPKFLTTGTTYFLPKDLQHTADPSKYRPITCLPTIYKIITSCIASRIYKHCETNNIMTAQQKGCSKNALGSKELLIIDSIICNQAFKKHRNLFMTYFDYKKAFDSIPHGWLTKILEIYKIDPITINFLKYAMCNWRTNIELSTANITTKEIPIKRGIFQGDSLSPLWFCLALNPLSKQLNATEKGFNVKGNRNTIALNHLLYMDDLKLITGNKNHLQIMVKLVENFSKDVGMKFGLDKCRTISVVRGKIQDEPIALSNGQEIEAMKSDDLYKYLGMKQNRRINHQRMKEDLTTEFIRRINKILKTNLNSKNMTRAINTYACSILTYSFGIIPWSKTDMENLQRKMRTLMTKAHKHHPKSSIERTTLPRNKGGRGLLDIMELANGQIECLRTYFKDKSGTSEIYKVLCEADESTPLQLHKEQLSYNHQTIQEKMQRWREKPLHGRHFNEVNQDHVDIEASNYWLTSGAMYPETEGFLLAIQDQMISTRNYCKHIIKDRTITDDRCRYGCPTNETIQHITGGCQMFAGNEYKERHDAVGKILHQEVATKLTLIHSEKVPYYKYRPETILENERYKLYWDRTVLTDKTVPHNRPDILLVDKHQKAAILIDVAIPNNNNMRQKEVEKISKYRDLEFQIKRQWGMISTRTIPIIISTTGIVPKNLKRNIKQLGLSEYICNIMQKAVLLGTARTVRKFLGSEGQVQGSRVRGPEVRREPGGPQRPDTTELCPSDILNIWD

SEQ ID NO: 7479 - protein, 1268 aa, Harmonia axyridis
MMVNLRNRNIEPLPEVRQGVSGAGAGHDSMRDVGDRVLRRRASVEQNATPPQSQHSRRRITRVSPTAEGAAQDPQPALTQAGLPRRRMKWTSSINETIMRIYYEVTNMEEDKIGYRQKLFAEFQRNYPELQVSEQRVADQYRVILRNKLVPDERLNTIKNEVQLRLQNRDLTNNERTIEENYDCAENQQNINAQMNTQEPNNADVIAISDAQRRNIYAAPVENPEKDQRELLERLSATMNRCVIDFEGTDPLRRPILPRLRTSKKLSHLLVMTNKEIIPKYLSDYHDLESLHLIIYCAAFSIATVLGVKPKPKSQQPAREKQQNKPHWQKRLENKVHSIRQDIGRLTQFAKGSPSRKLQKMVNIMMDRHRQHTTYDPNNENAQQILDTLKQKLSVYSERLRRYNESYRRKQDNMIFENSERKFYRMLNNNMSATPGSYPIVEDIENFWTDQLASPTPYNSQADWIRSEEKSCETIEHMPHNAVSIEEFHEILKNAHNWKSPGPDGIHNFWLKKFWCIHGRLVETINEVMRNPTEMPKFLTTGTTYLLPKDLQHTADPSKYRPITCLPTIYKIITSCIASRIYKHCETNNIMTAQQKGCSKNALGSKELLIIDSIICNQAFKKHRNLFMTYFDYKKAFDSIPHGWLTKILEIYKIDPITINFLKYAMCNWRTNIELSTANITTKEIPIKRGIFQGDSLSPLWFCLALNPLSKQLNATEKGFNVKGNRNTIALNHLLYMDDLKLITGNKNHLQIMVKLVENFSKDVGMKFGLDKCRTISVVRGKIQDEPIALSNGQEIEAMKSDDLYKYLGMKQNRRINHQRMKEDLTTEFIRRINKILKTNLNSKNMTRAINTYACSILTYSFGIIPWSKTDMENLQRKMRTLMTKAHKHHPKSSIERTTLPRNKGGRGLLDIMELANDQIECLRTYFKDKSGTSEIYKVLCEADESTPLQLHKEQLSYNHQTIQEKMQRWREKPLHGRHFNEVNQDHVDIEASNYWLTSGAMYPETEGFLLAIQDQVISTRNYCKHIIKDRTITDDRCRYGCPTNETIQHITGGCQMFAGNEYKERHDAVGKILHQEMATKLTLIHSEKVPYYKYRPETILENERYKLYWDRTVLTDKTVPHNRPDILLVDKHQKAAILIDVAIPNNNNMRQKEVEKISKYRDLEFQIKRQWGMISTRTIPIIISTTGIVPKNLKRNIKELGLSEYICNIMQKAVLLGTARTVRKFLGSEGQVQGSRVRGPEVRREPGGPQRPDTIELCPSDILNIWD

SEQ ID NO: 7480 - protein, 1267 aa, Harmonia axyridis
MVNLRNRNIEPLPEVRQGVSGAGAGHDSMRDVGDRVLRRRASVEQNVTPPQSQHSRRRITRVSPTAEGAAQDPQPALTQAGLPRRRMKWTSSINETIMRIYYEVTNMEEDKIGYRQKLFAEFHRNYPELQVSEQRVADQYRVILRNKLVPDERLNTIKNEVQLRLQNRNLTNNETTIEENYDCAENQHNINAQMNSEEQNNADVLAISDAQRRNIYAAPVVNPEEDERELLERLFATMNRCVIDFEGTDPLRRPILPRLRTSKKLSHLLVMTNKEIIPKYLSDYHDLESLHLIIYCAAFSIATVLGVKPKPKSQQPAREKQQNKPHWQKRLEDKVHSIRQEIGRLTQFAKGSPSRRLQKMVNIIMDRHRQHTTYDPNNENAQQILDTLKQKLSVYSERLRRYNESYRRKHDNMIFENSERKFYRMLNNNMSATPGSYPTVEDIENFWTDQLATPTPYNSQADWIRNEEKSCETMEQMPHNAVSIEEFHEILKNTHNWKSPGPDGIHNFWLKKFWCLHGRLVETINDVISNPTEMPKFLTTGTTYLLPKDMQHTADPSKYRPITCLPTIYKIVTSCIASRIYKHCETNNIMTAQQKGCSKNALGSKELLIIDSIICNQAFKKHRNLFMTYFDYKKAFDSIPHGWLTKILEIYKIDPITINFLKYAMCNWRTNIELSTANITTKDIPIKRGIFQGDSLSPLWFCLALNPLSKQLNATEKGFNVKGNRNNIALNHLLYMDDLKLITGNKNHLQIMVKLVENFSEDVGMKFGLDKCRTISVVRGKIQDEPIALSNGQEIEAMKSDDLYKYLGMKQNRRINHQRMKEDLTTEFIRRINKILKTNLSSKNMTRAINTYACSILTYSFGIIPWTKTDMENLQRKMRTLMTKAHKHHPKSSIERTTLPRNKGGRGLPDIMELAHGQIECLRTHFKDKSGTSEIYKVLCEADESTPLQLHKEQLSYNHQTIQEKLQRWREKPLHGRHFNEVNQDHVDIEASNYWLTSGAMYPETEGFLLAIQDQVISTKNYCKHIIKDRTITDDRCRYGCPTNETIQHITGGCQMFAGNEYKERHDAVGKILHQEMATKLTLINSEKVPYYKYRPETILENERYKLYWDRTVLTDKTVPHNRPDILLVDKQQKAAILIDVAIPNNNNMRQKEVEKISKYRDLEFQIKRQWGMISTRTIPIIISTTGIVPKNLKRNIKQLGLSEYVCNIMQKAVLLGTARTVRKFLGSEGQVQGSRVRGPEVRREPGGPQRPDTTELCPSDILNIWD

SEQ ID NO: 7481 - protein, 1264 aa, Harmonia axyridis
MRNRNIEPLPEVRQGVSGAGAGHDSMRDVGDRVLRRRASVEQNATPPQSQHSRRRITRVSPTAEGAAQDPQPALTQAGLPRRRMKWTSSINETIMRIYYEVTNMEEDKIGYRQKLFAEFERNYPELQVSEQRVADQYRVILRNKLVPDERLNTIKNEVQLRLQNRDLTNKEKTIEENYECAENQQNINAQMNTEEQNNADVIAISDAQRRKIYAAPVENPEEDQRELLERLSATMNRCVIDFEGTDPLRRPILPRLRTSKKLSHLLVMTNKEIIPKYLSDYHDLESLHLIIYCAAFSIATVLGVKPKPKSQQPAREKQQNKPHWQKRLENKVHSIRQDIGRLTQFAKGSPSRKLQKMVNIMMDRHRQHTTYDPNNENAQQILDTLKQKLSVYSERLRRYNESYRRKQDNMIFENSERKFYRMLNNNMSATQGSYPIVEVIENFWTDQLASPTPYNSQADWIRSEEKSCETIEHMPHNAVSIEEFHEILKNAHNWKSPGPDGIHNFWLKKFWCIHGRLVETINEVMRNPTEMPKFLTTGTTYLLPKDLQHTADPSKYRPITCLPTIYKIITSCIASRIYKHCETNNIMTAQQKGCSKNALGSKELLIIDSIICNQAFKKHRNLFMTYFDYKKAFDSIPHGWLTKILEIYKIDPITINFLKYAMCNWRTNIELSTANITTKEIPIKRGIFQGDSLSPLWFCLALNPLSKQLNATEKGFNVKGNRNTIALNHLLYMDDLKLITGNKNHLQIMVKLVENFSKDVGMKFGLDKCRTISVVRGKIQDEPIALSNGQEIEAMKSDDLYKYLGMKQNRRINHQRMKEDLTTEFIRRINKILKTNLNSKNMTRAINTYACSILTYSFGIIPWSKTDMENLQRKMRTLMTKAHKHHPKSSIERTTLPRNKGDRGLLDIMELANGQIECLRTYFKDKSGTSEIYKVLCEADESTPLQLHKEQLSYNHQTIQEKMQRWREKPLHGRHFNEVNQDHVDIEASNYWLTSGAMYPETEGFLLAIQDQVISTRNYCKHIIKDRTITDDRCRYGCPTNETIQHITGGCQMFAGNEYKERHDAVGKILHQEMATKLTLIHSEKVPYYKYRPETILENERYKLYWDRTVLTDKTVPHNRPDILLVDKHQKAAILIDVAIPNNNNMRQKEVEKISKYRDLEFQIKRQWGMISTRTIPIIISTTGIVPKNLKRNIKELGLSEYICNIMQKAVLLGTARTVRKFLGSEGQVQGSRVRGPEVRREPGGPQRPDTTELCPSDILNIWD

SEQ ID NO: 7482 - protein, 1268 aa, Harmonia axyridis
MMVNLRNRNIEPLPEVRQGVSGAGAGHDSMRDVGDRVLRRRAPVDQNATPPQSQHSRRRITRVSPTAEGAVQDPQPALTQAGLPRRRMKWTSSINETIMRIYYEVTNMEEDKIGYRQKLFAEFHRNYPELQVSEQRVADQYRVILRNKLVPDERLNTIKNEVQLRLQNRNPTNNEVTIEENYDCAENQHNINAQINTEEQNSGDLALARDEQWRNIQTATMENREESRRDLLEQLSVTINRYFIEFEGTDPLKRPILPRLKTSKKLSHILHIMNKEIIPPFFSNDQNLESLHLITYCAASTISAVLGVKPKPRSEQPAQKKQHNKPHWQNRLEAKVHSLRQDIGRLTQFEKGSPSRKLQKIVDAIMDRHRRHANYDANNESAQETLDTLKQKLSVYSERLRRYNESYKRKHDNMIFENSEKNLYRMLNEQTSTKLVSPPSAEDMESFWTDQLSTPTPFNSKAHWIRREEKSCETIENMPHSVITSEELQEILKNTHNWKSPGPDGIHNFWLKKFWCLHGRLVEYINNIIHNPTEMPTFLTTGITYLIPKDFQNTMDPSKYRPITCLPTIYKIITSCLASRIYKHCEKNEIITTQQKGCSKNAQGSKEQLVIDSIICNQAFKKHRNLFMTYFDYKKAFDSLPHGWLKKILEIYKIDPIITNFLKLAMDNWKTNIELSTANIKTKLIPIKRGIFQGDSMSPLWFCLALNPLSKQLNATEKGFNIKGNNNTTTLNHLLYMDDLKLITGNKNHLEIMVKLVEHFSKDVGMEFGLDKCRTLSVVRGRIQDEPITLANGQQIEAMKLDDLYKYLGMKQNRRINHQRMKQDLTTEFIRRTKKILKRNLNSRNMTRAINTYACSILTYSFGIVPWSKTDIENLQRKMRTLMTKANKHHPKSSIERTTLPRNKGGRGLTDIMELASGQIESLREYFRDQASTSEFYKILCEADESTPLQLHKEQFSYNHQTNQEKLDRWREKPLHGRHFNEVNQDHVDIEASNFWLTSGAMYPETEGFLLAIQDQVISTRNYCRHIIKDRTITDDRCRYGCPTNETIQHITGGCQMFAGNEYKERHDAVGKILHQEMATKLTLTQSEKVPYYKYRPETILENERYKLYWDRTVLTDKTVPHNRPDILLVDKHQKAAILIDVAIPNNNNLRQKEVEKISKYRDLEFQIKRQWGMISTRTIPIIISTTGIVPKNLKRNIKQLGLSEYICNVMQKAVLLGTARTVRKFLGSEGQVQGSRVRGPEVRRQPGGPQGPDTTELYPSDILNIWD

SEQ ID NO: 7483 - protein, 1209 aa, Harmonia axyridis
MVSPVWSWEINQGSRGQGRIPEVDLSPIGSICEYLHATHTRIYYEVTNMEEDKIGYRQKLFAEFERNYPELQVSEQRVADQYRVILRNKLVPDERLNTIKNEVQLRLQNRDLTNNERTIEENYECAENQQNINAQMNTEEQNNADVIAISDAQRRKIYAAPVENPEEDQRELLERLSATMNRCVIDFEGTDPLRRPILPRLRTSKKLSHLLVMTNKEIIPKYLSDYHDLESLHLIIYCAAFSIATVLGVKPKPKSQQPAREKQQNKPHWQKRLENKVHSIRQDIGRLTQFAKGSPSRKLQKMVNIMMDRHRQHTTYDPNNENAQQILDTLKQKLSVYSERLRRYNESYRRKQDNMIFENSERKFYRMLNNNMSATPGSYPIVEDIENFWTDQLASPTPYNSQADWIRSEEKSCETIEHMPHNAVSIEEFHEILKNAHNWKSPGPDGIHNFWLKKFWCIHGRLVETINEVMRNPTEMPKFLTTGTTYLLPKDLQHTADPSKYRPITCLPTIYKIITSCIASRIYKHCATNNIMTAQQKGCSKNALGSKELLIIDSIICNQAFKKHRNLFMTYFDYKKAFDSIPHGWLTKILEIYKIDPITINFLKYAMCNWRTNIELSTANISTKEIQIKRGIFQGDSLSPLWFCLALNPLSKQLNATEKGFNVKGNRNTIALNHLLYMDDLKLITGNKNHLQIMVKLVENFSKDVGMKFGLDKCRTISVVRGKIQDEPIALSNGQEIEAMKSDDLYKYLGMKQNRRINHQRMKEDLTTEFIRRINKILKTNLNSKNMTRAINTYACSILTYSFGIIPWSKTDMENLQRKMRTLMTKAHKNHPKSSIERTTLPRNKGGRGLLDIMELANGQIECLRTYFKDKSGTSEIYKVLCEADESKPLQLHKEQLSYNHQTIQEKMQRWREKPLHGRHFNEVNQDHVDIEASNYWLTSGAMYPETEGFLLAIQDQVISTRNYCKHIIKDRTITDDRCRYGCPTNETIQHITGGCQMFAGNEYKERHDAVGKILHQEMATKLTLIHSEKVPYYKYRPETILENERYKLYWDRTVLTDKTVPHNRPDILLVDKHQKAAILIDVAIPNNNNMRQKEVEKISKYRDLEFQIKRQWGMISTRTIPIIISTTGIVPKNLKRNIKQLGLSEYICNIMQKAVLLGTARTVRKFLGSEGQVQGSRVRGPEVRREPGGPQRPDTTELCPSDILNIWD

SEQ ID NO: 7484 - protein, 1074 aa, Harmonia axyridis
MNSEEQNNADVLAISDAQRRNIYAAPVVNPEEDQRELLERLFATMNRCVIDFEGTDPLRRPILPRLRTSKKLSHLLVMTNKEIIPKYLSDYHDLESLHLIIYCAAFSIATVLGVKPKPKSQQPAREKQQNKPHWQKRLEDKVHSIRQEIGRLTQFAKGSPSSRLQKMVNIIMDRHRQHTTYDPNNENAQQILDTLKQKLSVYSERLRRYNESYRRKQDNMIFENSERKFYRMLNNNMSATPGSYPTVEDIENFWTDQLATPTPYNSQADWIRNEEKSCETMEQMPHNAVSIEEFHEILKNTHNWKSPDPDGIHNFWLKKFWCIHGRLVETINDVISNPTEMPKFLTTGTTYLLPKDMQHTADPSKYRPITCLPTIYKIVTSCIASRIYKHCETNNIMTAQQKGCSKNALGSKELLIIDSIICNQAFKKHRNLFMTYFDYKKAFDSIPHGWLTKILEIYKIDPITINFLKYAMCNWRTNIELSTANITTKDIPIKRGIFQGDSLSPLWFCLALNPLSKQLNATEKGFNVKGNRNNIALNHMLYMDDLKLITGNKNHLQIMVKLVENFSEDVGMKFGLDKCRTISVVRGKIQDEPIALSNGQEIEAMKSDDLYKYLGMKQNRRINHQRMKEDLTTEFIRRINKILKTNLNSKNMTRAINTYACSILTYSFGIIPWTKTDMENLQRKMRTLMTKAHKHHPKSSIERTTLPRNKGGRGLLDIMELAHGQIECLRTYFKDKSGTSEIYKVLCEADESTPLQLHKEQLSYNHQTIQEKLQRWREKPLHGRHFNEVNQDHVDIEASNYWLTSGAMYPETEGFLLAIQDQVISTKNYCKHIIKDRTITDDRCRYGCPTNETIQHITGGCQMFAGNEYKERHDAVGKILHQEMATKLTLINSEKVPYYKYRPETILENERYKLYWDRTVLTDKTVPHNRPDILLVDKQQKAAILIDVAIPNNNNMRQKEVEKISKYRDLEFQIKRQWGMISTRTIPIIISTTGIVPKNLKRNIKQLGLSKYVCNIMQKAVLLGTARTVRKFLGSEGQVQGSRVRGPEVRREPGGPQRPDTTELCPSDILNIWD

SEQ ID NO: 7485 - protein, 1048 aa, Harmonia axyridis
MENREESRRDLLEQLSVTMNRYFIEFEGTDPLKRPILPRLKTSKKLSHILHIMNKEIIPPFFSNGQNLESLHLITYCAASTISAVLGVKPKPRSEHPAQKKQHNKPHWQNRLEAKVHSLRQEIGRLTQFEKGSPSRKLQKIVDAIMDRHRRHANYDANNESAQETLDTLKQKLSVYSERLRRYNESYKRKHDNMIFENSEKNFYRMLNEQTSTKLVSFPSAEDMESFWTDQLSTPTPFNSKAHWIKREEKSCETIENMPHSVITSEELQEILKNTHNWKSPGPDGIHNFWLKKFWCLHGRLVEYINNIIHNPTEMPTFLTTGITYLIPKDFQNTMDPSKYRPITCLPTIYKIITSCLASRIYKHCEKNKIITTQQKGCSKNAQGSKEQLVIDSIICNQAFKKHRNLFMTYFDYKKAFDSLPHGWLKKILEIYKIDPIITNFLKLAMDNWKKNIELSTANIKTKLIPIKRGIFQGDSMSPLWFCLALNPLSKQLNATEKGFNIKGNNSTTTLNHLLYMDDLKLITGNKNHLEIMVKLVEHFSKDVGMEFGLDKCRTLSVVRGRIQDKPITLANGQQIEAMKLDDLYKYLGMKQNRRINHQRMKQDLTTEFIRRTKKILKTNLNSRNMTRAINTYACSILTYSFGIVPWSKTDIENLQRKMRTLMTKANKHHPKSSIERTTLPRNKGGRGLTDIMELASGQIESLREYFRDQASTSEFYKILCEADESTPLQLHKEQFSYNHQTNQEKLDRWREKPLHGRHFNEVNQDHVDIEASNYWLTSGAMYPETEGFLLAIQDQVISTRNYCRHIIKDRTITDDRCRYGCPTNETIQHITGGCQMFAGNEYKERHDAVGKILHQEMATKLTLIQSEKVPYYKYRPETILENERYKLYWDRRVLTDKTVPHNRPDILLVDKHQKAAILIDVAIPNNNNLRQKEVEKISKYRDLEFQIKRQWGMISTRTIPIIISTTGIVPKNLKRNIKQLGLSEYICNVMQKAVLLGTARTVRKFLGSEGQVQGSRVRGPEVRRQPGGPQGPDTTELYPSDILNIWD

SEQ ID NO: 7486 - protein, 1180 aa, Harmonia axyridis
MRDVGDRVLRRRASVEQNATPPQSQHSRRRITRVSPTAEGAAQDPQPALTQAGLPRRRMKWTSSINETIMRIYYEVTNMGEDKIGYRQKLFAEFHRNYPELQVSEQRVADQYRVILRNKLVPDERLNTIKNEVQLRLQNRNLTNNETTIEENYDCAENQHNINAQMNSEEQNNADVLAISDAQRRNIYAAPVVNPEEDQRELLERLFATMNRCVIDFEGTDPFRRPILPRLRTSKKLSHLLAMTNKQIIPKYLSDHHDLESLHLIIYCAAFSIATVLGVKPKPKSHLPAREKQQNKPHWQKRLEDKVHSIRQEIGRLTHFAKGSPSRRLQKMVNIIMDRHRQHTTYDPNNENAQQILDTLKQKLSVYSERLRRYNESYKRKQDNMIFENSERKFYRMLNNNMSATPGSYPTVEDIENFWTDQLATPTPYNSQADWIRNEEKFYETMEQMPHNAVSIEEFHEVLKNTHNWKSPGPDGIHNFWLKKFWCIHGRLVETINDVISNPTEMPKFLTTGTTYLLPKDMQHTADPSKYRPITCQPTIYKIITSCIASRIYKHFETNNIMTSQQKGCSKNALGSKELLIIDSIICNQAFKKHRNLFMTYFDYKKAFDSIPHGWLTKILEIYKIDPITINFLKYAMCNWRTNIELSTANITTKDIPIKRGIFQGDSLSPLWFCLALKPLSKQLNATEKGFNVKGNRNNIALNHLLYMDDLKLITGNKNHLQIMVKLVENFSEDVGMKFGLDKCRTISVVRGKIQDEPIALSNGQEIEAMKSDDLYKYLGMKQNRRINHQRMKEDLTTEFIRRINKILKTNLNSKNMTKAINTYACSILTYSFGIIPWTKTDMENLQRKMRTLMTKAHKHHPKSSIERTTLPRNKGGRGLLDLMELAHAQIECLLPYFKDKSGTSEIYKVLCEADESTPLQLHKEQLSYNRQTIQEKLQRWREKPLHGRHFNEVNQDHVDIEASNYWLTSGAMYPETEGFLLAIQDQVISTKNYCKHIIKDRTITDDRCRYGCPTNETIQHITGGCQMFAGNEYKERHDAVGKILHQEMATKLTLINSEKVPYYKYRPETILENERYKLYWDRTVLTDKTVPHNRPDILLVDKQQKAAILIDVAIPNKNNMRQKEVEKISKYRDLEFQIKRQWGMISTRTIPIIISTTGIVPKNLNRNIKQLGLSEYIIT

SEQ ID NO: 7487 - protein, 1268 aa, Harmonia axyridis
MMVNLRNRNIEPLPEVRQGVSGAGAGHDSMRDVGDRVLRRRASVEQNATPPQSQHSRRRITRVSPTAEGAAQDPQPALTQAGLPRRRMKWTSSINETIMRIYYEVTNMEEDKIGYRQKLFAEFERNYPELQVSEQRVADQYRVILRNKLVPDERLNTIKNEVQLRLQNRNLTNNETTIEENYDCAENQHNINAQMNSEEQNNADVIAISDAQRRNIYAAPVVNPEEDQRELLERLFATMNRCVIDFEGTDPLRRPILPRLRTSKKLSHLLVMTNKEIIPKYLSDYHDLESLHLIIYCAAFSIATVLGVKPKPISQQPAREKQQNKPHWQKRLEDKVHSIRQEIGRLTQFAKGSPSRRLQKMVNIIMDRHRQHTTYEPNNENAQQILDTLKQKLSVYSERLRRYNESYRRKQDNMIFENSERKFYRMLNNNMSATPGSYPTVEDIENFWTDQLATPTPYNSQADWIRNEEKSCETMEQMPHNAVSIEEFHEILKNTHNWKSPGPDGIHNFWLKKFWCIHGRLVETINDVISNPTEMPKFLTTGTTYLLPKDMQHTADPSKYRPITCLPTIYKIITSCIASRIYKHCETNNIMTAQQKGCSKNALGSKELLIIDSIICNQAFKKHRNLFMTYFDYKKAFDSIPHGWLTKILGIYKIDPITINFLKYAMCNWRTNIELSTANITTKDIPIKKGIFQGDSLSPLWFCLALNPLSKQLNATEKGFNVKGNRNNIALNHLLYMDDLKLITGNKNHLQIMVKLVENFSEDVGMKFGLDKCRTISVVRGKIQDEPIALSNGQEIEAMKSDDLYKYLGMKQNRRINHQRMKEDLTTEFIRRINKILKTNLNSKNMTRAINTYACSILTYSFGIIPWTKTDMENLQRKMRTLMTKTHKHHPKSSIERTTLPRNKGGRGLLDIMELAHGQIECLRTYFKDKSGTSEIYKVLCEADESTPLQLHKEQLSYNHQTIQEKLQRWREKPLHGRHFNEVNQDHVDIEASNYWLTSGAMYPETEGFLLAIQDQVISTKNYCKHIIKHRTITDDRCRYGCPTNETIQHITGGCQMFAGNEYKERHDAVGKILHQEMATKLTLINSEKVPYYKYRPETILENERYKLYWDRTVLTDKTVPHNRPDILLVDKQQKAAILIDVAIPNNNNMRQKEVEKISKYRDLEFQIKRQWGMISTRTIPIIISTTGIVPKNLKRNIKQLGLSEYICNIMQKAVLLGTARTVRKFLGSEGQVQGSRVRGPEVRREPGGPQGPDTTELSPSDILNIWD

SEQ ID NO: 7488 - protein, 1268 aa, Harmonia axyridis
MMVNLRNRNIEPLPEVRQGVSGAGAGHDSMRDVGDRMLWRRASVEQNATPPQSQHSRRRITRVSPTAEGAAQDPQPALTQAGLPRRRMKWTSSINETIMRIYYEVTNMEEDKIGYRQKLFAEFHRNYPELQVSEQRVADQYRVILRNKLVPDERLNTIKNEVQLRLQNRNLTNNETTIEENYDCAENQHNINAQMNSEEQNNADVLAISDAQRRNIYAAPVVNPKEDQRELLERLFATMNRCVIDFEGTDPLRRPILPRLRTSKKLSHLLVMTNKEIIPKYLSDYHDLESLHLIIYCAAFSIATVLGVKPKPKSQQPAREKQQNKPHWQKRLEDKVHSIRQEIGRLTQFAKGSPSRRLQKMVNIIMDRHRQHTTYDPNNENAQQILDTLKQKLSVYSERLRRYNESYRRKQDNMIFENSERKFYRMLNNNMSATPGSYPTVEDIENFWTDQLATPTPYNSQADWIRNEEKSYETMEQMPHNAVSIEEFHKVLKNTHNWKSPGPDGIHNFWLKKFRCIHGRLVETINDVISNPTEMPKFLTTGTTYLLPKDMQHTADPSKYRPITCLPTIYKIITSCIASRIYKHCETNNIMTAQQKGCSKNALGSKELLIIDSIICNQAFKKHRNLFMTYFDYKKAFDSIPHGWLTKILEIYKIDPITINFLKYAMCNWRTNIELSTANITTKDIPIKRGIFQGDSLSPLWFCLALNPLSKQLNATEKGFNVKGNRNNIALNHLLYMDDLKLITGNKNHLQIMVKLVENFSEDVGMKFGLDKCRTISVVRGKIQDEPIALSNGQEIEAMKSDDLYKYLGMKQNRRINHQRMKEDLTTEFIRRINKILKTNLNSKNMTRAINTYACSILTYSFGIIPWTKTDMENLQRKMRTLMTKAHKHHPKSSIERTTLPRNKGGRGLLDLMELAHAQIECLRTYFKDKSGTSEIYKVLCEADELTPLQLHKEQLSYNHQTIQEKLQRWREKPLHGRHFNEVNQDHVDIEASNYWLTSGAMYPETEGFLLAIQDQVISTKNYCKHIIKDRTITDDRCRYGCPTNETIQHITGGCQMFAGNEYKERHDAVGKILHQEMATKLTLINSEKVPYYKYRPETILENERYKLYWDRTVLTDKTVPHNRPDILLVDKQQKAAILIDVAIPNNNNMRQKEVEKISKYRDLEFQIKRQWGMISTRTIPIIISTTGIVPKNLKRNIKQLGLSEYICNIMQKAVLLGTARTVRKFLGSEGQVQGSRVRGPEVRREPGGPQGPDTTELCPSDILNIWD

SEQ ID NO: 7489 - protein, 1181 aa, Harmonia axyridis
MKWTSSINETIMRIYYEVTNMEEDKIGYRQKLFAEFHRNYPELQVSEQRVADQYRVILRNKLVPDERLNTIKNEVQLRLQNRDLTNNETTIEENYDCAENQQNINAQMNTEEQNNADVIAISDAQRRNIYAAPVENPEEDQRELLERLSATMNRCVIDFEGTDPLRRPILPRLRTSKKLSHLLVMTNKEIIPKYFSDYHDLESLHLIIYCAAFSIATVLGVKPKPKSQQPAREKQQNKPHWQKRLENKVHSIRQDIGRLTQFAKGSPSRKLQKMVNIIMDRHRQHTTYDPNNENAQQILDTLKQKLSVYSARLRRYNESYRRKQDNMIFENSERKFYRMLNNNMSATPGSYPTVEDIENFWTDQLASPTPYNSQADWIRSEEKSCETIEHMPHNVVSIEEFHEILKNAHNWKSPGPDGIHNFWLKKFWCIHGRLVETINEVMRNPTEMPKFLTTGTTYLLPKDLQHTADPSKYRPITCLPTIYKIITSCIASRIYKHCETNNIMTAQQKGCSKNALGSKELLIIDSIICNQAFKKHRNLFMTYFDYKKAFDSIPHGWLTEILEIYKIDPITINFLKYAMCNWRTNIELSTANITTKEIPIKRGIFQGDSLSPLWFCLALNPLSKQLNATEKGFNVKGNGNTIALNHLLYMDDLKLITGNRNHLQIMVKLVENFSKDVGMKFGLDKCRTISVVRGKIQDEPIALSNGQEIGAMKSDDLYKYLGMKQNRRINHQRMKEDLTTEFIRRINKILKTNLNSKNMTRAINTYACSILTYSFGIIPWSKTDMENLQRKMRTLMTKAHKHHPKSSIERTTLPRNKGGRGLLDIMELAHGQIECLRTYFKHKSGTSEIYKVLCEADESTPLQLHKEQLSYNHQTIQEKLQRWREKPLHGRHFNEVNQDHVDIEASNYWLTSGAMYPETEGFLLAIQDQVISTRNYCKHIIKDRTITDDRCRYGCPTNETIQHITGGCQMFAGNEYKERHDAVGKILHQEMATKLTLIHSEKVPYYKYRPETILENERYKLYWDRTVLTDKTVPHNRPDILLVDKHQKAAILIDVAIPNNNNMRQKEVEKISKYRDLEFQIKRQWGMISTRTIPIIISTTGIVPKNLKRNIKQLGLSEYICNIMQKAVLLGTARTVRKFLGSEGHVQGSRVRGPEVRREPGGPQGPDTTELCPSDILNIWD

SEQ ID NO: 7490 - protein, 1167 aa, Harmonia axyridis
MMVNLRNRNIEPLPEVRQGVSGAGAGHDSMRDVGDRVLRRRASVEQNATPPQSQHSRRRIARVSPTAEGAAQDPQPALTQAGLPRRRMKWTSSINETIMRIYYEVTNMDEDKIGYRQKFFAEFHRNYPELQVSEQRVADQYRVILRNKLVPDERLNTIKNEVQLRLQNRNLTNNETTIEENYDCAENQHNINAQMNSEEQNDADVLAISDAQRRNIYAAPVVNPEEDQRELLERLFATMNRCVIDFEGTDPLRRPILPRLRTSKKLSHLLVMTNKEIIPKYLSDYHDLESLHLIIYCAAFSKATVLGVKPKPKSQQPAREKQQNKPHWQKRLEDKVHSIRQKIGRLTQFAKGSPSRRLQKMVNIIMDRHRQHTTYDPNNENAQQILDTLKQKLSVYSERLRRYNESYRRKQDNMIFENSERKFYRMLNNNMSATPGSYPTVEDIENFWTDQLATPTPYNSQADWIRNEEKSCETMEQMPHNAVSIEEFHEILKNTHNWKSPGPDGIHNIWLKKFWCIHGRLVETINDVISNPTEMPKFLTTGTTYLLPKDMQHTADPSKYRPITCLPTIYKIITSCIASRIYKHCETNNIMTAQQKGCSKNALGSKELLIIDSIICNQAFKKHRNLFMTYFDYKKAFDSIPHGWLTKILEIYKIDPITINFLKYAMCNWRTNIELSTANITTKDIPIKRGIFQGDSLSPLWFCLALNPLSKQLNATEKGFNVKGNRNNIALNHLLYMDDLKLISGNKNHLQIMVKLVENFSEDVGMKFGLDKCRTISVVRGKIQDEPIALSNGQEIEAMKSDDLYKYLGMKQNRRINHQRMKEDLTTEFIRRINKILKTNLNSKNMTRAINTYACSILTYSFGIIPWTKTDMENLQRKMRTLMTKAHKHHPKSSIERTTLPRNKGGRGLLDIMELAHGQIECLRTYFKDKSGTSEIYKVLCEADESTPLQLHTEQLSCNHQTIQEKLQRWREKPLHGRHFNEVNQDHVDTEASNYWLTSGAMYPETEGFLLDIQDQVISTKNYCKHIIKDRTITDDRCRYGCPTNETIQHITGGCQMFAGKEYKERHDAVGKILHQEMATKLTLINSEKVPYYEYRPETILENERYKLYWDPTVLTDKTVPHNRPDILLVDKQQKAAILIDVAIPNNNNMRQKEVKKFQNIGTSNFR

SEQ ID NO: 7491 - protein, 1181 aa, Harmonia axyridis
MKWTSSINETIMRIYYEVTNMEEDKIGYRQKLFAEFHRNYPELQVSEQRVADQYRVILRNKLVPDERLNTIKNEVQLRLQNRNLTNNETTIEENYDCAENQHNINAQMNSEEQNNADVLAISDAQRRNIYAAPVVNPEEDQRELLERLFATMNRCVIDFEGTDPLRRPILPRLRTSKKLSHLLVMTNKEIIPKYLSDYHDLESLHLIIYCAAFSIATVLGVKPKPKSQQPAREKQQNKPHWQKRLEDKVHSIRQEIGRLTQFAKGSPSRRLQKMVNIIMDRHRQHTTYDPNNENAQQILDTLKQKLSVYSERLRRYNESYRRKQDNMIFENSERKFYRMLNNNMSATPGSYPTVEDIENFWTDQLATPTPYNSQADWIRNEEKSYETMEQMPHNAVSIEEFHEVLKNTHNWKSPGPDEIHNFWLKKFWCIHGRLVETINDVISNPPEMPKFLTTGTTYLLPKDMQHTADPSKYRPITCLPTIYKIITSCIASRIYKHGETNNIMTAQQKGCSKNALGSKELLIIDSIICNQAFKKHRNLFMTYFDYKKAFDSIPHGWLTKILEIYKIDPITINFLKYAMCNWRTNIELSTANITTKDIPIKRGIFQGDSLSPLWFCLALNPLSKQLNATEKGFNVKGNRNNIALNHLLYMDDLKLITGNKNHLQIMVKLVENFSEDVGMKFGLDKCRTISVVRGKIQDEPIALSNGQEIEAMKSDDLYKYLGMKQNRRINHQRMKEDLTTELIRRINKILKTNLNSKNMTRAINTYACSILTYSFGIIPWTKTDIENLQRKMRTLMTKAHKHHPKSSIERTTLPRNKGGRGLLDLMELAHGQIECLRTYFKDKSGTSEIYKVLCEADESTPLQLHKEQLSYNHQTIQEKLQRWREKPLHGRHFNEVNQDHVDIEASNYWLTSGAMYPETEGFLLAIQDQVISTKNYCKHIIKDRTITDDRCRYGCPTNETIQHITGGCQMFAGNEYKERHDAVGKILHQEMATKLTLINSEKVPYYKYRPETILENERYKLYWDRTVLTDKTVPHNRPDILLVDKQQKAAILIDVAIPNNNNMRQKEVEKISKYRDLEFQIKCQWGMISTRTIPIIISTTGIVPKNLKRNIKQIGLSEYICNIMQKAVLLGTARTVRKFLGSEGQVQGSRVRGPEVRREPGGPQGPDTTELCPSDILNIWD

SEQ ID NO: 7492 - protein, 903 aa, Harmonia axyridis
MDRYRRHANYDANNESAQETLDTLKQKLSVYSEQLRRYNESYKRKHDNMIFENSEKNFYRMLNEQTSTKLVSPPSAEDMESFWTDQLSTPTPFNSKAHWIRREEKSCETIENMPHSVITSEELQEILKNTHNWKSPGPDGIHNFWLKKFWCLHGRLVEYINNIIHNPTEMPTFLTTGITYLIPKDFQNTMDPSKYRPITCLPTIYKIITSCLASRIYKHCEKNKIITTQQKGCSKNAQGSKEQLVIDSIICNQAFKKHRNLFMTYFDYKKAFDSLPHGWLKKILEIYKIDPIITNFLKLAMDNWKTNIELSTANIKTKLIPIKRGIFQGDSMSPLWFCLALNPLSKQLNATEKGFNIKGNNNTTTLNHLLYMDDLKLITGNKNHLEIMVKLVEHFSKDVGMEFGLDKCRTLSVVRGRIQDEPITLANGQQIEAMKLDDLYKYLGMKQNRRIDHQRMKQDLTTEFIRRTKKILKTNLNSRNMTRAINTYACSILTYSFGIVPWSKTDIENLQRKMRTLMTKANKHHPKSSIERTTLPRNKGGRGLTDIMELASGQIESLREYFRDQASTSEFYKILCEADESTPLQLHKEQFSYNHQTNQEKLDRWREKPLHGRFFNEVNQDHVDIEASNYWLTSGAMYPETEGFLLAIQDQVISTRNYCRHIIKDRTITDDRCRYGCPTNETIQHITGGCQMFAGNEYKERHDAVGNILHQEMATKLTLIQSEKVPYYKYRPETILENERYKLYWDRTVLTDKTVPHNRPDILLVDKHQKAAILIDVAIPNNNNLRQKEVEKISKYRDLEFQMKRQWGMISTRTIPIIISTTGIVPKNLKRNIKQLGLSEYICNVMQKAVLLGTARTVRKFLGSEGQVQGSRVRGPEVRRQPGGPQGPDTTELYPSDILNIWD

SEQ ID NO: 7493 - protein, 1268 aa, Harmonia axyridis
MMVNLRNRNIEPLPEVRQGVSGAGAGHDSMRDVGDRVLRRRASVEQNATPPQSQHSRRRITRVSPTAEGAAQDPQPALTQAGLPRRRMKWTSSINETIMRIYYEVTNMEEDKIGYRQKLFAEFHRNYPELQVSEQRVADQYRVILRNKLVPDERLNTIKNEVQLRLQNRNLTNNEVTIEENYDCAENQHNINAQINTEEQNSGDLPLVRDEQWRNIQTATMENREESRRDLLEQLSVTMNRYFIEFEGTDPLKRPILPRLKTSKKLSHILHIMNKEIVPPFFSNNQNLESLHLITYCAASTISAVLGVKPKPRSEQPAQKKQHNKPHWQNRLEAKVHSLRQDIGRLTQFEKGSPSRKLQKIVDAIMDRHRRHANYDANNESAQETLDTLKQKLSVYSERLRRYNESYKRKHENMIFENSEKNFYRMLNEQTSTKLVSPPSAEDMESFWTDQLSTPTPFNSKACWIRREEKSCETIESMPHSVITSEELQEILKNTHNWKSPGPDGIHNFWLKKFWCLHGRLVEYINNIIHNPTEMPTFLTTGITYLIPKDFQNTMDPSKYRPITCLPTIYKIITSCLASRIYKHCEKNKIITTQQKGCSKNAQGSKEQLVIDSIICNQAFKKHRNLFMTYFDYKKAFDSLPHGWLKKILEIYKIDPIITNFLKLAMDNWKTNIELSTANIKTKLIPIKKGIFQGDSLSPLWFCLALNPLSKQLNATEKGFNIKGNNNTTTLNHLLYMDDLKLITGNKNHLEIMVKLVEHFSKDVGMEFGLDKCRTLSVVRGRIQDEPITLANGQQIESMKSDDLYKYLGMKQNRRINHQRMKQDLTTEFIRRTKKILKTNLNSRNMTRAINTYACSILTYSFGIVPWSKTDIENLQRKMRTLMTKANKHHPKSSIERTTLPRNKGGRGLTDIMELASGQIESLREYFRDQASTSEFYKILCEADESTPLQLHKEQFSYNHQTNQEKLDRWREKPLHGRHFNEVNQDHVDIEASNYWLTSGAMYPETEGFLLAIQDQVISTRNYCRHIIKDRTITDDRCRYGCPTNETIQHITGGCQMFAGHEYKERHDAVGKILHQEMATKLTLIQSEKVPYYKYRPETILENERYKLYWDRTVLTDKTVPHNRPDILLVDKHQKAAILIDVAIPNNNNLRQKEVEKISKYRDLEFQIKRQWGMISTRTIPIIISTTGIVPKNLKRNIKQLGLSEYICNVMQKAVLLGTARTVRKFLGSEGQVQGSRVRGPEVRRQPGGPQGPDTTELYPSDILNIWD

SEQ ID NO: 7494 - protein, 1074 aa, Harmonia axyridis
MNSEEQNNADVLAISDAQRRNIYAAPVVNPEEDQRELLERLFATMNRCVIDFEGTDPLRRPILPRLRTSKKLSHLLVMTNKEIIPKYLSDYHDLESLHLIIYCAAFSIATVLGVKPQPKSQQPAREKQQNKPHWQKKVEDKVHSIRQEIGRLTQFAKGSPSRRSQKMVNIIMDRHRQHTTYDPNNENAQQILDTLKQKLSVYSERLRRYNESYRRKQDNMIFENSERKFYRVLNNNMSATPGSYPTVEDIENFWTDQLATPTPYNSQADWIRNEEKSYETMEQMPHNAVSIEEFHEVLKNTHNWKSPGPDGIHNFWLKKFWCIHGRLVETINDVISNPTEMPKFLTTGTTYLLPKDLQHTADPSKYRPITCLPTIYKIITSCIASRIYKHCETNNIMTAQQKGCSKNALGSKELLIIDSIICNQAFKKHRNLFMTYFDYKKAFDSIPHGWLTKILEIYKIDPITINFLKYAMCNWRTNIELSTANITTKDIPIKRGIFQGDSLSPLWFCLALNPLSKQLNATEKGFNVKGNRNNIALNHLLYMDDLKLITGNKNHLQIMVKLVENFSEDVGMKFGLDKCRTISVVRGKIQDEPIALSNRQEIEAMKSDDLYKYLGMKQNRRINHQRMKEDLTTEFIRRINKILKTNLNSKNMTRAINTFACSILTYSFGIIPWTKTDMEKLQRKMRTLMTKAHKHHPKSSIERTTLPRNKGGRGLLDLMELAHAQIECLRTYFKDKSGTSEIYKILCEADESTPLQLHKKQLSYNHQTIQEKLQRWREKPLHGRHFNEVNQDHVDIEASNYWLTSGAMYPETEGFLLAIQDQVISTKNYCKHIIKDRTITDDRCRYGCPTNETIQHITGGCQMFAGNEYKERHDAVGKILHQEMATKLTLINSEKVPYYKYRPETILENERYKLYWDRTVLTDKTVPHNRPDILLVDKQQKAVILIDVAIPNNNNMRQKEVEKISKYRDLEFQIKRQWGMISTRTIPIIISTTGIVPKNLKRNIKQLGLSEYICNIMQKAVLLGTARTVRKFLGSEGQVQGSRVRGPEVRREPGGPQGPDTTELCPSDILNIWD

SEQ ID NO: 7495 - protein, 1268 aa, Harmonia axyridis
MMVNLRNRNIEPLPEVRQGVSGAGAGHDSMRDVGDRVLRRRASVEQNATPPQSQHSRRRITRVSPTAEGAAQDPQPALTQAGLPRRRMKWTSSINETIMRIYYEVTNMEEDKIGYRQKLFAEFHRNYPELQVSEQRVADQYRVILRNKLVPDERLNTIKNEVQLRLQNRNLTNNETTIEENYDCAENQHNINAQMNSEEQNNADVLAISDAQRRNIYAAPVVNPEEDQRELLERLFATMNRCVIDFEGTDPLRRPILPRLRTSKKLSHLLVMINKEIIPKYLSDYHDLESLHLIIYCAAFSIATVLGVKPKPKSQQPAREKQQNKPHWQKRLEDKVHSIRQEIGRLTQFAKGSPSRRLQKMVNIIMDRHRQHTTYDPNNENAQQILDTLKQKLSVYSERLRRYNESYRRKQDNMIFENSERKFYRMLNNNMSATPGSYPTVEDIENFWTDQLATPTPYNSQADWIRNEEKSCETIEHMPHNVVSIEEFHEILKNTHNWKSPGPDGIHNFWLKKFWCIHGRLVETINDVISNPTEMPKFLTTGTTYLLPKDMQHTADPSKYRPITCLPTIYKIITSCIASRIYKHCETNNIMTAQQKGCSKNALGSKELLIIDSIICNQAFKKHRNLFMTYFDYKKAFDSIPHGWLTKILEIYKIDPITINFLKYAMCNWRTNIELSTANITTKDIPIKRGIFQGDSLSPLWFCLALNPLSKQLNATEKGFNVKGNRNNIALNHLLYMDDLKLITGNKNHLQIMVKLVENFSEDVGMKFGLDKCRTISVVRGKIQDEPIALSNGQEIEAMKSDDLYKYLGMEQNRRINHQRMKEDLTTEFIRRINKILKTNLNSKNMTRAINTYACSILTYSFGIIPWTKTDMENLQRKMRTLMTKAHKHHPKSSIERTTLPRNKGGRGLLDIMELAHGQIKCLRTYFKDKSGTSEIYKVLCEADESTPLQLHKEQLSYNHQTIQEKLQRWREKPLHGRHFNEVNQDHVDIEASNYWLTSGAMYPETEGFLLAIQDQVISTKNYCKHIIKDRTITDDRCRYGCPTNETIQHITGGCQMFAGNEYKERHDAVGKILHQEMATKLTLINSEKVPYYKYRPETILENERYKLYWDRTVLTDKTVPHNRPDILLVDKHQKAAILIDVAIPNNNNMRQKEVEKISKYRDLEFQIKRQWGMISTRTIPIIISTTGIVPKNLKRNIKQLGLSEYICNIMQKAVLLGTARTVRKFLGSEGQVQGSRVRGPEVRREPGGPQEPDTTEVCPSDILNIWD

SEQ ID NO: 7496 - protein, 1250 aa, Harmonia axyridis
MMVNLRNRNIEPLPEVRQGVSGAGAGHDSMRDVGDRVLRRRASVDQNATPPQSQHSRRRITRVSPTAEGAVQDPQPALTQAGLPRRRMKWTSSINETIMRIYYEVTNMEEDRIGYRQKLFAEFHRNYPELQVSEQRVADQYRVILRNKLVPDERLNTIKNEVQLRLQNRNPTNNEVTIEENYDCAENQHNINAQINTEEQNSGDLALARDEQWRNIQTATMENREESRRDLLEQLSVTMNRYFIEFEGTDPLKRPILLRLKTSKKLSHILHIMNREIIPPFFSNDQNLESLHLITYCAASTISAVLGVKPKPRSEQPAQKKQHNKPHWQNRLEAKVHSLRQDIGRLTQFEKGSPSRKLQKIVDAIMDRHRRHANYDANNESAQETLDTLKQKLSVYSERLRRYNESYKRKHDNMIFENSEKNFYRMLNEQTSTKLVSPPSAEDMESFWTDQLSTPTPFNSKAHWIRREEKSCETIENMPHSVITSEELQEILKNTHNWKSPGPDGIHNFWLKKFWCLHGRLVEYINNIIHNPTEMPTFLTTGITYLIPKDFQNTMDPSKYRPITCLPTIYKIITSCLASRIYKHCEKNKIITTQQKGCSKNAQGSKEQLVIDSIICNQAFKKHRNLFMTYFDYKKAFDSLPHGWLKKILEIYKIDPIITNFLKLAMDNWKTNIELSTANIKTKLIPIKRGIFQGDSMSPLWFCLALNPLSKQLNATEKGFNIKGNNNTTTLNHLLYMDDLKLITGNKNHLEIMVKLVEHFSKDVGMEFGLDKCRTLSVVRGRIQDEPITLANGQQIEAMKLDDLYKYLGMKQNRRINHQRMKQDSTTEFIRRTKKILKTNLNSRNMTRAINTYACSILTYSFGIVPWSKTDIENLQRKMRTLMTKANKHHPKSSIERTTLPRNKGGRGLTDIMELASGQIESLREYFRDQASTSEFYKILCEADESTPLQLHKEQFSYNHQTNQEKLDRWREKPLHGRHFNEVNQDHVDIEASNYWLTSGATYPETEGFLLAIQDQVISTRNYCRHIIKDRTITDDRCRYGCPTNETIQHITGGCQMFAGNEYKERHDAVGKILHQEMATKLTLIQSEKVPYYKYRPETILENERYKLYWDRTVLTDKTVPHNRPDILLVDKHQKAAILIDVAIPNNNNLRQKEVEKISKYRDLEFQIKRQWGMISTRTIPIIISTTGIVPKNLKRNIKQLGLSEYICNVMQKAVLLGTARTVRKFLGSEGQVQGSRVRGPEVRRQPGGP

SEQ ID NO: 7497 - protein, 1268 aa, Harmonia axyridis
MMVNLRNRNIEPLPEVRQGVSGAGAGHDSMRDVGDRVLRRRASVEQNATPPQSQHSRRRITRVSPTAEGAAQDPQPALTQAGLPRRRMKWTSSINETIMRIYYEVTNMEEDKIGYRQKLFAEFHRNYPELQVSEQRVADQYRVILRNKLVPDERLNTIKNEVQLRLQNRNLTNNETTIEENYDCAENQHNINAQMNSEEQNNADVLAISDAQRRNIYAAPVVNPEEDQRELLERLFATMNRCVIDFEGTDPLRRPILPRLRTSKKLSHLLVMTNKEIIPKYLSDYHDLESLHLIIYCAAFSIATVLGVKPKPKSQQPAREKQQNKPHWQKRLEDKVHSIRQEIGRLTQFAKGSPSRRLQKMVNIIMGRHRQHTTYDPNNENAQQILDTLKQKLSVYSERLRRYNGSYRRKQDNMIFENSERKFYRMLNNNMSATPGSYPTVEDIENFWTDQLATPTPYNSQADWIRNEEKSCETMEQMPHNAVSIEELHEILKNTHNWKSPGPDGIHNFWLKKFWCIHGRLVETINDVISNPTEMPKFLTTGTTYLLPKDMQHTADPSKYRPITCLPTIYKIITSCIASRIYKHCETNNIMTAQQKGCSKNELGSKELLIIDSIICNQAFKKHRNLFMTYFDYKKAFDSIPHGWLTKILEIYKIDPITINFLKYAMCNWKTNIELSTANITTKDIPIKRGIFQGDSLSPLWFCLALNPLSKQLNATEKGFNVKGNRNNIALNHLLYMDDLKLITGNKNHLQIMVKLVENFSEDVGMKFGLDKCRTISVVRGKIQDEPIALSNGQEIEAMKSDDLYKYLGMKQNRRINHQRMKEDFTTEFIRRINKILKTNLNSKNMTRAINIYACSILTYSFGIIPWTKTDMENLQRKMRTLMTKAHKHHPKSSIERTTLPRNKGGRGLLDIMELAHGQIECLRTYFKDKSGTSEIYKVLCEADESTPLQLHKEQLSYNHQTIQEKLQRWREKPLHGRHFNEVNQDHVDIEASNYWLTSGAMYPETEGFLLAIQDQVISTKNYCKHIIKDRTITDDRCRYGCPTNETIQHITGGCQMFAGNEYKERHDAVGKILHQEMATKLTLINSEKVPYYKYRPETILENERYKLYWDRTVLTDKTVPHNRPDILLVDKQQKAAILIDVAIPNNNNMRQKEVEKISKYRDLEFQIKRQWGMISTRTIPIIISTTGIVPKNLKRNIKQLGLSEYICNIMQKAVLLGTARTVRKFLGSEGQVQGSRVRGPEVRREPGGPQGPDTTELSPSDILNIWD

SEQ ID NO: 7498 - protein, 1030 aa, Harmonia axyridis
MNRCVIDFEGTDPLRRPILPRLRTSKKLSHLLVMTNKEIIPKYLSDYHDLESLHLILYCAAFSIATVLGVKPKPKSQQSAREKQQNKPHWQKRLEDKVHSIRQEIGRLTQFAKGSPSRRLQKMVNIIMDRHRQHTTYDPNNENAQQILDTLKQKLSVYSERLKRYNESYRRKQDNMIFENSERKFYRMLNNNMSATPGSYPTVEDIENFWTDQLATPTHYNSQADWIRNEEKSYETMEQMPHNAVSIEEFHEVLKNTHNWKSPGPDGIHNFWLKKFWCIHGRLVETINDVISNPTEMPKFLTTGITYLLPKDMQHTADPSKYRPITCLPTIYKIITSCIASRIYKHCETNKIMTAQQKGCSKNVLGSKELLIIDSIICNQAFKKHRNLFMTYFDYKKAFDSIPHGWLTKILEIYKIDPITINFLKYAMRNWRTNIELSTANITTKDIPIKRGIFQGGSLSPLWLCLALNPLSKQLNATEKGFNVKGNRNNIALNHLLYMDDLKLITGNKNHLQIMVKLVENFSEDVGMKFGLDKCRTISVVRGKIQDEPIALSNGQEIEAMKSDDLYKYLGMKQNRRINHQRMKEDLTTEFIRRINKILKTNLNSKNMTRAINTYACSILTYFFGIIPWTKTGMENLQRKMRTLMTKAHKHHPKISIERTTLPRNKGGRGLLDLMELAHAQIECLRTYFKDKSGTSEIYKVLCEADESTPLQLHKEQLSYNHQTIQEKLQRWREKPLHGRHFNEVNQDHVDIEASNYLLTSGAMYPETEGFLLAIQDQVISTKNYCKHIIKDRTITDDRCRYGCPTNETIQHITGGCQMFSGNEYKERHDAVGKILHQEMATKLTLINSEKVPYYKYRPETILENERYKLYWDRTVLTDKTVPHNRPDILLVDKQQKAAILIDVAIPNNNNMRQKEVEKISKYRDLEFQIKRQWGMISTRTIPIIISTTGILPKNLKRNIKQLEFSENICNIMQKAVLLGTARTVRKFLGSEGQVQGSRVRGPEVRREPGGPQGPDTTELCPSDILNIWD

SEQ ID NO: 7499 - protein, 1268 aa, Harmonia axyridis
MMVNLRNRNIEPLPEVRQGVSGAGAGHDSMRDVGDRVLRRRASVEQNATPPQSQHSRRRITRVSPTAEGAAQDPQPALTQAGLPRRRMKWTSSINETIMRIYYEVTNMEEDKIGYRQKLFAEFHRNYPELQVSEQRVADQYRVILRNKLVPDERLNTIKNEVQLRLQNRNLTNNETTIEENYDCAENQHNINAQMNSEEQNNADVLAISDAQRRNIYAAPVVNPEEDQRELLERLFTTMNRCVIDFEGTDPLRRPILPRLRTSKKLSHLLVMTNKEIIPKYLSDYHDLESLHLIIYCAAFSIATVLGVKPKPKSQQPAREKQQNKPHWQKRLEDKVHSIRQEIGRLTQFAKGSPSRRLQKMVNIIMDRHRQHTTYDPNNENAQQILDTLKQKLSVYSERLRRYNESYRRKQDNMIFENSERKFYRMLNNNMSATPGSYPTVEDIENFWTDQLATPTPYNSQADWIRNEEKSYETMEQMPHNAVSIEEFHEVLKNTHNWKSPGPDGIHNFWLKKFWCIHGRLVETINDVISNPTEMPKFLTTGTTYLLPKDMQHTADPSKYRPITCLPTIYKIITSCIASRIYKHCETNNIMTAQQKGCSKNALGSKELLIIDSIICNQAFKKHRSLFMTYFDYKKAFDSIPHGWLTKILEIYKIDPITINFLKYAMCNWRTNIELSTANITTTDIPIKRGIFQGDSLSPLWFCLAMNPLSKQLNATEKGFNVKGNRNNIALNHLLYMDDLKLITGNKNHLQIMVKLVENFSEDVGMKFGLDKCRTISVVRGKIQDEPIALSNGQEIEAMKSDDLYKYLGMKQNRRINHQRMKEDLTTEFIRRINKILKTNLNSKNMTRAINTYACSILTYSFGIIPWTKTDMENLQRKMRTLMTKAHKHHPKSSIERTTLPRNKGGRGLLDLMELAHAQIECLRTYFKDKSGTSEIYKVLCEADESTPLQLHKEQLSYNHQTIQEKLQRWREKPLHGRHFNEVNQDHVDIEASNYWLTSGAMYPETEGFLLAIQDQVISTKNYCKHIIKDRTITDDRCRYGCPTNETIQHITGGCQMFAGNEYKERHDAVGKILHQEMATKLTQINSEKVPYYKYRPETILENERYKLYWDRTVLTDKTVPHNRPDILLVDKQQKAAILIDVAIPNNNNMRQKEVEKISKYRDLEFQIKRQWGMISTRTIPIIISTTGIVPKNLKRNIKQLGLSEYICNIMQKAVLLGTARTVRKFLGSEGQVQGSRVRGPEVRREPGGPQGPDTTELCPSDILNIWD

SEQ ID NO: 7500 - protein, 1170 aa, Harmonia axyridis
MRIYYKVTNMEEDKIGYRQKLFAEFHRNYPELQVSEQRVADQYRVILRNKLVPDERLNTIKNEVQLRLQNRNLTNNETTIEENYDCAENQHNINAQMNSEEQNNADVLAISDAQRRNIYAAPVVNPEEDQRELLERLFATMNRCVIDFEGTDPLRRPILPRLGTSKKLSHLLVMTNKEIIPKYLSDYHDLESLHLIIYCAAFSIATVLGVKPKPKSQQPAREKQQNKPHWQKRLEDKVHSIRQGIGRLTQFAKGSPSRRLQKMVNIIMDRHRQHTTYDPNNENAQQILDTLKQKLSVYSERLRRYNESYRRKQDNMIFENSERKFYRMLNNNMSATPGSYPTVEDIENFWTDQLATPTPYNSQADWIRNEEKSCETMEQMPHNAVSIEEFHEILKNTHNWKSPGPDGIHNFWLKKFWCIHGRLVETINDVISNPTEMPKFLTTGTTYLLPKDMQHTADPSKYRPITCLPTIYKIITSCIASRIYKHCETNNIMTAQQKGCSKNALGSKELLIIDSIICNQAFKKHRNLFMTYFDYKKAFDSIPHGWLTKILEIYKIDPITINFLKYAMCNWRTNIELSTANITTKDIPIKRGIFQGDSLSPLWFCLALNPLSKQLNATEKGFNVKGNRNNIALNHLLYMDDLKLITGNKNHLQIMVKLVENFSEDVGMKFGLDKCRTISVVRGKIQDEPIALSNGQEIEAMKSDDLYKYLGMKQNRRINHQRMKEDLTTEFIRRINKILKTNLNSKNMTRAINTYACSILTYSFGIIPWTKTDMENLQRKMRTLMTKAHKHHPKSSIERTTLPRNKGGRGLLDIMELAHGQIECLRTYFKDKSGTSEIYKVLCEADESTPLQLHKEQLSYNHQTIQDKLQRWREKPLHGRHFNEVNQDHVDIEASNYWLTSGAMYPETEGFLLAIQDQVISTKNYCKHIIKDRTITDDRCRYGCPTNETIQHITGGCQMFAGNEYKERHDAVGKILHQEMATKLTLINSEKVPYYKYRPETILENERYKLYWDRTVLTDKTVPHNRPDILLVDKQQKAAILIDVAIPNNNNMRQKEVEKISKYRDLEFQIKRQWGMISTRTIPIIISTTGIVPKNLKRNIKQLGLSEYICNIMQKAVLLGTARTVRKFLGSEGQVQGSRVRGPEVRREPGGPQGPDTTELCPSDILNIWD

SEQ ID NO: 7501 - protein, 1267 aa, Harmonia axyridis
MMVNLRNRNIEPLPEVRQGVSGAGAGHDSMRDVGDRVLRRRASVEQNATPPQSQHSRRRITRVSPTAEGAAQDPHPALTQAGLPRRRMEWTSSINETIMRIYYEVTNMEEDKIGYRQKLFAEFHRNYPELQVSKQRVADQYRVILRNKLVPDERLNTIKNEVQLRLQNRDLTNNETTIEENYDCAENQHNINAQMNSEEQNNADVLAISDAQRRNIYAAPVVNPEEDQRELLERLFATMNRCVIDFEGTDPLRRPILPRLRTSKKLSHLLVMTNKEIIPKYLSDYHDLESLHLIIYCAAFSIATVLGVKPKPKSQQPAREKQQNKPHWQKRLEDKVHSIRQEIGRLTQFAKGSPTRRLQKMVNIIMDRHRQHTTYDPNNENAQQILDTLKQKLSVYSERLRRYNESYRRKQDNMIFENSERKFYRMLNNMSATPGSYPTVKDIENFWTDQLATPTPYNSQADWIRNEEKSCETMEQMPHNAVSIKEFHEILKNTHNWKSPGSVGIHNFWLKKFWCIHGRLVETINDVISNPTEMPKFLTTGTTYLLPKDMQHTADPSKYRPITCLPTIYKIITSCKASRIYKHCETNNIMTAQQKGCSKNALGSKELLIIDSIICNQAFKKHRNLFMTYFDYKKAFDSIPHGWLTKILEIYKIDPITINFLKYAMCNWRTNIELSTANITTKDIPIKRGIFQGDSLSPLWFCLELNPLSKQLNATEKGFNVKGNRNNSALNHLLYMDDLKLITGNKNHLQIMIKLVENFSEDVGMKFGLDKCRTISVVREKIQDEPIALSNGQEIEAMKSDDFYKYLGMKQNRRINHQRMKEDLTTEFIRRINKILKTNLNSKNMTRAINTYACSILTYSFGIIPWTKTDMENLQRKMRTLMTKANKHHPKSSIERTTLPRNKGGRGLLDIMELAHGQIECLRTYFKDKSGTSEIYKVLCEADESTPLQLHKEQLSYNHQTIQEKLQRWREKPLHGRHFNEVNQDHVDIEASNYWLTSGAMYPETKGFLLAIQDQVISTKNYCKHIIKDRTITDDRCRYGCPTNETIQHITGGCQMFAGNEYKERHDAVGKILHQEMATKLTIINSEKVPYYKYRPETILENERYKLYWDRTFLTDKTVPHNRPDILLVDKQQKAAILNDVAIPNNNNMRQKEVEKISKYKDLEFQIKRQWGMISTRTIPIIISTTGIVPKNLKRNIKQLGLSEYICNIMQKAVLLGTARTVRKFLGSKGQVQGSRVRGPEVRREPGGPQGPDTTELYPSDILNIWD

SEQ ID NO: 7502 - protein, 1181 aa, Harmonia axyridis
MKWTSSINETIMRIYYEVTNMEEDKIGYRQKLFAEFHRNYPELQVSEQRVADQYRVILRNKLVPDERLNTIKNEVQLRLQNRNPTNNEVTIEENYDCAENQHNINAQINTEEQNSGDLALARDEQWRNIQTATMENREESRRDLLEQLSVTMNRYFIEFEGTDPLKRPILPRLKTSKKLSHILHIMNKEIIPPFFSNDQNLESLHLITYCAASTISAVLGVKPKPRSEQPAQKKQHNKPHWQNRLEAKVHSLRQDIGRLTQFEKGSPSRKLQKIVDAIMDRHRRHANYDANNESAQETLDTLKQKLSVYSERLRRYNESYKRKHDNMIFENSEKNFYRMLNEQTSTKLVSPPSAEDMESFWTDQLSTPTPFNSKAHWIRREEKSCETIENMPHSVITSEELQEILKNTHNWKSPGPDGIHNFWLKKFWCLHGRLVEYINNIIHNPTEMPTFLTTGITYLIPKDFQNTMDPSKYRPITCLPTIYKIITSCLASRIYKHCEKNKIITTQQKGCSKNAQGSKEQLVIDSIICNQAFKKHRNLFMTYFDYKKAFDSLTHGWLKKILEIYKIDPIITNFLKLAMDNWKTNIELSTANIKTKLIPIKRGIFQGDSMSPLWFCLALNPLSKQLNATEKGFNIKGNNNTTTLNHLLYMDDLKLITGNKNHLEIMVKLVEHFSKDVGMEFGLDKCRTLSVVRGRIQDEPITLANGQQIEAMKLDDLYKYLGMKQNRRINHQRMKQDLTTEFIRRTKKILKTNLNSRNMTRAINTYACSILTYSFGIVPWSKTDIENLQRKMRTLMTKANKHHPKSSIERTTLPRNKEGRGLTDIMELASGQIESLREYFRDQASTSEFYKILCEADESTPLQLHKEQFSYNHQTNQEKLDRWREKPLHGRHFNEVNQDHVDIEASNYWLTSGAMYPETEGFLLAIQDQVISTRNYCRHIIKDRTITDDRCRYGCPTNETIQHITGGCQMFAGNEYKERHDAVGKILHQEMATKLTLIQSEKVPYYKYRPETILENERYKLYWDRTVLTDKTVPHNRPDILLVDKHQKAAILIDVAIPNNNNLRQKEVEKISKYRDLEFQIKRQWGMTSTRTIPIIISTTGIVPKNLKRNIKQLGLSEYICNVMQKAVLLGTARTVRKFLGSEGQVQGSRVRGPEVQRQPGGPQGPDTTELYPSDILNIWD

SEQ ID NO: 7503 - protein, 1193 aa, Harmonia axyridis
MMVNLRNRNIEPLPEVRQGVSGAGAGHDSMRDVGDRVLRRRASVEQNATPPQSQHSRRRITRVSPTAEGAAQDPQPALTQAGLPRRRMKWTSSINETIMRIYYEVTNMEEDKIGYRQKLFAEFHRNYPELQVSEQRVADQYRVILRNKLVPDERLNTIKNEVQLRLQNRNLTNNETTIEENYDCAENQHNINAQMNSEEQNNADVLAISDAQRRNIYAAPVVNPEEDQRELLERLFATMNRCVIDFEGTDPLRRPILPRLRTSKKLSHLLVMTNKEIIPKYLSDYHDLESLHLIIYCAAFSIATVLGVKPKPKSQQPAREKQQNKPHWQKRLEDKVHSIRQEIGRLTQFAKGSPSRRLQKMVNIIMDRHRQHTTYDPNNENAQQILDTLKQKLSVYSERLRRYNESYRRKQDNMIFENSERKFYRMLNNNMSATPGSYPTVEDIENFWTDQLATPTPYNSQADWIRNEEKSYETMEQMPHNAVSIEEFHEVLKNTHNWKSPGPDGIHNFWLKNFWCIHGRLVETINDVISNPTEMPKFLTTGTTYLLPKDMQHTADPSKYRPITCLPTIYKIITSCIASRIYKHCETNNIMTAQQKGCSKNALGSKELLIIDSIICNQAFKKHRNLFMTYFDYKKAFDSIPHGWLTKILEIYKIDPITINFLKYAMCNWRTNIDLSTANITTKDIPIKRGIFQGDSLSPLWFCLALNPLSKQLNATEKGFNVKGNRNNIALNHLLYMDDLKLITGNKNHLQIMVKLVENFSEDVGMKFGLDKCRTISVVRGKIQDEPIALSNGQEIEAMKSDDLYKYLGMKQNRRINHQRMKEDLTTEFIRRINKILKTNLNSKNMTRAINTYACSILTYSFGIIPWTKTDMENLQRKMRTLMTKAHKHHPKSSIERTTLPRNKGGRGLLDLMELAHAQIECLRTYFKDKSGTSEIYKVLCEADESTPLQLHKEQLSYNHQTIQEKLQRWREKPLHGRHFNEVNQDHVDIEASNYWLTSGAMYPETEGFLLAIQDQVISTKNYCKHIIKDRTITDDRCRYGCPTNETIQHITGGCPMFAGNEYKERHDAVGKILHQEMATKLTLINSEKVPYYKYRPETILENERYKLYWDRTVLTDKTVPHNRPDILLVDKQQKAAILIDVAIPNNNNMRQKEVEKISKYRDLEFQIKRQWGMISITITITITSFISSKVEM

SEQ ID NO: 7504 - protein, 1162 aa, Harmonia axyridis
MMVNLRNRNIEPLPEVRQGVSGAGAGHDSMRDVGDRVLRRRASVDQNATPPQSQHSRRRITRVSPTAEGAVQDPQPALTQAGLPRRRMKWTSSINETIMRIYYEVTNMEEDKIGYRQKLFGEFHRNYPELQVSEQRVADQYRVILRNKLVPDERLNTIKNEVQLRLQKRNPTNNEVTIEENYDCAENQHNINAQINTEEQNSGDLALARDEQWRNIQTATMENREESRRDLLEQLSVTMNRYFIEFEGTDPLKRPILPRLKTSKKLSHILHIMNKEIIPPFFSNDQNLESLHLITYCAASTISAVLGVKPKPRSEQPAQKKQHNKPHWQNRLEAKVHSLRQDIGRLTQFEKGSPSRKLQKIVDAIMDRHRRHANYDANNESAQETLDTLKQKLSVYSERLRRYNESYKRKHGNMIFENSEKNFYRMLNEQTSTKLVSPPSAEDMESFWTDQLSTPTPFNSKAHWIRREEKSCETIENMPHSVITSEELQEILKNTHNWKSPGPDGIHNFWLKKFWCLHGRLVEYINNIIHNPTEMPTFLTTGITYLIPKDFQNTMDPSKYRPITCLPTIYKIITSCLASRIYKHCEKNKIITTQQKGCSKNAQGSKEQLVIDSIICNQAFKKHRNLFMTYFDYKKAFDSLPHGWLKKILEIYKIDPIITNFLKLAMDNWKTNIELSTANIKTKLIPIKRGIFQGDSMSPLWFCLALNPLSKQLNATEKGFNIKGNNNTTTLNHLLYMDDLKLITGNKNHLEIMVKLVEHFSKDVGMEFGLDKCRTLSVVRGRIQDEPITLANGQQIEAMKLDDLYKYLGMKQNRRINHQRMKQDLTTEFIRRTKKIFKTNLNSRNMTRAINTYACSILTYSFGIVPWSKTDIENLQRKMRTLMTKANKHHPKSSIERTTLPRNKGGRGLTDIVELASGQIESLREYFRDQASTSEFYKILCEADESTPLQLHKEQFSYNHQTNQEKLDRLREKPLHGRHFNEVNQDHVDIEASNYWLTSGAMYPETEGFLLAIQDQVISTRNYCRHIIKDRTITDDRCRYGCPTNETIQHITGGCQMFAGNEYKERHDAVGKILHQEMATKLTLIQSEKVPYYKYRPETILENERYKLYWDRTVLTDKTVPHNRPDILLVDKHQKAAILIDVAIPNNNNLRQKEVEKISKYR

SEQ ID NO: 7505 - protein, 1181 aa, Harmonia axyridis
MKWTSSINETIMRIYYEVTNMEEDKIGYRQKLFAEFHRNYPELQVSEQRVADQYRVILRNKLVPDERLNTIKNEVQLRLQNRNLTNNETTIEENYDCAENQHNINAQMNSEEQNNADVLAISDAQRRNIYAAPVVNPEEDQRELLERLFATMNRCVIDFEGTDPLRRPILPRLRTSKKLSHLLVMTNREIIPKYLSDYHDLESLHLIIYCAAFSIATVLGVKPKPKSQQPAREKQQNKPHWQKRLEDKVHSIRQEIGRLTQFAKGSPSRRLQKKVNIIMDRHRQHTTYDPNNENAQQILDTLKQKLSVYSERLRRYNECYRRKQDNMIFGNSERKFYRMLNNNMSATPGSYPTVEDIENFWTDQLATPTPYNSQADWIRNEEKSCETIEHMPHNVVSIEEFHEILKNTHNWKSPGPDGIHNFWLKKFWCIHGRLVETINDVISNPTEMPKFLTTGTTYLLPKDMQHTADPSKYRPITCLPTIYKIITSCIASRIYKHCETNNIMTAQQKGCSKNALGSKELLIIDSIICNQAFKKHRNLFMTYFDYKKAFDSIPHGWLTKILEIYKIDPITINFLKYAMCNWRTNIELSTANITTKDIPIKRGIFQGDSSCPLWFCLALNPLSKQLNATEKGFNVKGNRNNIALNHLLYMDDLKLITGNKNHLQIMVKLVENFSEDVGMKFGLDKCRTISVVRGKIQDEPIALSNGQEIEAMKSDDLYKYLGMKQNRRINHQRMKEDLTTEFIRRINKILKTNLNSKNMTRAINTYACSILTYSFGIIPWTKTDMENLQRKMRTLMTKAHKHHPKSSIERTTLPRNKGGRGLLDIMELAHGQIECLRTYFKDKSGTSEIYKVLCEADESTPLQLHKEQLSYNHQTIQEKLQRWREKPLHGRHFNEVNQDHVDIEASNYWLTSGAMYPETEGFLLAIQDQVISTKNYCKHIIKDRTITDDRCRYGCPTNETIQHITGGCQMFAGNEYKERHDAVGKILHQEMATKLTLTNSEKVPYYKYRPETILENERYKLYWDRTVLTDKTVPHNRPDILLVDKHQKAAILIDVAIPNNNNMRQKEVEKISKYRDLEFQIKRQWGMISTRTIPIIISTTGIVPKNLKRNIKQLGLSEYICNIMQKAVLLGTARTVRKFLGSEEQVQGSRVRGPEVRREPGGPQGPDTTELCPSDILNIWD

SEQ ID NO: 7506 - protein, 1268 aa, Harmonia axyridis
MMVNLRNRNIEPLPEVRQGVSGAGAGHDSMRDVGDRVLRRRASVEQNATPPQSQHSRRRITRVSPTAEGAAQDPQPALTQAGLPRRRMKWTSSINETIMRIYYEVTNMEEDKIGYRQKLFAEFQRNYPELQVSEQRVADQYRVILRNKLVPDERLNTIKNEVQLRLHNRDLTNNERTIEENYDCAENQQNINAQMNTEEQNNADVIAISDAQRRNIYAAPVENPEKDQRELLERLSATMNRCVIDFEGTDPLRRPILPRLRTSKKLSHLLVMTNKEIIPKYLSDYHDLESLHLIIYCAAFSIATVLGVKPKPKSQQPAREKQQNKPHWQKRLENKVHSIRQDIGRLTQFAKGSPSRKLQKMVNIIMDRHRQHTTYDPNNENAQQILDTLKQKLSVYSERLRRYNESYRRKQDNMIFENSERKFYRMLNNNMSATPGSYPIVEDIENFWTDQLASPTPYNSQADWIRSEEKSCETIEHMPHNAVSIEEFHEILKNAHNWKSPGPDGIHNFWLKKFWCIHGRLVETINEVMRNPTEMPKFLTTGTTYLLPKDLQHTADPSKYRPITCLPTIYKIITSCIASRIYKHCETNNIMTAQQKGCSKNALGSKELLIIDSIICNQAFKKHRNLFMTYFDYKKAFDSIPRGWLTKILEIYKIDPITINFLKYAMCNWRTNIELSTANITTKEIPIKRGIFQGDSLSPLWFCLALNPLSKQLNATEKGFNVKGNRNTIALNHLLYMDDLKLITGNKNHLQIMVKLVENFSKDVGMKFGLDKCRTISVVRGKIQDEPIALSNGQEIEAMKSDDFYKYLGMKQNRRINHQRMKEDLTTEFIRRINKILKTNLNSKNMTRAINTYACSILTYSFGIIPWSKTDMENLQRKMRTLMTKAHKHHPKSSIERTTLPRNKGGRGLLDIMELAHGQIECLRTYFKDKSGTSEIYKVLCEADESTPLQLHKEQLSYNHQTIQEKMQRWREKPLHGRHFNEVNQDHVDIEASNYWLTSGAMYPETEGFLLAIQDQVISTRNYCKHIIKDRTITDDRCRYGCPTNETIQHITGGCQMFAGNEYKERHDAVGKILHQEMATKLTLIHSEKVPYYKYRPETILENERYKLYWDRTVLTDKTVPHNRPDILLVDKHQKAAILIDVAIPNNNNMRQKEVEKISKYRDLEFQIKRQWGMISTRTIPIIISTTGIVPKNLKRNIKQLGLSEYICNIMQKAVLLGTARTVRKFLGSEGQVQGSRVRGPEVRREPGGPQRPDTTELCPSDILNIWD

SEQ ID NO: 7507 - protein, 1268 aa, Harmonia axyridis
MMVNLRNRNIEPLPEVRQGVSGAGAGHDSMRDVGDRVLRRRASVDQNATPPQSQHSRRRITRVSPTAEGAVQDPQPALTQAGLPRRRMKWTSSINETIMRIYYEVTNMEEDKIGYRQKLFAEFHRNYPELQVSEQRVADQYRVILRNKLVPDERLNTIKNEVQLRLQNRNPTNNEVTIEENYDCAENQHNINAQINTEEQNSGDLALARDEQWRNIQTVTMENREESRRDLLEQLSVTMNRYFIEFEGTDPLKRPILPRLKTSKKLSHILHIMNKEIIPPFFSNDQNLESLHLITYCAASTISAVLGVKPKPRSEQPAQKKQHNKPHWQNRLEAKVHSLRQDIGRLTQFEKGSPSRKLQKIVDAIMDRHRRHANYDANNESAQETLDTLKQKLSVYSERLRRYNESYKRKHDNMIFENSEKNFYRMLNEQTSTKLVSPPSAEDMESFWTDQLSTPTPFNSKAHLIRREEKSCETIENMPHSVITSEELQEILKNTHNWKSPGPDGIHNFWLKKFWCLHGRLVEYINNIIHNPTEMPTFLTTGITYLIPKDFQNTMDPSKYRPITCLPTIYKIITSCLASRIYKHCEKNKIITTQQKGCSKNAQGSKEQLVIDSIICNQAFKKHRNLFMTYFDYKKAFDSLPHGWLKKILDIYKIDPIITNFLKLAMDNWKTNIELSTANIKTKLIPIKRGIFQGDSMSPLWFCLALNPLSKQLNATEKGFNIKGNNNTTTLNHLLYMDDLKLITGNKNHLEIMVKLVEHFSKDVGMEFGLDKCRTLSVVRGRIQDEPITLANGQQIEAMKLDDLYKYLGMKQNRRINHQRMKQDLTTEFIRRTKKILKTNLNSRNMTRVINTYACSILTYSFGIVPWSKTDIENLQRKMRSLMTKANKHHPKSSIERTTLPRNKGGRGLTDIMELASGQIESLREYFRDQASTSEFYKILCEADESTPLQLHKEQFSYNHQTNQEKLDRWREKPLHGRHFNEVNQDHVDIEASNYWLTSGAMYPETEGFLLAIQDQVISTRNYCRHIIKDRTITDDRCRYGCPTNETIQHITGGCQMFAGNEYKERHDAVGKILHQEMATKLTLIQSEKVPYYKYRPETILENERYKLYWDRTVLTDKTVPHNRPDILLVDKHQKAAILIDVAIPNNNNLRQKEVEKISKYRDLEFQIKRQWGMISTRTIPIIISTTGIVPKNLKRNIKQLGLSEYICNVMQKAVLLGTTRTVRKFLGSEGQVQGSRVRGPEVRRQPGGPQGPDTTELYPSDILNIWD

SEQ ID NO: 7508 - protein, 1268 aa, Harmonia axyridis
MMVNLRNRNIEPLPEVRQGVSGAGAGHDSMRDVGDRVLRRRASVDQNATPPQSQHSRRRITRVSPTAEGAVQDPQPALTQAGLPRRRMKWTSSINETIMRIYYEVTNMEEDKIGYRQKLFAEFHRNYPELQVSEQRVADQYRVILRNKLVPDERLNTIKNEVQLRLQNRNPTNNEVTIEENYDCAENQHNINAQINTEEQNSGDLALARDEQWRNIQTATMENREESRRDLLEQLSVTMNRYFIEFEGTDPLKRPILPRLKTSKKLSHILHIMNKEIIPPFFSNDQNLESLHLITYCAASTISAVLGVKPKPRSEQPAQKKQHNKPHWQNRLEAKVHCLRQDIGRLTQFEKGSPSRKLQKIVDAIMDRHRRHANYDANNESAQETLDTLKQELSVYSERLRRYNESYKRKHDNMIFENSEKNFYRMLNEQTSTKLVSPPSAEDMESFWTDQLSTPTPFNSKAHWIRREEKSCETIENMPHSVITSEELQEILKNTHNWKSPGPDGIHNFWLKKFWCLHGRLVEYINNIIHNPTEMPTFLTTGITYLIPKDFQNTMDPSKYRPITCLPTIYKIITSCLASRIYKHCEKNKIITTQQKGCSKNAQGSKEQLVIDSIICNQAFKKHRNLFMTYFDYKKAFDSLPHGWLKKILEIYKIDPIITNFLKLAMDNWKTNIELSTANIKTKLIPIKRGIFQGDSMSPLWFCLALNPLSKQLNATEKGFNIKGNNNTTTINHLLYMDDLKLIAGNKNHLEIMVKLVEHFSKDVGMEFGLDKCRTLSVVRGRIQDEPITLANGQQIEAMKLDDLYKYLGMKQNRRINHQRMKQDLTTEFIRRTKKILKTNLNSRNMTRAINTYACSILTYSFAIVPWSKTDIENLQRKMRTLMTKANKHHPKSSIERTTLPRNKGGRGLTDIMELASGQIESLREYFRDQASTSEFYKILCEADESTPLQLHKEQFSYNHQTNQEKLDRWREKPLHGRHFNEVNQDHVDIEASNYWLTSGAMYPETEGFLLAIQDQVISTRNYCRHIIKDRTITDDRCRYGCPTNETIQHITGGCQMFAGNEYKERHDAVGKILHQEMATKLTLIQSEKVPYYKYRPETILENERYKLYWDRTVLTDKTVPHNRPDILLVDKHQKAAILIDIAIPNNKNLLQKEVEKISKYRDLEFQIKRQWGMISTRTIPIIISTTGIVPKNLKRNIKQLGLSEYICNVMQKAVLLGTARTVRKFLGSEGQVQGSRVRGPEVRRQPGGPQGPDTTELYPSDILNIWD

SEQ ID NO: 7509 - protein, 1239 aa, Harmonia axyridis
MRDVGDRVLRRRASVEQNATPPQSQHSRRRITRVSPTAEGAAQDPQPALTQAGLPRRRMKWTSSINETIMRIYYEVTNMAEDKIGYRQKLFAEFHRNYPELQVSEQRVADQYRVILRNKLVPDERLNTIKNEVQLRLQNRNLTNNETTIEENYDCAENQHNINAQMNSEEQNNADVLAISDAQRRNIYAAPVVNPEEDQRELLERLFATMNRCVIDFEGTDPLRRPILPRLRTSKKLSHLLVMTNKEIIPKYLSDYHDLESLHLIIYCAAFSIATVLGVKPKSKSQQPAREKQQNKPHWQKRLEDKVHSIRQEIGRLTQFAKGSPSRRLQKMVNIIMDRHRQHTTYDPNNENAQQILDTLKQKLSVYSERLRRYNESYRRKQDNMIFENSERKFYRMLNNNMSATPGSYPTVEDIENFWTDQLATPSPYNSQADWIRNEEKSCETMEQMPHNAVSIEEFHEILKNTHNWKSPGPDGIHNFWLKKFWCIHGGLVETINDVISNPKEMPKFLTTGTTYLLPKDVQHTADPSKYRPITCLPTIYKIVTSCIASRIYKHCETNNIMTAQQKGCSKNALGSKELLIIDSIICNQAFKKHRNLFMTYFDYKKAFDSIPHGWLTKILEIYKIDPITINFLKYAMCNWRTNIELSTANITTKDIPIKRGIFQGDSLSPLWFCLALNPLSKQLNATEKGFNVKGNRNNIALNHLLYMDDLKLITGNKNHLQIMVKLVENFSEDVGMKFGLDKCRTNSVVRGKIQDEPIALSNGQEIEAMKSDDLYKYLGMKQNRRINHQRMKEDLTIEFIRRINKILKTNLNSKNMTRAINTYACSILTYSFGIIPWTKTDMENLQRKMRTLMTKAHKHHPKSSIERTTLPRNKGGRGLLDIMELAHGQIECLRTYFKDKSGTSEIYKVLCEADESTPLQLHKEQLSYNHQTIQEKLQRWREKPLHGRHFNEVNQDHVDIEASNYWLTSGAMYPETEGFLLAIQDQVISTKNYCKHIIKDRTITDDRCRYGCPTNETIQHITGGCQMFAGNEYKERHDAVGKILHQEMATKLTLINSEKVPYYKYRPETILENERYKLYWDRTVLTDKTVPHNRPDILLVDKQQKAAILIDVAIPNNNNMRQKEVEKISKYRDLEFQIKRQWGMISTRTIPIIISTTGIVPKNLKRNIKQLGLSEYICNKMQKAVLLGTARTVRKFLGSEGQVQGSRVRGPEVRREPGGPQGPDTTELSPSDILNIWD

SEQ ID NO: 7510 - protein, 1268 aa, Harmonia axyridis
MMVNLRNRNIEPLPEVRQGVSGAGAGHDSMRDVGDRVLRRRASVEQNSTPPQSQHSRRRITRVSPTAEGAAQDPQPALTQAGLPRRRMKWTSSINETIMRIYYEVTNMEEDKIGYRQKLFAEFHRNYPELQVSEQRVADQYRVILRNKLIPDERLNTIKNEVQLRLQNRDLSNNETTIEENYDCAENQQNINAQMNTEEQNNADVIAISDAQRRNIYAAPVENPEEDQRELLERLSATMNRCVLDFEGTDPLRRPILPRLRTSKKLTHLLVMTNKEIIPKYLSDYHDLESLHLIIYCAAFSIATVLGVKPKPKSQQPAREKQQNKPHWQKRLENKVHSIRQDIGRLTQFAKGSPSRKLQKMVNIIMDHHRQHTTYDPNNENAQQILDTLKQKLSVYSERLRRYNESYRRKQDNMIFENSERKFYRMLNNNMSATPGSYPTVEDIENFWTDQLASPTPYNSQADWIRSEEESCETIEHMPHNAVSIEEFHEILKNAHNWKSPGPDGIHNFWLKKFWCIHGRLVETINEVMRNPTEMPKFLTTGTTYLLPKDLQHTADPSKYRPITCLPTIYKIITSCIASRIYKHCETNNIMTAQQKGCSKKALGSKELLIIDSIICNQAFKKHRNLFMTYFDYKKAFDSIPHGWLTKILEIYKIDPITINFLKYAMCNWRTNIELSTANITTKEIPIKRGIFQGDSLSPLWFCLALNPLSKQLNATEKGFNVKGNRNTIALNHLLYMDDLKLITGNKNHLQIMVKLVENFSKDVGMKFGLDKCRTISVVRGKIQDEPIALSNGQEIEAMKSDDLYKYLGMKQNRRINHQRMKEDLTTEFIRRINKILKTNLNSKNMTRAINTYACSILTYSFGIIPWTKTDMENLQRKMRTSMTKAHKHHPKSSIERTTLPRNKGGRGLLDIMELAHGQIECLRTYFKDKLGTSEIYKVLCEADESTPLQLHKEQLSYNHQTIQEKMQRWREKPLHGRHFNEVNQDHVDIEASNYWLTSGAMYPETEGFLLAIQDQVISTRNYCKHIIKDRTITDDRCRYGCPTNETIQHITGGCQMFAGNEYKERHDAVGKILHQEMATKLTLIHSEKVPYYKYRPETILENERYKLYWDRTVLTDKTVPHNRPDILLVDKHQKAAILIDVAIPNNNNMRQKEVEKISKYRDLEFQIKRQWGMISTRTIPIIISTTGIVPKNLKRNIKQLGLSEYIYNIMQKAVLLGTARTVRKFLGSEGQVQGSRVRGPEVRREPGGPQGPDTTELCPSDILNIWD

SEQ ID NO: 7511 - protein, 1268 aa, Harmonia axyridis
MMVNLRNRNIEPLPEVRQGVSGAGAGHDSMRDVGDRVLRRRASVEQNATPPQSQHSRRRITRVSPTAEGAAQDPQPALTQAGLPRRRMKWTSSINETIMRIYYEVTNMEEDKIGYRQKLFAEFHRNYPELQVSEQRVADQYRVILRNKLVPDERLNTMKNEVQLRLQNRNLTNNETTIEENYDCAENQHNVNAQMNSEEQNNADVLAISDAQRRNIYAAPVVNPEEGQRELLERLFATMNRCVIDFEGTDPLRRPLLPRLRTSKKLSHLLVMTNKEIIPKYLSDYHDLESLHLIIYCAAFSIATVLGVKPKPKSQQPAREKQQNKPHWQKRLEDKVHSIRQEIGRLTQFAKGSPSRRLQKMVNIIMDRHRQHTTYDPNNENAQQILDTLKQKLSVYSERLRRYNESYRRKQDNMIFENSERKFYRMLNNNMSATPGSYPTVEDIEKFWTDQLATPTPYNSQADWIRNEEKSCETMEQMPHNAVSIEEFNEILKNTHNWKSPGPDGIHNFWLKKFWCIHGRLVETINDVISNPTEIPKFLTTGTTYLLPKDMQHSADPSKYRPITCLPTIYKIVTSCIASRIYKHCETNNIMTAQQKGCSKNALGSKELLIIDSIICNQAFKKHRNLFMTYFDYKKAFDSIPHGWLTKILEIYKIDPITINFLKYAMCNWRTNIELSTANIITKDIPIKRGIFQGDSLSPLWFCLALNPLSKQLNATEKGFNVKGNRNNIALNHLLYMDDLKLITGNKNHLQIMVKLVENFSEDVGMKFGLDKCRTISVVRGKIQDEPIALSNGQEIEAMKSDDLYKYLGMKQNRRINHQRMKEDLTTEFIRRINKILKTNLNSKNMTRAINTYACSILTYSFGIIPWTKTDMENLQRKMRTLMTKAHKHHPKSSIERTTLPRNKGGRGLLDIMELAHGQIECLRTYFKDKSGTSEIYKVLCEADESTPLQLHKEQLSYNHQTIQEKLQRWREKPLHGRHFNEVNQDHVDIEASNYWLTSGAMYPETEGFLLAIQDQVISTKNYCKHIIKDRTITDDRCRYGCPTNETIQHITGGCQMFAGNEYKERHDAVGKILHQEMATKLTLINSEKVPYYKYRPETILENERYKLYWDRTVLTDKTVPHNRPDILLVDKHQKAAILIDVAIPNNNNMRQKEVEKISKYRDLEFQIKRQWGMISTRTIPIIISTTGIVPKNLKRNIKQLGLSEYICNIMQKAVLLGTARTVRKFLGSEGQVQGSRVRGPEVRREPGGPQGPDTTELCPSDILNIWD

SEQ ID NO: 7512 - protein, 1268 aa, Harmonia axyridis
MMVNLRNRNIEPLPEVRQGVSGAGAGHDSMRDVGDRVLRRRASVEQNATPPQSQHSRRRITRVSPTAEGAAQDPQPALTPAGLPRRRMKWTSSINETIMRIYYEVTNMEEDKIGYRQKLFAEFHRNYPELQVSEQRVADQYRVILRNKLVPDERLNTIKNEVQLRLQNRNLTNNETTIEENYDCAENQHNINAQMNSEEQNNADVLAISDAQRRNIYAAPVVNPEEDQRELLERLFATMNRCVIEFEGTDPLRRPILPRLRTSKKLSHLLVMTNKEIIPKYLSDYHDLESLHLIIYCAAFSIATVLGVKPKPKSQQPAREKQQNKPHWQKRLEDKVHSIRQEIGRLTQFAKGSPSRRLQKMVNIIMDRHRQHTTYDPNNENAQQILDTLKQKLSVYSERLRRYNESYRRKQDNMIFENSERKFYRMLNNNMSATPGSYPTVEDIENFWTDQLATPTPYNSQADWIRNEEKSCETMEQMPHNAVSIEEFHEILKNTHNWKSPGPDGIHNFWLKKFWCIHGRLVETINDVISNPTEMPKFLTTGTTYLLPKDMQHTADPSKYRPITCLPTIYKIITSCIASRIYKHCETNNIMTAQQKGCSKNALGSKELLIIDSIICNQAFKKHRNLFMTYFDYKKAFDSIPHGWLTKILEIYKIDPITINFLKYAMCNWRTNIELSTANITTKEIPIKRGIFQGDSLSPLWFCLALNPLSKQLNATEKGFNVKGNRNNIALNHLLYMDDLKLITGNKNHLQIMVKLVENFSEDVGMKFGLDKCRTISVVRGKIQDEPIALSNGQEIEAMKSDDLYKYLGMKQNRRINHQIMKEDLTTEFIRRINKILKTNLNSKNMTRAINTYACSILTYSFGIIPWTKTDMENLQRKMRTLMTKAHKHHPKSSIERTTLPRNKGGRGLLDIMELAHGQIECLRTYFKDKSGTSEIYKVLCEADESTPLQLHKEQLSYNHQTIQEKLQRWREKPLHGRHFNEVNQDHVDIEASNYWLTSGAMYPETEGFLLAIQDQVISTKNYCKHIIKDRTITDDRCRYGCPTNETIQHITGGCQMFAGNEYKERHDAVGKILHQEMATKLTLINSEKVPYYKYRPETILENERYKLYWDRTVLTDKTVPHNRPDILLVDKQQKAAILIDVAIPNNNNMRQKEVEKISKYRDLEFQIKRQWGMISTRTIPIIISTTGIVPKNLKRNIKQLGLSEYICNIMQKAVLLGTARTVRKFLGSEGQVQGSRVRGPEVRREPGGPQGPDTTELSPSDILNIWD

SEQ ID NO: 7513 - protein, 1266 aa, Harmonia axyridis
MMVNLRNRNIEPLPEVRQGVSGAGAGHDSMRDVGDRVLRRRASVEQNATPPQSQHSRRRITRVSPTAEGAAQDPQPALTQAGLPRRRMKWTSSINETIMRIYYEVTNMEEDKIGYRQKLFAEFHRNYPELQVSEQRVADQYRVILRNKLVPDERLNTIKNEVQLRLQNRNLTNNETTIEENYDCAENQHNINAQMNSEEQNNADVLAISDAQRRNIYAAPVVNPEEDQRELLERLFATMNRCVIDFEGTDPLRRPILPRLRTSKKLSHLLVMTNKEIIPKYLSDYHDLESLHLIIYCAAFSIATVLGVKPKPKSQQPAREKQQNKPHWQKRLEDKVHSIRQEIGRLTQFSKGSPSRRLQKMVNIIMDRHRQHTTYDPNNENAQQILDTLKQKLSVYSERLRRYNESYRRKQDNMIFENSERKFYRMLNNNMSATPGSYPTVEDIENFWTDQLATPTPYNSQADWIRNEEKSCETMEQMPHNAVSIEEFHEILKNTHNWKSPGPDGIHNFWLKKFWCIHGRLVETINDVISNPTEMPKFLTTGTTYLLPKDMQHTADPSKYRPITCLPTIYKIVTSCIASRIYKHCGTNNIMTAQQKGCSKNSLGSKELLIIDSIICNQAFKKHRNLLMTYFDYKKAFDSIPHGWLTKILEIYKIDPITINFLKYAMCNWRTNIELFTANITTKDIPIKRGIFQGDSLSPLWFCLALNPLSKQLNATEKGFNVKGNRNNIALNHLLYMDDLKLITGNKNHLQIMVKLVENFSEDVGMKFGLDKCRTISVVRGKIQDEPIALSNGQEIEAMKSDDLYKYLGMKQNRRINHQRMKEDLTTEFIRRINKILKTNLNSKNMTRAINTYACSILTYSFGIIPWTKTDMENLQRKMRTLMTKDKHHPKSSIERTTLPRNKGGRGLLDIMELAHGQIECLRTYFKDKSGTSEIYKVLCEADESTPLQLHKEQLSYNHQTIQEKLQRWREKPLHGRHFNEVNQDHVDIEASNYWLTSGAMYPETEGFLLAIQDQVISTKNYCKHIIKDRTITDDRCRYGCPTNETIQHITGGCQMFAGNEYKERHDAVGKILHQEMATKLTLINSEKVPYYKYRPETILENERYKLYWDRTVLTDKTVPHNRPDILLVDKQQKAAILIDVAIPNNNMRQKEVEKISKYRDLEFQIRRQWGMISTRTIPIIISTTGIVPKNLKRNIKQLGLSEYICNIMQKAVLLGTARTVRKFLGSEGQVQGSRVRGPEVRREPGGPQGPDTTELCPSDILNIWD

SEQ ID NO: 7514 - protein, 1053 aa, Harmonia axyridis
MNFNLRPRNRIDSGRSADRATPVTQAQINQGPTSGPSTTTGRTSGHTHLPPEIPSSLEFECRAPQCSRVFQTATGRGVHERRSHTEWYDQHHLEHHQHRKERWNDEELGLLAHSEARLLLEGVRFINQELVKTSSRTLEAIKGVRRRPEYKKKVQELLKDMRDELERGEDNNRNEEHGAQPQGNEQDELFTYLIESDPLDGEDFNARWLNNICSMVHSSPKSRVGLELAAYIRETFPPEKELKVSGKGPERSRNQNAKQKRREEFARVQDLWRRNPGECARRIMEDRLHQEKSLEKDRMVSYWQTIMTRNKTMSPKLPHPEITLDQLWAPITADEVRKALPRRKTATGPDAVSAETVWKVPRDILARIFNIIMWLGKLPDALCRSRTVLLPKKKGAQDPGSFRPISMPSVIVRTFHKALANRMKSIQLDSRQRAFRDTEGCAENVVLLDMAIRYHHRKHRKMFMAVLDMAKAFDSVSFPALFSSIKAKGIPEPMIEYIQNIYREGTTILQHGGWQSDPIHPTCGVRQGDPLSPVMFNMVIDGLLGSMKSGIGVDIDGIKLNILAFADDIVLLASTKEGLQSLIDRVADFLGRCGLEANAEKCATLAIQGVPKQKKTTINPSCTFKINKAVIPALGRSSEWTYLGVRFNVDGVRCSSESTDIQEKLEKLSKAPLKPQQRLWATRSIVIPSVMYHLVHGHIQFGHLRKLDRTIRKNIRGWLHLPKDCPNAYFHANIKDGGLGVPSLRWWAPLQRLKTLNRLRKNQYLVDNDAISYLNIEATDTEKRLKQNDNSILRTAKELDRMWSEKLYSSVDGGPLCRSAEVRGQHGWVGAPTRFLSGRDFVNCVKTRINALPSLSRTSRGRTYDRSCRAGCGVPETNNHILQVCHKTNGIRIKRHNAISNYIARNLSNQGYRIENEPTFTTSEGVRKPDVIATLGDTSFIVDTQIVGEQTDLEHINRNKINYYKNNPTLINEIKNKYGSGTVLTYAATLNWRGVWAKTSAEDLLERGIIRRKDLPVMSSRVLIGSIAAWNIFNKSTSTKRSRNEGRPRQGVG

SEQ ID NO: 7515 - protein, 1053 aa, Harmonia axyridis
MNFNLRPRNRIDSGRSADRATPVTQAQINQGPTSGPSTTTGRTSGHTRLPPEIPSSLEFECRAPQCSRVFQTATGRGVHERRSHTEWYDQHHLEHHQHRKERWNDEELGLLAHSEARLLLEGVRFINQELVKTSSRTLEAIKGVRRRPEYKKKVQELLKDMRDELERGEDNNRNEEHGAQPQGNEQDELFTYLIESDPLDGEDFNARWLNNICSMVHSSPKSRVGLELAAYIRETFPPEKELKVSGKGPERSRNQNAKQKRREEFARVQDLWRRNPGECARRIMEDRLHQEKSLEKDRMVSYWQTIMTRNKTMSPKLPHPEVTLDQLWAPITADEVRKALPRRRTATGPDAVSAETVWKVPRDILARIFNIIMWLGKLPDALCRSRTVLLPKKKGAQDPGSFRPISMPSVIVRTFHKALANRMKSIQLDSRQRAFRDTEGCAENVVLLDMAIRYHHRKHRKMFMAVLDMAKAFDSVSFPALFSSIKAKGIPEPMIEYIQNIYREGTTILQHGGWQSDPIHPTCGVRQGDPLSPVMFNMVIDGLLGSMKSGIGVDIDGIKLNILAFADDIVLLASTKEGLQSLIDRVADFLGRCGLEANAEKCATLAIQGVPKQKKTTINPSCTFKINKAVIPALGRSSEWTYLGVRFNVDGVRCSSESTDIQEKLEKLSKAPLKPQQRLWATRSIVIPSVMYHLVHGHVQFGHLRKLDRTIRKNIRGWLHLPKDCPNAYFHANIKDGGLGVPSLRWWAPLQRLKTLNRLRKNQYLVDNNAISYLNTEATDTEKRLKQNDNSILRTVKELDRMWSEKLYSSVDGGPLCRSAEVRGQHGWVGAPTRFLSGRDFVNCVKTRINALPSLSRTSRGRTYDRSCRAGCGVPETNNHILQVCHKTNGIRIKRHNAISNYIARNLSNQGYRVENEPTFTTSEGVRKPDVIATLGDTSFIVDTQIVGEQTDLEHINRNKINYYKNNPTLINEIKNKYGSGTVLTYAATLNWRGVWAKTSAEDLLERGIIRRKDLPVMSSRVLIGSIAAWNIFNKSTSTKRSRNEGRPRQGVG

SEQ ID NO: 7516 - protein, 1053 aa, Harmonia axyridis
MERNLRPRIRMDSGRSADRATPVTQAQVNQGPTPGPSTTTGRTSGLTSLPPEIPSTSEFKCRAPQCSRVFQTATGRGVHERRSHTEWFDEQQMEHHQHRKERWNDEELGLLAHREARLVMEGVRFINQELVKTSSRTLESIKGVRRKPEYKRKVQELLQNMRNEAERGEGDNTREEQETQAQAGEQGQLFTYLIEADPLDGDEFNARWLNNICSMVLSNPKARVGLELAAYIKETFPPEKERKISRNSPSSCRALNAKQRRREEYARVQDLWKRKPGECARRIMEDRLHQDGSLRKDRMVPYWQTVMTRNKTMSPKITHSGETHEQLWAPITAEEVRTALPRKKTATGPDNVSAETVWRVPRDILARMFNVILWLGMLPDALCKSRTILLPKKRGAQDPGSFRPITMSSVIVRTLHKVLANRMKSVQLDERQRAFRDAEGCAENVVLLDMAIRYHHRKHRKMYMAVMDMAKAFDSVSFPALFSALRAKGIPEPMVNYIKNIYQEGTTVLQHGGWQSDPIHPTCGVRQGDPLSPIIFNMVIDGLLRSVRSGIGVDIDGLKLNILAFADDIVLVASTKEGLQSLIDRSVDFLGECGLEANVGKCATLAIESVPKLKKTVIDSSCTFKINNRMIPTLSRSSEWTYLGVRFNVDGVRCSSGNTDIQEKLDKLSKAPLKPQQRLWATRSIVVPSVMYHLVHGHVQFGHLRKLDRSIRKSIRSWLHLPKDCPNAYFHAKISDGGLGVPSLRWWAPLQRLETLKRLRKNQYLVKNKATTYLNDEYADTEKRLKLNDNTILRTAKDLDKMWAEKLYSSVDGGPLSRSAEVRGQHGWVGAPTRFLSGRDFVNCIKTRINALPSLSRTSRGRTQDRSCRAGCGVPETNNHIEQICHRTSRIRIKRHNAISNYIARSLNNQGYQVENEPTFTTTEGVRKPDIVATLGDTSFIVDTQIVGEQTDLEQTNKNKINYYKNNTTLQDEIKSRYGSGTVLTFAATLNWRGVWAKSSAEDLLERGIIRKRDLPVVSSRVLIGSIAAWNIFNKSTSTRRGRYEGRPRQGVG

SEQ ID NO: 7517 - protein, 1053 aa, Harmonia axyridis
MERNLRPRIRMDSGRSADRATPVTQAQVNQGPTPGPSTTTGRTSGLTSLPPEIPSTSEFKCRAPQCSRVFQTATGRGVHERRSHTEWFDEQQMEHHQHRKERWNDEELGLLAHREARLVMEGVRFINQELVKTSSRTLESIKGVRRKPEYKRKVQELLENMRNEAERGEGDNTREEQETQAQAGEQGQLFTYLIEADPLDGDEFNARWLNNICSMVLSNPKARVGLELAAYIKETFPPEKERKISRNSPSSCRALNAKQRRREEYARVQDLWKRKPGECARRIMEDRLHQDGSLRKDRMVPYWQTVMTRNKTMSPKITHSGETHEQLWAPVTAEEVRTALPRKKTATGPDNVSAETIWRVPRDILARMFNVILWLGMLPDALCKSRTILLPKKRGAQDPGSFRPITMSSVIVRTLHKVLANRMKSVQLDERQRAFRDAEGCAENVVLLDMAIRYHHRKHRKMYMAVMDMAKAFDSVSFPALFSALRAKGIPEPMVNYIKNIYQEGTTVLQHGGWQSDPIHPTCGVRQGDPLSPIIFNMVIDGLLRGVRSGIGVDIDGLKLNILAFADDIVLVASTKEGLQSLIDRSVDFLGECGLEANVGKCATLAIESVPKLKKTVINSSCTFKINNRLIPTLSRSSEWTYLGVRFNVDGVRCSSGNTDIQEKLDKLSKAPLKPQQRLWATRSIVVPSVMYHLVHGHVQFGHLRKLDRSIRKSIRSWLHLPKDCPNAYFHAKISDGGLGVPSLRWWAPLQRLETLKRLRKNQYLVKNKATTYLNDEYADTEKRLKLNNNSILKTAKDLDKMWAEKLYSSVDGGPLSRSAEVRGQHGWVGAPTRFLSGRDFVNCIKTRINALPSLSRTSRGRTQDRSCRAGCGVPETNNHIEQICHRTSRIRIKRHNAISNYIARSLNNQGYQVENEPTFTTTEGVRKPDIVATLGDTSFIVDTQIVGEQTDLEQTNKNKINYYKNNTTLQDEIKSRYGSGTVLTFAATLNWRGVWAKSSAEDLLERGIIRKRDLPVVSSRVLIGSIAAWNIFNKSTSTRRGRYEGRPRQGVG

SEQ ID NO: 7518 - protein, 1197 aa, Coremacera marginata
MQSNMNINRARIFAQTSVEATAIGVGLAPQRDESPVAQQLASQQSATSAAQYDLGTTRAGRRRQRIQWTNEMNEHVLRCYYTATHCENPQFRNAYRRVMYNLFTDRYGNFQGRININNLARRKDVIITNTYVERDRQQRIASEVATQITEQQTANSTITEMRSPSQEIQEAGTTTEIETTPISSQSYHQTSDTGNIATIEPTSSEEQQLIDSFRLNFIEFEGMDPLNRPRIPRIYETKRLDETLNIINSKILPHYLNEDTEIEYLNNLIYVSAITAVKTLGKTPIPTRESINVRTRSFVPKWRKRLEAKIDTLRKDIGRLTAFRSGSRSSRFCRHIKRIISPQQLYSVSADQITEILDRRCQQLLAYSKRLHRYVQCSKRKLENALFQQNQRTFYRKVPVQSENGHNSKNPPMDKTEEFWEGIWSSIKQHNANVHWIADERSRMDHIATMHHQPFSKDEVTEAISKTSNWKSPGLDQIQNIWIKRLKATHEQLAKCFNKILMLSSSCPQFFTTGLTYLLPKGPVSEDPSKYRPITCLSTSYKLFTRILTERIYHHCSTNNIISDEQKGCRRNSMGCKDQLISDSVITGLALRKKRNLSMAFIDYQKAFDSMPHDYLIKVLEIYKIDPVIVNCLRDLMQRWNTRLYQERSLSKPISIKRGIFQGDSFSALWFCMGLNPLSSILNKVKNGFTIRTETFDHTVNHLLFVDDIKLYANKREKLHQMIEIVQSFSSDIHMEFGIEKCKMIHLVKGKIDERDEGCTINENRVIEDLQHGDSYKYLGFLQLKGMNHTIIKKALNSQFQTRLNTIMKSSLNGGNKTKAINTWAIPLITYSFGVIKWSSTDISRLETMIRTTLTRYRSHHPRSAIERISLPRKLGGLGITDLTQLHFNQIKNLRQYFLANQSSLLKAVAVADDGFTPLNLSSDTPPQPRNLNSVDQHILSWKSKPIHGVHPHDLHMDHIDQHSSNQWLIKGKLFSETEGFIRAIQDKVIATRNHLKFVVGEPVEDKCRRCGENGETIEHIISGCCTFASYEYTHRHNNVAKIIHQQLAFDNELLTEHLPYYKYQPVPVLENSTQKLYWDRAITTDQHIPANRPDIILFHKREKTIEIFDVAVTLNRNIQSTYSTKISKYATLAVELRAMHSATRVGITPIIISATGLIPKHLSRNLEKFQLGHLLSEIQKTVLLDTCSIVRKFMNL

SEQ ID NO: 7519 - protein, 934 aa, Blastobasis lacticolella
MSSPTRSTCPLCPGSDRLFVVPRGLSVHMSHMHRDVRSRAPLSVPDHNAAHGLETLCDLKSNISVLKHIPKGARNLVAGKLKSIIDKCLFSNSVDDWYHLLSFSYAVLRVPAHGDPRSLTAKVKENIDNVDLTYTDVGNRRQLTVTRRIESKVYDGDLRGAVRLLDSKESLAPNCEETLTILRDKHPTPSRSLSMPSPPDASCPTLSVTAQDVLDTIGSFYNGSAAGLDGLRPQHLKELISTSAGDNALRLLESLTNLCNFLLKGCLNVEVCPYLYGATLCALSKGDGGVRPIAVGSVIRRLVARLGCRAVRGEMAAYLQPHQLGFGTPLGCEVAIHATRRFCLDLENGGGVVVKLDIRNAFNTVERDIILSEVKEKLPTLYPYLYQCYGSPSKLFYGGSSVSSEVGAQQGDPLGPLLFSLAIHQIVNSVQSPLNLWYLDDGTIGGTSDAVARDLEMLLNKFADIGLQLNTDKCEFYRSGVDTDIFLPRIRALIPGIKEVGRPNFALLGSPIFSEGMPAFLDSKRRSLVTVHESLKQLTSHVALILLRSCFSMPRLTYAVRTTPTWCFPGEVTNLDNLLKETLEYIVNVNLEEKQWCQAVLPVRHGGLGVRRVEGTGLAAFLASAHGVVDLVAQVLSTHGDGITIPFVSEAVSAWDVLCPGGILPEKKSSQRAWDDIYSRVVMERLCDDASGRELARLRAVSRPESGAWLHALPSPHLGTLLDNNTMRVAVALRLGCAVCEPHPCVCGVMVDDSGVHGLSCFRSAGRLSRHHAINDIIRRALVSANVPCILEPPGLCRTDGKRPDGLTLIPWKQGRCLLWDSTCCCTYAATHLSGSAQSAGSAAETAARAKHVKYAGLKSAYLFVPVAVETAGAWSSEAKLFIGEVGRRLRENGLGPCSGSYLVQRISLAIQRGNAASIMGTFERGATWGGLFE

SEQ ID NO: 7520 - protein, 934 aa, Blastobasis lacticolella
MSSPTRSTCPLCPGSDRLFVVPRGLSVHMSHMHRDVRSRAPLSVPDHNAAHGLETLCDLKSNISVLKHIPKGARNLVAGKLKSIIDKCLLSNSVDDWYHLLSFSYAVLRVPAHGDPRSLTAKVKENIDNVDLTYTDVGNRRQLTVTRRIESKVYDGDLRGAVRLLDSKESLAPNCEETLTILRDKHPTPSRSLSMPSPPDASCPTLSVTAQDVLDTIGSFYNGSAAGLDGLRPQHLKELISTSAGDNALRLLESLTNLCNFLLKGGLNVEVCPYLYGATLCALSKGDGGVRPIAVGSVIRRLVARLGCRAVRGEMAAYLQPHQLGFGTPLGCEVAIHATRRFCLDLENGGGVVVKLDIRNAFNTVERDIILSEVKEKLPTLYPYLYQCYGSPSKLFYGGSSVSSEVGAQQGDPLGPLLFSLAIHQIVNSVQSPLNLWYLDDGTIGGTSDAVAQDLEMLLNKFADIGLQLNTDKCEFYRSGVDTDIFLPRIRALIPGIKEVGRPNFALLGSPIFSEGMPAFLDSKRRSLVTVHESLKQLTSHVALILLRSCFSMPRLTCAVRTTPTWCFPGEVTNLDNLLKETLEYIVNVNLEEKQWCQAVLPVRHGGLGVRRVEGTGLAAFLASAHGVVDLVAQVLSTHGDGITIPFVSEAVSAWDVLCPGGILPENKSSQRAWDDIYSRVVMERLCDDASGRELARLRAVSRPESGAWLHALPSPHLGTLLDNNTMRVAVALRLGCAVCEPHPCVCGVMVDDSGVHGLSCFRSAGRLSRHHAINDIIRRALVSANVPCILEPPGLCRTDGKQPDGLTLIPWKQGRCLLWDSTCCCTYAATHLSGSAQSAGSAAETAARAKHVKYAGLKSAYLFVPVAVETAGAWSSEAKLFIGEVGRRLRENGLGPCSGSYLVQRISLAIQRGNAASIMGTFERGATWGGLFE

SEQ ID NO: 7521 - protein, 916 aa, Blastobasis lacticolella
MLNIRMPRGLNVHMSHMHRDVQSRAPLSAPDRNAVQRLDTLGDLKSNVSVLKHIPKGARNLVAGKLRCIIDKCLISNDWYHLLSFSYAVLRVPDHGDPRSLTAKVKENVDNVNMTYTEVGSRRQTSVSKRIESRVYDGDLRGAVRLLDSKASLAPHCEETLAILRDKHPSPSRPLSMPSSPDTSCPTLSVTAEDVSDAIGSFYNGSAAGLDGLRPQRLKELISLSAGDNGLRLQESLTNLCNFLLKGFLNVEVCPYLYGATLCALNKGDGGVRPIAVGSVFRRLVARLGCRAVRGEMAAYLQPHQLGFGTPLGCEAAIHATRRFCMDLESGGGVVIKLDIRNAFNTVERDIILSEVKEKLPTLYPYLFQCYSSPSKLFYSGSLVSSEVGAQQGDPLGPLLFSLAIHKVVNSIKSPLNLWYLDDGTVGGTPDAVVEDLEMLLHKFVDIGLQLNTTKCEFYHSGVDMGVFLPRIRALIPGIKEVDKPSFTLLGSPIFSEGIPALLDSKRQSLVAVQESLKHLTSHVALILLRSCFSMPRLTYAVRTTPTWCFPREVADLDNLLKETLESIVNVNLEEKQWCQAVLPVRHGGLGVRRVEGTGLAAFLASAHGVVDLVTQILSSHGDEITIPFVGEALSAWDVLCPGSALPENQSSQRAWDDVYSTVVMRQLCDDAAGRDLARLKAVSRPESGAWLHALPSPQLGTLLDSNTVRVAVALRLGCAICEPHQCVCGVMVDESGIHGLGCFRSAGRMSRHHALNQIIRRALVSANVPCVLEPPGLCRTDGKRPDGLTLIPWKQGRCLLWDATCCCTYAASHLPGSTQSAGSAAETAARAKHIKYAALKSAYLFVPVAVETAGAWSLEAKMFISEVGRRLRENGLGPCSGSYLVQRISLAIQRGNAASIMGTFERGTTWGGLFE

SEQ ID NO: 7522 - protein, 1549 aa, Trachurus trachurus
MDPHDAINGLSRVVRCYYLKYTERSRQKSRLPSILKTASEYVRVFKEWRDLKLVDDEDLTIKEHHRKSTNIISTLDSNINLSSTTHNACVDANANPNPNELLCSSSTSTLPPLVWLSKPQRRRMYNLASRLFNLSNQFASLIKDESVKDDFNVHLFEDDGKTIKITHCLSVILRARPINDPTSIPNSTSTLNPELNNENTTEETVSTQEATNAAVSEDLNNDDFQTPFPSDTEEEPPPPSHIDIDSINTINTNGKETVTAECPAQSTSIPTTDPTLKVIDCPSTTASTSILISTSTSTLNVATNTAEATIIPPSSTPSTPLITLNLNPTSTTEPAEETNEIFMDEPAGENFSVATKRTHPSSASTFFANMFASVDNDDDDIRSPKSPRIEESNAVSSQDVAAFITEVRNNPAPSSFNSLSPPPEISSPIVVDDNHSNNNPVATTNHDENYNPSNLTTNSNNIVDNNPVDNNPVAQTASASTSGEQNQNRNQNPNYLEKHQKHKEQQNLILESTSRILRDILCRADHGDSDLLYNCFIETATEKAKELNMFYTPPIFNNPTIATNATTTPRTPKEEAKRLRGLYRINMKRCFREVTQPPPKWCQASASTIKSALSSPVLPTTISTPSTTSTSTAPIIIENTNTNPNPNVDPNEINLNIEDSSPNDDDDFVTSPPTQTSITPITPITPIAIETPNEIETPIDITIETPNEIETPIDITIETPNEIETLIDIAIAIETQTTTTIEQPLDDIYNSGDRYNDFYITDEDVAVVIERAKKDTSPGTDGLQMNFWKRVPFMNCLLAPLFNAILRSGKVPESWLVSRLILIPKSDNPNVNNPLEYRPISITQTVYRLFMSVLNRKLSTIIKLSPSQKGFREGEGCAEHAFTLQECIDSCRRNSKQLHTVWVDLTKAFDSIPHHLVFAALNKQNVPTSVCTVIQNLYGNCFNTVTDKSGGFATLEQNGIGVRQGCPLSPLLFNTVMDAFLQDVDSSNLGFKLQTERIGALCYADDIVLLAESRPQLDQLISKLESFLSASNLTVNHSKCCSLSVRYKKSKRVVNDENFPPVNIQNSTIPALTEFYKYLGTMSDLNSFKSLPKPFAVFKKNLAKLSYSPLFHFQKLEMLKVYLLPTLDFAMKNQCLRVEELKALDRSILANVRSWFNFPTPLNTNVYYAPTSLGGLGLRCLRQDYAALRLSSALNVVNSRDERIQKIARKVLAEITNKRTKSTLSPLEYLHREKEVGQIKDVRSLLSSIRLNRKALNVNLKLIDDDPSHEDSSAIDLDISTLQCPPNIPTFRTQRVSRIKRLRWHLQNFYFEAWRALLDQGRCVDCFSGLKEANSWLRTGQISIQTYRFAVMGRANVLPTKVVLKRRFLEADTHCRRCPCDLETIGHVLNGCPYGSNLIRSRHDQVLEMISNAIKPKKDWVLRLNQRIPGIPSNRRPDIVLLNDKEKKAVIADVTICYENNSDRLDQVREGKLEKYSIEAGYLQDLGYEIHCTALVYGSLGSHHPMNRDIYNVIQIRPSKRTRKALLKKITTSTLELSNKIFKIHVRDT

SEQ ID NO: 7523 - protein, 1528 aa, Trachurus trachurus
MDPHDAINGLSRVVRCYYLKYTERSRQKSRLPSILKTAGEYVRVFKEWRDLKLVDDEDLTIKEHHRKSTNIISTLDSNINLSSTTHNACVDANELLCSSSTSTLPPLVWLSKPQRRRMYNLASRLFNLSNQFASLIKDESVKDDFNVHLFEDDGKTIKITHCLSVILRARSINDPTSIPNSNSTLTSTLNPELNNETTTEETVSTQEATNAAVSEDLYNDDFQTPFPSDTEEEPPPPSHIDIDSINTINTNGKETVTAECPAQSTSIPTTDPTLKVIDCPSTTASTSILISTSTLNVATTTAEATIIPPSSTPSTSLITLNLNPTSTTEPAEETNEIFMDEPAGENFSVATKRTHPSSASTFFANMFASVENDADIRSPKSPRIEESNAISSQDVAAFITEVRNNPAPSSFNSLSPSPEISSPIVVDDNDNHSNNNPVATTNHDENYNPSNSTTNSNNPVDNNPVDQTASASTSGEQNPNRNRNQNPNYLEKHQKHKEQQNLILESTSRILRDMLCRADHGDSDFLYSCFMEIATEKAKELNMFYTPPIFNNPTIATNATTTPRTPKEEAKRLRGLYRINMKRCFREVTQAPPKWCQASASTIKSALSSPVLPTTTPTPSTSTSTAPIIIENTNTNTNANVDPNEINLNIEDSSHNDDDDDFVTSPPTQTSITPITPIAIETPNDIAIETPIDIAIETPNEIETLIDIAIAIETQTTTTIEQPLDDIYNSGDRYNDFYITDEDVAVVIERAKKDTSPGTDGLQMNFWKRVPFMNCLLAPLFNAILRSGKVPESWLVSRLILIPKSDNPNVNNPLEYRPISITQTVYRLFMSVLNRKLSTIIKLSPSQKGFREGEGCAEHAFTLQECIDSCRRNSKQLHTVWVDLTKAFDSIPHHLVFAALNKQNVPTSVCTVIQNLYGNCFNTVTDKSGGFATLEQNGIGVRQGCPLSPLLFNTVMDAFLQDVDSSNLGFKLQTERIGALCYADDIVLLAESRPQLDQLISKLESFLSASNLTVNHSKCCSLSVRYKKSKRVVNDENFPPVNIQNSTIPALTEFYKYLGTMSDLNSFKSLPKPFAVFKKNLAKLSYSPLFHFQKLEMLKVYLLPTLDFAMKNQCLRVEELKALDRSILANVRSWFNFPTPLNTNVYYAPTSLGGLGLRCLRQDYAALRLSSALNVVNSRDERIQKIARKVLAEITNKRTKSTLSPLEYLHREKEVGQIKDVRSLLSSIRLNRKALNVNLKLIDDDPSHEDSSAIDLDISTLQCPPNIPTFRTQRVSRIKRLRWHLQNFYFEAWRALLDQGRCVDCFSGLKEANSWLRTGQISIQTYRFAVMGRANVLPTKVVLKRRFLEADTHCRRCPCDLETIGHVLNGCPYGSNLIRSRHDQVLEMISNAIKPKKDWVLRLNQRIPGIPSNRRPDIVLLNDKEKKAVIADVTICYENNSDRLDQVREGKLEKYSIEAGYLQDLGYEIHCTALVYGSLGSHHPMNRDIYNVIQIRPSKRTRKALLKKITTSTLELSNKIFKIHVRDT

SEQ ID NO: 7524 - protein, 1529 aa, Trachurus trachurus
MDPHDAINGLSRVVRCYYLKYTERSRQKSRLPSILKTAGEYVRVFKEWRDLKLVDDEDLTIKEHHRKSTNIISTLDSNINLSSTTHNACVDANELLCSSSTSTLPPLVWLSKPQRRRMYNLASRLFNLSNQFASLIKDESVKDDFNVHLFEDDGKTIKITHCLSVILRARSINDPTSIPNSNSTLTSTLNPELNNETTTEETVSTQEATNAAVSEDLYNDDFQTPFPSDTEEEPPPPSHIDIDSINTINTNGKETVTAECPAQSTSIPTTDPTLKVIDCPSTTASTSILISTSTLNVATTTAEATIIPPSSTPSTSLITLNLNPTSTTEPAEETNEIFMDEPAGENFSVATKRTHPSSASTFFANMFASVDNDDDDIRSPKSPRIEESNVVSSQDVAAFITEVRNNPAPSSFNSLSPSPEISSPIVVDDNDNHSNNNPVATTNHDENYNPSNLTTNSNNPVDNNPVDQTASASTSGEQNPNRNRNQNPNYLEKHQKHKEQQNLILESTSRILRDILCRADHGDSDLLYNCFIETATEKAKELNMFYTPPIFNNPTIATNATTTPRTPKEEAKRLRGLYRINMKRCFREVTQPPPKWCQASASTIKSALSSPVLPTTTPTPSTSTSTAPIIIENTNTNTNANVDPNEINLNIEDSSHNDDDDDFVTSPPTQTSITPITPIAIETPNDIAIETPIDIAIETPNEIETLIDIAIAIETQTTTTIEQPLDDIYNSGDRYNDFYITDEDVAVVIERAKKDTSPGTDGLQMNFWKRVPFMNCLLAPLFNAILRSGKVPESWLVSRLILIPKSDNPNVNNPLEYRPISITQTVYRLFMSVLNRKLSTIIKLSPSQKGFREGEGCVEHAFTLQECIDSCRRNSKQLHTVWVDLTKAFDSIPHHLVFAALNKQNVPTSVCTVIQNLYGNCFNTVTDKSGGFATLEQNGIGVRQGCPLSPLLFNTVMDAFLQDVDSSNLGFQLQNERIGALCYADDIVLLAESRPQLDQLISKLESFLSASNLTVNHSKCCSLSVRYKKSKRVVNDENFPPVNIQNSTIPALTEFYKYLGTMSDLNSFKSLPKPFAVFKKNLAKLSYSPLFHFQKLEMLKVYLLPTLDFAMKNQCLRVEELKALDRSILANVRSWFNFPTPLNTNVYYAPTSLGGLGLRCLRQDYAALRLSSALNVVNSRDERIQKIARKVLAEITNKRTKSTLSPLEYLHREKEVGQIKDVRSLLSSIRLNRKALNVNLKLIDDDPSHEDSSAIDLDISTLQCPPNIPTFRTQRVSRIKRLRWHLQNFYFEAWRALLDQGRCVDCFSGLKEANSWLRTGQISIQTYRFAVMGRANVLPTKVVLKRRFLEADTHCRRCPCDLETIGHVLNGCPYGSNLIRSRHDQVLEMISNAIKPKKDWVLRLNQRIPGIPSNRRPDIVLLNDKEKKAVIADVTICYENNSDRLDQVREGKLEKYSIEAGYLQDLGYEIHCTALVYGSLGSHHPMNRDIYNVIQIRPSKRTRKALLKKITTSTLELSNKIFKIHVRDT

SEQ ID NO: 7525 - protein, 1402 aa, Kudoa iwatai
MDAKDAINGLSRAIRYYYIQYEKRRKHKMRLPVLYKVVGEYIRAFKEWRDLKLIDEEDATITDHIKRNMPAKDISRLDDVTKATNDTNPRTFMSKKQRRRMYNLSSRLFNLANEFTTLLREEIIKGDFNELLYEDDNESIKITHNLTVHISRPTTTNITNPANPENISLSNGAVTTKEVTTVEPCSSSTAVPETIYNTESLNPSSYEEEAQLNESATVETLSLTTKSTSNEVIPTTSNNKETTQTESSSKDQSTLHPTKEPTLLTKSTILTHTNVNVNVNESTSTKKKRPYTSLSQNTTQLQYPISANVPSEAEDDNDIRPPKSPRFEEPNTISTQDINHFLTEVRNNPDISKNPQQSNKNTTSNSINNIIPAFQFTPPCEDNLLSTTNFNFNGEATVEAEANTETNPTTTNPTIANTPSASNRDFSTTHQQRKEQQNIILEETARLLRETLCRADHGDSNLLYSSFIEIATEKAKELKMLYVPPLIKNKTTNTRTTAIPKTPQEEAKRLRGLYRINMKRCFREVTQAPPKWCEASAECIKETLSPQTTTNQSTTSTESSNNNETITIADTPSNTDGLGIPQEQTESNTQQQQDTNSENDDIYNTGNRYDDFYINDEDVAVVLERAKKDTSPGTDGIQMIFWKRVPMMHCLLAPLFNSILRSGKLPDSWLESRLVLIPKTESPNTTDPLNYRPISITQTVYRIFMSVLNRKLTSIIKLSDSQKGFREGEGCVEHAFTLQECLDSCRRNSKQLHAVWIDLTKAFDSVPHHLVISALQKQQVPQSVCSTINYLYNNCYNLVTDNTGSSTTIPQNGKGVRQGCPLSPMLFNCVVDDFLKDVDKSNLGFQLQNQRIGALCYADDIVLLAENRNQMEILIKKLELFLARTNLKVNHSKCCSLSIKYKRSKRIINDPFAPEICIQNQSIPVLTDFYKYLGTMSNLKSFKSLPKPFDTFKENLAKLSYSPLLHFQKLEMLKVYLYPTLDYAMKNQCLRVEELKALDRLVLANVRSWFKLPNSLTSNIYYSPTSLGGLGLRNLRQDYAALRLSSALNVVNSRDERIQKIARKVLVEITDRRTKSTLNPIQYLHLDKEIGPVKDVRSLLSSIRLNRKALSVQLKHIQAGDEEDPSAIDLDTSTLNRPPNIPTFRSIQISRIKRIRWHLQNKSFEAWRALLDQGRSVDCFSGLKEANSWLRTGQIAIQTYRFAVMGRANVLPTKFVLKRRQLSPNTHCRRCSCDLETIGHVLNGCPHSANLFRTRHDRVLEVISTAIKPKKDWVLRVNKEIPQIPSHRRPDLVLLNDKEKKAVIADITICYENNIDRMDQVREHKMEKYQHEAGLLQDLGYEIHCTAFVYGSLGSHHPMNKNILKVIQIRPGQRARKALLKKITTTVLESSNQIWRNHVRDS

SEQ ID NO: 7526 - protein, 923 aa, Kudoa iwatai
MLYVPPLIKNKTTNTRTTAIPKTPQEEAKRLRGLYRINMKRCFREVTQAPPKWCEASAECIKETLSPQTTTNQSTTSTESSNNNETITIADTPSNTDGLGIPQEQTESNTQQQQDTNSENDDIYNTGNRYDDFYINDEDVAVVLERAKKDTSPGTDGIQMIFWKRVPMMHCLLAPLFNSILRSGKLPDSWLESRLVLIPKTESPNTTDPLNYRPISITQTVYRIFMSVLNRKLTSIIKLSDSQKGFREGEGCVEHAFTLQECLDSCRRNSKQLHAVWIDLTKAFDSVPHHLVISALQKQQVPQSVCSTINYLYNNCYNLVTDNTGSSTTIPQNGKGVRQGCPLSPMLFNCVVDDFLKDVDKSNLGFQLQNQRIGALCYADDIVLLAENRNQMEILIKKLELFLARTNLKVNHSKCCSLSIKYKRSKRIINDPFAPEICIQNQSIPVLTDFYKYLGTMSNLKSFKSLPKPFDTFKENLAKLSYSPLLHFQKLEMLKVYLYPTLDYAMKNQCLRVEELKALDRLVLANVRSWFKLPNSLTSNIYYSPTSLGGLGLRNLRQDYAALRLSSALNVVNSRDERIQKIARKVLVEITDRRTKSTLNPIQYLHLDKEIGPVKDVRSLLSSIRLNRKALSVQLKHIQAGDEEDPSAIDLDTSTLNRPPNIPTFRSIQISRIKRIRWHLQNKSFEAWRALLDQGRSVDCFSGLKEANSWLRTGQIAIQTYRFAVMGRANVLPTKFVLKRRQLSPNTHCRRCSCDLETIGHVLNGCPHSANLFRTRHDRVLEVISTAIKPKKDWVLRVNKEIPQIPSHRRPDLVLLNDKEKKAVIADITICYENNIDRMDQVREHKMEKYQHEAGLLQDLGYEIHCTAFVYGSLGSHHPMNKNILKVIQIRPGQRARKALLKKITTTVLESSNQIWRNHVRDS

SEQ ID NO: 7527 - protein, 1410 aa, Kudoa iwatai
MDAKDAINGLSRAIRYYYIQYEKRRKHKMRLPVLYKVVGEYIRAFKEWRDLKLIDEEDATITDHIKRNMPAKDITREDDVTKVTKATKITDDTNPRTRTFMSKKQRRRMYNLSSRLFNLANEFTTLLREEIIKGDFNELLYEDDNESIKITHNLTVHITKATNPANPENNSPENISLSNGAVTTKEVTTVEPCSSSTAVPETIYNTESLNPSSYEEEAQLNESATVETLSLTTKSTSNEVIPTTSNNKETTQTESSSKDQSTLHPTKEPTLLTKSTILTHTNVNVNVNESTSTKKKRPYTSLSQNTTQLQYPISANVPSEAEDDNDIRPPKSPRFEEPNTISTQDINHFLTEVRNNPDISKNPQQSNKNTTSNSINNIIPAFQFTPPCEDNLLSTTNFNFNGEATVEAEANTETNPTTTNPTIANTPSASNRDFSTTHQQRKEQQNIILEETARLLRETLCRADHGDSNLLYSSFIEIATEKAKELKMLYVPPLIKNKTTNTRTTAIPKTPQEEAKRLRGLYRINMKRCFREVTQAPPKWCEASAECIKETLSPQTTTNQSTTSTESSNNNETITIADTPSNTDGLGIPQEQTESNTQQQQDTNSENDDIYNTGNRYDDFYINDEDVAVVLERAKKDTSPGTDGIQMIFWKRVPMMHCLLAPLFNSILRSGKLPDSWLESRLVLIPKTESPNTTDPLNYRPISITQTVYRIFMSVLNRKLTSIIKLSDSQKGFREGEGCVEHAFTLQECLDSCRRNSKQLHAVWIDLTKAFDSVPHHLVISALQKQQVPQSVCSTINYLYNNCYNLVTDNTGSSTTIPQNGKGVRQGCPLSPMLFNCVVDDFLKDVDKSNLGFQLQNQRIGALCYADDIVLLAENRNQMEILIKKLELFLARTNLKVNHSKCCSLSIKYKRSKRIINDPFAPEICIQNQSIPVLTDFYKYLGTMSNLKSFKSLPKPFDTFKENLAKLSYSPLLHFQKLEMLKVYLYPTLDYAMKNQCLRVEELKALDRLVLANVRSWFKLPNSLTSNIYYSPTSLGGLGLRNLRQDYAALRLSSALNVVNSRDERIQKIARKVLVEITDRRTKSTLNPIQYLHLDKEIGPVKDVRSLLSSIRLNRKALSVQLKHIQAGDEEDPSAIDLDTSTLNRPPNIPTFRSIQISRIKRIRWHLQNKSFEAWRALLDQGRSVDCFSGLKEANSWLRTGQIAIQTYRFAVMGRANVLPTKFVLKRRQLSPNTHCRRCSCDLETIGHVLNGCPHSANLFRTRHDRVLEVISTAIKPKKDWVLRVNKEIPQIPSHRRPDLVLLNDKEKKAVIADITICYENNIDRMDQVREHKMEKYQHEAGLLQDLGYEIHCTAFVYGSLGSHHPMNKNILKVIQIRPGQRARKALLKKITTTVLESSNQIWRNHVRDS

SEQ ID NO: 7528 - protein, 762 aa, Plutella xylostella
MSFEFIPVEIFIEVIKRSHNWKSPGSDHIHNYWYKKFSCTHPYIHSHINKFIRTPNSMPAYITHGKTYLIPKDLDTKNPAKYRPITCLQTIYKIITGCISELIYSHVEEHKILAEQQKGCRKNSQGCKEQLIIDSIAMKQAFTKKRNIHSMYIDYKKAFDSVPHSWLLKILSVYKINPVIISFLESSMKNWETVLHIKHNTSSLSTEPISIQRGIFQGDSLSPLWFCLALNPLSKLLNAADTGFKLKHNNSHHTLSHLIYMDDIKLYASSKNELFKLADITQEFSQDIKMQFGIDKCKIHSINKGKVHANSYKLKTGETIESMDENDTYKYLGFHQSNQILQKRTKHILTDKFRSRLRQISNTQLNSRNLIKAINTYAIPVLTYSFGIINWSKTDLNKLQCIVNSTLTKYRKHHPKTCSQRLTLPRQEGGRGLIDIKNLHNKQIATLRSFFHKKAEQSTLHKFVSNIDHKLTPLNLHSKDSQPNESNVGADQKMAAWAQKSLHGRHKADLNQAHVDKEASNAWLKRGELFPETEAFMLAIQDQVIATRNYRKYIIKDLNQPTDLCRRCRSASETIQHITGACKSLVQTDYKHRHDQVASIIHQHLAHSAHFIEKKVPYYKYKPETVHENNLYKLYWDRTILTDKTVHFNRPDITLLDKSNRTAYIIDIAIPNTHNIQSTLTEKLTKYQDLAIEIKTQWRAQTIHIVPIDLSSTGIIPKTLQNSLETINVPKSIIYTLQKATILNTCRITRKFLTTSVISSQN

SEQ ID NO: 7529 - protein, 1495 aa, Plutella xylostella
MVAERKTKLPQAGPSVNSAGQSRSGPRGSGCPSYSGGGNGPLIRVTRSSSRSSPLLAEEPQGTEDITGPSTRRYNLRSLPGGRRGTPGADAGCHSMRTIGSEELNRRALTGNEPEDTTADNPPPPPSPTSTHSLFTSPDSSPHSHYTRTSSTQGSSSRRTSTSSPPHLTPMDVAQEARADIPAPTKGKNGARKRWSEDVNKFIWRTYLIYSKLETIPRGYLDPLHREFCQKYPEYDASKQRLGDQRRSIINNKLLSTQILDEIKAEVTIYLQNTNLQTQQTTTTTQETIYETGRTRINWSEMNETIMRCYYEVTKNETDMTAYRKKLHEKFIDHYPHMTHISEQRISDQRRVIENNNMLTTQKLQDIRKEIQTQLQKESLEEENLGDGLCLSNRLTQINEETLSDLLEDENLGDGLCPSNRHTLINEGTPPDTLEHENFGDGLCPGNRQPIHDDSTTAENFTEIRYSTSLTQNENSATNLNVELYPDNIQQIFNQTLDTFKDTNPIDRPFIPKQQTSRHFASTVDHINTKILPQHVNHELDFTTLQTLIYVAAYTAATINGSQIGSNKDKESPRLPPWRIRLESKIKKLREDIGRLTQYINGNRHRNIELAVDDIKRRYEVHAQYEDSNTDLTHFLDTLKQKLNVKASRLKRYLTCTQRKTQNNRFKNNEKLFYRTAFDTDAHNNIRNTASVTDTPSKEALQEYWANIWENPVHHNENEQWVNHINGNTDIPEMPFEFIPVEIFIQVIKRSHNWKSPGSDHIHNYWYKKFSCTHPYIHSHINKFITTPATMPAYITHGKTYLIPKDSDTKNPAKYRPITCLQTIYKIITGCISELIYSHVEEHKILAEQQKGCRKNSQGCKEQLIIDSIAMKQAYTKKRNIHSMYIDYKKAFDSVPHSWLLKILSVYKINPVLISFLQSSMKNWETVLHIKQNNSSLSTEPISIQRGIFQGDSLSPLWFCLALNPLSKLLNEADTGFKLKHNNSHHTLSHLLYMDDIKLYASSKNELFKLADITQQFSQDIKMQFGIDKCKIHSINRGKVHANSYKLTTGETIESMDENDTYKYLGFHQSNQILQKKTKHILTDKFRSRLRQISNTQLNSRNLIKAINTYAIPILTYSFGIINWSKTDLNKLQCIVNSTLTKYRKHHPKTCSQRLTLPRGEGGRGLIDIKNLHNKQIATLRCFFHKKAEQSTLHKFVSNIDHKLTPLNLHSKDSQPNESNVGTDQKMAAWAQKSLHGRHKADLSQAHVDKEASNAWLKRGELFPETEAFMLAIQDQVIATRNYRKYIIKDLNQPTDLCRRCRSASETIQHITGACKSLVQTDYKHRHDQVASIIHQHLAHSAHFIEKKVPYYKYKPETVHENNHYKLYWDRTILTDKTVHFNRPDITLLDKSNRTAYIIDIAIPNTHNIKSTLTEKLSKYQDLAIEIKTQWRAQTIHIVPIVLSSTGIIPKTLKNSLETINVPKSIIYTLQKATILNTCRITRKFLTTSVISSQN

SEQ ID NO: 7530 - protein, 1345 aa, Tagiades litigiosa
MMRLRSSKALPQAGTRNGESRPEQSNSGSPTYSGGGTASLEPSHLGINRYNLRSQARKNLKYRGSPERNEAREISSTSASPESIFPSLPSSPRSYEEQTLCLSRSATLSPMSVDVAREANAVQPEPTTGHIKRRRWTKDMNKFIWRTYLLATEMEKNTHGYLDYLYPQFTQKFPEIETSRQRLGDQCRAIIRNKLLPQAVLDDIRNEVAVQLQSQHTDTPHSNTTLLIQSTTTSKRMKWTREINEYIIKYYFEVTEAERDITGYRKKLHDRFIDKFPHLDHISEQRLADQRRVIINNKLLTTERVHEIKMGVETELHKRIFNASETEQFLCELTQNNDEEQLEHHNLININQLLGESAMSTENQTELEITINDNESMEHENKEYIDKEFRNSFNLFNNTIPTARPFIPKQKSTRKLASIVGYINKYILPKYLSPDITYDSLQTLIYVSAYTAAISNGTNISNQLNIEPYRKPHWQRRLENKIENLRSDIGKLTQFINGNRGKKVTDAVKIIREKYRIHAQFEDENREMNDFLDSLKQKLNVTASRLRRYRNCTKRKIQNYQFYNNESRFYRNIVNDKTTPAPITGIPTPESLRSYWASIWENPVEFNKEAGWLQNLIQPSNTPEMHFEHISHITLVEVIKRTHNWKSPGTDHIHNYWYKKLTSIHSHIHKYINLFIQFPNRMPTYITHGRTYMVSKENNTENPAKYRPITCLQTIYKIITACISVSIYSHLENNSILAEEQKGCRKYSYGCKEQLTIDAIIMKQAFQKKRNIHSMYIDYKKAFDSVPHSWLLYILRLYKIHPLLITFLETSMANWQTVLNLTVNNSTITTKPINIQRGIFQGDSLSPLWFCLALNPLSEILNRTQTGFKLKHNNSFHIVSHLMYMDDIKLYASNKKELFKLADLTQNYSNDINMQFGIDKCKINSVNKGLIVNTAYPLETGELIEAMTENSTYKYLGFHQSRCINETIVKPELIKKFKYRLNVILKTQLNSRNIIKAINTYAIPVLTYSFGIVKWSQTDLKKLQTTINTTLTKYRKHHPKSCIQRLTLPRCEGGRGLIDIKNLHNKQLHTLRQYFYGKAQVSDLHKFTVEIDTKLTPLNLNNKSTQPNEHLINNKEKIAAWAQKSLHGRHYADLNQPHIDAYESNAWLKRGELFPETEAFMLAIQDQVICTANYRKYIMKETLQNDLCRKCKGASETIQHITGACRSLVQNDYKHRHDQIAAIIHQHLAHMYKFIAKKQPYYKYKPQTVLENKTHKLYWDRTILTDKTIHFNRPDILLHEKKTMSTYIIDIAIPNTHNIQSTISDKMSKYQDLSIELRTQWQTQTTKIIPIVLSSTGVIPKLLEK

SEQ ID NO: 7531 - protein, 1231 aa, Butleria flavomaculatus
MHKDFIEKFPEFNASRQRIGDQRRAIVNNKLLSQETLELIKTEVTKYLQSTEADPNTHTSRHTSKQINQHTENTVNSCRMVWSEMNETVMRCYLEVTRNETDMTAYRKKMHEKFLEYYPHLTHITEQRLSDQRRVIVNNNMITADKIQNIRREIEVQLQIEKACNNTQIDLNPNSLQDEDTNVQIVEIVEREVEHSVSETENNRREDLRQNEHIDCSKIEQKFNEALEQFKNTHPTSRPYIPKQNTSRKFASIVNFINTHILPKHLSHNLDFVTLQTLIYAAAYTIAIINGSKIGNNFNSNSRHKPPWQIRLEKKIDKFRLDIGQLTQFILGNRSQKIVLAVEHIKDKYQIHARYEDLNTEIIQFLDTLKQKLNVTASRLKRFLTCTERKSQNTQFKKNEKIFYRYLSNNKGQSDQATPTETPSLASLREYWAGIWENPLQHNENANWIDKIRQVTNIPEMSFDHVPVETFIQIIKRTHNWKSPGSDNIHNYWYKKLTCTHPFLHNHINNFIQRPELMPEYLTIGKTYMLPKDSDTKDPSKYRPITCLQTMYKILTACISELIYTHINEHNILAEQQKGCRKNSQGCKEQLTIDSITTKQALTQKRNIHNMYIDYRKAFDSVPHSWLLQILTLYKIHPIITTFLQASMRNWQTILNIKENSMTHTSEPIRIQRGIFQGDALSPLWFCLALNPLSELLNKSGTGFKLKYDNSHHTLTHLMYMDDIKLYASTKKELFKLADITQQFSKDIHMQFGIDKCKIHSINRGVLQNNTYTLDTGQHIESMDQHSTYKYLGFNQSNQIQQKATKTELTKKFRHRLNQILKTHLNSLNLIKAINTFAVPILTYSFGIINWSQTDLTNLQRIVNTSLTKFRKHHPKSCIQRLTLSRQEGGRGLIDIKNLHNRQITTLRQFFHARSEYSTLHQFVTNIDQKLTPLNLNNRTNQKNEQITTSEQKIACWTQKSLHGRHRNDLSQPHVDKDTSNSWLRRGELFPETEGFMLAIQDQVIATRNYRKHITKDLDRLTDACRQCNSASETIQHITGACKNLVQTDYKHRHDQVASIIHQHLAHSSNFIQKKVAYYKYKPETVLENNKYKLYWDRTILTDKTIHFNRPDITLHDKYNNTAYIIDVAIPNTHNIQSTITHKLTKYRDLSIEIRSQWKIKTVHIVPIVLSSTGVIPKTLSNSLKTLNIHPLTTYNLQKATILNTCRIVRKFLTTSVTTTHSSSNDPFSLG

SEQ ID NO: 7532 - protein, 1355 aa, Oechydrus chersis
MQKQYKKSYNLRSRTGTYKGTNSLQSSRSDEVCGDTLTVNSSAVYMDYKAIGDSTRSASLDSLFSSPVSSPRSYEDPDIHVSSSTTSSPMSVDVVQEAIATHPEPTTDRLKRKRRRWTEEMNKFIWRTYLIATNLEKHTRGYLDQLHPKFIQKYPEMDTSRQRLGDQCRAITRNRLLPQIVLDDIRKQAALHLQSTTSHSQTLHETQNVSVSTRMKWTDDINEYIIRCYFEVTDMEKDMTAYRKKLHEKFKEHFPNLGHISEQRLADQRRTIINNKLLSMDKIQSIKKEVGSTLQQTHVLNNNTLQAKIKNTQNNINNNEKGNHNTTQIRSTHAILNQKEDEMNTTKHMEHNNYICQYIDKEFNKILKKLEKTDPTNRPFIPKQKTSRKLAIAVDCINRHILPKHLTPEMQFESVQTLIYIAAYTAAVYNNTKFCEKSNKVSIRKPLWQRRLESKIERLRSDIGKLTQYVKGNKSKKVIAAFKVIKEKYKIHAQFDDLNNEPNHFLDTLKQKLNTVASRLRRYVNCTNRKRQNSQFSNNESKFYRNLVSNRDQSHTPITSIPTSNDLQGYWETIWNNPAEHDKEANWLQNLSYAPDLPDMPFEHITEDTLAQVIKRTHNWKSPGTDHIHNYWYKKFTCLHSLIHKHINQFIQSPNTMPKYFTYGKTYMLPKDDDTGNPSKYRPITCLQTIYKIMSACISESIRSHLDEHNILAEQQKGCRKYSQGCKEQLTIDAVVMKQAFQKKRNIHSMFIDYRKAFDSVPHSWLLHVLNHYKIHPQIIKFLKISMLNWQTVLHLFNGHNTITTEPIRIQRGIFQGDALSPLWFCLAFNPLSELLNKSQAGFKLTYNNSHHTISHLMYMDDIKLYASSKKDLFKLADITQEFSKDIHMQFGIDKCKIHSVCRGRIQNTSYFLETGEKINAMDEHSTYKYLGFHQSKQIEHNTAKINLTEKFRYRLNRILKTQLNSRNLIKAINTFAIPILTYSFGIITWTQTELKKLQRIINTSLTTHRKHHPKSCIQRLTISRREGGRGVIDIVNLHNKQIHTLREFFHAKAQISDLHKYIADIDSKLTPLNLHNSNTQLKERIITTEEKMCAWAQKSLHGRHLTDLSQSHVDRKESNAWLKHGELYPETEAFMLAIQDQVINTANYRKHITKELAQQHDLCRYCKGASETIQHITGACKSLVQNDYKHRHDQVASIIHQYLAHACKFIQNKQPYYKYKPETVLENKTHKLYWDRTILTDKTIHNNKPDITLHDKEKKITYIIDIAVPNTHNIQSTISEKNSKYRDLAIELKTQWQAQNVHIIPIVLSSTGVIPKLLEKSLKTLNINTQITRNLQKAAILNTCRIVRKFLNTY

SEQ ID NO: 7533 - protein, 1247 aa, Aurina azines
MSVDVVQEADAAHPGPTAGYIKRKRRRWTEDMNKFIWRTYLIGTELEKHKRGYLDYLHSQFTQKYPEMDTTRQRLGDQCRAIVRNKLLPQVVLDNIKNQVATHLQSTDSQISIHHSQELHPTQNSSGLIRMKWSDNINECIMRLYFEVTDIEKDMTVYRRKLHDRFIEQFPHLNHISEQRLADQRRTIVHNKLLPVIKIQEIKREVELRLRLRSLNNNNIQQAALELSYTTDNETNEQQHNINTHHTQTQTTTGERQNRQELRIDTARNMEHESSMCQYIEEEFTIALKRFEKSNPTTRPFIPKQKPCRRLALVVDCINRHIFPKHLSPDLEYDTLQTLIYVAAFTGATCNDTRFDQNIKRDSVKKPAWQRRLESKIERLRAEIGKFTQFMKGNRSKKVIDAVEIIKEKYTTHAQFEDQNYEPVQFLDTLKQKLNTVASRLRRYLNCTKRKSQNSQFSNNEGKFYRNLVTHTEHTEITGTPSPNALQHYWANIWENPVEHNKEANWLQNLSNTSEISDMYFEQITENTFANIIKRIHNWKSPGTDHIHNYWYKKFTCLHSHILKHINQFIQSPSTMPAYITYGKTYMLQKDAESENPAKYRPITCLQTIYKIITACISESIYTHLDKYNILAEQQKGCRKNSHGCKEQLTIDAVVMKQACQKKRNIYSMYIDYRKAFDSVPHSWILQILSHYKIHPQIITFLETSMSNWQTVLNLTNKNCSITTEPIRIQRGIFQGDALSPLWFCLAFNPLSELLNQSRAGFKMTYNHTHHILSHLMYMDDIKLYASSKKDLYKLADITQTFSKDIHMEFGIDKCKIHSVNKGHVQNTNYYLESGEQIEAIDEHSSYKYLGFHQSKQIHQNTTKENLRSKFKFRLNRILKTQLNSRNLVKAINTFAIPLLTYSFGIIAWTQSDLKKLQRIINTSLTKYRKHHPKSCVQRLTMPRREGGRGLIDIVNLHNRQIHTLRQFFHTKSSVSDLHKYTVEIDSKLTPLNLHDRNTQSNEHLVNTEEKIAIWAGKSLHGRHHADLNQTYVDKNESNAWIKRGELFPETEAFMLAIQDQVINTLNYKKFITKELSNQSDQCRQCKGASETIQHITGACKALVQNDYKHRHDQIAAIIHQNLAHSYKFIPTKQPYYKYKPQSVFENSTHKLYWDRTILTDKTIHFNRPDITLHDKQKSIAYIIDIAVPNTHNLQSTISEKMTKYRDLAIELKTQWKVRTVHIIPIVLSSTGVVPKLLSTSLKSLHI

SEQ ID NO: 7534 - protein, 905 aa, Nicephellus nicephorus
MSIHNTQTQTYLTCDRQNEQGLQINTVRHMNHESSVCQYIEEEFIKGLKLFEKSNPPSRPFIPKQRTSRKLTVVVNCIIQHIFPKYLTPDMPFDTLQTLIYVAAFTAATYNDTRIGKQTNKDPIRKPNWQIRLETKIERLRSDIGKLTQFMRGNRSKKVIQAVEIINEKYKTHAQFEDLNNEPNQFLDTLKQILNTTASRLRRYLNCTKRKTQNSQFSNNESKFYRNLVTDSNSTETLGTPSSTALKHYWANIWEKPIEHNKEARWLRNLGGASEISDMQFEQITKNTLTQVIKRTHNWKSPGTDHIHNYWYKNFTCLHSLIHKHINQFIQSPHTMPAYITHGKTYMLHKDDETENPAKYRPIACLQTIYKIITACINESIYHHLEKYNILAEQQKGCRKHSYGCKEQLIIDAVAMKQAFKKKRNIHSMYIDYRKAFDSVPHSWLIHILRHYKIHPHIITFLETSMSNWQTVLNLTNNKHTITTEPIRIQRGMFQGDALGPLWFCLAFNPLSELLNKSKAGFKLSYNNSHHTLSHLMYMDDIKLYASSKKDLLKLADITQTFSKDIHMEFGIDKCKIHSVNRGRIENTNYYLETGEQIEAMDEHSSYKYLGFHQSTLIHQNFAKENLTKKFKFRLNRILKTQLNSRNLIKAINSFAIPILTYSFGIIAWTQSDLKKLQRIVNTSLTRHRKHHPKSCVQRLTLPRREGGRGLVDIVNLHNSQVRTLRQFFHKKASVSDLHKYTVDIDSKFTPLNLHDSNTQSNEQQISTQEKIDIWARKSLHGRHHTDLSQPHVDRNESNAWLKRGELFPETEAFMLAIQDQVISTANYKKFITKELAHQSDLCRQCKGASETIQHITGACKALVQNDYKHRHDQIAAIIHQHLAHTYKFISRKQPYYKYKPQTVF

SEQ ID NO: 7535 - protein, 1370 aa, Cephise aelius
MKNLRTQNTKKHFYNLRSVSGAHKRQCNNEELSRQDVIAQNVSSTMVTHAETSTRSSSPESLFPSVESSPRSYENSVQNQTRSATVSPMSEDVVQEASATYPVPTADNTKRKRLRWTEDMNRFLWRAYLVATEIGKHTRGYLDYLHSQFLQKYPEMDVSRQRLGDQCRAIIRNKLLPQTVLDDIKSEVVADIQSTTSQTQTHQSQILHTIQNLTGTTRMKWTDDINESIMSIYFEVTDIERDMTVYRKKLHERFIERFPHLQHISQQRLADQRRAIVYNKLLSTVKIQEIKREIEIKLQHSHNLNTTVNNTPFNNNIELSLLELTDNNDNELNAQQHGINAYHIQTDIHVTSERREELEISSARYMDHESSMCQYLEEEFMKVMKRFEKSDPTTRPYIPKQKSSRKFALVVHCINQHILPKHITPGISFDILQTLIYTAAFTAAICNGTKIDKNTNKESSKKPTWQRRLESKIARLRSDIGKLTQFTKGNKSQRVTDAFKIIKEKFKAHAQYEEFNYEPSQFLDTLKQKLNTTASRLRRYLNCTKRKNQNSQFSSNESKFYRNLVIDRDRIEATNVPSSAALKHYWANIWEKPVEHSKEANWLQNLSKASEIPDMHFEQVTVNTLTQVIKRTHNWKSPGTDHIHNYWYKKFTCLHPLIHKYINQFIQSPNTMPTYLTQGRTYMLHKGGERDNPAKYRPITCLQTMYKILTACIAESIYSHLNKYNFLAEQQKGCRKNSQGCKEQLTIDAVVMKQAFQNKRNIHSMYIDYKKAFDSVPHSWLLHTLNYYKIHPQIINFLETSMSSWQTVLNLKNNQHTITTEPIRIQRGIFQGDALSPLWFCLALNPLSELLNKSQVGFNLTYNNSNHILSHLMYMDDIKLYASSKKDLYKLADITQTFSKDIHMEFGVDKCKIHSVNKGRIQNTNYYLESGEQIQAMDEQSTYKYLGFHQSNYIHQNIAKENLIKKFKFRLYRILKTQLNSRNLIKAINTFAVPILTYSFGIITWTQSDLKKLQRIINTTLTKHRKHHPKSCVQRLTVPRREGGRGLIDIVNLHNNQVHLLRQFFHAKALTSDLHRYTVDIDSKFTPLNLHNRKTQPNEHLENIQNKLDIWARKSLHGRHHADLSQLHVDRNESNAWLRRGELFPETEAFMIAIQDQVINTANYKKFITKELAHQSDLCRQCKGASETIQHITGACKALVQNDYKHRHDQIAAIIHQYLAHTYNFIQQKQPYYKYKPQTVLENKTQKLYWDRTILTDKTIHYNRPDITLHDKQKSIAYIIDIAIPNTHNLQSTISDKMIKYRDLAIELKTQWQVQTVHIVPIVLSSTGVIPKLLSKSLKLLNIHPQVSRILQKAAILNTCRIVRKFLNIV

SEQ ID NO: 7536 - protein, 764 aa, Telemiades fides
MVTSEISDMHFQQITLHTLTQVIKRTQNWKSPGTDYIHNYWYKKFTCIYPIINKYINQFIQSPNTMPAYITHGKTYMLHKNSESENPANYRPITCLQTIYKIITACISESIYVHLEKYNILTEQQKGCRKYSYGCKEQLTIDAVVMKQAFQKKRNFYSMYIDYRKAFDSVPHSWLLDILRHYKIHPQIITFLETSMTNWQTVLNLSQNNNNITTEPIRIQRGIFQGDALSPLWFCLAFNPLSELLNKSQVGFKLTYNNSHHILSHLMYMDDIKLYASSKKGLYKLADITQAFSRDIHMEFGIDKCKIHSVNKGRIQNTNYYLETGQKIEAMDENSSYKYLGFHQSKQIHQNSAKEDLSNKFKFRLNRILNTQLNSRNLIKAINTFATPVLTYSFGIISWTQSDLKKLQRIINTSLTKHRKHHPKSCTQRLTLPRQIGGRGLIDIVNLHNSQVNTLRQFFHTKATISELHKYIVDIDSKFTPLNLHDRNTQPNEKIVNPHEKTEAWARKSLHGRHYADLSQTHVDKNESNAWLKHGDLFPETEAFMLAIQDQVINTANYKKYITKELAHQSDLCRQCKGASETIQHVIGACKAMVQTDYKHRHDQIASIIHQHLAYAYKFIHKKQPYYKYKPQTVLENTSHKLYWDRTILTDKTTHFNRPDITVHDKLNSTAYIIDIAVPNTHNLQSTISEKMSKYRDLAIELKTQWKVQTVHIVPIVLSSTGVIPKLLCKSLKSLNIHSHVSRLLQKAAILNTCRIVRKFLNIV

SEQ ID NO: 7537 - protein, 1412 aa, Tuta absoluta
MRLRNRVIPQVGPRPEVRESHPVPSGSGSPIVCEGGNISLSAQSSTVADHEKNLTPDFLTSNPSSPVSSTDILIHTNPYPIITSESNSRHLSAIASPPRVNIENIKNFSPNSSIESLYHTPNSSPHSFSHASRSSTLSPMSGGSEILQYGALRSITLSPLLVDVAQTAPADGTEPTTSKTGARKRWPEDVNKFIWRTYLILSKLETITRGYLDPLHREFTDKYPEYNASKQRVGDQRRAIIRNNLLPQNTLDAIKNEVSEFLQLEPQNLTTYSTGSGRIIWSEMNETVIRCYFEVTNNESDMTSYRQKMHQKFIEYYPNLSHLSEQRISDQRRVTVNSKLLTAERIQEIKQEVGRQLQIQNLTGSTLPGLCPSRLYEIETHDNIEETVYEEADTRRECAGSRTTNIDCEKIKNTFDEALNRFKHTDPTSRPYISKQKTSRKLASIVDYVNYDILPKHVNHEQDFQTLQTLIYVAAYTIATSNGSKVGTTSNTKSRRRKPVWQARLENKIQKLRKDIAQLTTYISGNTSLRVTAAVDKIKERYQVHALYEDPNTELSHFLDTLKQKLNVASSRLKRYKTCTERKQQNSQFSNNEKTFYRQVMQKIDNQQSTAGTPSLESLREYWAQIWENPVEHNKQAEWLRPIEQNANIPEMIFDHIPVETFIQVVKRTHNWKSPGSDHIHNYWYKKLTHVHPFLHTHINNFLQSPEIMPEYITHGKTYMLPKDTETNNPAKYRPITCLQTIYKIITACISETIYTHINDSDILHEEQKGCRKMSQGCKEQLIIDTTAMKQALTKKRSMYSMYIDYRKAFDSVPHSWLLDILTLYKIHPSIINFLKTSMKNWKTVLNIKQNESTLTTAPISIQRGIFQGDSLSPLWFCLALNPLSDMLIQSGAGFKLRLNNSHHILSHLLYMDDIKLYSSSKDELFKLADIVQQFSNDIHMHFGIDKCKINSINTSALRNCTYTLESGQQIEPMSEQDTYKYLGFQQANQIEQRETKLELTKKFRHRLNQILKTHLNSRNLTKAINTYAIPTLTYSFGIINWTQTELKTLQRTINTSLTKFRKHHPKSCYQRLTLPRLIGGRGIIDLQNLHNKQITSLRQFFHDRAETSTLHKYVAEIDRKLTPLNLHNRDRQKNEQITTTDQKLASWAQKSLHGRHRTELSQPYVDKDASNAWLKRGELFPETEGFMLAIQDQVVATRNYRKHITKDLDRPNDLCRQCNSVPETIQHVTGACKNLAQTDYKHRHDQVASIIHHHLAHSTKFIEKKTPYYKYKPETILENHKHKLYWDRTILTDKTVHYNRPDITFYDKNNRIAYLIDVAIPNSHNIQTTITEKLTKYRDLAIEVRTQWKAQTGHIVPIVLSSTGVIPKTLKDSLKTLKIHPNVCHTLQKAVVLNTCRTVRKFLTTSVTTDS

SEQ ID NO: 7538 - protein, 1454 aa, Tuta absoluta
MLNQHELLPPKGTGFLCRLTSRRLTLPNKRSQPQNPFFLIMDVNVKKRYSLRPLPGGRRGAPGAGAGCHSIRSTGGGGLSRRVPPEQNTTAETNRCPNIISPELNSPSPIFSPNRNNHDNSGNPSSLNSTIESLYVTPDSSPHSFSKKSNSSVSTLSPMSGDSDLLQFVARRSTTLSPLLIDVAQTARADGTEPTISKNGARKRWPEEVNKFIWRTYLIHSKLGTLTRGYLDIMQKEFNDKYPEYNASKQRIGDQRRSIINNKLLTQNSLDTIRSEVTELLQTGQHNTQTDRNEVLNSTGNCRIVWSEMNETVMRCYFEVTRNESDMTAYRKKLHQKFIEAYPHLSYLSEQRISDQRRVIVNNKLIPAERILEIKQQVGRQLEIEEVVDSIHNGQCPDSNQIEDEATSHEIEVEESGRAQNADEDREIRNTRRECSNLIEVNGKKIEEIFNQTLALFKNTDPTSRPFIPKQKTSRKLAAIVDYVNAEILKKHLNHDQSFQALQELIYIAAYTIASANGSKLGYSFSSQPHRKPSWQIRLENKIEKFRKDIARLTIYMSGNRSPRVVAAVDNIKERYGIHALYEDPNTQLSQFLDTLKQKLNVAANRLKRYMTCTERKKQNKQYKNNEKSFYRQLMHKPNQPAEKTATPPLESFREYWAEIWENPFEHNAHAVWLNNLKDKADLPEMSFSNIPVDTFINVIKRTHNWKAPGSDHIHNYWYKKLTSIHPFLHNHINTFLESPETMPKYITHGKTVMLPKDTDTKNPAKYRPITCLQTIYKIITACISEMIHTHISQHSILHEEQKGSRKHSQGCKEQLTIDTIAMKQALTKKRNLHCMYIDYRKAFDSVPHSWLLQILTIYKIHPVIITFLQASMQNWQTVLNIKLNETTLTTEPIYIRRGIFQGDALSPLWFCLALNPLSEILLQSGAGFKLQHNNSNYTLSHLMYMDDIKIYASSKKELFKLVDLVQEFSTDIHMQFGIDKCKIHSMNRGILQNNTYRLETGQLIESMNDQDTYKYLGFQQAKQIQQKETKVELIKKFRLRLNQILKTHLNSRNIIKAINSFAIPILTYSFGIINWTQTDLKTLQRTINTSLSKSRKHHPKSCYQRLTLPRAIGGRGLIDLQNLHNTQINTLRRFFHERAETSALHQYVTNVDHKLTPLNLNNRDRQINEKITTTEQKIASWAQKSLHGRHRTELSQPHVDKDASNDWLKRGELFPETEGFMLAIQDQVIATRNYRKYITKDLDRPNDLCRLCNSAPETIQHITGACKNLVQNDYKHRHDQVASIIHQHLAHSTNFIHKKSPYYKYNPDTVLENDKYKLYWDRTILTDKTLHYNRPDITLHDKDNKIAYLIDIAVPNSHNVKSNITEKLRKYHDLAIEIKTQWRVHTVHIVPVVLSTTGIIPKTLQNSLKTLKIHPHVSHTLQKAAILNTCRIVRKFLTTSVTTDFYSDPSSLG

SEQ ID NO: 7539 - protein, 1403 aa, Tuta absoluta
MESQNQRRYNLRSLPGGRRGTPGAGAGCSSMRTTGGGGLNRRVPPEKLMTADSTSIEVAPPCQHTAVTEREQVQATTNTSNPSSPISSIHSLFQSPSSSPNIFEYPFYSRSSTATPVSVDVELAAEANSLAPTAGTATGARKRWSDNVNKFIWRTYLIYSKLGTVSRGFLDPLHKDFTEKFPEFNASKQRLSDQRRAIINKKLLPENILDAIKIEVEEYLRTDGQEQITYQHMTQTITNTQGTGASTASTRLIWTDLNETVMRCYYEVTRNETDMTAYRKKMHQRFVEHYPHLSHLSEQRISDQRRVIVNNRLLTPDKLQEIRREVQIQMQIEEIREEGSLCQSSLYTTGNLTQINTEETEENNDIAYSTPNTNTIQTSSLNESEFRNIHQTIDCAKIEQIFNETLDKFKNTDPITRPYIPKQRTSRKLAIIVDFIDKNILPKYLNHDQLFSELQTLIYVSAYTTAVINGSKIGTHSITQRSEPPWQKRLKSKIQKLRSDIGRLTQYISGNRSDRIVSAVEDIKSRYQVHASYENSNTELNEFLDTLKQKLNVTASRLRRYLTCTQRKTQNNQFQNNEKLFYRNLENKNQHSQTPTDTPSLQMMHEYWANIWGNPIQHNENAEWMDKITPINTEMPFDLIPVDTFIKVIKNTHNWKSPGSDHIHNYWYKKLTSTHPYLHNHMHNFIQTPDSMPKYITYGITHMLPKDSDTANPAKYRPITCLQTIYKIITACISKVIYNHINEHNLLAEQQKGCRKNSQGCKEQLTIDTIAMKQDQKSKRNIYSMYIDYRKAFDSVPHSWLLQILKIYNINPTLVKFLQTSMKNWQTVLNVRQNNSTLTTEPIRIQRGIFQGDALSPLWFCLALNPLSTLLNDSGIGFKLKNNNSHHTLSHLLYMDDIKLYASNKAELFKLTDITQVFSNDIHMEFGIDKCKIHAIDKGKLLNITYTITTGQQIESMNDTDTYKYLGFHQSNQIHQKETKTELIKKFKHRLNQILKTHLQARNMIKAINTYAIPILTYSFGIISWSKTGLITLQRLINTSLTKSRKHHPKSCFQRLTLPRQLGGRGIIDMQNLHNRQIATLRHFFHTKADTSILHQYVNEIDQMFTPLNLHDRTRQPNETITTTDQKISSWTQKALHGRHQADLSQPYVDKDTSNNWLKYGDLFPETEGFMLAIQDQVIATRNYRKHISKDLGQASDLCRHCNSASETIQHITGACRALVQSDYKHRHDQVASILHQHIAHNTNFINKKTAYYKYKPETVHENSRYKLYWDRTILTDKTIHFNRPDVTLHDKVNKTAYIIDIAIPNTHNIQQTITDKLTKYQDLAIEIRTQWRVQTVHIVPIVLSSTGVIPKTLNNSLKSLNAPKHLIRTMQKAVVLNTCRIVRKFLTSSVITAPSTDPITLG

SEQ ID NO: 7540 - protein, 801 aa, Tuta absoluta
MMHEYWANIWGNPIQHNENAEWMDKITPINTEMPFDLIPVDTFIKVIKNTHNWKSPGSDHIHNYWYKKLTSTHPYLHNHMHNFIQTPDSMPKYITYGITHMLPKDSDTANPAKYRPITCLQTIYKIITACISKVIYNHINEHNLLAEQQKGCRKNSQGCKEQLTIDTIAMKQAQKSKKNIYSMYIDYRKAFDSVPHSWLLQILKICNINPTLVKFLQTSMKNWQTVLNVRQNNSTLTTEPIRIQRGIFQGDALSPLWFCLALNPLSTLLNDSGIGFKLKNNNSHHTLSHLLYMDDIKLYASNKAELFKLADITQVFSNDIHMEFGIDKCKIHAIDKGKLLNITYTIATGQQIESMNDTDTYKYLGFHQSNQIHQKETKTELIKKFKHRLNQILKTHLQARNMIKAINTYAIPILTYSFGIISWSKTGLITLQRLINTSLTKSRKHHPKSCFQRLTLPRQLGGRGIIDMQNLHNRQIATLRHFFHTKADTSILHQYVNEIDQMFTPLNLHDRTRQPNETITTTDQKISSWTQKALHGRHQADLSQPYVDKDTSNNWLKYGDLFPETEGFMLAIQDQVIATRNYRKHISKDLGQASDLCRHCNSASETIQHITGACRALVQSDYKHRHDQVASILHQHIAHNTNFINKKTAYYKYKPETVHENSRYKLYWDRTILTDKTIHFNRPDITLHDKVNKTAYIIDIAIPNTHNIQQTITDKLTKYQDLAIEIRTQWRVQTVHIVPIVLSSTGVIPKTLNNSLKSLNAPKHLIRTMQKAVVLNTCRVVRKFLTSSVITAPSTDPITLG

SEQ ID NO: 7541 - protein, 1418 aa, Tuta absoluta
MEHNKSKYNLRSLPGGRRGAPGAGARCLSTRDTGDEELSRRAPVTQYATAGRRELNRRAHDEDVTADSSGDDTSSLFSSIPSTCPSYMTRRSSTLSSTSTLSDDMLVFNTNTPQLADERSTTRSPLSVDVAQEAEADKPAPTTTRQSARKRWPENVNRFIWRAYLIYSKLGTLTRGYLDALHQDFTQKFPEFNASKQRVGDQRRSIVNNRLLSQNILDEIKTEVTEYLQYSCQHQSTQQPDDNRTQTFQQTDITGKTRLIWTTEMNETVMRSYYEVTLNETDLTAYRKKLHEKFLTRYPNLSFLTEQRVSDQRRVIITNKMIPTDRLDEIRRDVDNSTLAENDNLTENTNFSHIPQFDNNIEPTVNRIETLNETITKELNEHTTESLRCTDITRSREQKESDNQKIETSFHQAFERFKDTEPTSRPYIPKQNSSRKLASIVDFIDKNILPKYLHIDIDFMTLQTLIYVSAYTTASCNGSKLETNLTNRHQSLRKPKWQIRLENKVARLRTDISHLTKFVQGNHSPRVIAALDNIKSRYQIHATFEQPNTKLTEFLDTLKQKLNVAASRLRRYLKCTDRKSQNSQFKSNEQNFYRNLAQRHQRNDTSTNSNTPSPHALRQYWANIWENPVQHNIDTEWLKNISDPSYTEMEFDHVQVDIFKKVISRAHNWKAPGTDNIHNYWYKKLTTIHPHIHNHINKFIQSPDSLPAYITQGKTYMLPKDTDTLNPAKYRPITCLQTIYKIITACISETIYTHLNEQNIMAEQQKGCRKGSQGCKEQLIIDAVAMKQALRRNRNMYAMYIDYRKAYDSVPHTWLLHVLTLYKIHPMIIEFLKITMQKWQTILNLKHNNSTLTTEPIPIQRGIFQGDALSPLWFCLVLNPLSKLLNEAQIGFKLKVQQSNHVLSHLLYMDDIKLFATNKSELFKLADITQEFSNDIRMQFGIDKCKIHSINKGKLQDNTYILDNGEKVESLNEHDTYKYLGFQQSRQIHHKTTKVELTKKFRHRINLILKSHLNSRNIVKAINTFAIPVLTYSFGVINWSKADLVKLQRTINTSLTKFRKHHPKSCVERLTLPRTEGGRGLIDIQNLHNKQIMTLRKYFHSKTESSPLHKYITEIDDKMTPLNLRTKVSQQNEQLVSKEQKIANWTQKSLHGRHRSDLSQTHVDKDSSNAWLKRGELFPETEAFMLAIQDQVVATRNYRKYITKDLGHQSDVCRRCHSSSETIQHITGACKALVQTDYKHRHDQVASIIHQHLAVSCKFQDKKEPYYKYKPATVLENSNYKLYWDRTILTDKTIHFNRPDITLHDKQTKTAYLIDIAIPNTHNIQTTITQKLSKYQDLAIEIGRQWQVRTTHIVPIVLSSTGVVPKTLKSSLNTLNISLQIINTLQKATILNTCRITRKFLATSVTSSILNTDPISLG

SEQ ID NO: 7542 - protein, 1418 aa, Tuta absoluta
MEHNKSKYNLRSLPGGRRGAPRAGARCLSTRDTGDEELSRRAPVTQYATAGRRELNRRAHDEDVTADSSGDDTSSLFSSIPSTCPSYMTRRSSTLSSTSTLSDDMLVFNTNTPQLADERSTTRSPLSVDVAQEAEADKPAPTTTRQSARKRWPENVNRFIWRAYLIYSKLGTLTRGYLDALHQDFMQKFPEFNASKQRVGDQRRSIVNNRLLSQNILDEIKTEVTEYLQYSCQHQSIQQPDDNRTQTFQQTDITGKTRLIWTTEMNETVMRSYYEVTLNETDLTAYRKKLHEKFLTRYPNLSFLTEQRVSDQRRVIITNKMIPTDRLDEIRRDVDNSTLAENDNLTENTNFSHIPQFDNNIEPTVNRIETLNETITKELNEHTTESLRCTDITRSREQRESDNQKIETSFHQAFERFKDTEPTSRPYIPKQNSSRKLASIVDFIDKNILPKYLHIDIDFMTLQTLIYVSAYTTASCNGSKLETNLTNRHHSLRKPKWQIRLEKKVARLRTDISHLTKFVQGNHSPRVIAALDNIKSRYQIHATFEQPNTKLTEFLDTLKQKLNVAASRLRRYLKCTDRKSQNSQFKSNEQNFYRNLAQRHQRNDTSTNSNTPSPHALRQYWANIWENPVQHNIDTEWLKNISDPSYTEMEFDHVQVDIFKKVISRAHNWKAPGTDNIHKYWYKKLTTIHPHIHNHINKFIQSPDSLPAYITQGKTYMLPKDTDTLNPAKYRPITCLQTIYKIITACISETIYTHLNEQNIMAEQQKGCRKGSQGCKEQLIIDAVAMKQALRRNRNMYAMYIDYRKAYDSVPHTWLLHVLTLYKIHPMIIEFLKITMQKWQTILNLKHNNSTLTTEPIPIQRGIFQGDALSPLWFCLALNPLSKLLNEAQIGFKLKVQQSNHVLSHLLYMDDIKLFATNKSELFKLADITQEFSNDIRMQFGIDKCKIHSINKGKLQDNTYILDNGEKVESLNEHDTYKYLGFQQSRQIHHKTTKVELTKKFRHRINLILKSHLNSRNIVKAINTFAIPVLTYSFGVINWSKADLVKLQRTINTSLTKFRKHHPKSYVERLTLPRTEGGRGLIDIQNLHNKQIMTLRKYFHSKTESSPLHKYITEIDDKMTPLNLRTKVSQQNEQLVSKEQKIANWTQKSLHGRHRSDLSQTHVDKDSSNAWLKRGELFPETEAFMLAIQDQVVATRNYRKYITKDLGHQSDVCRRCHSSSETIQHITGACKALVQTDYKHRHDQVASIIHQHLAVSCKFQDKKEPYYKYKPATVLENSNYKLYWDRTILTDKTIHFNRPDITLHDKQTKTAYLIDIAIPNTHNIQTTITQKLSKYQDLAIEIGRQWQVRTTHIVPIVLSSTGVVPKTLKSSLNTLNISLQIINTLQKATILNTCRITRKFLATSVTSSILNTDPISLG

SEQ ID NO: 7543 - protein, 1042 aa, Plutella xylostella
MSQSPNILHSDLDHQNTSTVTHNCLPVVDQNIIAQKFEETLRQFTNTEPTSRPRIPKQKTSKKLAQIVDYINSNILPMHVSHEQDFMTLQTLIYTGAFTAAICNGSKVNLDGNSSENNQVKPKQKPPWQKRLEGNIEQIRSDLGRLTEYMRGNRSPRVVSAVERIKIKYKIHAQYEDPNTDLNHYLDTLKQKLNTKASRLKRYLTCTNRKKQNALFDNNEKTFYRNLNENNTTNQPTDDTPTKQDLHEFWANIWERPVQHNNNTDLTHEPSELPEMQFENISPGTLIQVIKRTHNWKSPGSDNIHNFWYKKFTATHPYIHSHINKFIQSPDTLPEYITHGVTHMLPKDKEDTKNPAKYRPITCLQTIYKILTGCIKEVIYGHLIEHSILAEEQKGCRKFSQGCKEQLIIDSVAMKQALKKKKNIHTMYIDYRKAFDSVPHSWLLQVLTQYKIHPTIIEFLKTSMQKWQTVLTIRQNGASVITEPINIQRGIFQGDALSPLWFCLALNPLSNLLNKTKTGYELTHENSSFNLTHLMFMDDIKIYASNKTGLFKLADITQTFSNDIQMQFGIDKCKIHSIERGKLLPTTYTLDSGEVIEPLDDNSTYKYLGFHQSRQIHHKSTKYELTKKFKHRLNLILKSHLNSRNLIKAINTFAIPILTYSFGVISWSKTDLTKLQQIINTHLTKHRKHHPKSAIQRLTLPRSEGGRGIIDIQNLHNTQISNLRKYFHHNAQTSTLHEFINKIDDKYTPLNLKNRNTQINEKVSTLQNKISAWSQKSLHGRHRAELNQAHVDKSESNSWLKRGELFPETEAFMLAIQDQVIATKNYRKYITKELNNQPDMCRHCNSASETIQHITGACKALIQTDYKHRHDQVAAIVHQNLIHRYQFISKKSPYYKYKPSTVNENDLCKIYWDRTILTDKTVHYNRPDITLHDKNTNTVFLIDIAIPNSHNIQKTISEKLSKYKELAIEVKTQWKVHAVHIVPIVLSSTGIIPKTLKNSLEILKIPLYTIHLLQKATILNTCRITRKFLTSSSCITDPVTFG

SEQ ID NO: 7544 - protein, 1514 aa, Plutella xylostella
MHVSTYNNNNNNKPLTNLTPRPARPPVPREGRTLASFNDIIYSPAANGDLVIIMVAERETKLPQAGPSVNSAGQSRSGPRGPGCPSYSGGGNGPLIRVTRSSSRSSPLLAEEPQSTEDFTGPSTRRYNLRSLPGGRRGTPGADAGCHSMRTIGSEELSRRALTGDEPEDTTADNPPPPPSPTSTHSLFTSPDSSPHSHYTRTSSTQGSSRRTSTSSTPSFMPVNVVQEANANTPAPITGNKRTRQKWSEEMNVFIWRAYLKITNLEQNTKTYLQQLHEQFNQQFPTMQASRQRIGDQRRAILYNKLLSQSILDQIRNEVQTELKTGPQTCTQLTSQDLSNTRMRWSDELNVAIIKIYYTVTKLETNKTAYRQMLHTQFIQQFPYLSHLSEQRIADQRRVIMFNRLIPESEIESIKRDVELELQDISQYENSSVSCLDQQLSPEANENTDVERSSLQQQHEIEFNVSITPFEMSQSSNILHPDLDHQNTSTLTHNCHPIVDHNIIEQKFEETLRQFTNTEPTSRPRIPKQKTSKKLAQIVDYINSNILPMHVSHEQDFMALQTLIYTGAFTAAICNGSKVNLDDNPSQHNLDKPKQKPPWQKRLEGNIEQIRSDLGRLTEYMRGNRNPRVVSAVERIKIKYKIHAQYEDPNTELNHYLDTLKQKLNTKASRLKRYLTCTNRKKQNAQFDNNEKTFYRNINENNSTTTHQSTDDTPTKQDLHEFWANIWERPVQHNNNTDLTNEPSELPEMQFENISPDTLIQVIKRTHNWKSPGSDNIHNFWYKKFTATHPYIHNHINKFIQSPDTLPEYITHGVTHMLPKDKDDTKNPAKYRPITCLQTMYKILTGCIKEVIYGHLMEHSILAEEQKGCRKFSQGCKEQLIIDSVAMKQALKKKRNIHTMYIDYRKAFDSVPHSWLLQVLTQYKIHPTIIEFLKTSMQKWQTVLTIRQNGASVITEPINIQRGIFQGDALSPLWFCLALNPLSNLLNKSNTGYKLTLENSSFNLTHLMFMDDIKIYASSKTGLFKLADITQTFSNDIQMQFGIDKCKIHSIERGKLLPTTYTLDSGEVIEPLDDNSTYKYLGFHQSRQIHHKSTKYLLTKKFKHRLNLILKSHLNSRNLIKAINTFVIPILTYSFGVISWSKTDLTKLQQTINTHLTKHRKHHPKSAIQRLTLPRREGGRGIIDIQNLHNTQISNLRKYFHHNAQTSTLHEFISKIDDKYTPLNLKSRNTQINEKVSTLENKISAWSQKTLHGRHRAELNQPHVDKSESNSWLKRGELFPETEAFMLAIQDQVIATKNYRKYITKELNNQSDMCRHCNSASETIQHITGACKALVQTDYKHRHDQVAAIVHQNLIHRYQFIPKKSPYYKYKPSTVNENDLCKIYWDRTILTDKTVHYNRPDITLHDKNTNTVFLIDIAIPNSHNIQKTISEKLSKYKELAIEVKTQWKVRTVHIVPIVLSSTGIIPKTLKNSLEILNIPLHTIHLLQKATILNTCRITRKFLTSSCITDPITFG

SEQ ID NO: 7545 - protein, 1298 aa, Plutella xylostella
MPVNVVQEASANTPAPITGNKRTRQKWSEEMNVFIWRAYLKITNLEQNTKTYLQQLHEQFNQQFPTMQASRQRIGDQRRAILYNKLLSQSILDQIRNEVQTELETGPQISTQLTSQDLCNTRMRWSDELNVAIIKIYYTVTKLETNKTAYRQMLHTQFIQQFPYLSHLSEQRIADQRRVIMFNRLIPETEIESIKRDVELELQDISQDAQQYENSSVSCLDQQLSPEANENTDVERSSLQQQHEIEFNDSSTPFEISQPSNILHPDLDHQNTSTLTHNCHPIVDHNIIEQKFEETLRQFTNTELTSRPRIPKQKTSKKLAQIVDYINSNILPMHVSHEQDFMDLQTLIYTGAFTAAICNGSKVNLDDNPSQHNLDKPKQKPPWQKRLEGNIEQIRSDLGRLTEYMRGNRNPRVVSAVERIKIKYKIHAQYEDPNTELNHYLDTLKQKLNTKASRLKRYLTCTNRKKQNAQFDNNEKTFYRNLNENNSTTTHQSTNDTPTKQDLHEFWANIWERPVQHNKNTDLTHEPSELPEMQFENISPDTLIQVIKRTHNWKSPGSDNIHNYWYKKFTATHPYIHNHINKFIQSPDTLPEYITHGVTHMLPKDKDDTKNPAKYRPITCLQTMYKILTGCIKEVIYGHLMEHSILAEEQKGCRKFSQGCKEQLIIDSVAMKQALKKKRNIHTMYIDYRKAFDSVPHSWLLQVLSQYKIHPTIIEFLKTSMQKWQTVLTIRQNGASVITEPINIQRGIFQGDALSPLWFCLALNPLSNLLNKSNTGYKLTLENSSFNLTHLMFMDDIKIYASSKTGLFKLADITQTFSNDIQMQFGIDKCKIHSIERGKLLPTTYTLDSGEVIEPLDDNSTYKYLGFHQSRQIHHKSTKYLLTKKFKHRLNLILKSHLNSRNLIKAINTFAIPILTYSFGVISWSKTDLTKLQQTINTHLTKHRKHHPKSAIQRLTLPRREGGRGITDIQNLHNTQISNLRKYFHHNAQTSTLHEFISKIDDKYTPLNLKSRNTQINEKVSTLENKISAWSQKTLHGRHRAELNQPHVDKSESNSWLKRGELFPETEAFMLAIQDQVIATKNYRKYITKELNNQSDMCRHCNSASETIQHITGACKALVQTDYKHRHDQVAAIVHQNLIHRYQFIPKKSPYYKYKPSTVNENDLCKIYWDRTILTDKTVHYNRPDITLHDKNTNTVFLIDIAIPNSHNIQKTISEKLSKYKELAIEVKTQWKVRTVHIVPIVLSSTGIIPKTLKNSLEILNIPLHTIHLLQKATILNTCRITRKFMTSSCITDPITFG

SEQ ID NO: 7546 - protein, 1466 aa, Plutella xylostella
MVAERKTKLPQAGPSANSAGQSRTGPRGSGCPSYSGGGNGPLIRVTRSSSRSSPLLAEEPQSQGTEDINEPSTRRYNLRSLPGGRRGTPGADAGCHSMRTIGSEELNRRALAGNKPEDTTADNPPPPPSPTSTHSLFTSPDSSPHSHYTRTSYTQGSSRRTSTSSTPSFMPVDVVQEANANTPAPITGNKRTRQKWSEEMNVFIWRAYLKITNLEQNTKTYLQQLHEQFNQQFPTMQASRQRIGDQRRAILYNKLLSQSMLDQIRNEVQTELETGPQTCTQLNSQDLNNSRMRWSDELNVAIIKIYYTVTKLETNKTAYRQMLHTQFIQQFPYLSHLSEQRIADQRRVIMHNRLISESQIETIKRDVELELQDISQDQYENSSVSCLDQRLSPEANENTDVERSSLQQQHEIEFNDSITPFEMSQSSNILHPDLDHQNTSTLTHISHPIVDHNIIEQKFEETLRQFTNTEPTSRPRIPKQKTSKKLAQIVDYINSNILPMHVSHEQDFMALQTLIYTGAFTAAICNGSKVNLDGNPSQHNLVKPKQKPPWQKRLEGNIEQIRSDLGRLTEYMRGNRNPRVVSAVERIKIKYKIHAQYEDPNTELNHYLDTLKQKLNTKASRLKRYLTCTNRKKQNAQFDNNEKTFYRNLNENNSTTTHQSTDDTPTKQDLHEFWANIWDRPVQHNKNTDLTHEPSELPEMQFQNISPDTLIQVIKRTHNWKSPGTDNIHNFWYKKFTATHPYIHNHINKFIQSPDTLPEYITHGVTHMLPKDKDDTKNPAKYRPITCLQTMYKILTGCIKEVIYGHLMEHSILAEEQKGCRKFSQGCKEQLIIDSVAMKQALKKKRNIHTMYIDYRKAFDSVPHSWLLQVLTQYKIHPTIIEFLKTSMQKWQTVLTIRQNGASVTTEPINIQRGIFQGDALSPLWFCLALNPLSNLLNKSKTGYKLTHENSSFNLTHLMFMDDIKIYASNKTGLFKLADITQTFSNDIQMQFGIDKCKIHSIERGKLLPTTYTLDSGEVIEPLDDNSTYKYLGFHQSRQIHHKSTKYQLTKKFKHRLNLILKSHLNSRNLIKAINTFAIPILTYSFGIISWSKTDLTKLQQTINTHLTKHRKHHPKSAIQRLTLPRREGGRGIIDIQNLHNTQISNLRKYFHHNAQTSTLHEFISKIDDKYTPLNLKSRNTQLNEKVSTLENKISAWSQKTLHGRHRAELNQPHVDKSESNSWLKRGELFPETEAFMLAIQDQVIATKNYRKYITKELKNQSDMCRHCNSASETIQHITGACKALVQTDYKHRHDQVAAILHQNLIHRYQFIPKKSPYYKYKPSTVNENDLCKIYWDRTILTDKTVHYNRPDITLHDKNTNTVFLIDIAIPNSHNIQKTISEKLSKYKELAIEVKTQWKVRTVHIVPIVLSSTGIIPKTLKNSLKILKIPLHTIHLLQKATILNTCRITRKFLTSSSCITDPITFG

SEQ ID NO: 7547 - protein, 1348 aa, Caltoris sirius
MRLRNRVIPQAGTHQGESRPEPSGSGCPAYSGGGNASHTAQYDTVAVDNNIPSTRSTSPESLFPSLPSSPRSYEDEIRHSGSTTPTSVFVSSPEHIPVDVVQKANANISVPTIGKSIRTRRRWTEDMNKFIWRTYLIVTELDKNPRGYLDHLHPQFTQRYPEMNVSRQRLGDQYRSILRNKLLPQEVLDSIKNEVEILLSSTTSQIYLKTPSDNSIGTKRMRWSNDINEFIIRSYFEVTEVEKELTAYRKKLHEKFLEKFPSLNHVSEQRISDQRRIIMRNKLLSEDKIQEIKRTVELQIQQINISSQHTPHEYIYSDNSNQTQENLTHEEDITQDTQTDDNRHIEHKDMAYIEHLFKKILERFENISPDSRPFIYKQKTSRKLTAVVDCINNHILPKYLKPDIQFDFLHTLIYVTAFTVATYSGSRIDNHIIQGPKYKPAWQTRLECKITELRKQIGRLTQFIKGNRSKKVVTAVENIKLKYKSHAQFEADNREINQFLDTLKQKLNVTASRLRRYLKCTNRKIQNKQFYNNESKFYKNFLNSNNQSVESIGTPTSEELKHFWGNIWEHPVEHNKDANWLKELTKTNQVPDMQFEHITENTVTQVIKRTHNWKAPGTDHIHNYWYKKLTCTHSYIHRHINSFIKSPSTMPKYLTHGKTYMIPKDNDTKNPGNYRPITCLQTIYKIITACISDSIKTHLEKYNILAEQQKGCRKYSYGCKEQLTIDSVIMKQAVHKKRNIHCMYVDYRKAFDSVPHSWLLYTLHYYKIHPQLISFLESSMKNWQTILTLTVGNITTITNPIRIQRGIFQGDALSPLWFCLAFNPLSEILNKSPAGFKLTYEKSHHVISHLMYMDDIKLYASNETELFTLADLTQAFSIDIHMQFGIDKCKINSVNKGRILNTCYHLQSGELIEAIDKYSSYKYLGFHQSQQIHQKTTKSDLIKKFKYRLNQILRTQLNSRNTIKGINTFAIPILTYSFGIIHWSSTDLKKLQRITNTNLTKHRKHHPKSCIQRLTIPRREGGRGLIDILNLHNSQINILRRFFHSKAQRSDLHKYVVNIDKKLTPLNLHDKTTQRNEHLVSIREKTSIWAQKALHGRHYTDLTQSHVDKSESNAWLRRGELFPETEAFILAIQDQVISTANYKKHITKECALQSDLCRRCKGASETIQHITGACKSLVQTDYKHRHDQIASIIHQHLAHTYSFIPKKQPYYKYKPDTVVENKEYKLYWDRTILTDKTIHYNRPDITVHDKQNMTAYIIDIAIPNTHNLQSTIAQKITKYRDLAIELQTQWQVSTVHIVPIVISTTGVIPKHLYNSLNLLNIKKQVSQILQKAAILNTCRIVRKFLNIS

SEQ ID NO: 7548 - protein, 1382 aa, Ochlodes sylvanus
MESRLKSKRLGPLPGGNRRGTPGADAGCFSMRTVGGEELNRRAPSGSPEHVTANQINSNRKLPSRYNLRSRSHTISNLQPNQINSQSEIATRSSSPESLFPSLPSSPCSYEDRLENQSGSSTSTPVPIDVVQQANAANVAPTTGKIMRTRRRWTKEINEFLWRTYLIATELEKNPRGYLDYLHPQFIQKYPDINVSRQRLGDQCRAIVRNKLLHQEVLDKIRQEVTLLLQTNDSQVYEPPPNNDLGSNRMRWSNDINEYIIRSYFEVTEAEKELTAYRKKLYEKFQEKFPHLPHISEQRVADQRRSIICNKLLSASRIQEIKKEVEMQILIQQTSVLSEHATDEYIYNDSHDHPQQLQTDNTYTEQTHQEMVVDRINYIEHKNRDYIKHKFKEFIDRFDNTNPLSRPFIPRQKVTRKLAVAVDYINKSILPEYLLPDVTFDHLQTLIYVTAFTVATYNGAKMDTCAIRSQKSKPAWQKRLEGKVVELRSDIGRLTQFINGSRGRKVCRTVDRIKEKYKLHAQFEDNNNDLPQFLDTLKQKLNVTASRLRRYLKCTKRKSQNIQFANNESKFYKTILNDIDQPVKTKDTPTSNELKHFWGNIWENPVEHNRNAIWLEELHNTQQIPEMQFERITENTMLQVINRLHNWKSAGTDQIHNFWYKKLTSTHTHILKHINLFIQSPSTMPKYLTHGKTYMLPKDSDTKNPANYRPITCLQTIYKIITACISESIKTHLMNHNVLAEQQKGCRKHSHGCKEQLTIDAVVMKQAFHKKRNIHSMFIDYKKAFDSVPHSWLLYILDYYKIHPQLISFLEASMSNWQTELNVNINNTTITTEPIHIQRGIFQGDALSPLWFCLALNPLSELLNKTQVGFKLIYKGTHHVLSHLMYMDDIKLYASNKKELFTLADLTQTFSNDINMQFGVDKCKIHSVNKGQIINTSYRLDSGELIEAIDEHSSYKYLGFHQSRQIHQKTTKLNLINKFKFRIDHILKTQLNSRNTVKAINAFAIPILTYSFGIISWSVTDLKKLQRMINTSLTKHRKHHPKSCIQRLTLPRLEGGRGLIDILNLHNSQVNILRRFFHTKSLTSDLHKYIVDIDEKLTPLNLHDRATQTNEQIVCVQDKSATWAQKSLHGRHYADLNQPHVDKSESNAWLKHGDLFPETEAFMLAIQDQVISTANYRKHITKELALQSDLCRRCKGAPETIQHITGACKSLVQNDYKHRHDQVACIIHQHLAHTYKFIPKKQPYYKYKPQSVLESKTHKLYWDRTILTDKTVHFNRPDITVHDKLNMTAYIIDIAIPNTHNLQTTISEKLTKYRDLAIELQTQWQVQTVHIIPIVLSSTGIIPKLLSKSLELLKIPAHISQTLQKAAILNTCRIVRKFLNVN

SEQ ID NO: 7549 - protein, 1378 aa, Thymelicus lineola
MESQLRIERLGPLPGGNRRGTPGADAGCFSMRTVSGEELNRRAPSGSPEHIIANQVNSNRKLPSRYNLRSRSHTQSDTNQINHQTEIDTRSTSPESLFSSLASSPRSYEDRLQNQSRSSTVTPALVDVVQEADATNLASTTGNKVRTRRRWTEEINKFLWRTYLIATELEKKPRGYLDYLHSQFTQKYPEINVSRQRLGDQCRAIVRNKLLHQKTLDSIRREVVLLLQSNDPTHQSQSNNDLLGSTRMRWSNEMNEFIIKSYFEVTEVGKELTAYRKKLHEKFQEKYPHLLHLSEQRVADQRRSIIHNKLLSADRIQEIKQDVELQKQQTHIFTQHTSQEVINNDNHHNIQPTQANNTYTEQTEEENITDRVNYMEHKNRIYIKNKFHEFLERFENTDPVSRPFIPKQKISRKLAVAVEYLNKSILPQFLTPDTQFDYLQTLIYVTAFTAATYNGARMDNGVVKYQKSKPAWQKRLENKIEQLRSDIGRLTQFISGNRSKKVRKTVERIQEKHKLHAQFEDKNCDLSQFLDTLKQKLNVTSSRLRRYLKCTKRKSQNGQFINNESKFYKNFLNNKEQSTITRDTPTPDELKHFWGNIWENPVEHNKDANWFNQLNNTNQIPEMQFESITENTLSEVIKHTHNWKSPGTDHIHNFWYKKLTSTHTHILKHINSFINFPSTMPKYFTHGKTYMLPKNSDTNNPANYRPITCLQTIYKIITACISESIKSHVMKYNILAEQQKGCRKYSHGCKEQLTIDSVVMKQALHKKRNIHSMYIDYRKAFDSIPHSWLLYILDYYKIHPQLVSFLETAMSNWQTVLNVNISNTRIITDPIRIQRGIFQGDALSPLWFCLAFNPLSEMLNKTQAGFKLIYKDTHHVLSHLMYMDDIKLYASNKKELFTLADVTQTFSNDINMQFGVDKCKIHSVNKGKILNINYHLESGELVEAMDEHSSYKYLGFHQSRQIHQKATKSELINKFKYRINQILKTQLNSRNTVKAINTFAIPILTYSFGIISWSPTDLKNLQRMINTSLTKHRKHHPKSCIQRLTIPRCEGGRGLIDILNLHNSQVHILRQFFHTKALISDLHKFIVNIDERITPLNLHDRTTQSNEQLVNIQEKTAIWAQKSLHGRHYADLNQPHIDKSESNAWLKYGELFPETEAFMLAIQDQVINTANYRKHITKELASQSDLCRRCKGAPETIQHITGACKSLVQNDYKHRHDQIASIIHQHLAHTYKFIPKKQPYYKYKPQSVLENRTHKLYWDRTILTDKTIHFNRPDITVHDKQNMTAYIIDIAIPNTHNLQTTLSEKLTKYRDLAVELQTQWHVQTVKIIPIVLSTTGVIPKLLNENLKLLKIPTYVSQTLQKAAILNTCRIVRKFLHIN

SEQ ID NO: 7550 - protein, 1476 aa, Parnara guttata
MRLRSNKRLPQAGTSNGESRPVPPSAGSPTYSGEGTVSFSLAQSRTVASHKTIIPSLQTPPISHTFNPSISNLTLKPHFSKNSFTPPTVLLNSSSIKVEQGKKDNVLACVKPTRYNLRSQSNTRLLSKPTQEEQRKSQLADHSRTSTRSTSPESLFPSLPSSPCSYEDKVVNQSRSMTSSPIPVDVVQKATRSTSPESLFPSLPSSPCSYEDINQLRSTTSSPIPIDVVQKAIASNSVPTIGKNKRLRQRWTDDMNKFIWRTYLIATDMDKNPRGYLDYLHPQFVQRYPEMNVSRQRLGDQYRSIIRNKLLPIEVLNDIKQEVQKHLGSITSELNTETLTINSIGTKRMKWSNNINEFIIRSYFEVTIVEKDLTAYRKKLHDRFLEKFPNLNHISEQRIADQRRIIIHNKLLSEDRIQEIKKEVEQKIQQSNISIQHTVHESRNTDNSIQTQSNIRHVVDTMQGSGTDNSRHIKHKDIAYIEDLFKNSFERFEKTNPESRPFIPKQKTSRRLAAVVNCINQSVLPKYLLPNTQFEVLQTLIYVTAFTAATYNGTKIDNQINRGPRCKPTWQLRLEYKIKQLRAQIGKLTQFIKGNRSKKIITAVENIKVRYKSHAQFEDHNHELHQYLDTLKQKLNVSASRLRRYLKCTNRKIQNSQFCNNESKFYKNFLNSSNHTKELSGTPTSEDLKKFWGSIWENPVIHNENAKWLKNLTHTNQIPDMLYEHVTENIVTQVIKRTHNWKAPGTDHIHNYWYKKLTCIHSHLHKHINTFIQSPTTMPGYLAHGKTYMLAKDNDTKNPANYRPITCLQTIYKIITACISELIKIHLEKHNILAEQQKGCRKNSKGCKEQLTIDSVIMKQTFYKKKNIHSMYIDYRKAFDSVPHSWLLYTLHYYKIHPQLIKFLESTMKSWQTILNLNHGNTTTTTDPIFIKRGIFQGDSLSPLWFCLAFNPLSEILDKSQAGFKLTYKDSHHVVSHLMYMDDIKLYASNKKELFILADLTEAFSTDIHMQFSIDKCKINSVSKGKILNTSYPLPSGGLIEAMDEYSCYKYLGFHQSRKIHHKSAKLDLIKKFKYRINQILRTQLNSRNIVKAINTYAIPVLTYSFGIISWSVTDLKKLQRIVNTTLTKHRKHHPKSCIQRLTISRREGGRGLIDILNLHNNQIHILRQFFHTKAQISDLHKHVVNVDEKFTPLNLHKRTTQYNEHLVSIQEKTSTWAQKALHGRHYIDLNQPHVDKNESNAWLRRGDLFPETEAFMLAIQDQVISTANYKKHITKELAQQSDLCRRCKGAPETIQHITGACKSLVQSDYKHRHDQVASIVHQHLAYTYKFIPKKQPYYKYKPETVLENKHYKLYWDRTILTDKTIHYNRPDITLHDKDNMTAYIIDIAIPNTHNLQSTIAEKMTKYRDLAIELQTQWQVRTVHIVPIILSSTGVIPKNLYNSLELLNMKKQISETLQKAAILNTCRIVRKFLNIN

SEQ ID NO: 7551 - protein, 1448 aa, Ernsta colotes
MRLRCRNRVPQAGTSNGESRPELTSSGSPTYSGGGTASLLLAQASTVASTSKQSSPVPSIPSSPISSTHSLFHSPSSSPNSFQNVPTSRSSTATPMSVDVEQEANAAGLVPTTGTKRARKHWTIEMNKFIWRTYLEITHLEKNTKKYLEPLYLKFTQTFPHMQVSKQRIGDQRRAIMNNKLLPTEVLEDIREQVSSALQVTTQQAPITDHTNQKIHSYQNHTNINLDKTQNSPANNLPAHSDSNILNPLRPKHTKTGKVRQRMQWTDEINNTLLKCYYIVTDNETNLTGYRPQLHKKFTELLPELDFLSEQRLSDQVRVIIRNNRIPESERTLIKSEVARLKHDTSIEITQQHKNESQPHTPNRTYADVTRNSPQLDQTGETIPSTVMEAQNPSEIHLTQIELTANSQHQIPRTEEVEINTTRRENKSFIEQTFIERIETIFKQALEDFRDTEPISRPYIPKQKSSRKLASVIDHINSKILPSHLSVDIEFDKLQTLLYTAAYTAAVSNGSKIEGQHNRHSSFKRAWQIRLEDKITKLRCDIGQLTHFIRGSKSQRVLKAVEDIRYRYNIHAQYENPNVELTDFLDTLKQKLNVKSSRLARYIKCSARKLQNRQFNSNEKNFYRNLTQNKHTQNTQINEMPPLESIKKYWSNIWENSVNHNEKAEWINTIRENDKIPEMRFDYISEETFIHIIKRAHNWKAPGTDNIHNFWYKKYTCIHPHLLNHINHFIQSPHTMPEFITHGRTYLLPKDANDIKNPSKYRPITCLQTIYKIITACISETIYSHLNSSEILAEQQKGCRKNSQGCKEQLIIDTVVMRQAMTRKKNIHTMFIDYQKAFDSVPHSWLLEVLKIYKIHPSLISFLETSMQKWQTALCLKQNGTDLTTEPIKIQRGIFQGDALSPLWFCLALNPLSKLLNDSAVGYKLTFNKTHHTLSHLMYMDDIKLYASNKEELFQLADITQGFSQDIHMQFGIDKCKIHSINKGKLENNIYTLDTGEHIESMSEHDTYKYLGFHQSKQIKQTETKNNLRKKFNLRLNQILKTHLNSRNIIKAINTFAIPILTYSFGIINWSQTDLAKLQRTINTQLTKYRKHHPKSCTQRLTLPRQEAGRGLIDIVNLHNSQISTLRQFFHSKAERSSLHDYVTKIDHKFTPLNLKERNTLSKEQITSKVQKMANWSQKSLHGRHHADLSQPHVDKEASNAWLTRGDLYPETEAFMLAIQDQVIATRNYKKHISKDLDKPTDLCRHCNSHPETIQHITGACKSLVQTDYKHRHDQVASIIHQELAFAYKFTMKKQPYYKYKPSTILDNNTCKLYWDRTILTDKTIHFNRPDITLHDKQNKIVYIIDIAIPNTHNLQSTIRDKLTKYQDLAIEIQTQWKVNTVHIVPIVLSSTGIIPKTLKNSLKTLNIPKHIIYLLQKATILNTCRITRKFLTSATVTSSCDDPAILG

SEQ ID NO: 7552 - protein, 1496 aa, Celaenorrhinus opalinus
MTNGALVIKYAMRLRNRQIPQAGPRERESRPGPAGSGSPIVSGGGAVSQSSAQYITVADQHLNQLHPTEDLPAKTTFKRNDISYPSSPILSTNRILRSSSSSSPSFINPSSCSSSSTSPILRSSSSSSPSFESPSSCSSSSTSPMSVSVEQEAKATTLVPTADTTKRARKHWTNEMNRFIWRTYLEIKLETNSKKYLEQLHKRFSEKFPHMNVTRQRIGDQKRSIINNKLLSLKELDEIKQEVQKTTPSQTQYTQTQHTQTHIPHININNQLSVNSTQSNLTNNIVTSMRPEKTKLGKSRQRMYWSDTVNRTLLKCYYKVTNNESDLSAYRPLLHKEFITLYPDLHFISEQRLSDQVRVIKRNNRIPPEEREQLKLQQSSDYIMSPITIDIQQTDHTLPIHVQTPALIHAEGTYTDIQTWNTRQFTPIAETRVSPGYLLDKTTHQTKSNYLTHSATTSISQNKQTSTHRSKILISLQKSNITPQKIEQNFKETLKQFKDTDPISRPYIPKQKTSRKFSWIVDEINSKILAKYLNSDIDYASLQTLIYVAAYTAAISNGTKIETRQNSNSRCKPSWQIRLETKIVKLRADIGQLSHYIAGCRSRRLIAAVENIKDRYQIHAQYENPNTDLTQFLDTLKQKLNVKASRLARYTTCSKRKLQNAQFKTNEKNFYRSLTHHQGHTNNSSVTTPSIESMREYWTGILGKSVRHNENAKWIDKIKQKINHLEMSFEMIPIDTFKKVIEKTHNWKSPGSDNIHNFWYKKLTSAHPYIHNYINQFIQSPHTMPQYITHGKSYLLPKDLNDTSNPAKYRPITCLQTIYKIMTACISKSVYSFLESNNILTEQQKGCRILSQGCKEQLIIDAVAMKQALNNKKKLHTMYIDYCKAFDSVPHSWLLEVLNIYKIHPIIITFLESTMKNWQTVLCLKQNNTTHISEPISIQRGIFQGDALSPLWFCLALNPLSVLLNDSAVGYRLTNNKSHHILSHLLYMDDIKLYASNKFDLFTLVDISQTFSNDIHMQFGIDKCKINVIGRTASDNSSYILENGKEIQTMEAHDTYKYLGFQQSRQIEQKETKCSLKNKFRERLNIILKSQLTSRNLIKAINTYVIPVLTYSFGIIKWSQADLHTLQRTINTTLTRHRKHHPKSCTQRLTLPRDEAGRGLIDIVNLHNKQISSLRQFFHTKSQTSQLHEYISSIDRRYTPLNLQDRNTQNIEHITSIKQKLADWSQKSLHGRYRADLSQSYVDKDASNAWLRRGDLFPETEAFMLAIQDQVIATRNYRKHITKDLDQATDLCRHCNRASETIQHITGACKSLVQTDYKHRHDQVAAIIHQEIAHNYKLIHNKLPYYKYQPMNVLDSNKCKIYWDRTILTDKTIHFNRPDIVVYDKQSETAHIIDIAIPNTHNIQATITDKLAKYQDLAIEIQRQWKAKKVHIVPIVLSSTGIVPKTLSNSLKTLNLPSYISNILQKATILNTCRITRKFLTSSIITSLDSNPSTLG

SEQ ID NO: 7553 - protein, 1415 aa, Theope publius
MRLRSTRILPQAGTGADRDGESRSEPSSSGCPTYSGGDTVSPPPAQSNTVAGRDQMLQNISRSLSPLSSNHSLFESPNSSHSFEIISNFSPRSSTISPMSVDVEQEAGAINLAPTTGTTRHKRKRWTNEMNTFLWQTYLIITNLEANTKKYLQPLHQQFIQKFPDMNVSRQGVGGQRRAIISNKLLSNEQLEQIRVNAIEILKTRNIGHSTNSQISHSQSQPTLSVQSNNLTLNTANFEQSSQILSNMKPQCTKAGIPRQRMQWTNEVNTELLKCYYKVTNNESNLTSYRPLMYKMFMERFPELHFLSEQRLSDQIRVIHRNNRIKPADRETIKTMVAQESSERLHNNIIGTEYIQQLNLHTQPDLDVQNQSQNNNNNLDLSSSNLNTIETEENVEEEPNSRYIQEKYSIDIGKIEQIFAETLQNFAETNPETRPYIPKQKTSKKLAVIVDYIDTEILPKYLNTDQEFSSLHTLIYVAGYTAAVSNGAKIKNTEIRQNSNTSKPKWQIRLENKIVKLRRDIGKLTQFIKGNRNPRILKAVDDIKDRYQIHAQFEDPNTQITEFLDTLKQKLNAKSSRLSRYLKCTQRKTQNATFRNNEKTFYRSLIQQRQAVAITESSEAPSPESLKNYWAGIWENSLQHNQDAKWINKDNQNIPEMPFESVSIDSLICIINRTHNWKSPGTDNIHNYWYKKYTSTHSYIHNHINKFIQSPSSLPEFITRGKTYMLRKDPNVNNPANYRPITCLQTIYKIITACISNTIYRHLEENSILTEEQKGCRKNSQGCKEQLIIDTVTMKQAVAKKRNICTMYIDYRKAFDSVPHSWLLQVLHLYKINPIIIQFLETSMKNWQTVLHVKEGQIFTTTEPIHIRRGIFQGDSLSPLWFCMALNPLSELLNNAKPGYKLTHNSTNHKITHLMYMDDIKLYADTKTELFSLADITQEFSKDIHMQFGVDKCKIFSIHKGKIENYSYTLQTGEQIEAMDAEATYKYLGFHQAKQINQKDTKQLLIKKFINRLHLLLKTQLNSRNIIKSINTYAIPILTYSFGIIIWSQTDLKKLQRLINTNLTKYRKHHPKSCTQRLTISRKEAGRGLIDLQNLHNTQISTLRQFFQKKSSTSTLHKFITHIDNKITPLNLRDAQKQPNETITTITQKFQAWRQKSLHGRHCADLGQPHVDKKASNAWLTRGDLFPETEAFMLAIQDQVIATRNYRKHISKNLDRPTDLCRHCSSQSETIQHITGACKTIAQTDYKHRHDQVAAIIHQNLAAKYKLIEKKIAYYKYKPQTVIDNADYKLYWDRTIITDRTIHHNRPDITLHDKKNSIVYLIDIAIPNTHNLASTHSDKISKYTDLSIELKTQWRVHTVKTVPIILSSTGVIPTTLHASLIQLDIHPLTYTLLQKAVILNTCRIVRKFLSINSDR

SEQ ID NO: 7554 - protein, 1346 aa, Celaenorrhinus opalinus
MQDSNKKTYNLRSLSCTSKGTSSMRFNYGKELNRRTPTERNCKVSTADNQTETIRKSRSTESLFPSPESSPRSYEDPKRYRSRSTTLSPMSVDVAQEANTNQPVPTTDKIKRKRQKWTEDMNKFIWRTYLIATQLEKETRGYLNDLHPQFTQKYPDIDVSRQRLGDQCRAIVRNKLLSAEILNDIKNQVSTELQSSNCQTQKHFSQTENTLNSTRMRWSNDLNESIMKYYFEVTEIEKDMTGYRKKLYNKFKEQFPHLDHISEQRLADQRRTIVYNKLLPVNKIKEIKREVEFKLQQINTFNIDDEQLQYKHSTNTGNLSLQTHIEVGEQNRPEVTTNAVSNISHVQKSYIAEKFREVFEQFDKTNPITRPFIPKQKTCHNLALTVDYINKYVLPKYLVPETNYESLQTLIYVAAYTTAICNDSKIFNRINKDFKQKPSWQHRLETKIQRLRSDIGKLTQFIRGNRSKKVTGAVQAIKEKHKTHAQFENNNYELNQFLDTMKQKLSTLASRLRRYLKCTKRKAQNSQFCNNENKFYRDLLKDEGRSVVANVPSSDVLRQYWASIWEIPVEYNKDANWLQDLEPRGSEIAEMHFENITLNTLTQVIKRTHNWKSPGTDHIHNYWYKKFTCMHPLIHKHINRFIQLPHTMPTYITHGKTYMLPKDNDTENPEKYRPITCLQTIYKIITACISESIYAHLDRYNILTEQQKGCRKNSYGCKEQLTIDAIAMKQAFQNKRNIYTMYIDYRKAFDSVPHSWLLYSLKHYKIHPLLITFLKTSMLNWETVLCLSNNFNSITTEPIRIQRGIFQGDALSPLWFCLAFNPLSELLNKSEIGFKLRHNKSHHTLSHLMYMDDIKLYASNKKDLFKMAHLTQTFSNDIRMSFGIDKCKIHSVNRGRLLNTNFELETGEKIEAMSAYCSYKYLGFHQANCILQSSTKSDLTKKFKYRLNRILKTQLNSRNIIKAINTFAIPTLTYSFGIINWSRTDLKKLQRSIHTSLTIHRKHHPKSCIQRLTIPRREGGRGLIDLENLHNTQVRLLRQFFHAKAQMSDLHKYVVYIDSKFTPLNLQDNTSQPNEQTVNYEEKRVIWAQKSLHGRHYADLHQSYIDKTESNAWLRRGELFPETEAFMLAIQDQVISTANYRKYITKELAHQNDLCRKCNGAPETIQHITGACKSLVQNDYKHRHDQIASIIHQQLAYAYKFIPQKQPYYKYKPQTILENKTHKLYWDRTILTDKTIHYNRPDITLHDKHTLTTYIIDIAVPNTHNIQSTISDKISKYRDLATQLQTQWQSRNVHIIPIVLSSTGVIPNHLRSSLKSLNIHCQISQTLQKAAILNTCRIVRNFLNMK

SEQ ID NO: 7555 - protein, 1233 aa, Poecilobdella manillensis
MAMVSYARRIVGRRERGGRQVCKDSTDKNIRLISGCGPAPENVRGIMGRNVCRWGYLSEDSCRRSSRVSISTPMHMAFDAREQTEGQPGKTGDNLERRATSRKDEVHAPGLATPRDKFTATPRTTRTCPQDSSRKEGENDESTNVNKDYDYASQRTLDSGHASDNASTDCRCCCGRTFPTSRGMKIHRSKMGCAVESEQRTAASTLVGKSSNVTGPDAYHSPVCVSSSPPDSNLPRPRIKFPTTKEKVAWQELEKVLLRKLKKLLKTESSMKAFTDVVFETCMEKFGPKAICCRDQAGNVQNRRQRELQQLRKEKKALQRRWKRANDAEKEGLSVLWGEVKKRAAEVRRAEKVRQKKYEKRRARASFFKDPYKYGKSLLDPPKSGTLSVEQTVLEDHLIRTYSDAHRSSPLEERSDIPSVPQPVSAFDLTTPSLEDIRAIVRKARNRSAPGANGIPYLVYKRCPNVIRLLHGFIEEAWRSGTVSDEWKRAEGIFIPKEKNSSSLNQFRPISLLNVEGKIFFAIMAQRLMHFVMANQYVNASVQKGGVPGVPGCIEHTTMLWEAIQQAKSNRLSLYVVWLDLANAYGSVPHRLIWDALESHHVPDHVIRILQDYFDGFEMRFTTGQFTTDWVRLQVGIAMGCAISPALFVLAMQVILSTAGPSIPEARIGKGLTMLPIKAFMDDTTLVTNRKQVMQRALDGLNDMLGRCRMAFKPAKSRSLALTRGKIREDVVFSVAGQRVPTVAEEPVKSLGRVFDESLTDKCQDKAIRRLAQEGMEAIDKVPLPGKFKVWLSQFVLLPRLLWPLTIYEIGLSSVESLERSYSRRVRLWLGFPPGLSSVALYSKSAKLRLPLRSIVEEYKIGKIRTQLMMNNSSDTSIREVAPLLRSGRKFKAQEEITKSEEALKFEEIRGPVQSDRHGVGWNHFTRWSKASSPLRAAMVIQERRREIESDRIAKAVQQSQQGQWTTWEEVLQRSITWQEMWSMSPFRLAFVVRAVYDVLPSRDNLQRWRLAQNTECALCGERQTLRHVLSGCSYALAHGRFTWRHNQVLLAVIEALKTACSSANARESMPQRATYFLREGASQFAKNRCTSKRSHLLEIANDWEIAADIAGLRHYPQVLAESGKRPDIVLSSTKADALVLAELTVPWEDRMDLSNSLKEEKYLDLTMDLRQKGYRVWFFAIEVGARGLIGRSTYAFLREVGLTSSARSKSMAKMSRAAEAASQWIWSKRDAR

SEQ ID NO: 7556 - protein, 1233 aa, Poecilobdella manillensis
MAMVSYARRIVGRRERGGRQVCKDSTDKNIRLISGCGPAPENVRGIMGRNVCRWGYLSEDSCRRSSRVSISTPMHMAFDAREQTEGQPGKTGDNLERRVTSRKDEVHAPGLATPRDKFTATPRTTRTCPQDSSRKEGENDESTNVNKDYDYASQRTLDSGHASDNASTDCRCCCGRTFPTSRGMKIHRSKMGCAVESEQRTAASTLVGKSSNVTGPDAYHSPVCVSSSPPDSNLPRPRIKFPTTKEKVAWQELEKVLLRKLKKLLKTESSMKAFTDVVFETCMEKFGPKAICCRDQAGNVQNRRQRELQQLRKEKKALQRRWKRANDAEKEGLSVLWGEVKKRAAAVRRAEKVRQKKYEKRRARASFFKDPYKYGKSLLDPPKSGTLSVEQTVLEDHLIRTYSDAHRSSPLEERSDIPSVPQPVSAFDLTTPSLEDIRAIVRKARNRSAPGANGIPYLVYKRCPNVIRLLHGFIEEAWRSGTVSDEWKRAEGIFIPKEKNSSSLNQFRPISLLNVEGKIFFAIMAQRLMHFVMANQYVNASVQKGGVPGVPGCIEHTTMLWEAIQQAKSNRLSLYVVWLDLANAYGSVPHRLIWDALESHHVPDHVIRILQDYFDGFEMRFTTGQFTTDWVRLQVGIAMGCAISPALFVLAMQVILSTAGPSIPEARIGKGLTMLPIKAFMDDTTLVTNRKQVMQRALDGLNDMLGRCRMAFKPAKSRSLALTRGKIREDVVFSVAGQRVPTVAEEPVKSLGRVFDESLTDKCQDKAIRRLAQEGMEAIDKVPLPGKFKVWLSQFVLLPRLLWPLTIYEIGLSSVESLERSYSRRVRLWLGFPPGLSSVALYSKSAKLRLPLRSIVEEYKIGKIRTQLMMNNSSDTSIREVAPLLRSGRKFKAQEEITKSEEALKFEEIRGPVQSDRHGVGWNHFTRWSKASSPLRAAMVIQERRREIESDRIAKAVQQSQQGQWTTWEEVLQRSITWQEMWSMSPFRLAFVVRAVYDVLPSRDNLQRWRLAQNTECALCGERQTLRHVLSGCSYALAHGRFTWRHNQVLLAVIEALKTACSSANARESMPQRATYFLREGASQFAKNRCTSKRSHLLEIANDWEIAADIAGLRHYPQVLAESGKRPDIVLSSTKADALVLAELTVPWEDRMDLSNSLKEEKYLDLTMDLRQKGYRVWFFAIEVGARGLIGRSTYAFLREVGLTSSARSKSMAKMSRAAEAASQWIWSKRDAR

SEQ ID NO: 7557 - protein, 840 aa, Sinella curviseta
MRKKKNIFQNNDSNYTKSTNPQRSSKRARQRRMERYNYELCQYQYYNNRRTCVRKLLNAENNCECNIEIEVLQNTFENRWSCENNNIREDYEVISSEDQQFLNNDYCFKINEDQVTNALKGMKTDSAAGPDGISIRVLKCTSSSECLAEIFTLFNKWCYIPTTLKEARTTLIYKSGNKNDPSNWRPVSVCSTIRRLYERIVLTNLRSYVTVSEYQSGSQRVPGTFLNTSILEGCLSKAKQEKDDVSVVLLDISKAFDCVGHRHIKNMINALPLPEHLRMIIFNLIEGNFTKIRIKNKTSSPIYFRRGLFQGSTISPEIFNLSIDFILRILSEQTIADSYGYNIGTHIKPLSVLGFVDDTTLIGKNNNAVAQLTLMAIEGFQRIGLDVNISKTKSICIKNGVLADAVIQLNNDWTITSIGHNEIIKYLGVTFNSEIIFNGQSTIKKLEASINTLISSPMLHPDQKISIINQYLWPTMIFSLQSTPIEKIPLSFLKSLDKMIRSSSRQLLNLPQDSPNSMLYTSTKQKGLGLICAEWEAYIQTHGICINLKRSKNVYVDNLRNLDQDIQMAAKKLEIDEDKHKILLEHGGPIPIINKIIREDLREAEYINWCKLKVHGKGAEVFNQCPTINRNFFQKKGLSSSEWISYFKMVTNCSAVKVIPGRSQNTIRCRHCNETVETLPHVLGSCPFGELLRNTRHHRVRSMFAEELKIKGYEVYEEIPTLDRRIDIIAINRLKNTAFILDPTIRFETTINQAHDVDGEKKSIYNPCCEDLRTKFNLDRTCKIEVIGILIGARGTLTKDTRNLLNIFKFSKKFYDEIVTSALKGSCMILHNHLYSVPIK

SEQ ID NO: 7558 - protein, 1228 aa, Nephromyces sp.
MIMPSKNTYHAGSDVARINKVRSDSRETRRITRNMLLESGERSPEEAQGHYTGNSSQNSPCSQKSNEKQNKQSKIQKRRKWTREEYREILWCFIYAKEAQHLAGIVEGSYEVWKSRYDVDITGMNPNKLANIRRWIIKSNKFSDLEIENIKRQVMDEIDQSDRQRNMNKNEIATLETNGSTSLDCLNISIPNLNSQSNNLAHANEMLNEQMKNDLINKIEEVKHLTFEERNPIFKLQITKNLTKDIQEVNKILDEILADHFANEDTPNDITYVNLVSFAAAELLTEKYDKRVMKKQTKRGGNFEPPWKRRIKSQIDTLRKHISNISDLNCKHLSKHLIKVKNLLEKRYHTKLNEKQSRIKLQENLKMKLTAKAQRLRRYEKRSNQFWQNKMFNENTKQFYRTLNNNKNNINKPPKKDEMEMFWKNIWEKSKYHNENCNWIKQHETQCEDLSEQTWDNITIEEVTNAIKNTSNWKAPGLDKLPNFWIKYLTSTHKYLQRSFNNIFNRKQVIPNWLTQGITFLLPKNLDTENPKNYRPITCLSTTYKIFTKIITERCYSHLDDILPAEQKGCRRGSYGCKDLLMLNKSIHEDSKRGKRNLSVAWVDYQKAFDSVPHSWIIKVLRLYKLHPNLITVMEQLMLNWRTKLTLRYEGGSLISDEININNGIFQGDSFSPLLFCLAMAPLSTLLNESKQGYRMKNNKGKLVNHFLYMDDLKLFGKNDNEIESLLQIVYQFSTDICMKFGLTKCAKLSIVQGKVKHQLNINLDANNKIQDLEPGEFYKYLGVNENSEIGHSDMKTKIKKEYIRRIRKILGTELNSKNKITAINTLAVPVLRYSFGIINWKVDEIKQIDRKTRKLLTIFRMHHPKADIERIYLPRISGGRGLIKLEMALKSEVVGLAQYLKTKKDYLTLLTLKHDENKNKYSITKDCEKYLKEMNVKTKPNLENPLAAAKKAKEIFASSNLESSFKTWEDKPLHGQFAGIINKSFVDKNMTFQWLTSSGLKGETEGFIMAAQDQALSTRYYQSKILKLPVNEKCRMCNKSIESIGHIVSGCTILAPSEYTYRHDRVAKYIHFQLCKEYNIDIAANQWYDHSPEDVAVNDKGITILWNSPIFTDRTVKANRPDIVVKNLNLKTCWLIDIAIPNDCNIALKEIEKISKYTDLKIECTRMWKLKTEIIPVVIGATGVIKKDTEKYVNKIQCPNLNLKIMQKIAILGTAYILRKFLSNDLE

SEQ ID NO: 7559 - protein, 869 aa, Muscidifurax raptorellus
MYGTIDFAVSRLIPVVEEIEGYGSRCLVAIARRARAGGDVARACCEWLQSTFVQSSPARRRRPRHQNNRVSKRQQRRIEYSRTQRLFKSNMSRAAQEILDGHDESVVPDMSAMTEYWKPILTRDSIRVDRPASPEYRVNLQYIWQAVSCEEVEAVSIGINSAPGIDGISARQWRAVPASIKALFYNIVLARGGFPDELLVGRTVFLPKKTAATTPADFRPISIASIVVRHLHKILAERAREAGLVDLRQRCLDDGCAENITVLAALLHDARASLREVHVASLDYAKAFDSVSHEAITAVLERRGLPPGFINYIARTYASSMTRLEVEGSRSDPIMVNSGVRQGDPLSTWLFCLIVDEVLKALPPDVGYELGPSRLNAVAYADDVILVSSTTLGMQRLLDIAQTMGAKQGLTLNASKCVALSIVPAGKQKKYKVLTTPQFHLNSGEELKQLTPSQEWRYLGVDFRPIGPRKAGGSLETELDRVTRAPLRPQQRLKILRCFLINRLYYRLILAGTTLGKLRALDKQVRAAIRRWLRLPPDTALAYYHASTQDGGLGIPSFTTTVPRLVIDRFKSMAKSSSASARAACQSDWTAKRERWALKALTQQGEVLNTAQRGRRWWAQKLHSSVDGKELRESGKTDLSGHWVDAGSYGIPGRDYVQYHHVRVNCLPTRIRTTRGARRANSDVTCRAGCNSTETAAHVIQACFRTHGGRVKRHDAVCKVLAGALRDKGWVVDEEPHITTRAGLRKPDIVAAKEEKVCVIDAQVVSGQQPLDDAHKRKVEKYGENLDVRRAVRSWRGVMRDRIIFGSCTVSWRGIWSPASADCLLQCGLSKRLLRSITTRVIQGSHTNWTRWNSMVTTRRVGRLPEGIG

SEQ ID NO: 7560 - protein, 1145 aa, Strongyloides papillosus
MALTTKLTINEAKKVLQWTPNEVKLLLELYDKTDDNLTKTKRLEQICHHFPNRTIKAMLTKLRETKEEKGGKCEVKVKKNEEKFEGNFNFDNYEEVKMKKEVRRKKEEEPPIVNEINDEELLKVEKLFLKFVNTINYQRKKGKSTRMQKFNVSKDSFQIFLVDSILNKHILLTESKVKDDIKKRSIIKTLICAAGLTLRKLVCGKLGNNKYNSKINQLRKKERKMMNCIEDLKYLIETNKCRHNIGRRLRKAKVTPTEMIEDYYNKLRYIRNEITACLEEHKKAILRSKFELTPSIKIISNIQNLNEEEELPKEEEFVKYYRELFTSKDVDGKETPHLDNWLKEFSKTLNVDWTISDNEILEALKYCGNFKAPGPDMVMNVCYKWFKSAQNYLIRWIKSTWYGEYRINKKDASAVTYMIWKGNDKPKNDVKSFRPISCLNCDFKLLNKLIANKVYESVEKILPMNQMAVIKGKHGTCEALLLDKSLAQSMKFRRRKDVKEIWCSWIDFSQCYDSISHTCLKKMIQSIKAPPTIHKVILDGIDSWNISICSGKSVSKAKIPVKSGILQGEVASPLYFVLLTGGISYALNKEEQVPIETVTPSNTLKINHISFMDDYQLYATSQKKVEKLTVKLKEIADEMNLKLNPQKCGIYGSDDLGKKLMLKESSLNFPYTSEYKYLGLVENSLDLKDVNIQLVKDKILSKCSTIFESRLTTHQKRRAFNSTISPCAAYYLGNLVTNECSIQGLLNECKKFDQMVRNQLVSQNIKKLQVSNSRIYLPKEYNSLGLNEIEIEVAANIIRKACYIKKRETLRGVDKLYIAMSNNGHRNTLSDASYITKNYSNFKINWNIMGAVKDENNILLDAKKIIEDIKEKRKNFWLDHWQKGNMTYANEAIKKEYHLPDLNIDSKYLMLCYAGSEEQIIYNGHVSLASQSTPTSRLCRKCKKYEETSYHVASVCEFHKKNLHLMRHNSAVYHIITELCKIMKVKCPLRYPEASGIIKSGDMKIAAGVKYTFGTARIYHNKPDLVWYTPDAIYVIEVSISSLKNVKSQIKMKTARYAVNSTEKLENFAALDNLKKGENFVEILSQKENFKKVQFMPLIFCTYGEIPKETMKHLKELNFTKEKIKTIASSIARLTGRTLKAHFIN

SEQ ID NO: 7561 - protein, 1146 aa, Strongyloides papillosus
MAPTNKLTNNEAKKALLWTPDEVKLLLELYDKTDDNLTKTKRLEQQICHHFRNRTIKAMLTKLRETKEEKGGKCEVKVKKNEEKFEEKFNFDNYEEIKMEREVKSKKEEERPIVDEFNDEELLKVEKLFLKFVNTINYQRKKGKSTRRQKFNVSKDSFQIFLVDSILNKHILLTESKVKDDIKRRSIIKTLICAAGLTLRKLVCGKLGNNKYNSKINQLRKKERKMMNCIEDLKYLIETNKCRHNIGRRLRKAKVTPTEMIEDYYNKLRYIRNEITACLEEHKKAILRSKFELTPSIKIISNIQNLNEEEELPKEEEFVKYYKELFTSKDVDGKETPHLDNWLKEFSKTLNVDWTISDNEILEALKYCGNFKAPGPDMVMNVCYKWFKSAQNYLIRWIKSTWYGEYRINKKDASAVTYMIWKGNDKPKNDVKSFRPISCLNCDFKLLNKLIANKVYESVEKILPMNQMAVIKGKHGTCEALLLDKSLAQSMKFRRRKDVKEIWCSWIDFSQCYDSISHKCLKKMIQSIKAPPTIHKVILDGIDSWNISICSGKSVSKAKIPVKSGILQGEVASPLYFVLLTGGISYALNKEEQVPIETVTPSNTLKINHISFMDDYQLYATSQKKVEKLTVKLKEIADEMNLKLNPQKCGIYGSDDLGKKLMLKESSLNFPYTSEYKYLGLVENSLDLKDVNIQLVKDKILSKCSTIFESRLTTHQKRRAFNSTISPCAAYYLGNLVTNECSIQGLLNECKKFDQMVRNQLVSQNIKKLQVSNSRIYLPKEYNSLGFNEIEIEVATNIIRKACYIKKRETLRGVDKLYIAMSNNGHRNTLSDASYITKNYSNFKINWNIMGVVKDENNILLDAKKIIEDIKERRKNFWLDHWQKGNMTYANEAIKKEFYLPNLNIDSKYLMLCYAGSEEQIIYNGHVSLASQSTPTSRLCRKCKKYEETSYHVASVCEFHKKNLHLMRHNSAVYHIITELCRIMKVKCPLRYPEASGIIKSGDMKIAAGVKYTFGTARIYHNKPDLVWYTPDAIYVLEVSISSLKNVKSQIKMKTARYAVNSTEKLENFAALDNLMKGENFVDILSQKENFKKVKFMPLIFCTYGEIPKETMKHLKELNFTKEKIKTIASSIARLTGRTLKAHFIN

SEQ ID NO: 7562 - protein, 1000 aa, Strongyloides ratti
MQKFSVPKDSSQIFLVDSILNKHICSTKNKVKDVIKRRSIIKTLICAAGLTLRKLVCGKLGNNKYNSKINQLWKKERKIINCIEDLKHLIETNKRRHNFGKRLRNAKVSPSEMLKDYYNKLRYIKNEITACLDEHKKAILRTKFKLTPSIKIISNIQNHNDEEAELPKEEEFVKYYKELFTNKDGDDKETPHLDNWLKKFSKTLIVDWTINDKEILEALKYCGNFKAPGSDMVMKVCYKWFKSAQNYLIRWIKSTWYGEYTINKKDTNAVTFMIWKRDGKPKNDVKSYRPISCLNCDFKLLNKLIANKIYESIEKILPINQMAVIKNKHGTCEALLLYKSLVQSMKFRRTKDVKEIWCSWIDFSKCYDSISHKCLKKMIQSIKAPPIIHKLILDGIDSWNISICNGKNISKTKIPVKSGILQGKVASSLYFVLLTGEISYALNKEEQVPIETITPSNTLKINHISFIDDYQLYATSQKKVEKLTIKLREIAEEMNLKLNPQKCGIYGTDDLGKRLMLKESSLNFPYTSEYKYLGLVENSLDLKDINIQLFKDKILSKYSTIFESRLTTHQKRKVFNSTISPCAAYYLGNLITNKCSIQELLNECKKFDQMVRNQLVNQNIKKLQVSNSRIYLPKEYNSLGLNEIEIEVAANIIRKACYIKKRETLRGVDKLYIAMSKNGHRNTLSDALYITKKYSNFQINWNIMGMVKDQNNILLDAKKIIENIKEKRRNLWLEHWKKGNMTYANEAIKKEFHLPDLNIDSKYLMLCYAGSEEQIIYNGHVSLVNQSSPSSRLCRKCNKLEETSYHVASVCEFHKKNLHLMRHNSAVYHIITELCRIMKVKCTLRYPEASGIIKSGNMKIAAGVKYTFGTAKIYHNKPDLVWYTPEVIYVIEVSISSLKNAKSQMKMKTARYAVNSTKKLENFAALNNLKKGENFVEILSHKANFKRVHFMPLVFCTFGEIPKETMKYLEKLNFSNEKIKTIASPIARYTGRTLKAHFTN

SEQ ID NO: 7563 - protein, 1353 aa, Ephydatia muelleri
MTMEPIPEDPLLEETTSVPPDHEEEMTHQIERSRHGVDPELRDYINGDLTKTATGQARTPKIWGPHQSTGPGLQQKTSQVSRAPEKVAASRAPRVSEKVSAPRRNPCGQPPQRSANQVPRAPKKTAESKVPRAIEKVAAPKIPITPENSATSRATPHDLPTQRSGNQWGEGRRRGGKNRSGQRGEGPGGRGGRSRGGRNQRALHVGIQVSNTASVAASAPPTARPPLHIADTAPPSVGPSPPVVGPASPTTGLTPTSRPGQPDRGGVYSGTNRGGSGGGGWSVGRYNWFGPGWRRDTGHIPHFEHTGDSQQNSDSQWSSDDQCWRGERLHGETPVAWEEWEEGPRGKDRASGYASQRNGGADRGRGGNEWGGQACGGRGSQETWGGGGGRGRGNSQGLERGVGRDRPTTDKGRGQMGMGQSIQRGIANIRSQVERGYQIHSRDQSSRPPPSAERPTAQPPNDDNPHHLSTQVSFTLTRLPMDPKDDQAPTRLFEPLKGSANCRMNQSRWDEWCRKLSAWIKGFSAWSHSRYVASLKSPQSTNPTEGWRKRRQDRGNNPPQVQTANPSNRNRVIRRKANLQKLYRANPKACMGIIRKSPSPPRCDISMPAVYNYFRGKNSQPHSDTSEAPPPFPIWPQSTEVDILEDPFTEQEVEATLKGLPSNSAPGPDRLRYSDWKRLGSVVPILTVILNTCRVNKKVPLSWKTSSTILIHKAGDTTNLDNWRPIALQNTAYKVYAGVIAKRVTNWAIQEGKLSPSQKGFLPYEGCLEHNFVLRSVLQDARRRKRDLTISWLDLKDAYSSVPHSTLLRILRLAGLGGATIDIIQDIYAGSTTCVRTKSETSASIACERGVKQGCPLSPILFNFVMESIIRSVEEVHDAGYKIANSSITTLAYADDLCVLSSSRTLMQQMMDRAHQAGSWAGLTFNTKKCASLTILRGQGRRQRAVPFQPKLGMEVIPALTWNESYKYLGCRAGADPKAEVRQVGEEYLQDCEAIMKSDLSDWQKLDALHRFAKPRLVYPLQNLTPPIRWATNLDKAVRKVVKQCLKLPRRTITSFLYSPTRRGGLGIPNVVDDLNIYMVSSAFKLLSSQNDPKVKDIALHELQRTANTRRRDLQSSEEFINSLPIWGEGKRGDLKSMWSDVRVAAHHCGVKFQLNRNAITCGGKSVGWNRRRVVCRLMRSGIQETYVDRLKQASDQGRAMECVSSHASSNHWITTGDYTSFGEYRFALKARLNLLPTRTVRRRAGEKIADVSCPQCYEEQDTLAHALNHCNKHVGLFRHRHNNILGRLFRAIPESMGQKYKEQTFPGDTSRLKPDLFVLNELSKEAFVVDVTIPFEGSGAFQEAREGKEKKI

SEQ ID NO: 7564 - protein, 951 aa, Ephydatia muelleri
MNLSDDQAPTRLFEPLRELANRRMDHSQWDEWCRRLAAWTRGFSAWSHSRYVASSESSKNTIPKEAWKQRRQGRGNNPTQAQSSQPNNRNRAIRRKANLQKLYRTNPKVCMDTIRKSPRPPRCEVPMPAVHEYFRGKNAQPTTDTSETPPPFPVWPRSAEVDILDDPFTEQEVEAALRGLPNNSAPGPDRLRYSDWKRLGSSVSILTTIINTCRVNKKIPLSWKVSSTILIHKTGDIINLDNWRPIALQNTIYKVYAGAIAKRLTSWAVETGRLSPSQKGFLPYEGCLEHNFVLRSVLQDARRRKRDLTVSWLDLKDAYSSVPHSTLLRVLRMAGLGGACIDIIKDIYAGSTTCVKTKSETTTPIVCGRGVKQGCPLSPILFNFVMEAVIRAVEEVPDAGYKIANSSITTLAYADDLCVLSSSRSLMQRMLDRAHQAGSWAGLTFNTRKCASLTILRGQGTRQRAVPFKPKLGAEEIAALSWDETYKYLGCRVGADPKVEIREVGEEFLRDCEAIMRSDLSDWQKLDALHRFAKPRLVYPLQNLTPPIRWAINLDKAVRKIVKQCLKLPRRTITQFLYSPTRRGGLGIPNVVDDLNIYMVSSAFKLLSSQNDPKVKDIAHHELQRTATVRRRDLQSTEEFINSLPIPGEGRRGDLKSMWSDVRMAAHHCRVKFQLNRNTITCGGKSIGWNGRRVICRLMRSGIQNTYVDRLMQARDQGRAMGCVSSHPSSNHWITTGDYTSFGEYRFALKARLNLLPTRTVRRRAGENIMDISCPLCNEEQDTLAHTLNHCSKHVGLVRHRHNNILGRLFRAIPDWMGLKYKEQNLPGDNSRLKPDLFVLNEQTREAFVVDVTVPFEGTGTFQEAREGKEAKYEYLKTLLRDRGYRKVEVDALVVGSLGSWDPDNDPVLRKLGIGRRYAVLFRKLCCTEAIKGSFGIWKARQPSSVEQEVA

SEQ ID NO: 7565 - protein, 1919 aa, Ephydatia muelleri
MSNTFILGDVISENGGDDGGRVWIRRYPPIPGAPCPVCNTGMFREKSLSVHVKAHFKGCSPSLAEKWACSMCRRQYDTRQGVANHFSQAHTTASGEDNGSSQHISQLAPLVRQTNSCSLCSGHFGSIRELREHEAVSHQAVMGRHTDASEDEVEVLARQPNSQLVSPASQNNNARGDNVGRSSQPASQLVPSASQGNSCSYCGSHFSTIRGLRNHERARHQVAVSDTLAAQDDTRPTSPDVSRSKSIPRLPWSIEEINRFRKAVEIHGLRSNKILAEVIGTRTSNQVAHFKQRYIKDHEQWAYRHLNAPSLGSQKDQATQSSPSTSPSSRRSVSSQSQPPDSLGSPDSRTTAEEVSSPSSSDISIPLATKGQRNPLIVEADQILVRLRTRIHPTLDKGAEDSTSPQHPSTTPKDQTAYIEGQTTSLTPAGLLQEGDETTRPLVWNDADAVSSGGGEEMYTPPPIEDNQMSGDDSYLEILLPPPPSFSGAMTMEPIPEDPLLEETTSVPPDHEEEMTHQIERSRHGVDPELRDYINGDLTKTATGQARTPKIWGPHQSTGPGLQQKTSQVSRAPEKVAASRAPRVSEKVSAPRRNPCGQPPQRSANQVPRAPKKTAESKVPRAIEKVAAPKIPITPENSATSRATPHDLPTQRSGNQWGEGRRRGGKNRSGQRGEGPGGRGGRSRGGRNQRALHVGIQVSNTASVAASAPPTARPPLHIADTAPPSVGPSPPVVGPASPTTGLTPTSRPGQPDRGGVYSGTNRGGSGGGGWSVGRYNWFGPGWRRDTGHIPHFEHTGDSQQNSDSQWSSDDQCWRGERLHGETPVAWEEWEEGPRGKDRASGYASQRNGGADRGRGGNEWGGQACGGRGSQETWGGGGGRGRGNSQGLERGVGRDRPTTDKGRGQMGMGQSIQRGIANIRSQVERGYQIHSRDQSSRPPPSAERPTAQPPNDDNPHHLSTQVSFTLTRLPMDPKDDQAPTRLFEPLKGSANCRMNQSRWDEWCRKLSAWIKGFSAWSHSRYVASLKSPQSTNPTEGWRKRRQDRGNNPPQVQTANPSNRNRVIRRKANLQKLYRANPKACMGIIRKSPSPPRCDISMPAVYNYFRGKNSQPHSDTSEAPPPFPIWPQSTEVDILEDPFTEQEVEATLKGLPSNSAPGPDRLRYSDWKRLGSVVPILTVILNTCRVNKKVPLSWKTSSTILIHKAGDTTNLDNWRPIALQNTAYKVYAGVIAKRVTNWAIQEGKLSPSQKGFLPYEGCLEHNFVLRSVLQDARRRKRDLTISWLDLKDAYSSVPHSTLLRILRLAGLGGATIDIIQDIYAGSTTCVRTKSETSASIACERGVKQGCPLSPILFNFVMESIIRSVEEVHDAGYKIANSSITTLAYADDLCVLSSSRTLMQQMMDRAHQAGSWAGLTFNTKKCASLTILRGQGRRQRAVPFQPKLGMEVIPALTWNESYKYLGCRAGADPKAEVRQVGEEYLQDCEAIMKSDLSDWQKLDALHRFAKPRLVYPLQNLTPPIRWATNLDKAVRKVVKQCLKLPRRTITSFLYSPTRRGGLGIPNVVDDLNIYMVSSAFKLLSSQNDPKVKDIALHELQRTANTRRRDLQSSEEFINSLPIWGEGKRGDLKSMWSDVRVAAHHCGVKFQLNRNAITCGGKSVGWNRRRVVCRLMRSGIQETYVDRLKQASDQGRAMECVSSHASSNHWITTGDYTSFGEYRFALKARLNLLPTRTVRRRAGEKIADVSCPQCYEEQDTLAHALNHCNKHVGLFRHRHNNILGRLFRAIPESMGQKYKEQTFPGDTSRLKPDLFVLNELSKEAFVVDVTIPFEGSGAFQEAREGKEKKYEYLKALLHNRGYGKVEVDALVVGSLGSWDPANDRVLTKLGIGRRYSILFRKLCCTEAIKGSFGIWKARQPSSVEQES

SEQ ID NO: 7566 - protein, 1035 aa, Macropis europaea
MEPAAGPPTRETHHRPTVTGSRRSQLRGETGRRRRVWSALPVAGCRGADRNQPGASGPPIRTPPGNQSVREAPGSSARRSNWSVARAERARIVAEAEQVEAPVELERLAAKVAGYIRSRCAARPRGSGRGAPNPGDGRSRADGGESRRPHARAQSRATAGPMSREEQIREATRIQRLFRVNRKRAVREVLQGPSMHCEVPRETVQRYFENIYAQRTRSEPYPGVQYPQASPESCDALVSAFQTSEVDRRLKRMKNTSPGPDGLTYDDLRKADPGAVLLTAVFNACRRLETVPRSWKESNTVLLHKKGERNDLSNWRPLAMGDVVPKLFAAVWADRLTEWAVNNGRLCHAQKGFLPHEGCFEHNFVLQEILAGSRRRSGDLVVAWLDLTNAFGSIPHSVIMDSLSGAGVPSSLVSIVRSLYTDCATRVKTAEGFTEKIPMLSGVRQGCPLSPILFNLAIEPLVRGAADSEAGVEVEGIRVTALAYADDLALVASSPDDMRGLLQAAEVKARSLGLSFNPRKCATLHTKGRGRIERTVFELGGPVPALGEGDHYEHLGVPTGILIDQTPYQKIEGMLDDLRALDRSLLAPWQRIEALATFILPRLDFLLRGADVRKAPLSMADREIKRTVKAWLHLPQRASAEIVHIPPSQGGCGLLPLADLADVSTVAHAFKMLSAGDAVVSRMARSALEKAVREKLGRIPNNRDLAEYLSGSNAGEFARPSSAPSSFWSKVRSASARLRRLCEIGWEWSDGRQELAVSCVRKGRKIVVPPQAKRQIFRQLRAAVSDQYLGSLLRKADQGKVYSATSRHAVSNHFMRGGGFIRFADWRFVHRARLDVVPLNGTRRWAAGDRRCRRCGYELESLPHVLQHCGLLAAPRQLRHHNLVGRLARAIRIPGDIRVDKRVPGTEGELEALRPDIVVTHEPSKTVVIVDVAVPFENTFGAFEEAREGKIRKYQPLAESLRRRGYRVHVEAFVLGALGGWDPRNEAVLGLLRVTPRYAALMRRLMVSETVAWSRDMYVEHVSGVRQYPATDAVP

SEQ ID NO: 7567 - protein, 1672 aa, Macropis europaea
MGERTVDLLFPFPAEFSCPFCYLGRSMAGKKGAFSYLRHEDLGKHLRLHHPGVGKRWVCRVCGESDSTKYGLKKIRSHHATAHADDPGVEARAGGSRGHPAGAAVCPIEGGRRESRSPPGAEHRAPAERAAPSRPEARPPTTTGGTNTSAPHRTTTTTSATRPAVMATRKERAVSMAAAPTRRSDPMADHTASGTPRPPRSSATAPATTTTPARRSTEGPGAGTGAKRRATVSSNTSPPKARRTAKGGMTTSPPSLRRSQRATRGGTEPPVPVPTRRPARLVTPQVTYAVVTKGTAPAQTAVAVNARSRGAVPVPPTSPRRMVSVNQAADIVDVVAIRTSPIPWTPTTRCSGSVSLTTTTTTTSVCGRPISSPAESGVSLQVREPAGTTTSPVPAPRTSPRSPCWSPLRGFPRLTPGCPSSVTPPGVRTRPERSTPPAATKSPSPPSQTTPAGRTPMVIAGPRGDTTTTRVSPAEGRGERRRPRRGTGRSSGLPRIAETSSEGSAGAGRHPREGVNRGRIASSTSSSSGEWTTVPRRSPPRRSGTSQRRGNCVPGRSGEPVTRGSPVVRMVGQTAEDERCRTDSINKNIDLVSVSYVGDVTDIPGLNRGSVCRLCGAIGGGGRDPPTRRGPSSSAPRMEPAAGPPTRETHHRPTVTGSRRSQLRGETGRRRRVWSALPVAGCRGADRNQPGASGPPIRTPPGNQSVREAPGSSARRSNWSVARAERARIVAEAEQVEAPVELERLAAKVAGYIRSRCAARPRGSGRSAPNPGDGRSRADGGESRRPHARAQSRATAGPMSREEQIREATRIQRLFRVNRKRAVREVLQGPSMHCEVPRETVQRYFENIYAQRTRSEPYPGVQYPQASPESCDALVSAFQTSEVDRRLKRMKNTSPGPDGLTYDDLRKADPGAVLLTAVFNACRRLETVPRSWKESNTVLLHKKGERNDLSNWRPLAMGDVVPKLFAAVWADRLTEWAVNNGRLCHAQKGFLPHEGCFEHNFVLQEILAGSRRRSGDLVVAWLDLTNAFGSIPHSVIMDSLSGAGVPSSLVSIVRSLYTDCATRVKTAEGFTEKIPMLSGVRQGCPLSPILFNLAIEPLVRGAADSEAGVEVEGIRVTALAYADDLALVASSPDDMRGLLQAAEVKARSLGLSFNPRKCATLHTKGRGRIERTVFELGGPVPALGEGDHYEHLGVPTGILIDQTPYQKIEGMLDDLRALDRSLLAPWQRIEALATFILPRLDFLLRGADVRKAPLSMADREIKRTVKAWLHLPQRASAEIVHIPPSQGGCGLLPLADLADVSTVAHAFKMLSAGDAVVSRMARSALEKAVREKLGRIPNNRDLAEYLSGSNAGEFARPSSAPSSFWSKVRSASARLRRLCEIGWEWSDGRQELAVSCVRKGRKIVVPPQAKRQIFRQLRAAVSDQYLGSLLRKADQGKVYSATSRHAVSNHFMRGGGFIRFADWRFVHRARLDVVPLNGTRRWAAGDRRCRRCGYELESLPHVLQHCGLLAAPRQLRHHNLVGRLARAIRIPGDIRVDKRVPGTEGELEALRPDIVVTHEPSKTVVIVDVAVPFENTFGAFEEAREGKIRKYQPLAESLRRRGYRVHVEAFVLGALGGWDPRNEAVLGLLRVTPRYAALMRRLMVSETVAWSRDMYVEHVSGVRQYPATDAVP

SEQ ID NO: 7568 - protein, 1152 aa, Macropis europaea
MSNESHSYALDSEGGLDNPPVPTQAPLNPIFEQTGRELPSRDIQLSSHAAQNRALSTGNSIVQNNNQNGGIPIPPSSGSLLTVTLSSIYSYRNNNGTNNICEDSNHTYSDQPTIAAVQPSILLESNANNHSLFQCEYCHRGFNSFRGLGAHKASAHPSETNANIDTSRKKARWQAEDINRLAEAEARAPTAVIQKMNDYLMRTVKLDPPRTQESIKCLRKTEKYKAALMQFKQAVSEEITYSNQLNNTTAQTITNISQAHFQDNDHNTQTYMEQINTADTYHMESTFPIIDGQSWMEDALRYLRSSSCDDPAKYILGFAVEDTRQGRNPCIHLSKWFETNFGIPVTKRRQLVIAQRDIDIQISNKSKRKMEYARIQQMWKTNRSKTANIILDGDGSNTQHLPLQEQVRYWKPIFEKPSVHVSEESTPTGQIAFGLLNAISYDEVIRCKPTIDSARGADGLAPKIWLNKVPTKIKMILMNIMLFSSKVPNLWVRARTVLIPKAGEWSNPSNYRPISIASVIVRHFHKILANRIQVAIQHDERQRGFIRADGTAEIVYSLATTLSIARQQKRQLHIAFLDIKKAFDSVSQYSIFYTLHKRGFPNKLIEYIKYIYKNSEMCLEIDGTLSEIIKPGQGVRQGDPLSSIIFNLVMDEILDKLSCSIGFEYQQTSINALAFADDLALLASTKEGLQSQLNLVTMEMAKHGLSMASNKCKCLSLVPSGKEKKIKVIERPLFNINGVNLPQLKVSDQWAHLGVTFNHRGVILHKFPIEEYLSRMTRAPLKPQQRLIILRTFLLPRLLHTMILGKINYGILQKTDRIVRKYARQWLHMPLDVPIAYFHAKTKDGGLGIMSFYTKIPALIVKRIDNLRNSSLRFVREIVNTDYINKRLCWARLHSSGDQKWDNELYRHVDGWELRESSKVTPSSSWVCDQRVSIPARDWTKYHMVRINALPTRMRTTRGMRRISQDVQCRAGCNVPETAAHVIQECHRTHGGRIMRHNIIVKGLSKLFSNRGFSVIEEPRIPTAEGNRKPDLLLIKDGKAMILDTQIVSGYRDLNEAHEKKKKYYEENIDVISFVSNNFNVQLIDIGVSSVTISWRGIWSNKSYESLKRLGVSNEFMKGITTRVLLGSYLNFIKFNKMTTVQRRHIWPFRRR

SEQ ID NO: 7569 - protein, 1156 aa, Osmia bicornis
MIAEKSRSYQRESEGGLDIPPVPVQALPRENPSLTGRRSTPCDDQVRCQLAPYGAHSTGNLIVPNITQNGGIPMPPSSGALSISSFSILSTASLMSTNTGSRLEDNNLDVNVSPNLRNSIDYQPPSTELIVNPQTMFQCEFCHRGFNSFRGLGVHKASAHPSEMNLGIDISRRKARWQIEDINRLADAEVRAPSTALHKINEYLLLSVKLDPPRTQESIKALRKSQRYKSIFTHLKQTLQEETIHSNLVNAVMIQTDTSPTPNHSLDIDHTARVHTENANTEGTHHRASLHSNEDRHSWIDNALRYLRSSSCDDPARYTLGNAVEDARQGRDPCKNLVRWFEKNFGSPATNPTHSVPVNRTFNDQLSKKKKRKMEYARIQQMWKSNMTKTANIILDGETETTQHLTLQEQVRYWKPILESPSVQVSAETTITDQTVLNLLNPINKEEIIRYKPAADSARGADGLSPAVWIHKISNQIKSIIMNVMLTSAKVPKIWARARTVLIPKTGDWRNPSNYRPISIASVIIRHYHKILANRIYKALRHDERQRGFIRADGTSEITHSLTAIMEITRQQKKQLHLAFLDIRKAFDSVSHNSIFTALHKRGFPNELISYVKHVYKNSEITLEVDGCCSDTIKPSQGVRQGDPLSPIIFNLIMDEILRKLPKLIGFQFRDTMINALAFADDLVLMATTKEGLQSLLDIVITEMESHGLRLAPNKCKCLSLVPSGKEKKIKVIEKPLFKIGDSNIPQIKVLEQWTHLGVTFTYRGLVKHKFPIEDYLVKITRAPLKPQQRLILLKTYLLPRLLHTMVLGKTNYSMLQKIDRTVRKYLRQWLHLPPDVPIAYFHAKVKEGGLGVTAFYTKIPALIERRINNLHNSSLSIAKEIVNTEFISKRMRWAKLHSAEDEKWDEKLHKHVDGWELRESSKVTPSSSWVQDQRISIPSKDWIKYHKVRINSLPTRMRTTRGIRRLTQDVQCRAGCGVPETAAHIIQECHRTHGGRIMRHNIITKGLAKFFNNREYLVVEEPRIPTTEGNRKPDLVIVKEGKAMILDAQIVSGYRNLNEAHEKKKKYYSQNKDIINYVSSNFNVHPRNIEVSSVTVSWRGIWAYRSYETLRNLGVSNMYMKGITTRILLGSYLNFVSFNKMTTVQRHHIWPFRRR

SEQ ID NO: 7570 - protein, 1041 aa, Platycheirus albimanus
MPHNNGNEEIPGWPCRICGKSFPSKAKTQQHIYRTCSRRSPGQSTDCLISVRSFTTYAGLRLHQKKAHAENYNDDLVAEASRSKKTLWTIDEERELARIEATLVGLTSTEIIVHLSRNSSRTKDSIKKRRQLASYKALVSEYSIDSSTAEMSPQPLPYSHHDSSRLNLEILSYITSLPSNILDEEDKDFVRQLNDGSDYAEANNQFFDSIVTKFSVERSHRRQNNHNLITALYSSNSKRKKKKILFKLTQQEFLKNKAACADRILDNIAWSSETTSPTDESLLQQFQSTFGQHATASLPDVTSERFDSITIAHPITIDEVRLTIRALKSNASGPDNIGKKELLKIPIPKVTLFFNALLLAEDFPGTMKANSTILIAKTTSNLDNAKNWRPITISSVLLRCFNKIMAKRLDNINILESQRGFTKIDGCFANSWTVESLIKHHRRKGAPITMISIDLAAAFDSVPHDAIIRALRRAKVDSKYTNMVKASFIDSSTNITCNGRSIGEIPILRGVKQGDPASPVHFNIFLDELITILHEEFSGVNINGDKLCCLAYADDIILVANTPEDASRMLKRLVEFLTTMCMSVNPSKCSALVLRTVPAKKKLFLDTNASFIINNEAIQVLKTGDSFKYLGYQFNYLGLTSANNGELFEQLKRIKCAPLKPAQKLNIIKEFLVPRYIASLQRPNITSKILKEVDRKIRVYLRGILHLNRHCHNSVFYSPIKYGGLGIFCFADNIPLIIKNRICKLRAASSILNNTFELANQRLNNISSAIKPGSTNKTEIRKKHSTALQESFSGNGLSQAQHSTVSSHHLSYPPKCWSGEDYIRGVQLRFNLLPCASVPSNPPEARYCRAGCNRKETVCHILQKCPLSHNQRITRHNYVVKRIANIAGRKGWTYLMEPHIRCRDGTLKKPDIIMMKGSTLIVSDVGVHWEGPNSLSSQYNIKVAIYSQPNFIQALQIRYPGYTIHILPFILGARGIWCKQNEFLSHHLRMSMFDKRDTITTVIRGSCTIHRDFMKFVWRRRPSSQHPGPLFIPNEGRRRLT

SEQ ID NO: 7571 - protein, 1041 aa, Platycheirus albimanus
MPHNNGNEEIPGWPCRICGKSFPSKAKTQQHIYRTCSRRSPGQSTDCLICVRSFTTYAGLRLHQKKAHAENYNDDLVAEASRSKKTLWTIDEERELARIEATLVGLTSTEIIVHLSRNSSRTKDSIKKRRQLASYKALVSEYSIDSSTAEMSPQPLPYSHHDSSRLNLEILSYITSLPSNTLDEEDKDFVRQLNDGSDYAEANNQFFDSIVTKFSVERSHRRQNNHNLITALYSSNSKRKKKKILFKLTQQEFLKNKAACADRILDNIAWSSETTSPTDESLLQQFQSTFGQHATASLPDVTSERFDSITIAHPITIDEVRLTIRALKSNASGPDNIGKKELLKIPIPKVTLFFNALLLAEDFPGTMKANSTILIAKTTSNLDNAKNWRPITISSVLLRCFNKIMAKRLDNINILESQRGFTKIDGCFANSWTVESLIKHHRRKGAPITMISIDLAAAFDSVPHDAIIRALRRAKVDSKYTNMVKASFIDSSTNITCNGRSIGEIPILRGVKQGDPASPVHFNIFLDELITILHEEFSGVNINGDKLCCLAYADDIILVANTPEDASRMLKRLVEFLTTMCMSVNPSKCSALVLRTVPAKKKLFLDTNASFIINNEAIQVLKTGDSFKYLGYQFNYLGLTSANNGELVEQLKRIKCAPLKPAQKLNIIKEFLVPRYIASLQRPNITSKILKEVDRKIRVYLRGILHLNRHCHNSVFYSPIKYGGLGIFCFADNIPLIIKNRICKLRAASSILNNTFELANQRLNNISSAIKPGSTNKTEIRKKHSTALQESFSGNGLSQAQHSTVSSHHLSYPPKCWSGEDYIRGVQLRFNLLPCASVPSNPPEARYCRAGCNRKETVCHILQKCPLSHNQRITRHNYVVKRIANIAGRKGWTYLMEPHIRCRDGTLKKPDIIMMKGSTLIVSDVGVHWEGPNSLSSQYNIKVAIYSQPNFIQALQIRYPGYTIHILPFILGARGIWCKQNEFLSHHLRMSMFDKRDTITTVIRGSCTIHRDFMKFVWRRRPSSQHPGPLFIPNEGRRRLT

SEQ ID NO: 7572 - protein, 1041 aa, Platycheirus albimanus
MPHNNGNEEIPGWPCRICGKSFPSKAKTQQHIYRTCSRRSPGQSTDCLICVRSFTTYAGLRLHQKKAHAENYNDDLVAEASRSKKTLWTIDEERELARIEATLVGLTSTEIIVHLSRNSSRTKDSIKKRRQLASYKALVSEYSIDSSTAEMSPQPLPYSHHDSSRLNLEILSYITSLPSNILDEEDKDFVRQLNDGSDYAEANNQFFDSIVTKFSVERSHRRQNNHNLITALYSSNSKRKKKKILFKLTQQEFLKNKAACADRILDNIAWSSETTSPTDESLLQQFQSTFGQHATASLPDVTSERFDSITIAHPITIDEVRLTIRALKSNASGPDNIGKKELLKIPIPKVTLFFNALLLAEDFPGTMKANSTILIAKTTSNLDNAKNWRPITISSVLLRCFNKIMAKRLDNINILESQRGFTKIDGCFANSWTVESLIKHHRRKGAPITMISIDLAAAFDSVPHDAIIRALRRAKVDSKYTNMVKASFIDSSTNITCNGRSIGEIPILRGVKQGDPASPVHFNIFLDELITILHEEFSGVNINGDKLCCLAYADDIILVANTPEDASRMLKRLVEFLTTMCMSVNPSKCSALVLRTVPAKKKLFLDTNASFIINNEAIQVLKTGDSFKYLGYQFNYLGLTSANNGELFEQLKRIKCAPLKPAQKLNIIKEFLVPRYIASLQRPNITSKILKEVDRKIRVYLRGILHLNRHCHNSVFYSPIKYGGLGIFCFADNIPLIIKNRICKLRAASSILNNTFELANQRLNNISSAIKPGSTNKTEIRKKHSTALQESFSGNGLSQAQHSTVSSHHLSYPPKCWSGEDYIRGVQLRFNLLPCASVPSNPPEARYCRAGCNRKETVCHILQKCPLSHNQRITRHNYVVKRIANIAGRKGWTYLMEPHIRCRDGTLKKPDIIMMKGSTLIVSDVGVHWEGPNSLSSQYNIKVAIYSQPNFIQALQIRYPGYTIHILPFILGARGIWCKQNEFLSHHLRMSMFDKRDTITTVIRGSCTIHRDFMKFVWRRRPSSQHPGPLFIPNEGRRRLT

SEQ ID NO: 7573 - protein, 482 aa, Samia ricini
MLKFKFQQIGLELNFSKCEIFIASKTLDSGNILNKFNSIAPGIKLLDPSHLRILGAPVLDESILTFAKEKIQNFSDMSDRLLELDSQLAYVIVKYCLFVPKFTYVLRSFPFWKYLDIVKKFDSLIQNCLVSILNIVVIDDRSWSQASLPIRFGGLGIRKVSCVSLPAFLSSVFSNENLVINILSKFDISEISNLTEAKNAWIAACSNSNYPEVVNSQRCWDEPLCKLVRNNLYNTSTSAAERARLLAAQEWESSIWLKVLPSSNIGTKLDNTTFRLSVYLRLGISWVSPHRCQCGTIVDSLGHHGLACSKSAGRISRHATLNDVLRRAFASANVPASLEPIGLVRDDGKRPDGITLLPWKMGRPLVWDATCVDTLAPSHLPITSLKAGAAATSAEDLKRRKYATLGESYIFVPFGVETLGPWGPSAHCLFKDLAGRLVDKSRDQRAGQYLAQRISIAIQRGNMASLLGTFPSGGELDGIHYL

SEQ ID NO: 7574 - protein, 482 aa, Samia ricini
MLKFKFQQIGLELNFSKCEIFIASKTLDSGNILNKFNSIAPGIKLLDPSHLRILGAPVLDESILTFAKEKIQNFSDMSDRLLELDSQLAYVIIKYCLFVPKFTYVLRSFPFWKYLDIVKKFDSLIQNCLVSILNVDVIDDRSWSQASLPIRFGGLGIRKVSCVSLPAFLSSAFSNENLVINILSKFDISEISNLTEAKNAWIAACSNSNYPEVVNSQRYWDEPLCKLVRNNLYNTSTSAAERARLLAAQEWESSLWLKVLPSSNIGTKLDNTTFRLSVYLRLGISWVSPHRCQCGTIVDSLGHHGLACSKSAGRISRHAALNDVLRRAFASVNVPASLEPIGLVRDDGKRPDGITLLPWKMGRPLVWDATCVDTLAPSHLPITSLKAGAAATSAEDLKRRKYATLGESYIFVPFGVETLGPWGPSAYSLFKDLAGRLVDTSRDQRAGQYLAQRISIAIQRGNMASLLGTFPSGGELNGIHYL

SEQ ID NO: 7575 - protein, 962 aa, Samia ricini
MNTNTLTDSVDVVSPSAIESPCCPVCSRYFKSFKGLKIHFKRIHKNYESLSSSGHEPSLLCQESNKPFWEFIGNLKKTCPIVKRIPRGARVSVCEKLSSEIENAISQNSCDAWEKLLLFPYRVLHILKDSDTKVSLTTKIKNNCKNESNFFNYNISSFQNKTHSLISPNSVIKRVENKLCDGDVRGASRLLFSDDVIAPVSEHTLKELEKKHPSPASNFSPPDPPSFQLDEPCLQVNGLEVIEAIKSFPSGTAGGLDGLTAQHLKDLIGVSDAGVSLLGKLVALCNFLLSGKVCPDIVDVLYGAKLFALTKKDGGIRPIAVGSTYRRLTAKLCCHSITKSLSQYFRPVQLGFGTKGGCEAAVHSARTLLDNKSVEVLLKVDVKNAFNTLDRSTFLSCVRDKTPSIYPFLWQCYHSPSKLIYEQNLLFSSVGCQQGDPLGPAIFSLAIQPIIENLTSKFNLWFLDDGTLGGDVDSVLNDLNILKFKFQQIGLELNFSKCEIFIASKTLDSGNILNKFNSIAPGIKLLDPSHLRILGAPVLDESILTFAKEKIQNFSDMSDRLLELDSQLAYVIVKYCLFVPKFTYVLRSFPFWKYLDIVKKFDSLIQNCLVSILNIDVIDDRSWSQASLPIRFGGLGIRKVSCVSLPAFLSSVFSNENLVINILSKFDISEISNLTEAKNAWIAACANSNYPEVVNSQRCWDEPLCKLVRNNLYNTSTSAAERARLLAAQEWESSIWLKVLPSSNIGTKLDNTTFRLSVYLRLGISWVSPHRCQCGTIVDSLGHHGLACSKSAGRISRHATLNDVLRRAFASANVPASLEPIGLVRDDGKRPDGITLLPWKMGRPLVWDATCVDTLAPSHLPITSLKAGAAASSAEDLKRRKYATLGESYIFVPFGVETLGPWGPSAHCLFKDLAGRLVDKSRDQRAGQYLAQRISIAIQRGNMASLLGTFPSGGELDGIHYL

SEQ ID NO: 7576 - protein, 1026 aa, Bradysia coprophila
MAEDESSQFRVATITTGPQSGGPQSSSSVPELPTCATCGRSFPTTRGLGVHIRRAHPNQANDAINTDRTKRRWNDEELRLMADHEARALRDNVENINQHLIQLMPDRSLEAIKGKRRNAEYRRLVVDRTAILESGDLNAQQSAPDNNVSQPVDPEIVSVPPTSYRDRIMNALEESMIDVDAIRGSSARELVEIGKVALLNQPMDEGRIMSWLSDRFPDTQKPKGPIYSKTTIYHGTNKQKRKQRYALVQSLYKKDISAAARVVLDENDKIATKIPPVRHMFDYWKDVFATGGGSAATNINRAPPAPHMETLWDPVSLIEIKSARASNEKGAGPDGVTPRSWNALDDRYKRLLYNIFVFYGRVPSPIKGSRTVFTPKIEGGSLDPGDFRPLSICSVILREFNKILARRFVSCYTYDERQTAYLPIDGVCINVSMLTAIIAEAKRLRKELHIAILDLVKAFNSVYHSALIDAITEAGCPPGFVDYIADMYNNVITEMQFEGKCELASILAGVYQGDPLSGPLFTLAYEKALRALNNEVGFDIADVRVNASAYSDDGLLLAMTVIGLQHNLDKFGETLAKIGLRINSRKSKTVSLVPSGREKKMKIVSNRRFTVEGQRIEALTISDLWKYLGVVYTTSGPEVAKVSMDDDLSKLTKGPLKPQQRIHLLKTFVIPKHLNRLVLSRTTATGLSKMDLLIRKYVRRWLHLPGDVPVAFLYAPVKAGGLGIPCLKQWIPLMRFLRLNKAKRTGGDRIAAVLNCQLYASIMHSCKQALSVLGCGDQPTLEGYHAYWRRILIGMVDGKDLKSAQNHSSATSFNSIRMNDISGEDYIHYNQLRTNSIPTRKRTARGRPNKPTACRAGCRQVETLQHVIQGCIRSQGGLVQRHDRVVDLLFDECETKGYAAEKVVHLRTSEELWKPDLVLKKNGRVVVVDAQVVQCGRLESDHRVKVSKYRDDPELADVIREKYAVQEVTFEACTLSYKGIWSKNSVEGLQKLGISNYCLFKIVTSVLRGSWLNWVRFNNVTTVVHW

SEQ ID NO: 7577 - protein, 1246 aa, Montipora efflorescens
MMLTINNNNNNNNNNNNNNNNNNNNNNNNNNNNKTGRKTGRVRWTDEMISDLLQCKRKALELASSSYPPRQENGRKKGYMKIMKELWDELGYQGHDFTCQNRRDQAARQEKSLGNVGETICERVGTRRPPTENDREICDMLDNNSQSLQTQTFENANEPELQHSVPQESLCQETKLLLDSAIKIFDSISSEPGEFMNRDIDTRTKERPSQKEIENINKAIAELTKTTSFQTNDPFVYLWIANCALYAVTVAFLLHKGWKKQKSSASQTTQNNYQNKLKAKYERKVSEMRKKISIAAAEVERLKANKKVTKKGRRNRAVLLEECKVLSVAQLVNYMEKKKSTVRRLKREYSRRKKQQQSRGLNNQFETDPGRVYANFGEMIAEDKDLNRPKYKPRQSTISNETDANQFEDIEETSSFWRQVWSEGGTGNRNATWLVDVREAINKYVPPPSNENFVLESTEAVKTIMKKRNWSAPGPDRIATTNYWWKKAHALHEGVTKSFQSIGQSPSEYPMWFAEGKTTLIPKPGEFSSSNQRPITCLNTMYKWFTSCLLGPMDRHLNEYGLMEGEQRGAKSGCSGTVDNLLIDRMVTQDCHRGKRNLSMAWIDVKKAFDSVDHEWLAEMMILHRFPTWLCRTIESLCNSWNTKVVAKTKQGIEKSEVIQFRRGLPQGDALCPRLFTLCMNPVAWKLRASEGYKLSKPLSTKITDLLYIDDLKAFAASEIKLNKVLKSTKSAMQDIGLEWNPKKCATVHVRRGVQVKDETDVQLDDGAVLTNLKEGTYYKFLGTLENLKQDDKLALNDAAKEYLQRMSVIWSSPLSDHNRVAASNQFALPILGYLMWTQSWPIAELRQIDREVRKILVQSGGKHPLGSTALLYLPREKGERGLKSVEQEYKLVKIKAALKVYKNLDPTIAVVRKFEERAGEVGHHSFLKDSMKYAAELGLGLDLEHPSPCITQGGVTITDKKIKVALKETVEKQNTQAVREERWQGKLHTSRWEDVSLSKADCFAWLKDWTLCPSNTVAGVIELYEQLLPTRIYYSHKVRARPATEVACRLCSRSAETVQHILAGCPTLAQNKYLERHNNALKILFFEILKDANLIDKVPPWFSQVKPKPVYENDQFQAYWDVPLYAEHTEVRANRIDARFIDHQQEKVIALEMSCPWIDNRTSKEEEKTAKYAPLRWEIKRQYPGYDVQQYNIIIDVLGGWSTDMEEGMRNLLGSRVRTKGVLLKMQKSVLSSSLNIARTFKVIT

SEQ ID NO: 7578 - protein, 1165 aa, Montipora efflorescens
MKIMKELWDELGYQGHDFTCQNLRDQAARQEKSLGNVGETICERVGTRRPPTENEREICDMLDNNSQSLQTQTFENANEPELQNSVPQESLCQETKLLLDSAIKIFDSISSEPGEFMNRDIDTRTKERPSQREIENINKAITELTKTTSFQTNDPFVYLWIANCALYAVTVAFLLHKGWKKQKSSTSQTTQNNYQNKMKAKYERKVSEMRKKISIAAAEVERLKANKKITKKGRRNRAVLLEECKVLSVAQLVNYLEKKKSTVRRLKREYSRRKKQQQSRELNNQFQTDPGRVYAKFGEMIAEDKDLNRPKYKPRPSTISNETDANQFEDIEEASSFWRQVWSEGGTGNRNAAWLEDVREAINKYVPPPSNENFVLESTEAVKTIMKKRNWSAPGPDRIANYWWKKAHALHEGVTKSFQSIGQSPSEYPMWFAEGKTTLIPKPGEFSSSNQRPITCLNTMYKWFTSCLLGPMDRHLNEYGLMEGEQRGAKSGCSGTVDNLLIDRMVTQDCHRGKRNLSMAWIDVKKAFDSVDHEWLAEMMILHRFPTWLCRTIESLCNSWNTKVVAKTKQGIEKSEVIQFRRGLPQGDALCPRLFTLCMNPVAWKLRASEGYKLSKPLSTKITDLLYIDDLKAFAASEIKLNKVLKSTKSAMQDIGLEWNPKKCATVHVRRGVQVKDETGVQLDDGAVLTNLKEGTYYKFLGTLENLKQDDKLALNVAAKEYLQRMSVIWSSPLSDHNRVAASNQFALPILGYLMWTQSWPIAELRQIDREVRKILVESGGKHPLGSTALLYLPREKGGRGLKSVEQEYKLVKIKAALKVYKNLDPTIAVVRKFEERAGEVGHHSFLKDSMKYAAELGLGLDLEHPSPCITQGGVTITDKKIKVALKETVEKQNTQAVREERWQGKLHTSRWEDVSLSKAGCFAWLKDWTLCPSNTVAGVIELYEQLLPTRIYYSHKVRARPATEVACRLCSRSAETVQHILAGCPTLAQNKYLERHNNALKILFFEILKDANLIDKVPPWFSQVKPKPVYENDQFQAYWDVPLYAEHTEVRANRIDARFIDHQQEKVIALEMSCPWIDNRTSKEEEKTAKYAPLRWEIKRQYPGYDVQQYNIIIDVLGGWSTDMEEGMRNLLGSRVRTKGVLLKMQKSVLSSSLNIARTFKVIT

SEQ ID NO: 7579 - protein, 1049 aa, Montipora efflorescens
MNRDIDTRTKERPSQKEIENINKAITELTKTTSFQTNDPFVYLWIANCALYAVTVAFLLHKGWKKQKSSTSPATQDNYQNKMKAKYERKVSEMRKKISIAAAEVERLKANKKITKKGRRNRAVLLEECKVLSVTQLVNYMEKKKSTVRRLKREYSRRKKQQQSRELNNLFQTDPGRVYAKFGEMIAEDKDLNRPKYKPRQSTISNETDANQFDDIEEASSFWRQVWSEGGTGNRNATWLEDVREAINKHVPPPSNENFVLESTEAVKTIMKKRNWSAPGPDRIANYWWKKAHALHEGVTKSFQSIGQSPSEYPMWFAEGKTTLIPKPGEFSSSNQRPITCLNTMYKWFTSCLLGPMDRHLNEYGLMEGEQRGAKSGCSGTVDNLLIDRMVTQDCHRGKRNLSMAWIDVKKAFDSVDHEWLAEMMILHRFPTWLCRTIESLCNSWNTKVVAKTKQGIEKSEVIQFRRGLPQGDALCPRLFTLCMNPVAWKLRASEGYKLSKPLSTKITDLLYIDDLKAFAASEIKLNKVLKSTKSAMQDIGLEWNPKKCATVHVRRGVQVKDETGVQLDDGAVLTNLKEGTYYKFLGTLENLKQDDKLALNVAAKEYLQRMSVIWSSPLSDHNRVAASNQFALPILGYLMWTQSWPIAELRQIDREVRKILVESGGKHPLGSTALLYLPREKGGRGLKSVEQEYKLVKIKAALKVYKNLDPTIAVVRKFEERAGEVGHHSFLKDSMKYAAELGLGLDLEHPSPCITQGGVTITDKKIKVALKETVEKQNTQAVREERWQGKLHTSRWEDVSLSKAGCFAWLKDWTLCPSNTVAGVIELYEQLLPTRIYYSHKVRARPATEVACRLCSRSAETVQHILAGCPTLAQNKYLERHNNALKILFFEILKDANLIDKVPPWFSQVKPKPVYENDQFQAYWDVPLYAEHTEVRANRIDARFIDHQQEKVIALEMSCPWIDNRTSKEEEKTAKYAPLRWEIKRQYPGYDVQQYNIIIDVLGGWSTDMQEGMKNLLGSRMRTKGVLLKMQKSVLSSSLNIARTFKVIT

SEQ ID NO: 7580 - protein, 1241 aa, Montipora cactus
MYNNNNNNNNNNNNNNNNNNNKEGCERNRQIGRKPTGRVRWTDEMISDLLQCKRKALELASSSYPPRQENGRKKGYMKIMKELWDELGYQGHDFTCQHLRDQAARQEKSLGNVGETICERVGTRRPPTENDREICNMLDNNSQSLQTQTFENANEPELQHSVPQESLCQETKLLLDSAIKIFDSISSEPGEFMNRDIDTRTKERPSQKEIENINKAITELTKTTSFQTNDPFVYLWIANCALYAVTVAFLLHKGWKKQKSSISQTTQNNYQNKMKAKYERKVSEMRKKISIAAAEVERLKANKKITKKGRRNRAVLLEECKVLSVAQLVNYMEKKKSTVRRLKREYSRRKKQQQSRELNNQFQTDPGRVYAKFGEMIAEDKDLNRPKYKPRPSTISNETDANQFEDIEEASSFWRQVWSEGGTGNRNAAWLEDVREAINKYVPPPLNENFVLESTEAVKTIMKKRNWSAPGPDRIANYWWKKAHALHEGVTKSFQSIGQSPSEYPMWFAEGKTTLIPKPGEFSSSNQRPIACLNTMYKWFTSCLLGPMDRHLNEYGLMEGEQRGAKSGCSGTVDNLLIDRMVTQDCHRGKRNLSMAWIDVKKAFDTVDYEWLAEMMILHRFPTWLCRTIESLCNSWNTKVVAKTKQGIEKSEVIQFRRGLPQGDALCPRLFTLCMNPVAWKLRASEGYKLSKPLSTKITDLLYIDDLKAFAASEIKLNKVLKSTKSAMQDIGLEWNPKKCAAVHVRRGVQVKDETGVQLDDGAVLTNLKEGTYYKFLGTLENLKQDDKLALNVAAKEYLQRMSVIWSSPLSDHNRVAASNQFALPILGYLMWTQSWPIAELRQIDREVRKILVESGGKHPLGSTALLYLPREKGGRGLKSVEQEYKLVKIKAALKVYKNLDPTIAVVRKFEERAGEVGHHSFLKDSMKYAAELGLGLDLEHPSPCITQGGVTITDKKIKVALKETVEKQNTQAVREERWQGKLHTSRWEDVSLSKAGCFAWLKDWTLCPSNTVAGVIELYEQLLPTRIYYSHKVRARPATEVACRLCSRSAETVQHILAGCPTLAQNKYLERHNNALKILFFEILKDANLIDKVPPWFSQVKPKPVYKNDQFQAYWDVPLYAEHTEVRANRIDARFIDHQQEKVIALEMSCPWIDNRTSKEEEKTAKYAPLRWEIKRQYPGYDVQQYNIIIDVLGGWSTDMEEGMRNLLGSRVRTKGVLLKMQKSVLSSSLNIARTFKVIT

SEQ ID NO: 7581 - protein, 1175 aa, Montipora cactus
MATEEDGMSGQEGCERNRQIGRKPTGRVRWTDEMISDLLQCKRKALELASSSYPPRQENGRKKGYMKIMKELWDELGYQGHDFTCQHLRDQAARQEKSLGNVGEPICERVGTRRPPTENDREICNMLDNNSQSLQKQTFENANEPELQHSVPQESLCQETKLLLDSAIKIFDSISSEPGEFMNRDIDTRTKERPSQKEIENINKAITELTKTTSFQTNDPFVYLWIANCALYAVTVAFLLHKGWKKQKSSTSQTTQNNYQNKMKAKYERKVSEMRKKILSVAQLVNYMEKKKSTVRRLKREYSRRKKQQQSRELNNQFQTDPGRVYAKFGEMIAEDKDLNRPKYKPRPSTISNETDANQFEDIEEASSFWRQVWSEGGTGNRNATWLEDVREAVNKYVPPPSNENFVLESTEAVKTIMKKRNWSAPGPDRIANYWWKKAHALHEGVTKSFQSIGQSPSEYPMWFAEGKTTLIPKPGEFSSSNQRPITCLNTMYKWLTSCLLGPMDRHLNEYGLMEGEQRGAKSGCSGTVDNLLIDRMVTQDCHRGKRNLSMAWIDVKKAFDSVDHEWLAEMMILHRFPTWLCRTIESLCNSWNTKVVAKTKQGIEKSEVIQFRRGLPQGDALCPRLFTLYMNPVAWKLRASEGYKLSKPLSTKITDLLYIDDLKAFAASEIKLNKVLKSTKSAMQDIGLEWNPKKCATVHVRRGVQVKDETGVKLDDGAVLTNLKEGTYYKFLGTLENLKQDDKLALNVAAKEYLQRMSVIWSSPLSDHNRVAASNQFALPILGYLMWTQSWPIAELRQIDREVRKILVESGGKHPLGSTALLYLPREKGGRGLKSVEQEYKLVKIKAALKVYKNLDPTIAVVRKFEERAGEVGHHSFLKDSMKYAAELGLGLDLEHPSPCITQGGVTITDKKIKVALKETVEKQNTQAVREERWQGKLHTSRWEDVSLSKAGCFAWLKDWTLCPSNTVAGVIELYEQLLPTRIYYSHKVRARPATEVACRLCSRSAETVQHILAGCPTLAQNKYLERHNNALKILFFEILKDANLIDKVPPWFSQVKPKPVYENDQFQAYWDVPLYAEHTEVRANRIDARFIDHQQEKVIALEMSCPWIDNRTSKEEEKTAKYAPLRWEIKRQYPGYDVQQYNIIIDVLGGWSTDMEEGMRNLLGSRVRLKESC

SEQ ID NO: 7582 - protein, 1236 aa, Montipora efflorescens
MATEEDGMSGQEGCERNRQIGRKPTGRVRWTDEMISDLLQCKRKALELASSSYPPRQENGRKKGYMKIMKELWDELGYQGHDFTCQHLRDQAARQEKSLGNVGETICERVGTRRPPTENDREICNMLDNNSQSLQTQTFENANEPELQHSVPQESLCQETKLLLDSAIKIFDSISSEPGEFMNRDIDTRTKERPSQKEIENINKAITELTKTTSFQTNDPFVYLWIANCALYAVTVAFLLHKGWKKQKSSISQTTQNNYQNKMKAKYERKVSEMRKKISIAAAEVERLKANKKITKKGRRNRAVLLEECKVLSVAQLVNYMEKKKSTVRRLKREYSRRKKQQQSRELNNQFQTDPGRVYAKFGEMIAEDKDLNRPKYKPRQSTISNETDANQFEDIEEASSFWRQVWSEGGTGNRNATWLEDVREAINKYVPPPSNENFVLESTEAVKTIMKKRNWSAPGPDRIANYWWKKAHALHEGVTKSFQSIGQSPSEYPMWFAEGKTTLIPKPGEFSSSNQRPITCLNTMYKWFTSCLLGPMDRHLNEYGLMEGEQRGAKSGCSGTVDNLLIDRMVTQDCHRGKRNLSMAWIDVKKAFDSVDHEWLAEMMILHRFPTWLCRTIESLCNSWNTKVVAKTKQGIEKSEVIQFRRGLPQGDALCPRLFTLCMNPVAWKLRASEGYKLSKPLSTKITDLLYIDDLKAFAASEIKLNKVLKSTKSAMQDIGLEWNPKKCATVHVRRGVQVKDETGVQLDDGAVLTNLKEGTYYKFLGTLENLKQDDKLALNVAAKEYLQRMSVIWSSPLSDHNRVAASNQFALPILGYLMWTQSWPIAELRQIDREVRKILVESGGKHPLGSTALLYLPREKGGRGLKSVEQEYKLVKIKAALKVYKNLDPTIAVVRKFEERAGEVGHHSFLKDSMKYAAELGLGLDLEHPSPCITQGGVTITDKKIKVALKETVEKQNTQAVREERWQGKLHTSRWEDVSLSKAGCFAWLKDWTLCPSNTVAGVIELYEQLLPTRIYYSHKVRARPATEVACRLCSRSAETVQHILAGCPTLAQNKYLERHNNALKILFFEILKDANPIDKVPPWFSQVKPKPVYENDQFQAYWDVPLYAEHTEVRANRIDARFIDHQQEKVIALEMSCPWIDNRTSKEEEKTAKYAPLRWEIKRQYPGYDVQQYNIIIDVLDGWSTDMEEGMRNLLGSRVRTKGVLLKMQKSVLSSSLNIARTFKVITSTLQAI

SEQ ID NO: 7583 - protein, 1165 aa, Montipora cactus
MKIMKELWNELGYQGHDFTCQNLRDQAARQEKSLGNVGETICERVRTRRPPTENDREICDMLDNNSQSLQTQTFENASEPELQHSVLQESLCQETKLLLDSAIKIFGSISSEPGEFMNRDIDTRTKERPSQKEIENINKAIAKLTKTTSFQTNDPFVYLWIANCALYAVTVAFLLHKGWKKQKSSASQTTQNNYQNKMKAKYERKVSEMRKKISIAAAEVERLKANKKITKKGRRNRAVLLEECKVLSVAQLVNYMEKKKSTVRRLKREYSRRKKQQQSRELNNQFQTDPGRVYAKFGEMIAEDKDLNRPKYKPRPSTISNETDANQFEDIEEASSFWRQVWSEGGTGNRNAAWLEDVREAINKYVPPPSNENFVLESTEAVKTIMKKRNWSAPGPDRIANYWWKKAHALHEGVTKSFQSIGQSPSEYPMWFAEGKTTLIPKPGEFSSSNQRPITCLNTMYKWFTSCLLGPMDRHLNEYGLMEGEQRGAKSGCSGTVDNLLIDRMVTQDCHRGKRNLSMAWIDVKKAFDSVDHEWLAEMMILHRFPTWLCRTIESLCNSWNTKVVAKTKQGIEKSEVIQFRRGLPQGDALCPRLFTLCMNPVAWKLRASEGYKLSKPLSTKITDLLYIDDLKAFAASEIKLNKVLKSTKSAMQDIGLEWNPKKCAAVHVRRGVQVKDETGVQLDDGAVLTNLKEGTYYKFLGTLENLKQDDKLALNVAAKEYLQRMSVIWSSPLSDHNRVAASNQFALPILGYLMWTQSWPIAELRQIDREVRKILVESGGKHPLGSTALLYLPREKGGRGLKSVEQEYKLVKIKAALKVYKNLDPTIAVVRKFEERAGEVGHHSFLKDSMKYAAELGLGLDLEHPSPCITQGGVTITDKKIKVALKETVEKQNTQAVREERWQGKLHTSRWEDVSLSKAGCFAWLKDWTLCPSNTVAGVIELYEQLLPTRIYYSHKVRARPATEVACRLCSRSAETVQHILAGCPTLAQNKYLERHNNALKILFFEILKDANLIDKVPPWFSQVKPKPVYENDQFQAYWDVPLYAEHTEVRANRIDARFIDHQQEKVIALEMSCPWIDNRTSKEEEKTAKYAPLRWEIKRQYPGYDVQQYNIIIDVLGRWSTDMEEGMRNLLGSRVRIKGVLLKMQKSVLSSSLNIARTFKVIT

SEQ ID NO: 7584 - protein, 1105 aa, Montipora efflorescens
MLDNNSQSLQTQTFENANEPELQHSVPQESLCQETKLLLDSAIKIFDSISSEPGEFMNRDIDTRTKERPSQKEIENINKAITELTKTTSFQTNDPFVYLWIANCALYAVTVAFLLHKGWKKQKSSISQTTQNNYQNKMKAKYERKVSEMRKKISIAAAEVERLKANKKITKKGRRNRAVLLEECKVLSVAQLVNYMEKKKSTVRRLKREYSRRKKQQQSRELNNQFQTDPGRVYAKFGEMIAEDKDLNRPKYKPRQSTISNETDANQFEDIEEASSFWRQVWSEGGTGNRNATWLEDVREAINKYVPPPSNENFVLESTEAVKTIMKKRNWSAPGPDRIANYWWKKAHALHEGVTKSFQSIGQSPSEYPMWFAEGKTTLIPKPGEFSSSNQRPITCLNTMYKWFTSCLLGPMDRHLNEYGLMEGEQRGAKSGCSGTVDNLLIDRMVTQDCHRGKRNLSMAWIDVKKAFDSVDHEWLAEMMILHRFPTWLCRTIESLCNSWNTKVVAKTKQGIEKSEVIQFRRGLPQGDALCPRLFTLCMNPVAWKLRASEGYKLSKPLSTKITDLLYIDDLKAFAASEIKLNKVLKSTKSAMQDIGLEWNPKKCATVHVRRGVQVKDETGVQLDDGAVLTNLKEGTYYKFLGTLENLKQDDKLALNVAAKEYLQRMSVIWSSPLSDHNRVAASNQFALPILGYLMWTQSWPIAELRQIDREVRKILVESGGKHPLGSTALLYLPREKGGRGLKSVEQEYKLVKIKAALKVYKNLDPTIAVVRKFEERAGEVGHHSFLKDSMKYAAELGLGLDLEHPSPCITQGGVTITDKKIKVALKETVEKQNTQAVREERWQGKLHTSRWEDVSLSKAGCFAWLKDWTLCPSNTVAGVIELYEQLLPTRIYYSHKVRARPATEVACRLCSRSAETVQHILAGCPTLAQNKYLERHNNALKILFFEILKDANLIDKVPPWFSQVKPKPVYENDQFQAYWDVPLYAEHTEVRANRIDARFIDHQQEKVIALEMSCPWIDNRTSKEEEKTAKYAPLRWEIKRQYPGYDVQQYNIIIDVLGGWSTDMEEGMRNLLGSRVRTKGVLLKMQKSVLSSSLNIARTFKVIT

SEQ ID NO: 7585 - protein, 1230 aa, Montipora capitata
MATEEDGMSGQEGCERNRRIGRKPTGRVRWTDEMISDLLQCKRKALELASSSYPPRQENGRKKGYMKIMKELWDELGYQGHDFTCQNLRDQAARQEKSLGNVGETICERVGTRRPPTENEREICDMLDNNSQSLQTQTFENANEPELQHSVPQESLCQETKLLLDSAIKIFDSISSEPGEFMNRDIDTRTKERPSQREIENINKAITELTKTTSFQTNDPFVYLWIANCTLYAVTVAFLLHKGWKKQKSSTSQTTQNNYQNKMKAKYERKVSEMRKKISIAAAEVERLKANKKITKKGRRNRAVLLEECKVLSVAQLVNYMEKKKSTVRRLKREYSRRKKQQQSRELNNQFQTDPGRVYAKFGEMIAEDKDLNRPKYKPRQSTISNETDANQFEDIAEASSFWRQVWSEGGTGNRNATWLEDVREAINKYVPPPSNENFVLESTEVVKTIMKKRNWSAPGPDRIANYWWKKAHALHEGVTKSFQSIGQSPSEYPMWFAEGKTTLIPKPGEFSSSNQRPITCLNTMYKWFTSCLLGPMDCHLNEYGLMEGEQRGAKSGCSGTVDNLLIDRMVTQDCHRGKRNLSMAWIDVKKAFDSVDHEWLAEMMILHRFPTWLCRTIESLCNSWNTKVVAKTKQGIEKSEVIQFRRGLPQGDALCPRLFTLCMNPVAWKLRASEGYKLSKPLSTKITDLLYVDNLKAFAASEIKLNKVLKSTKSAMQDIGLEWNPKKCATVHVRRGVQVKDETGVQLDDGAVLTNLKEGTYYKFLGTLENLKQDDKLALNVAAKEYLQRMSVIWSSPLSDHNRVAASNQFALPILGYLMWTQNWPIAELRQIDREVRKILVESGGKHPLGSTALLYLPREKGGRGLKSVEQEYKLVKIKSALKVYKNLDPTIAVVRKFEERAGEVGHHSFLKDSMKYAAELGLGLDLEHPSPCITQGGVTITDKKTKVALKETVEKQNTQAVREERWQGKLHTSRWEDESLSKAGCFAWLKDWTLCPSNTVAGVIELYEQLLPTRIYYSHKVRARPATEVACRLCSRSAETVQHILAGCPTLAQNKYLERHNNALKILFFEILKDANLIDKVPPWFSQVKPKPAYENDQFQAYWDVPLYAEHTEVRANRIDARFIDHQQEKVIALEMSCPWIDNRTSKEEEKTAKYAPLRWEIKRQYPGYDVQQYNIIIDVLGGWSTDMEEGMRNLLGSRVRTKGVLLKMQKSVLSSSLNIARTFKVIT

SEQ ID NO: 7586 - protein, 970 aa, Acropora tenuis
MTALRKEISQLSEEIRRTKYNMKMTKRLWKNRIWIKKELKGKVTLESLTILKEKRINMIRKLKNERRNKIITTKTRKANHTFDQDPGKFYGHLRDILNQDKDKEKPKYEENRSSNNSKQSSSLTKEDFEKFWVPIWQNDQEGNLTSDWITEVRKALKEASPTQDNSPITITKEIVYNCVKKKKNWTSPGLDKITNFWIKKFSSLHALLADAITTLINDSSKSLPSWLAEGRTVMLPKKDNPLPQDFRPITCLNTTYKLVTSVINAELIDHESKFKLMQIDQRGGVKGSMGCIDNLLIDKALLEDATKNAKNISCVWIDVKKAFDSVAHNWLVTVLRDHGVNERLVCFIEKITKLWKTTLIVPTEKGTEKVGPIRIQRGILQGDSFCVNLFTLCINPIAWYLRATEGYTFSHDKTSKITHTLFADDLKSYHKNAVKAATIASNLESMFEDIGLHWGISKCAAVHVKRGKIVPNEGLPLHSGNQIPVLGEGDYYKFLGKYENATQLEKEVQRDASKEYIRRLSVIWSSPLSFTRKVKATNSFATSVLLYHMWTADWPIEHLRELDRSTRQLMNDNKAKHKHESNSLLYLPVDKGGKGMQELETLYKTTKIKTAHYLTVSADPHVQLVSTFQNVKDKKSLRSIVKDARTFAGQLDLNIEYHRVESKTTIKTSNSTIEVNQPQPRHLKTILRKKVEKKLEEEVKQQRWIGQYTVQQWQDEHLHHESYNIAKVWPNIPNVVYSVHTSIVQQLITTKVYNAKKVQSGGEDLLCSFCRVKKETVPHIMCSCSAIAQTLYTARHDRMLRPVYYAILKTLGITNNEEDEEDETIPWYREIQPKCCVETKEVKVLWNIPQHLDVVPKDGANKPDIAICNKKERQWLIFEGTVCNIGQIQERDKLKTEKYADLRASLKRLYPGYNVIQVNLVFDFLAGYHKELIHKLNNVGLSDSMNVIRKCQKWVIAQNCEIVKAFHSRK

SEQ ID NO: 7587 - protein, 982 aa, Girardia tigrina
MVTSMKIIGKLSGNCQKKRRFNKVSAHPSKNRKETEANQTYQDRQTDAEEFLKTVINDSTEQFSDKFQNFILQKQRKSCKKPYKGKIGKDRGKNDKYLHIKYRTEPKKVIETILSESKLNESPPIEKIQEYGRTKTPDPPITDWTKSPRIEKGPIFEFKKITEADIISVLQKMKKSSPGKSNITYKDIEYCDPSAKILAKLFEKIMDNNNLPKSWGEFITILIPKPGKDGKYKEVSSWRPIALLECIYKVFASCLTSQLEKWLTGNDLIFPLQKGTGTSDGCAEHNNVLRIVLEELNEVHVAFLDLTDAFSRMPIDHVIEILSRKGMTSKSCDLIKQIYTDNTSEYSCNGRSIPAIPINRGVRQGCPLSMLLFNIGIDPILTEIDSSPDSGIKIGTHKISCLAYADDIALISNTNERLQEMVNKASQWASWTSMTFNPSKSGYLCTTKGVEKIFINNEEIPKVDDEKGYRYLGVDFTRKTKSSPTELFTGIIKDMKRIANSSLDPWQKIDAYKTFIHSRLIFSFRNYNIPNRELSDYGHPETKDKAFASGLDKEIRKIIKPICGLQPTASNDYLYAGKEYGGLGLIQTRDEYAIQSIIQAFRNLTCEDMSVAEITLINLNNTLKKQKKNKKKKYNPDRSISEMLEWLNEGDRENGIESWWTKIRNNIRYLDKIGLQTRFLHNHEKGICLQIKTSSENLTLSADDNKNLSFQFHRLYRHQKFVDWSKQSSAGRSADSLSKNKISSQVLYDGSLTATEWRFIHQARTGNLPVNFKPKKPREQTLCRACRQYTETQMHILCRCNTNMALITARHNAVVDLVIEAIDFEMPFYEIKNDKQSDFSNSNRRIDIQAKNTGGRTLWLIDIKTPYDDTENLKSARELNETKYKSLEAEAKAKFPGWNIQLGTIVVGCLGSWPKKNDEVLQDLKLSDVAINNLRRRCVISNIKHCSSTWAKHNTLCFNPCSSSTEKPINSILERIQSMDAQ

SEQ ID NO: 7588 - protein, 1061 aa, Girardia tigrina
MQWILISFDQVNRKTTILNRLPKISNDQWAAIKTLNDNLHSFFRNKDNNWDPQETETTKSEQFAGNGYCIGNYIYQIINNGNIDEDNRETVWELSKKRRFNKVSAHPSKNRKETEASQTYQDRQTDAEEFLKSVFNDSTEQFSDKFQKFLLQKQRKSCKKPYKGKIGKDRGKNDKYLNIKYRTEPKKVIETILSEPKVNESPPIEKIQEYGRTKTPDPPKTDWTKSPQIEKGPIFEFKKITEADIISVLQKMKKSSPGKSNITYKDIEYRDPSGKILTKLFEKIMDNNNLPKSWGEFITILIPKPGKDGKYKEVSSWRPIALLECIYKVFASCLTSQLEKWLTGNDLIFPLQKGTGTSDGCAEHNNVLRIVLEELDEVHVAFLDLTDAFSRMPIDHVIEILSRKRMTSKSCDLIKQIYTDNTSEYSCNGRSIPAIPINRGVRQGCPLSMLLFNIGIDPILTEIDSSPDSGIKIGTHKISCLAYADDIALISNTNESLQEMVNKAFQWASWTSMTFNPSKSGYLCTTKGVEKIFINNEEIPKVDDEKGYRYLGVDFTRKTKSSPTELFTGIIKDMKRIANSSLDPWQKIDAYKTFIHSRLIFSFRNYNIPNRELSDYGHPETKDKAFASGLDKEIRKIIKPICGLQPTASNDYLYAGKEYGGLGLIQTRDEYAIQSIIQAFRNLTCEDMSVAEITLINLNNTLKKQKKNKKKKYNPDRSIREMLEWLNEGDRENGIESWWTKVRNNIRYLDKIGLQTRFIQDNEKGICLQIKSSNENLTLSAADNKTLSFQFHRLYRHQKFMDWSKQSNAGRSADALSKNKISSQILYDGSLTTNEWRFIHQARTGNLPVNFKPKKPREQTLCRACRQYAETQMHVLCRCNTNMALITARHNAVVDLVIEAIDFEMPFYEIKSDEQSDFSNSNRRIDIQAKNTGGRTLWLIDIKTPYDDTENLKSARELNETKYKSLEAEAKAKFPGWNIQLGTIVVGCLGSWPKKNDEVLQDLKLSDVAINNLRRRCVISNIKHYSSTWAKHNTLCFNPCSSSTDNPINSILERIQSMDAQ

SEQ ID NO: 7589 - protein, 1031 aa, Girardia tigrina
MTKLIHNLQIPDDIMILDHRIAHKISKGNEEFIKKHISYSSFVGKRLVLCPLCISDMQWILISFDQENQRTAILNRLPRISDEQLIAIKTLNKNIHSFYRNDSLWDPAEIDTTKSEKFAGNGYWIANYIHQIINNGDVNQDNRQTIWELSKKKRFNKISAHPKEKGKQNEQNQTYPVRLTDAEEFLKSASNDSIEEYSEKFQLFVLQKQKKSCKKPYMGKIGKDRGKNDSYLHIKYRTEPKKVIEMILSDTKVNTSPPIEKIPEYGKTKTPDPPVTDWTNCPLIEKGPEFQFKKITETEVLSVLSKMKKSSPGKSNITYKDIEYCDPSGKILTKLFEKILDKNETPKNWGEFITILIPKPGKEGKYDEVSSWRPIALLECIYKVFASCLTSQLEKWLSDNDLIFPLQKGTGTSDGCAEHNNVLKIILEELKEVHVAFLDLTDAFSRMPIAHMIEILRRKGMNSKSCDLICQIYTDNTSEYSCNGRSIQAIPINREVRQGCPLSMLLFNIGIDPILTEIHNSPDSGIKIKDIKISCLAYADDIALNSNTNEGLQEMVNNAFKWASWTSMTFNPSKSGYLSTTKVTEKIFINEEEIPIVDDEKGYRYLGVDFPRKTKSSPTELFKDIINDMKKIADSSLDPWQKLDAYKIFIHSRLIFPFRNYNIPNRELAKYGHAKVKNKVFDYGFDVEIRKIIKPTCGLQPTASNDYFYAGKEYGGLGLVETRDEYAIQSIIQAFRNLTCEDLNVPELTLINLNNTLKKQKKNKKKKNNPDRTISEMMDWLNEGDRENGIESWWTKVRNNIRYLDKIGLQTRFIQDHHLGICLNIKSSKESLTISSANKKTLSFQFHRLYRHQKFVDWSKQANAGRSADALSKNKISSQVLYDGSLTATEWRFIHQARTGNLPVNFKPGKPRAHTLCRACRQHVETQMHVLCLCNMNMALVTARHNAVVDLVIEAIDFEMPYYEIKNDEQSDFSNSTRRIDIQAKNTGGRTLWLLDIKTPYDETENLKSARELNETKYESLEKEAKAKYPG

SEQ ID NO: 7590 - protein, 1119 aa, Eufriesea mexicana
MKLACDKVKNNTGHGPDRRQLPRTAGPVSSGRMGPTPSPSAPAPHLTSEPIPSGVQCPICQPLRQFKSSRGLANHMRTHRGTTSTTQAPAAPAAATMVNEFVCNECDPPRSFASKIGLGQHRKHRHPVSANAEIAVERTRKGCSLEEMRMAAGEEAFVVKYGRDRSGNPVRFINIFLAQYFPGRNSDGIKYVRKTATYRQLLDQAIQALDDTSLCPSSPQTAQAAPSESSATPPTTASPAPHSSPPNPRDKYAEMIRLLISEMNEDDNAIGRRLVLLGEQLLEGRDVSDDIASWLRTVGAQTVVRKKRRKRRRVINADARPSRQKIRRREYAAMQTLFKNNMSRAAHRVLNGDVEVTPPSLEDMVEHWEPVLVHPSAPVEQHPNLPEHQQKLQLAEPIQMSEVDSINVPTNSAPGVDGITPAAWKRCPVMVRALLYNMIMYIGSFPVASLASRTVFVPKKANATLPSDFRPISIASVVVRQLHKILARRMMAAGLVDERQRCLEDGCAENVAVLAATIAHARRHLRELHVVSLDVARAFDSVSHQAITSALTEAGVPEVLVEYVKTTYRNSSTILEVRGKRSGSIVVNRGVRQGDPMSTFIFSLVTDRVLRAIPSTVGYALGQGHLLNAVAYADDVCLIASSSTGMRAALTAAEGAARKQGLVFNSSKCVATSIVPSGRDKKVKVLTVAQFALLDGAPIRQLGPADEWRYLGVNLGPVGLKKASPSLEVELGRVSRAPLKPQQRLKILRCYLITRFYHLLVLSGCTLKVLRHLDLQVRAAVRRWLRLPRDVPVAYFHTACRHGGLGIPSFETTIPGLMRERLMHMKDSSFSSARIVHESLWVQNKVRWTERVLNVNSERLYSSELRAKHWARRLYESVDGRELRDCAKSTASTRWIDAGSLGVPGRDYIQYHHIRTNSLPTRVRTSRGQRLVHNIIKCRAGCDCTETAAHIIQSCFRTHGGRVRRHDAVCRTLADHLRSRGMKVYVEPRLRTSEGLRKPDIVAAKEGRGYIVDAQVVSGAAPLDDSHGRKVEKYNTASVKEAAAGILDIPPSAVTVMSCTISWRGVWSGASARALQGDLGVPVGLLAGIATRVIQGSHTNWTRWNQMTFVARVAREGVG

SEQ ID NO: 7591 - protein, 1060 aa, Neodiprion lecontei
MRIHSRQQAQQTSSAESQPLTPAVDPVASPSTSQGRFVCEDCAPPVTFSTKIGLGQHRRHCHPDATNAEINVERVRKGYSSEELRVAAFEEAYLVKHGKDRLGNRVRFVNVYMAQFFPNRNTDGVKNARKTKIYRDLVAQYVSQLDEGETPESPTPGSSLGRTPPESPARTSAAPIPEEPPPLDPRDRYKEAITSSLGKMAEDESLQDHPLVSLGLDLINGRDISLEMISWLRTLLRPKVRAKASRRRRRCSKRPLNPNAKPSAWRSRRREYARMQDLFKKNMSRAAKAVLDGEDEATLPSLEEMSDFWKPVFEHPSIPVQQHPVLPEHQQKTSLADPITIREVNSINVPSRSAPGIDGITPAVWRQCPALCRALLYNMVLYSGSFPPDVLTSRTVFVPKKAKATKPSDVRPISIASVVVRQLHKILAARMMAAGLIDERQRCLEDGCAENISILASTINHARSNRRELHMVSLDVAKAFDSVSHQAITSALTEAGVPQVLVDYIRTSYEKSTTILEVGKQKSERIVVSRGVRQGDPMSTVIFSLVNDRILRSIPTTVGYELAPNHMVNGVAFADDIVLLTGSVSGMTATLNAVEETARKQGLAFNPSKCVATSIVPSGRDKKVKVLTEPQFALQDGSLIRQLGPVDEWRYLGVNFSPVGIKKASPSLEVELQRITRAPLKPQQRLKILRCYLVTRFYHLLVLSGCTLKVLRHFDFQVRAAVRRWLRLPKDIPIAYVHASCRDGGLGIPSFATTIPGLLLNRLEQMKDSSFKSARIAYGSVWVQKKIEWARGVLNCKGERLNSSEHRAKYWARCLYERVDGMELRDCGRTSASTKWIDAGALGVPGRDYIQYHHVRINSLPTKVRTSRGQRHVYTNIKCRAGCDSTETAAHVIQSCFRTHGGRIKRHDAVCKTLADHMRSRKMRVHVEPHLRTLVGLRKPDILVADGDRGFIVDVQVVSGAVPLDDSHKRKVEKYDSLPIISEAAKVLQVKPSAVTVLSCTLSWRGVWSGTSADTLRSDLRIPLGLLCGITTRVIQGSHTNWTRWNQMTSRIPAERAGIG

SEQ ID NO: 7592 - protein, 1060 aa, Athalia rosae
MRIHNRQQAQRIPSAEAQLSVLAVDPVASSPAAQGQFVCEECVPPVGFSSKIGLGQHRRHRHPDSTNAEINVERLRKGYSSEELRIAASEEAYVVKHGKDRLGNRVQFINVYMAQFFPNRNTDGVKNARKTKAYRDLVAQYVSQLDEDESPESPTPGLPPVRTLPESPARTSAAPIPEEPPSPDPRDRYRVVIISLLAKIAEDESLRDHPLASLGLNLINGLDISVEMIAWLRTLPRPNVRTKAVRRGRRCSKRPRSCNAVPSAWRSRRREYARMQGLFKKNMSRAAKAVLDGEDEATLPSLEEMSDFWKPVFEHPSIPVQQHPVLLGNRQKTSLADPIDIREVDSVNVPCDSAPGIDGITPAVWKQCPALCRALLYNMVLYSGSFPPDVLASRTVFVPKKARAAGPSDFRPISIASVVVRQLHKILAARMMAAGLIDVRQRCLEDGCAENISILASTINHARSNRRELHMVSLDVAKAFDSVSHQAITSALTEAGVPQVLVDYIRTSYEKSTTILEVGKRKSERIVVSRGVRQGDPMSTVIFSLVNDRILRSIPTAVGYELGPNHLVNGVAFADDIVLLTGSVGGMTATLNAVEETARKQGLAFNPSKCVATSIVPSGRDKKVKVLTEPQFALQDGSPIRQLGPVDEWRYLGVNFSPVGIKKASPSLEVELQRITRAPLKPQQRLKILRCYLVTRFYHCLVLSGCTLKVLRHLDFQVRAAVRRWLRLPKDVPIAYVHASCRDGGLGIPSFSTTIPGLLLSRLERMKDSSFESAKIAYGSVWVQKKIEWARGVLNCNGERLNSAEHRAKYWARCLYERVDGKELKDCGGTSASTRWIDAGALGVPGRDYIQYHHVRINSLPTKVRTSRGQRLVYTNIRCRAGCDSTETAAHVIQSCFRTHGGRVKRHDAVCKTLADHLRSRKMRVHVEPHLRTSVGLKKPDILVADEGRGFIVDVQIVSGAVPLDDSHRRKIEKYDSLPIKSEAARVLQVEPSTVTVLTCTLSWRGVWSGASADALRSHLRVPLGLLCGITTRVIQGSHTNWTRWNQSKNFQSLVALLPG

SEQ ID NO: 7593 - protein, 1143 aa, Nomada fabriciana
MDNEDDASDAGAPGPGAPVADSSAMDRRTTGDDTAFSPGHETSQTTDLPLSGYITCKFCTNEGPEQCFLKEAQFLEHLETRHPRHRAIWRCAACQKSFDKLHGWQCHAPKCRGRPNENVVEDGEQVECQACGRVFRTQRGLSQHERHRHPLMRNEKRQATMSGNRGPSNRASAWTKEEVDLLILLDRRFHSEKYPNVRIREFIPQKTLKQISDKRRLLPARGRRTPVAEEESSSSDSSVYASATEEVEEDPRRSLGREAWEVTLREYIQTGHLNDDHPLRVIESKIENLANWRKILPGDAESILQELTEKIKGDSSAVSVTRHQARRLPRGPSAISQRTVRGRRPNRTKQYNYARSQELYRKCPQRLIDWAIAGRQPEVRQTIEVPKKEEISPLYRDLWGVAGPQVKVKVSRRESINHSSPMENMWTPITVEELAGKMKKIKNTTAAGVDGIRKAHLRMNGALHVISKFMNLLLMSRVYPSQWKQNRTTLIPKPGKNMSDASNWRPITIGSLMGRVYSAMIDRRLRSNIDINRRQKGFTKEDGCKQNIAILSKALQSMKEDGGGVVTLIDISKAFDTVPHSVIASSLRTKGVPIIASQYIRKMYRNCSTKIMCKDGEAIDMELLRGVKQGDPLSPLLFNIVLDPVIGKIDTTTEGIKMGDEKVSILAFADDLILLAKTKKEAAKQLKMATNYLKELGMEIAASKCNSFQIVQRNAIWHMADPKLESGGTAIPYTDPESRLKYLGVKIDPWRGLQNASNDEIIEAIKAIRRFKLKPHQKVNLIRTYLLPRYIHRLVANAPPLGTLRSLDLDIRQEIKKILHLHPSTTDGLIYTSKSHGGLGIQRVENIVKVAKLRSAAKMRGSSDEAVAAALLGQETILRKYAASIGLDWEQGLDTDTIEAKRKSLRKLETDRWRQLVSQGQGIREFFGDKIGNSWLYNPELLRPSRYLDALKLRTNTFGTKVAMNRAKKTLDVRCRRCKVQAETLGHILGNCTHTKAQRIKRHNEICNLIKDKVPNHCAVFQEPTVNVLGELKKPDLVIKDHDTVYVVDVTVHYEDRENLPQAYREKIRKYKDTAEYIRLKLNGVRADILPIIVGCRGAIPNDTIRNMKILGLGRKDCLTASLIALRSSIEMANQFIDYDHVT

SEQ ID NO: 7594 - protein, 1144 aa, Nomada fabriciana
MDSEDEASDAEASGPGAPVADMSARMDRTIDDEPGISMEHETEQITDLPLSGYITCRFCAGEGPETCFVNELKFLDHVEKKHPRHKAIWRCAACRRDFEKLHGWRVHNSRCKGESIESNAGEDGASKVCQLCGEGFRTQAGLGQHERHRHPQARNYKRKMQETSGRNLPGNRASAWTKEEVDLLIQLDRRFHGEKYPNVRIREFLPQKTLKQISDKRRLLPARGRVEAEEENSSSGSSVYVSAIEEADDAPRRSLGREGWEEALQSAIMARSLGHEHPLKLIEKQIEDMACWRRILPGDVDLLVRNVTEKLGGDVREGPVTRSRAAGNPARSTASSGRANGRKSATTRKRAYNYARAQEIYKKCPPRLIDWAIAGKPPENRQSIEAPKKEEVEPLYRDLWGVEGPRVRLKRGGRGSETQVSTMGDLWKPITTGELIDKIKKVKGNTAAGIDGITKADLKRDGALHVLAKLFNLLLMSRVYPGQWKLNRTTLIPKPGKSVEEVSNWRPITIGSLIGRIYSSMIDRRLRSIVEISRRQKGFTKEDGCKHNIAILSGALSSMKENGGGIVTVVDISKAFDTVPHCVMGSCLRAKGVPPTAAQYISGMYQDCKTRILCRGGQVLETDIKRGVKQGDPLSPLLFNIIIDPIIGKIDRTTEGVPMGDEKVSVIAFADDLVLLAKTRKEAAKQNQMLSNYLKELGMNVAASKCAAFQIVQKNKTWHMVDPKLESGGTTIPYTDPESTFKYLGIVIDPWRGQHGASTKEVIEAVKNIKRFKLKPHQKVNLIRTYLLPRYIHRLVANPPPLGTLKGLDHDIKQEIKQILHLHPSTTDGIIYTSKSHGGLGVQRVENIVKLAKLRSAIKMKTASDEAVKSALLAQENVIRKYADSIGLNWDQGVTADDVEAVRKSLRKKDTDRWRQLVSQGQGVREFFGDKIGNTWLYNPELLKPSRYLDALKLRSNTFGTRVALNRARKTLDVKCRRCGVQAETLGHILGNCTHTKPQRIKRHNEICKLIRDKMPNHFAVFEEPSINVLGELRKPDLVIKDQEAVYVIDVTVRYEDKDNLPQAFREKQRKYKDTAELIRIRVNGVRAEVIPIVVGCRGAMPKGTLDNMKRLGLGKRDCLTASLIALRSSIEMANQFLDYDHTS

SEQ ID NO: 7595 - protein, 1143 aa, Nomada fabriciana
MDNEDDASDVGAPGPGAPAADLSAMDRRTTGYDTAFSPGHETTQTMDLPLSGYITCKFCPNEGPEQCFLKEAQFLEHLETRHPRHRAIWRCAACQKSFDKLHGWQCHAPKCRGRLNENVVEDGGQVECQACGRVFRTQRGLSQHERHRHPLMRNEKRQATMSGSRGPSNRASAWTKEEVDLLIQLDRRFHNEKYPNVRIRELIPHKTLKQISDKRRLLPARGRRTPVAEEDSSSTDSSMYASATEEVEEDPRRSLGREAWEITLRESIQTGHLNDDHPLRMIESKIENLANWRKILPGDAESILQELTEKIKGDSSAVSVTRHQARRLPRGPSAISQRTVRGKRPNRTKQYNYARSQELYKKCPQRLIDWAIAGRQPEARQAIEVPKKEEISPLYRDLWGVAGPQVKVKVSRRESINHSSPMENMWTPITVEELAGKMRKIKNTTAAGVDGIRKAHLRMNGALHIISKFMNLLLMSRVYPSQWKLNRTTLIPKPGKNMSDASNWRPITIGSLMGRVYSAMIDRRLRSNIDINRRQKGFTKEDGCKQNIAILSKALKSMKEDGGGVVTFIDISKAFDTVPHSVIASSLRTKGVPIIASQYIRKMYRNCTTRIMCKDGEAIDMELLRGVKQGDPLSPLLFNIVLDPVIGKIDTTTEGIKMGDENVSILAFADDLILLARTKKEAAKQLKMATNYLKELGMEIAASKCNSFQIVQRNAIWHMADPKLESGGTAIPYTDPESRLKYLGVKIDPWRGLQNASNDEIIDAIKAIRRFKLKPHQKVNLIRTYLLPRYIHRLVANAPPLGTLRSLDLDIRQELKKILHLHPSTTDGLIYTSKSHGGLGVQRVENIVKLAKLRSAAKMRGSSDEAVTAALLGQETILRKYAASIGLDWEQGLNTDTIEAKRKSLRKLETDRWRQLVSQGQGIREFFGDKVGNSWLYNPELLRPSRYLDALKLRTNTFGTRVVLNRAKKTLDVKCRRCNVQAETLGHILGNCTHTKAQRIKRHNEICNLIRDKVPNHCAVFQEPTVNVLGELKKPDLVIKDHDTVYIVDVTVRYEDRENLPQAYREKIRKYKDTAEYIRLKLNGVRADILPIIVGCRGAIPNDTIRNMKILGLGKKDCLTASLIALRSSIEMANQFIDYDHVT

SEQ ID NO: 7596 - protein, 1038 aa, Nomada fabriciana
MSAVDRRTTVDDQASEQANEMEQWTDLPLSGYIKCRFCDAEGPETCFVNEAQFGDHVEMKHPQRKAIWRCAASRRHFEKLHGWRVHASRCKGAETGSTAGKEAQRRCPECSETFRTLAGLGQHERHRHPQTRNRNREAQSSQGRNRPGNRASAWSREEVDLLIELDRRFHADRYPNVRIREFLPQKTLKQISYKRRLLSARGRANINADEDSSSGSSVYASAEEEIEASARRSIGREQWEESLQNAVMSESLPHEHRMRRTERLIQDVASWRRISQVDVDLIVVHEGPVTRSRAMGTLRNPGTNRNRANARIPNRRTREKRYEYARAQKLYKKCPQRHVDWAIAGRQPQHKPKLEAPEKKEVEPVYRDLWGTAGPQVSLKAGRRQGDQGSSTMCDVWTPITVGELVEILRKIKSNTAAGLDGITKADIRRDGALHVLSKLFNLLLMNRVYPSQWKRNRTTLIPKPGKSEEEVGNWRPITIGSLVGRIYSSMIGRRLRSIIEIHRRQKGFTREDGYKQNITILSSALSSMKIDGGGVMTIVDISKAFDTVPHGVMGSCLRAKGVASAAAQYIVEMYKDCNTRIMCKGGEVVETNLKRGVKQGDPLSPLLFNIILDSIIGKIDETTEGIRMGDEKVSVIAFADDLVLIAKTKIEAAKQNKLLANYLKKLGMSVAASKCSAFQIVQKNTTWHMVDPKLETGGLPIPYSDPESTFKYLGIKVDPWRGLRGSSTKEIVEAVKSVKRLKLKPHQKVNLIRTYLLPRYIHRLVANAPPLGTLRQLDHEVKQEIKQILRLHPSTTDGIIYTNKSHGGLGVQRVENIVKLAKLRSAIGMKAATDEAVRKALHGQENTIRKYATSIGLNWDRGITADDVEEARKGLKKKETGKWRQLVSQGQGIREFAGDKIGNAWLYNLELLRPPRYLDALKIRTNTFGTKVALNRARKTMDVKSRRCGDQAETLGHILGNCTHTKPQRIKRHNEICNLIKDKVPNHCAVFQEPTVNVLGELRKPDLVIKDQETVYVVDIRYVTRIRATSPKHIEKR

SEQ ID NO: 7597 - protein, 1143 aa, Nomada fabriciana
MDNEDDASDAGAPGPGAPVADSSAMDRRTTGDDTAFSPGHETSQTTDLPLSGYITCKFCTNEGPEQCFLKEAQFLEHLETRHPRHRAIWRCAACQKSFDKLHGWQCHAPKCRGRPNENVVEDGEQVECQACGRVFRTQRGLSQHERHRHPLMRNEKRQATMSGNRGPSNRASAWTKEEVDLLILLDRRFHSEKYPNVRIREFIPQKTLKQISDKRRLLPARGRRTPVAEEESSSSDSSVYASATEEVEEDPRRSLGREAWEVTLREYIQTGHLNDDHPLRVIESKIENLANWRKILPGDAESILQELTEKIKGDSSAVSVTRHQARRLPRGPSAISQRTVRGRRPNRTKQYNYARSQELYRKCPQRLIDWAIAGRQPEVRQTIEVPKKEEISPLYRDLWGVAGPQVKVKVSRRESINHSSPMENMWTPITVEELAGKMKKIKNTTAAGVDGIRKAHLRMNGALHVISKFMNLLLMSRVYPRQWKQNRTTLIPKPGKNMSDASNWRPITIGSLMGRVYSAMIDRRLRSNIDINRRQKGFTKEDGCKQNIAILSKALQSMKEDGGGVVTLIDISKAFDTVPHSVIASSLRTKGVPIIASQYIRKMYRNCSTKIMCKDGEAIDMELLRGVKQGDPLSPLLFNIVLDPVIGKIDTTTEGIKMGDEKVSILAFADDLILLAKTKKEAAKQLKMATNYLKELGMEIAASKCNSFQIVQRNAIWHMADPKLESGGTAIPYTDPESRLKYLGVKIDPWRGLQNASNDEIIEAIKAIRRFKLKPHQKVNLIRTYLLPRYIHRLVANAPPLGTLRSLDLDIRQEIKKILHLHPSTTDGLIYTSKSHGGLGIQRVENIVKVAKLRSAAKMRGSSDEAVAAALLGQETILRKYAASIGLDWEQGLDTDTIEAKRKSLRKLETDRWRQLVSQGQGIREFFGDKIGNSWLYNPELLRPSRYLDALKLRTNTFGTKVAMNRAKKTLDVRCRRCKVQAETLGHILGNCTHTKAQRIKRHNEICNLIKDKVPNHCAVFQEPTVNVLGELKKPDLVIKDHDTVYVVDVTVRYEDRENLPQAYREKIRKYKDTAEYIRLKLNGVRADILPIIVGCRGAIPNDTIRNMKILGLGRKDCLTASLIALRSSIEMANQFIDYDHVT

SEQ ID NO: 7598 - protein, 1144 aa, Nomada fabriciana
MDSDSDEASDAGAPGPGTPVADLSAMDNRANVDDTAFVQGYEMEQVTDLPLSGYITCGFCAEGGPDTCFLKEGQFTEHVERRHPRRRAVWRCAACRKRFDKLHGWECHRPHCKGASANEGAEGEGSEVCQLCERKFRTPRGLSQHERHQHPEARNLKRQEQETRASGRNRPGNRASAWSKEEVDLLIVLDRRFCNDRYPNVRIREFLPNKTCKQISDKRRLLPARGRIVEEADDSDTGSSVYESAAEELEEAPRRSIGREGWEASLQEAIQSNSLREEHPLREIERIIENMADWRRILQVDVDRVIQRVTEELRGDVHEGPVTRSGARKRRIRQENIRGARRIRKRTGEKRYLYARTQEMYKKCPQKLIDWAIAGEPQTEKEGIEAPRKVEVGPLYRDLWGVAGPQVKLKSRSRESETGSCRMEELWTPITLGEIVSKYKRIKNNTAAGLDMIRKADLRRDGALHILCKVFNLLLMSRVYPAQWKLNRTTLIPKPGKSVDEVSNWRPITIGSLVSRLYSAMIDKRLRHKVVQDLRQKGFTKEDGCKYNVAILSSALSKMKTEGGGVVVVIDISKAFDTVPHSVIGGCLKRKGVPVAVGQYIAKMYDGCRTKIACRDGEMVDMDLLRGVKQGDPLSPLLFNLIVEPIIGKINRSTEGVKLGDENVSILAFADDLVLLAKTKKEAAKQAKMLARYLKELGMNIAASKCSAFQIVQAQKTWHMVDPQIEVSGSTIPYVDPESTVRYLGVNIDPWRGLSRTSSKEIVDAVKAVKGLKLKPHQKINLIRTYLLPRYIHKLVANPPPLGTLKQIDTEIRQVLKQILSLHPSTTDGIIYTAKSHGGLGVQRVENIVKLAKLRNAIKMKESEDEAVRQALLGQESIVKKYAASIRLDWDRGITVEQIEDARKALRVADTNKWRQLVSQGQGIREFFGDKIGNSWLYKPELLKPSRYLDALKLRTNTIGTKVVLNRARKDMDVKCRRCGVQAETLGHVVGNCTHTKPKRIRRHNEICNLIKSRVSDTCAVFMEPQVNVMGDLRKPDMVIKDQEKVYIVDVTVRYEDKENLRQAYREKERKYMDTAEYIRIKTNSVRAEVIPIVVGCRGAMPKYTIQNMKVLGLGKKDCLTASLIALRSTIEMINEFMDYDYTM

SEQ ID NO: 7599 - protein, 1144 aa, Nomada fabriciana
MEVRIEEEASDTGAPGPGAPVADLSAMDGRTSVINTAFTTGHEMVQVTDLPLSGYIICRFCAGEGPDVCFLQEAQFLKHMEERHPRQGAVWKCAACRRSFKRLHGWQCHKPHCKGTITEEEAEDEAWEWCPECSRTFRTQRGLSQHERHQHPLARNLRRIEQSESGRNRPSNRALAWSREEVDLLIMLDRRFRDDRYPNVRIGEFLPHKTCKQISDKRRHLPAGGRSRITEDADESSSGSSVYESATEKLEEAPRRSMGSERWEDPLRDAIQGNHLSERHPLRELEKKIENMADWRRIFPVDVDRIIQDIVEHTKDDVHEGPVTRSRARIGQQRPESARGARRKKKKTAEKQYDYARAQEMYKKCPPRLVDWAIAGKLLNERKGIEAPVKEEVGPLYRDLWGVAGPQVKVKKDRRESITGSTMEELWTPVTFEEIVSKFKTIKNNTAAGIDGIGKTHLRKDGVLHILGKLFNLLLMSRVFPDQWRLNRTTLIPKPGKSVDEVSNWRPITIGSLMSRLYSAMIDKRIRSKIKQDLRQKGFTKEDGCKHNIAILSSALSKMKTHVGGVITIVDVSKAFDTVPHSVMGGCLRRKGVPAAVGQYVKRMYSGCKTKIACGHGEVVEMDLLRGVKQGDPLSPLLFNLIIEPIIGKINKATEGIELGDENVSILAFADDLVLLAKTKKEAAKQIKMLTNNLKELGMSVAASKCSGFQIVQAQKTWHMVDPRLEVAGVVIPYADPESIIKYLGINIDPWRGLSRASPKEITDAVRGIKRLKLKPHQKINLIRTYLLPRFIHKLIANPPPLGTLKQIDQEIKQEIKKILHLHPSTTDGIIYTAKSHGGIGVQRVENIVKIAKIRNAIKMKETVDVVVREALLGQEVTVRKYAASVGLDWDRGVPIEQVEAARKALRKRDTDKWRQLVSQGQGVRDFLGDKIGNSWLYKPELLKPSRYLDALKLRTNTIGTKVALNRAKKNLDVKCRRCGVQVETLGHIVGNCTHTKPKRIHRHNEICNLIKSRMPKDCAVFMEPTINVIGDTRKPDMVIKDRDRVYVVDVTVRYEDKENLKQAYREKERKYMDTAEYIRIRTNSVRADVLPIVVGCRGAMPRYTIQNMKALGLGRKECLTASLIALRSTIEIVNEFIDYDYTL

SEQ ID NO: 7600 - protein, 1144 aa, Nomada fabriciana
MERQTEEEASDAGAPGPGAPVADLSAMDGRTLDYDTAFAPGHEMEQITDLPLSGYIVCRFCAGEGPDMCFLQEAQFLNHMDERHPRQRAVWRCAACHRSFEKLHGWQCHKPHCKGIIVEEEAEDERGERCPECNRTFRTQRGLAQHERHQHPMARNLKRIEQSESGRNRPSNRASAWSKEEVDLLIMLDRRFREDRYPNVRIREFLPHKTCKQISDKRRHLPAGGRRIVVEDADDSSSGSLVYESATEELEEAPRRSMGRERWEDPLRDAIQSNHLSERHPLREVEKKIENMADWRRIFPADVDRVIQEIIEHTKGDVREGPVARSRATRGQQGPESARGARRKKKKTTERQYEYARAQEMYKKCPPRLVDWAIVGKPLNERKGIEAPVKEEVGPLYRDLWGVAGPQVKVKRDRRESGAGSTMEELWTPVTLEEIVSKFKTIKNNTAAGIDGVGKTHLRKDGVLHILGKLFNLLLMSRVFPDEWRLNRTTLIPKPGKSVDEVSNWRPITIGSLMSRLYSAMIDKRIRSKIAQDLRQMGFTKEDGCKHNIAILSSALSKMKAHGGGVVTIVDVSKAFDTVPHSVMGGCLRRKGVPAAVGQYVKRMYSGCKTRITCRHGEVIEMDLLRGVKQGDPLSPLLFNLIIEPIIGKINKATEGIELGDENVSILAFADDLVLLARTKKEAAKQIKVLTNNLKELGMSIAASKCSAFQIVQAQKTWHMVDPRLEVTGVAIPYADPEAIIRYLGINIDPWRGLSRASPKEIIDAVKGVKRLKLKPHQKVNLIRTYLLPRFIHKLVANPPPLGTLKQIDHEIKQEIKKILHLHPSTTDGIIYTAKSHGGIGVQRVENIVKVAKIRNALKMKESEDVVVKEALLGQEATVRKYAASVGLDWDRGISVEQLEASRKALRRQDTEKWRQLVSQGQGVRDFLGDRIGNSWLYNPELLKPSRYLDALKLRTNTIGTKVALNRAKKNLDVRCRRCGVQVETLGHIVGNCTHTKPKRIHRHNEICNLIKSKMPKDCAVFMEPTINVIGDTRKPDMVIKDRDRVYVVDVTVRYEDKENLKQAYREKERKYMDTAEYIRIKTNSVRADVLPIVVGCRGAMPGYTIQNMKTLGLGKKECLTASLIALRSTIEIVNEFIDYDYTV

SEQ ID NO: 7601 - protein, 1143 aa, Nomada fabriciana
MDSDEDVEASDVGTPGPGAPAADLSAMMDRTTDDDPSNDNGHETIQIMTLPLGGQIECEFCTGGPKVCFVKEAQFVEHVEKRHPRQKLLWRCAACRKDFVKLHGWQCHAPRCAGHVETEVEAEGEDRVQCPLCGAAFGNKRGLSQHERFRHPEVRNKKREESGKSSGRSRPGSRASAWSKEDVDLLIQLDRRFYMDKYPNVRIRELLPHKTLKQISDKRRLLPAWRERRATLESESSSGSSVYETAAEEGEEASRRSVGLERWEDPIRRYIMSSNLKDDHPLRNVERLIQDMAQWRRILPADVDPVITTITEYLKGDVREKSKRKHGNGEKGNRQMQERGTRRASRNTSKRKYGYARTQEIYKKCPSRLVDWAIVGTTPEDKRKIEAPPKEEVAALYQDLWGVAGPQVKLKHAGRNRSSVNTDEVWTPITRDEVINKFKGVKANTAPGVDGVRKVHLRKDGALHVLTKLYNLLLMSRVYPEQWKSHRTTLIPKPGKSVEEVGNWRPITIGSLISRIYSSMIDRRVRDNVTINRRQKGFTKEDGCKQNIAILSSALAAMKENGGGVITVVDITKAFDTVPHSVMGSCLKAKGIPDAAARYICRMYDGCKTNITCSKGELVEMSLLRGVKQGDPLSPLLFNITIDPIIGKIDRTTEGIMMGDERVSVLAFADDLVLLAGTRKEAVKQNKMLNSYLKELGMSVAASKCSAFQIVQGNKTWYMVDQKIETGGSTIPYTDPESTFKYLGIKLDPWRGLRGSSTKEIIESVKAVGRMRLKPHQKINLIRTYLLPRFIHRLVADPPPLGTLRQLDQELRQQIKQILHLHPSTTDGIIYTAKSHGGLGVQRVENIVKLAKIRSAIRMKEAEDTVVKQALLGQEGMIRKYAESIGLNWDEGITIDQVEVARKALRKKETDRWRQLVSQGQGVREFLGDKIGNEWLYNPDLLKPSRYLDALKLRTNTFGTRVVLNRAKKTSDVKCRRCSAQAETLGHILGNCTHTKAHRIRRHNEICKLIESKMPSTHAVFVEPSINVLGELRKPDLVIKDQETVYVVDVTVRYEDRENLPQAYKEKERKYRETAEYLKIKMNGVRAEVIPIIVGCRGAMPKATIQNMKRLGLGKTECRTASLIALRSSLEIANAFIDYDRMA

SEQ ID NO: 7602 - protein, 1146 aa, Nomada fabriciana
MDSDEDIEASDVGTSGPGVPAADLSALMDRTTGNDSGNENGHEMVQITVLPLGGQIECKFCTRGPKVCFVKEAQFLEHVEKRHPRRKVLWRCAACGKDFEKLHGWQCHVPRCAGHAETDSEAEGANQILCSLCGGTFGTKRGLSQHERYRHPELRNKKREEESKGSGRGRPGNRASTWSKEDVDLLIQLDRRFHMEKYPNVRIRELLPHKTLRQISDKRRLLPAWRERRAMPEDTSDSGSSVYETAAEDGEVASRRSVGRERWEDPVRRYILASNLEDSHPLRTVERTIQDMAQWRQVLPADVDPIILTIVEYLKGDVREGPKVRCRADTKGNRQEKEGGTRRAKRTTREKRYEYARAQEIYRKCPSLLVDWAIVGKAPVNRQSIEAPPKEEVASLYKDLWGVAGPQVKLKCLRRSSGNRNSVNTEEVWAPITLEEVVCKFKGIKGNTASGVDGIRKAHLRKDGALHVITKLYNLLLMSRIYPEQWKLHRTTLIPKPGKSVEEVSNWRPITIGSLISRMYSAMIDRRVRNNVTINRRQKGFTKEDGCKQNIAILSSALATMKENGGGVITVVDITKAFDTVPHSVMSSCLKAKGIPDAAARYIRRMYDGCKTIIACGKGEKVEMGLLRGVKQGDPLSPILFNIIIDPIIGKIDEKTEGIKMGDERVSVLAFADDLVLLAKTRKEAVKQNKMLNNYLKELGMSVAASKCTAFQIVQGNKTWYMVDPKLETGGSAIPYNDPESTIKYLGIQLDPWRGLRGSSTKEIVESIKAVGRMKLKPHQKVNLIRTYLLPRYIHRLVADSPPLGTLRNLDIEIRQLLKQMLHLHPSTTDGLIYTAKSHGGLGVQRVESIVKLAKIRSAIRMKEAQDEVVRQALLGQEGMVRKYAASIGINWDDGVTIDQVEAARKALRKKETDHWRQLVSQGQGIKEFFGDKIGNEWLYNPDLLKPSRYLDALKLRTNTFGTRVVLNRVKKTSDVKCRRCGVQAETLGHILGNCTHTKAQRIRRHNEICKLIESKMPSSYAVFVEPSINVLGELRKPDLVIKDQETVYVVDVTVRYEDRENLAQAYREKERKYKDTAEYLKIKMNGVRAETIPIVVGCRGAMPEVTIRNMKRLGLGKADCLTASMIALRSSLEMANAFIDYDHTS

SEQ ID NO: 7603 - protein, 1141 aa, Nomada fabriciana
MENEDEASDAGALGPEAPVADLSATGERTTVDEHGNVPGHEMSQVIDLPLSGFITCRFCASGGPETCFVNEAQFRDHIDSKHPRDIIIWRCTACQRGFGKLHGWRVHAHRCRARELESATEGEVEQVKCQMCDGTFRTQRGLAQHERHRHPEARNQAREGTSASGRIRPSRRVLAWSQEEVELLKELDIRFRGDRYPNVKIREFLPSKTLKQISDKRRLILAQVAVPAVEEESPSGSSIYESAAEELEEAPRTSIGREQWEISLRDAIGSNSLSDTHPLRVLEERIERLANQRRIEPVEINVLLEEITEQIKEDINEGPGIGRAGRRREETRRVGGARIESSRSRRKQFEYARAQELYRKCPPRLIDWAIAGKPQTDRQGIEAPSKEEVGPLYQDLWGVAGPRVKLKGIRRESVAGSISTEELLTPITYEELVSKFKRIKSNTAAGIDGVRKAHLRKDGVLQILSKMFNLLLMSRVYPDKWKLNRTTLIPKPGKSVDDVGNWRPITIGSLVSRMYSAMIDKRIRGKVIQNIRQKGFTKEDGCKSNIAILSSALSKMKEDNGGIVTIVDISKAFDTIPHGVIESCLKNKGVPAAVGKYIKKMYNGCKTKIACKKGEAVETDLLRGVKQGDPLSPLIFNLVIDPIIGRISDSTEGIRLGDEQVSILAFADDLVLLAKTDKEAIKQNKMLTSYIKALGMSIAASKCSTFQIISKNKTWYMVDPKLEMGGSTVPYADPESVIKYLGVNVDPWRGLSRTSVKEIVDAAKSIRTMRLKPHQKINLIRTYLLPRYIHRLVANPPPLGTLRQIDHEIKQVLKQILHLHPSTTDGILYTAKSHGGLGVQRVENIVKLAKLRNAIKMRVSEDEAVRQALIGQESVIRKYAASVGKDWDAGITVDEIEEVRKGLRRQETNKWRQLVSQGQGVHEFMGDKIGNSWLYNPELLKPSRYLDALRLRTNTIGTKVALNRAKKNLDVRCRRCGVQAETLGHIVGNCTHTKPKRIRRHNEICELIKSKMPSSRAVFVEPSINVMGELRRPDLVIKDQEEVYIVDVTVRYEDKDNLRQAYKEKERKYRDTAEYIRIKTNSVRAEIIPIVVGCRGAMPKDTIKNMEFLGLRKKDCLTASMIALRSTLEMVCEFIDYDYTI

SEQ ID NO: 7604 - protein, 1141 aa, Nomada fabriciana
MDSDDGASDTGAPGPGAPVADLSATEGRTNDDDTALAHGHEMEQITDLPLSGYITCRFCSGTGPNTCCIKEGQFLEHVERRHPQCKVVWRCAACQKSFEKLHGWQCHVPHCRGTQSEQEAEGEGREKCGICNRGFRTQRGLAQHERHQHPEERNRRRQEQQAGGRDRPGSRASAWTREEVDLLIQLDRRFHSERYPNVRIREFLPHKTCKQISDKRRLLPARGRNTIEEEDSESGGSAYESAMEELEEDPRRSLGRESWEVSLQEAINSNSLKEQHPLRGTEKLIEDMAYWRRILPVDVDLIVEKVTDELRGDVHEGPATRSGTTEGRGRQNGTRRARNMRNRTKEKRYLYAKTQELYKKCPPKLIDWAMAGEPQAEKESVKAPKKEDVSPLYKDLWGVAGPRVKPKNERGETGISSCTMEEVWTPVTVGEMVSKYKKIKSNTAAGLDGIKKAHLRKDGALQIMSKMFNLLLLSRVYPAQWRLNRTTLIPKPGKSVEEVSNWRPITIGSLISRMYSAMIDQRLRRKVAQNLRQKGFTKDDGCKYNIAILGSALSIMKTQGGGVVTVVDISKAFDTVPHSVIGGCLKRKGVPAAAGQYITRMYDGCQTRISCRDGETIDMDLRRGVKQGDPLSPLLFNLIIEPIIGKINRSTEGVKMGDENVSILAFADDLVLLARNKREAAKQARMLANNLKELGMSVAASKCSAFQIVQAQKTWYMIDPQLEVTGTKIPYVDPESTVRYLGIELDPWRGLSRTSAKEIVDAVKAVKRLRLKPHQKINLIRIYLLPRYIHKLVANPPPLGTLKQIDTEVRQEIKQILRLHPSTTDGILYTSKSHGGLGVQRVENIVKIAKLRNAIKMAESEDEAVKEALKGQEGIVKKYAASVGLEWSSGLTTEQVEAARKALRKADTDKWRQLVSQGQGVKEFFGDKIGNCWLYRPELLKPSRYLDALKIRTNTVGTKVALNRAKKNMDVNCRRCGVQAETLGHIVGNCTHTKPKRIRRHNEICELIKSRVSSRCAVFTEPSVNVLGDVRKPDMVIKDQERVYIVDVTVRYEDRENLRQAYREKVRKYTDTAEYIRIRTNSVRAEVIPIVVGCRGAMPQYTIDNLKALGLGKKDCLTASLIALRSTIEMINEFIDYDYTR

SEQ ID NO: 7605 - protein, 1143 aa, Nomada fabriciana
MEELTEEEASDAGAPGPGAPVADLSAMDGRTLDYDTAFTPGHEMEQVTDLPLSGYIVCRFCAGEGPDVCFLQEAQFLNHMDKRHPRQRAVWRCAACHRSFEKLHGWQCHKPHCKGIVEEEAEDERGERCPECSRTFRTQRGLAQHERHQHPMARNLRRIEQSESGRNRPSNRASAWSKEEVDLLIMLDRRFREERYPNVRIREFLPHKTCKQISDKRRLLPAGGRRVVVEDADESSSGSSVYESATEELEEAPRRSIGRERWEDPLRDAIQSNHLSARHPLREIEKKIENMADWRRIFPADVDQVIQEIIEHTKGDVREGPVTRSRATRGQQGPESTGGARRKKKKTTEKQYEYARAQEMYKKCPPRLVDWAIVGKPLNERKGIEAPVKEEVGPLYRDLWGVAGPQVKVKKDRRESGAGSTMEELWTPVTFEEVVSRFKAIKNNTAAGIDGIEKTHLRKDGVLHILGKLFNLLLMSRVFPDEWRLNRTTLIPKPGKSVDEVSNWRPITIGSLMSRLYSAMIDKRIRNKITQNLRQKGFTKEDGCKHNIAILSSALSKMKAHGGGVITIVDVSKAFDTVPHSVMGGCLRRKGVPAAVGQYVRRMYSGCKTRITCRHGEVVEMDLLRGVKQGDPLSPLLFNLIIEPIIGKINKATEGIELGDENVSILAFADDLVLLAKTKREAAKQIKMLTNNLKELGMSIAASKCSAFQIVQTQKTWHMVDPRLEVTGVAIPYADPEAVIRYLGVNIDPWRGLSRASPKEITDAVKGVKRLKLKPHQKINLIRTYLLPRFIHKLVANPPPLGTLKQIDHEIKQEIKKILHLHPSTTDGIIYTAKSHGGLGVQRVENIVKVAKIRNALKMKESEDVVVKEALLGQEATVRKYAASVGLDWDRGISVEQLEASRKALRRQDTEKWRQLVSQGQGVRDFLGDKIGNSWLYNPELLKPSRYLDALKLRTNTIGTKVALNRAKKNLDVRCRRCGVQVETLGHIVGNCTHTKPKRIHRHNEICNLIKNKMPKDCAVFMEPTINVIGDTRKPDMVIKDRDRVYVVDVTVRYEDKENLKQAYREKERKYMDTAEYIRIRTNSVRADVLPIIVGCRGAMPRYTIQNMKTLGLGKKECLTASLIALRSTIEIVNEFIDYDYTL

SEQ ID NO: 7606 - protein, 1146 aa, Nomada fabriciana
MDSDDYDEASDAGTSGPGVPVADLSARMDRTTYDDLGIPTEHEMVQTIDLPLSGYITCRFCDGGGPETCFVNEIKFIDHVEKRHPRHRAVWKCAACRRDFEKLHGWRVHNSRCKGENIGTNAGEEAQKECQLCGEKFRTQAGLGQHERHRHPQARNYNRTVQEPSGRNRPGSRASAWSKEEVDLLIQLDRRFHDSRYPNVRIREFLPQKTLKQISDKRRLLPARGRIETPIEDDSSSGSSVYVSATEETDEAPRRSIGRERWEEALQNAILARSLGQEHPLRLLERQIEDMASWRRILPGDVDLLVGNVTEQLRGDVREGPVTRSRAAVIPSRPATNNGRAHRRKRATTRQKAYNYARAQEIYRKCPPRLIDWAIAGKPPENRQTIEAPSKEEVEPLYKDLWGVEGPRVSLKRGGRGSLTRVSAMCDLWKPITIGELIDKIKRIKNNTAAGIDGIMKADLKRDGALHVLAKLYNLLLMSRVYPGQWKLNRTTLIPKPGKSVEEVSNWRPITIGSLIGRIYSSMIDRRLRSIVEINRRQKGFTKEDGCKQNITILSGALSSMKESGGGIVTIVDISKAFDTVPHCVMGSCLRAKGVPLAAAQYISEMYRDGKTRILCRGGQVLETNIKRGVKQGDPLSPLLFNIIIDPIIGKIDRTTEGISMGDEKVSVIAFADDLVLLARTRREAAKQNQMLSNYLKELGMNVAASKCAAFQIVQNNKTWYMVDPKLESGGTIIPYTDPESTFKYLGVVIDPWKGQHGASTKEIIEAIKNIKRFKLKPHQKVNLIRTYLLPRYIHRLVANPPPLGTLKGLDHDIKQEIKQILHLHPSTADGLIYTSKSHGGLGVQRVENIIKLAKIRSAIRMKAADDEAVKNALLGQENLLRKYANSLGLDWDQGVTADDVEAARKRLRKKDTDKWRQLVSQGQGIREFFGDRIGNSWLYNPELLKPSRYLDALKLRSNTFGTRVALNRAKKTLDVKCRRCCVQAETLGHILGNCTHTKPQRIKRHNEICKLIKDKMPNHFAVFEEPSVNVLGELKKPDLVIKDQEAVYVVDVTVRYEDKDNLPQAFKEKQRKYKDTAELIKIKINGVRAEVIPIVVGCRGAIPKATLHNMKRLGLGKKDCLTASLIALRSSIEMANHFLDYDHTS

SEQ ID NO: 7607 - protein, 1109 aa, Nomada fabriciana
MVIDEEASDVADLSARDSRTIDDDPASQRTDEMEQWTDLPLSGHIKCRFCRDEGPDVCFINEAQFRDHVDVRHPQRRAIWRCAACRRQFEKFHGWHVHASRCKGNEIGNTAGEEALIECRTCGEAFRTPAGLGQHERHRHPQVRNQNRQAQSSRGGNRPSNRASAWSKEEVDLLIELDRRFCRERYPNVRIREFLPQKTLKQISDKRRLLPARGRSNINDDGDSSSGSSVYVSAEEEVETSTRRSIGREQWEESLQNAIIAESRPQEHPMRRTERLIQDMAYWRRICQVHVDLIVQNVTELIGGDVHEGPVTRSRAAGAHRVPNTNKQGTNGRVPKRKTKERRYEYARAQEIYKKCPQRLVDWAIAGRQPQCKPKIEAPEKKEVEPMYRDLWGTAGPQVSLKASRRLGDQDSSTMSDIWTPVTVGELVERMKRIKHNTAAGLDGIVKADIRRDGALHVLSKLYNMLLMSRVYPSQWKQNRTTLIPKPGKSVEEVSNWRPITIGSLMGRIYSSMIDRRLRTVVEIDRRQKGFTREDGCKHNITILSSALSSMKTNGGGVVTVVDISKAFDTVPHCVMGSCLKAKGVPSAAAQYLTEMYKDCKTRIMCRGGDMVETNLKRGVKQGDPLSPLLFNIILDPIIGKIGETTEGIQMGDEKVSVIAFADDLVLLARTKNEAAKQNKMLASYLKKLGMSVAASKCSAFQIAQNNKTWYMVDPRLETGGLPIPYSDPESTFKYLGIQIDPWRGLRGSSIREIVEAVKNVRRFKLKPHQKVNLIRTYLLPRYIHRLVANAPPLGTLKQLDHEIKQEIKQILRLHPSTTDGIIYTSKSHGGLGVQRVENIVKLAKLRSALRMRTATDEAVRIALLGQESTIRKYATSIGLDWDTGITEENIEEARKGLKKKETGKLRQLVSQGQGIREFFRDKIGNEWLYNPDLLKPSRYLDALRLRTNTFGTRVVLNRVKKTSNVQCRRCSNQAETLGHILGNCTHTKAHRIRRHNEICNLIKSKVPSHCAVFMEPTVNVLGELRKPDLVIKDQDTVYVVDVTVRYEDRENLSQAYREKERKYKDTAEYWKIKMSGVRAETIPIVVGCRGAMPKMTISNMKPSGRQSK

SEQ ID NO: 7608 - protein, 1144 aa, Nomada fabriciana
MEVRTEEEASDAGAPGPGAPVADLSAMDGRTLDDDTAFVPGHEMEQVTDLPLSGYIVCRFCAGEGPDVCFLQEAQFVRHMDERHPRRTAVWRCAACHRSFEKLHGWQCHKPHCKGMIAEEKAEDEGGERCLECSRTFRTQRGLAQHERHQHPAARNLRRIEQNESGRNRPSNRASTWSKEEVDLLIVLDRRFREDRYPNVRIREFLPHKTCKQISDKRRHLPAGGRSIIVENADESSSGSSVDESATEEMEEAPRRSMGRERWEDPLRDAIQSNHLSERHPLREIERKIENMADWRRIFPVDVDRVIQEIIEHAKGDVHEGPVTRSRAIRGQQGPESTRGARRKRKKTAEKQYDYARAQELYKKCPPRLVDWAIAGKPLNERKGIEAPIKEEVGPLYRDLWGVAGPQVKVKVDRRESGAGSTMEELWTPVTLEEIVSKFRTIKNNTAAGTDGIEKTHLRKDGVLHILGKLFNLLLMSRVFPDQWTLNRTTLIPKPGKSVDEVSNWRPITIGSLMSRLYSAMIDKRIRSKITQDLRQKGFTKEDGCKHNIAILSSALSKMKIQGGGVVTIVDVSKAFDTVPHSVMGGCLRRKGVPATVGQYIKRMYSGCRTRIACRNGEVVEMDLLRGVKQGDPLSPLLFNLIIEPIIGKINKATEGIELGDENVSILAFADDLVLLAKTKKEAAKQIKVLTNNLKELGMSIAASKCSAFQIVQAQKTWHMVDPRLEVTGMAIPYADPEAIIRYLGINIDPWRGLSRASPKEITDAVKGVKRLKLKPHQKINLIRTYLLPRFIHKLVANPPPLGTLKQIDHEVKQEIKKILHLHPSTTDGIIYTAKSHGGIGVQRVENIVKISKIRNALKMKESEDVVVREALLGQEATVRKYAASVGLDWDRGIPIEQLEASRKALRKQDTEKWRQLVSQGQGVRDFLGDKIGNSWLYKPELLKPSRYLDALKLRTNTIGTKVALNRAKKNLDVKCRRCGVQVETLGHIVGNCTHTKPKRIHRHNEICNLIKSKMPRDCAVFMEPTINVIGDTRKPDMVIKDRDRVYVVDVTVRYEDKENLKQAYREKERKYMDTAEYIRIKTNSVRADVLPIVVGCRGAMPRYTIQNMKTLGLGKKECLTASLIVLRSTLEIVNEFIDYDYTL

SEQ ID NO: 7609 - protein, 1144 aa, Nomada fabriciana
MERRIEEEASDAGAPGPGAPVADLSAMDGRTLDDDTAFAPGHEMEQITDLPLSGYIVCRFCAGEGPDVCFLQEAQFLNHMDERHPRQRAVWRCAACHRSFEKLHGWQCHKPHCKGIIIEEEAEDERGERCPECNRTFRTQRGLAQHERHQHPMARNLRRIEQSESGRNRPSNRASAWSKEEVDLLIMLDRRFREDRYPNVRIREFLPHKTCKQISDKRRHLPAGGRRLVVEDADDSSSGSSVYESATEELEEAPRRSMGRERWEDPLRDAIQCNHLSERHPLREVEKKIENMADWRRIFPADVDQVIQEIIEHIKGDVREGPVARSRATRGQQGPESARGARRKKKKTTERQYEYARAQEMYKKCPPRLVDWAIVGKPLNERKGIEAPVKEEVGPLYRDLWGVAGPQVKVKRDRRESGAGSTMEELWTPVTLEEIVSKFKTIKNNTAAGIDGVGKTHLRKDGVLHILGKLFNLLLMSRVFPDEWRLNRTTLIPKPGKSVDEVSNWRPITIGSLMSRLYSAMIDKRIRSKIAQDLRQKGFTKEDGCKHNIAILSSALSKMKAHGGGVVTIVDVSKAFDTVPHSVMGGCLRRKGVPAAVGQYVKRMYSGCKTRITCRHGEVIEMDLLRGVKQGDPLSPLLFNLIIEPIIGKINKATEGIELGDENVSILAFADDLVLLARTKKEAAKQIKMLTNNLKELGMSIAASKCSAFQIVQAQKTWHMVDPRLEVTGVAIPYADPEAIIKYLGINIDPWRGLSRASPKEIIDAVKGVKRLKLKPHQKVNLIRTYLLPRFIHKLVANPPPLGTLKQIDHEIKQEIKKILHLHPSTTDGIIYTAKSHGGIGVQRVENIVKVAKIRNALKMKESEDVVVKEALLGQEATVRKYAASVGLDWDRGISVEQLEASRKALRRQDTEKWRQLVSQGQGVRDFLGDRIGNSWLYNPKLLKPSRYLDALKLRTNTIGTKVALNRAKKNLDVRCRRCGVQVETLGHIVGNCTHTKPKRIHRHNEICNLIKSKMPKDCAVFMEPTINVIGDTRKPDMVIKDRDRVYVVDVTVRYEDKENLKQAYREKERKYMDTAEYIRIKTNSVRADVLPIVVGCRGAMPRYTIQNMKTLGLGKKECLTASLIALRSTIEIVNEFIDYDYTV

SEQ ID NO: 7610 - protein, 1147 aa, Nomada fabriciana
MDSDDYGEASDAGASGPGVPAADMSATMDRTTYDDLGIPTEHELVQIIDLPLSGYITCKFCAGGGPETCFVNEIKFIDHVEKRHPRHRAVWKCAACRRDFEKLHGWRVHNPRCKGESIGSSAGEDGAQKECQLCGESFKTQAGLGQHERHRHPQARNYKRATQEPSGRNRPGSRASAWSKEEVDLLIQLDRRFHDSRYPNVRIREFLPHKTLKQISDKRRLLPARGRVEAQIEDDSSSGSSVYVSATEETDDAPRRSIGRERWEETLQNAIQARSLGQEHPLRLIERRIEDMASWRRILPGDVDLLVGNVTEQLRGDVREGPVTRSRAAVIPSRSATSNGRAHRRKRATTRRKAYDYARAQEIYKKCPPRLIDWAIAGKPPDDRQKIEAPRKEEVEPLYKDLWGVEGPRVSLKRGGRGSLTRASAMCDLWKPITIGELIDKIKKIKSNTAAGIDGIIKADLKRDGALHVLAKLYNLLLMSRVYPGQWKLNRTTLIPKPGKSVEEVSNWRPITIGSLIGRIYSSMIDRRLRSIVEINRRQKGFTKEDGCKQNITILSGALSSMKENGGGIITVVDISKAFDTVPHCVMGSCLRAKGVPPAAAQYISEMYRNSKTRILCRDGEVLETNIKRGVKQGDPLSPLLFNIIIDPIIGKIDRTTEGISMGDERVSVIAFADDLVLLAKTRREAAKQNQMLSNYLKELGMNVAASKCAAFQIVQNNKTWHMVDPKLESGGTIIPYTNPESTFKYLGVVIDPWRGQQGASTKEIIEAIKNIKRFKLKPHQKVNLIRTYLLPRYTHRLVANPPPLGTLKGLDHDVKQEIKQILHLHPSTADGLIYSSKSHGGLGVQRVENIVKLAKIRSAIRMRAADDEAVKSALLGQENLIRKYANSVGLNWDQGVTADDVEAARKRLRKKDTDKWRQLVSQGQGIREFFGDRIGNSWLYNPELLKPSRYLDALKLRSNTFGTRVALNRAKKTLDVKCRRCCVQAETLGHILGNCTHTKPQRIKRHNEICKLIKDKMPHHFAVFEEPTVNVLGELRKPDLVIKDQEAVYVVDVTVRYEDKDNLPQAFKEKQRKYKDTAELIRLKLNGVRAEVMPIVVGCRGAMPKATIHNMKRLGLGKKDCLTASLIALRSSLEMANHFLDYDHTS

SEQ ID NO: 7611 - protein, 1144 aa, Nomada fabriciana
MDSDSDEASDAGAPGPGTPAADLSAMDNRANVDDTAFVQGYEMEQVTDLPLSGFITCGFCAEGGPDTCFLKEGQFTEHVEKRHPRRRAVWRCAACRKRFDKLHGWQCHMPHCKGALVNEEAEGEGNEVCQLCERKFRTPRGLSQHERHQHPEARNLKRQEQETRASGRNRPGNRASAWSKEEVDLLILLDRRFCNERYPNVRIREFLPNKTCKQISDKRRLLPARGRIVEEADDSDTGSSVYESAAEELEEAPRRSIGREVWEASLQEAIQSNSLKEEHPLREIEKIIENMADWRRILQVDIDLVIQRVIEELRGDVHEGPVTRSGARKGRMRQENNRGARRIRKRTGEKRYLYARAQEMYKKCPQKLIDWAIAGEPHTDKEGIKAPRKEEVSPLYRDLWGVAGPQVKLKSRSRESETGSCRMEELWTPITLGEIVSKYKRIKNNTAPGLDMIRKADLRRDGALHILCKVFNLLLMSRVYPAQWKLNRTTLIPKPGKSVDEVSNWRPITIGSLVSRLYSAMIDKRLRHKVVQDLRQKGFTKEDGCKYNVAILSSALSKMKTEGGGVVIIIDISKAFDTVPHSVIGGCLKRKGVPVAVGQYIAKMYDGCRTKIACRDGEMVDMDLLRGVKQGDPLSPLLFNLIVEPIIGKINRSTEGIKLGDENVSILAFADDLVLLAKTKKEAAKQAKVLARYLKELGMSIAASKCSAFQIVQAQKTWHMIDPRIEISGSTIPYVDPESTVRYLGVNIDPWRGLSRTSSKEIVDAVKAVKGLKLKPHQKINLIRTYLLPRYIHKLVANPPPLGTLKQIDTEVRQVLKQILSLHPSTTDGIIYTAKSHGGLGVQRVENIVKLAKLRNAIKMKGSEDEAVRQALLGQEGIVKKYAASIRLDWDSGITVEQIEDARKALRVADTNKWRQLVSQGQGVREFLGDKIGNSWLYKPELLKPSRYLDALKLRTNTIGTKVVLNRARKDMDVKCRRCGVQAETLGHVVGNCTHTKPKRIRRHNEICNLIKSRVSDTCAVFMEPQVNVMGDLRKPDMVIKDQEKVYIVDVTVRYEDKENLRQAYREKERKYMDTAEYIRIKTNSVRAEVIPIVVGCRGAMPKYTVQNMKVLGLGKKDCLTATLIALRSTIEMINEFMDYDYTR

SEQ ID NO: 7612 - protein, 1115 aa, Nomada fabriciana
MDSDEEASDAGASGPGVPVADMSARMDRTIYDEPGISMEHETEQITDLPLSGYITCRFCAGEGPETCFVNELKFLEHVEKRHPRHKAVWRCAACRRDFAKLHGWRVHNSRCKGENIESSAGEDGALKMCQLCGEGFQTQAGLGQHERHRHPQARNCKRKMQEISGRNLPGNRASAWTKEEVDLLIQLDRRFHGERYPNVRIREFLPHKTLKQISDKRRLLPARGRVEVAEESSSSGSSVYVSAIEEADDAPMRSLGREGWEEALQIAITARSLGQEHPLRLIEKQIEDMACWRRILPGDVDLLVRNVTEKLRGDVREGPVTRSRAAGNPARSATNNGRANGRKSATTKKRAYNYARAQEIYKKCPPRLIDWAIAGKPPENRQTIEAPKKEEVEPLYRDLWGVEGPRVSLKRGGRGSGARVSTMGDLWKPITTGELIDKFKKVKGNTAAGFDGITKADLKRDGALHVLAKLYNLLLMSREYPGQWKLNRTTLIPKPGKSVEEVSNWRPITIGSLIGRIYSSMIDRRLRSVVEINRRQKGFTKEDGCKHNIAILSGALSSMKENGGSIITVVDISKAFDTVPHCVMGSCLRAKGVPPTAAQYISGMYKNCKTRILCRGGQVLETDIKRGVKQGSRPYYISPLLFNIIIDPIIGKIDRTTEGVPMGDEKVSVIAFADDLVLLAKTRREAAKQNQMLSNYLKELGMNVAACKCAAFQIVQKNKTWHMVDPKLESGGTAIPYTDPESTFKYLGVVIDPWRGQHGASTKEVIEAVKNIRRFKLKPHQKVNLIRTYLLPRYIHRLVANPPPLGTLKGLDHDIKQEIKQILHLHLSTTDGIIYTSKSHGALLAQENIVRKYADSIGLKWDQGVTADDVEAVRKSLRKKETDRWRQLVSQGQGIREFFGDKIGNTWLYNPELLKPSRYLDALKLRSSTFGTRVALNRARKTLDVKCRRCDVQAETLGHVLGNCTHTKPQRIKRHNEICKLIRDKVPNHFAVFEEPSINVLGELKKPDLVNKDQEAVYVIDVTVRYEDKDNLPQSFRQKQSKYKDTAELIRIRVNGVRAEVIPIVVGCRGAMPKGTLDNMKRLGLGKKDCLTASLIALRSSIEMANQFLDYDHTS

SEQ ID NO: 7613 - protein, 1125 aa, Coccinella septempunctata
MEGFSGLDERISRPAQEPKRDGRARWTEDENVLIIRAHFIAKALEQASERTYRQLLTETWNNIKPDKQLYTNLLANRVRYLLEGEKLSSVELAAIEQSMWPHTAPPAEDQEQELQQQEELYVEQQEEDQGDQLTIKIKQAFKRNALLYTGINPEMRPKIPRMKGSRIMLEKVKVVDEIIKYNISSTTTLRDVVDLVYTGAVTVCEEMGKCITITQPHRRPKREQPPWKARLERKIIKIRKNIGLLHTYLNTEVVSNKVHKRVHWIASEARIDLRAADFRLKLETLNDSLKQKIKALGNRIKRYTERTIRYQNNQLYYRNQKQFFRNLENSNHSNNEPPKTEDMYTYWQAIWGKNKQHDDAARWIREAEAESSSYNMEEVKITKLDIEQVLKKTNNWAAPGPDKVQNYWWKHFPSTYQILATLFQKALSNPAVIPRFFTLGTTVMLPKGNTTSDPKNFRPITCLPTIYKILTGTITTYIWKHVKKENILAREQNGCCRDAKGCKELLVVDQIITGQAKGKLRNISVAWVDYKKAFDSVPHSWLLKVLRLYGVSEKVINLLEHLMSTWRTTLLVENGGNSSMSNEIAIKCGIFQGDTLSPLWFCLALNLLSKLLNKTKYGYIINKIRNVKINHQLYMDDLKLFAANREEMRRLLEIVSSFSQTIGMEMGLDKCAVLNVKRGRVTEGQDIKLWDESSISCLGQQETYKYLGIKQALDIRKPEVKDDFKTKYFSRLRCLLKAKLNSKALFTAINTWVLPCISYSFGVVRWTATELEAIDIQTRKLLTRYGIHHPHASVNRLYISRHEGGRGLQNILITHNRMVSQMRDYFRSRNLPFFKSVCQADEYSALQLAKPSVNLKEQSLEQLTAEWHSKALHGRYPENLKSDNIIKNESITYLKAGYLHPETEGRLVAIQDQVVPTRAYIKRITGRNIPSDLCRRCSKALETIQHITSSCSILAPKDYTERHNAMARVYHREIALKTGLLQSKGNLYTYHPRDVLENDNYKLYWDTAIITDRSIAHNRPDIVLFDKREKSVQIVDVTVPADDNITKAYTEKVSKYHDLAFELKEIYGLRKTSIVPLIISVNGLVEAHMLENTKRLHLDTSLISQAQREVILGTTRIVRRFLTSS

SEQ ID NO: 7614 - protein, 985 aa, Coccinella septempunctata
MWPQTAVPVDDDEPEHQDEQQPETQNSPLVEGTGRVFGRNLLSYAGMNPESRPMIPRMKGSRIMLEKEMGVHLKQPITKLERSQPPWKTRLVRKINVIRKKIASLHTYLNTDSPPNKVYKAVRRIASELQIKAWTPDFRQKLETLCDKLKQRVKALGNRMKRYNERTKRYKNNQLYYKNQKQFFRDLENGTATDDKPPKAEDMRKYWQEIWGKDKHHDDGAGWIREAEAESTKYDMEDIHITKSDIEYVLKKTNNWAAPGPDKIHNYWWKYFPSTHQPLATLFQRALRNPSTIPKSLTLGCTRMIPKGNITTNPKNFRPITCLPTIYKILTGTITMHIWKHVGKHHILAREQGGCCKDAKGCKELLVIDQIITKQAKCKLRNISVAWIDYKKAFDSVPHSWLLKVLRLYGISETIINLLEHLMKSWRTKLVTETKDGISSSEEIAIRCGIFQGDTLSPLWFCLALNLLSKLLNKTKYGYVLNKVRHVKINHQLYMDDLKLYAANEDQMRRLLEIVSSFSQTIGMEMGLDKCAVLNVKRGKIVEGPGIRLWNDLKIECLQPQEAYKYLGIQQALDIKTTEVKETLKAKYFARIRSLLKAKLNSKALFTSINIWAVPCISYSFGVVRWTAAELQAMDIQTRKLLTRYGVHHPHSSVSRLYLSRHEGGRGLQNMQITHNKIVLQMRDYFRKKHLPFFQTVCQADESSVLQLVRSSIDLKEQSLDQLSEEWHSKALHGRYPGNLKSDNILKSESLTYLKAGYLFPETEGRIVAIQDQVMPTRAYIKRITGRNILTDSCRKCAKALETIQHITSSCPILAPRDYTERHNAMARIYHREIAKKAGLIQDHGKRHTYQPRDVLENDRFKLYWDTIMITDRAIPHNRPDIVLFNKTERSVHIIDVTVPADENIPRSYTEKLTKYHDLAFELKEIYGLEKTTILPLIISVNGLVESHLVENTKRLQLNSSLISQAQKEVILATTRIVRKFLTST

SEQ ID NO: 7615 - protein, 987 aa, Harmonia axyridis
MKQIFGRNTLLYSGINPEARLKIPRMKGSRIMLEKVRMVDAIIESHITSATTLRDIVDLVYTGAATVCEEMGKCLTEPHRKPKKEQPAWRARLERKVLKIRKNIGLLHTYLNTEVVSNKVHKAVRRIASEVRINLKASDSRMKLETLNDHLKQKIKALGNRIKRYTESKMRYENNQLYYKNQKQFFRNLENNNNSDKEPPKTEDMYTYWQAIWGNNKQHDDTARWIRETEAESSRYNMEEVEITKLDIEQVLKKTNNWAAPGPDKIQNYWWKHFPSTHQTLVTLFQRALTNPTVIPGFFTLGTTIMLPKGNTTSDPKNFRPITCLPTIYKLLTGTITKYIWNHVKKENILACEQNGCCRDAKGCKELLVVDQIITGQAKGKLRNISIAWVDYRKAFDSVPHTWLLKTLRLYGISDKVINLLEHLMSAWRTTLLIDNRGESSMSKEIAIKCGIFQGDTLSPLWFCLALNPLSKLLNKSKYGYIINNTRNCKINHQLYMDDLKLFAANREEMRRLLEIVSSFSQTIGMEMGLDKCAVLDVKRGRVAEGPEIKLWNESKISCLGPQETYKYLGIQQALDIKTPEVKDNFKTKYFARLRSLLKAKLNSKALFTAINIWVLPCITYSFGVVRWTAAELQAIDIQTRKLLTRYGIHHPHSSVNRLYISRHEGGRGLQNILITHNKIVSQMRDYFRSRNLPLFKIVCQADEYSALQLAKSSVNLREQSLEQLSEEWHSKALHGRYPGNLKSDNIIKNESLTYLKAGYLHPETEGRLIAIQDQVVPTRAYIKRITGRNIPSDLCRRCSRALETIQHITSSCPILAPKDYMERHNAMARVYHREIATKTGLLQSNDGFYSYQPRDVLENDIFKLYWDTAMVTDRSIAHNRPDIVLFNKTEKSVQIIDVSVPADDNITKAYTEKVSKYHDLAFELKEIYGLRKASIVPLIISVNGLVEAHMLENTKRLQLDTYLISQAQKQVILGTTRIVRRFLTSS

SEQ ID NO: 7616 - protein, 1125 aa, Coccinella septempunctata
MEGFSGLDERISRPAQEPKRDGRARWTEDENVLIIRAHFIAKALEQASERTYRQLLTETWNNIKPDKQLYTNLLANRVRYLLEGEKLSSVELAAIEQSMWPHTAPPAEDQEQELQQQEELYVEQQEEDQGDQLTIKIKQAFKRNALLYTGINPEMRPKIPRMKGSRIMLEKVKVVDEIIKYNISSTTTLRDVVDLVYTGAVTVCEEMGKCITITQPHRRPKREQPPWKARLERKIIKIRKNIGLLHTYLNTEVVSNKVHKRVHWIASEARIDLRAADFRLKLETLNDSLKQKIKALGNRIKRYTERTIRYQNNQLYYRNQKQFFRNLENNNHSNNEPPKTEDMYTYWQAIWGKNKQHDDAARWIREAEAESSSYNMEEVKITKLDIEQVLKKTNNWAAPGPDKVQNYWWKHFPSTYQILATLFQKALSNPAVIPRFFTLGTTVMLPKGNTTSDPKNFRPITCLPTIYKILTGTITTYIWKHVKKENILAREQNGCCRDAKGCKELLVVDQIITGQAKGKLRNISVAWVDYKKAFDSVPHSWLLKVLRLYGVSEKVINLLEHLMSTWRTTLLVENGGNSSMSNEIAIKCGIFQGDTLSPLWFCLALNLLSKLLNKTKYGYIINKIRNVKINHQLYMDDLKLFAANREEMRRLLEIVSSFSQTIGMEMGLDKCAVLNLKRGRVTEGQDIKLWDESSISCLGQQETYKYLGIKQALDIRKPEVKDDFKTKYFSRLRCLLKAKLNSKALFTAINTWVLPCISYSFGVVRWTATELEAIDIQTRKLLTRYGIHHPHASVNRLYISRHEGGRGLQNILITHNRMVSQMRDYFRSRNLPFFKSVCQADEYSALQLAKPSVNLKEQSLEQLTAEWHSKALHGRYPGNLKSDNIIKNESITYLKAGYLHPETEGRLVAIQDQVVPTRAYIKRITGCNIPSDLCRRCSKALETIQHITSSCSILAPKDYTERHNAMARVYHREIALKTGLLQSKGNLYTYHPRDVLENDNYKLYWDTAIITDRSIAHNRPDIVLFDKREKSVQIVDVTVPADDNITKAYTEKVSKYHDLAFELKEIYGLRKTSIVPLIISVNGLVEAHMLENTKRLHLDTSLISQAQREVILGTMRIVRRFLTSS

SEQ ID NO: 7617 - protein, 1033 aa, Propylea japonica
MEGFSGLDERISRPAQEPKRDGRARWTEDENVLIIRAHFIAKALEQASERTYRQLLTETWNNIKPDKQLYTNLLANRVRYLLEGEKLSSVELAAIEQSIWPHTAPPAEDQEQELQQQEELYVEQQEEDQGDQLTIKIRQAFKRNALLYTGINPEMRPKIPRMKGSRIMLEKVKVVDEIIKHHISSTSTLRDVVDLVYTGAVTVCEEMGKCITITQPHRRPKREQPPWKARLERKITKIRKNIGLLHTYLNTEVVSNKVHKRVHWIASEARIDLRAADFRLKLETLNDSLKQKIKALGNRIKRYTERTIRYQNNQLYYRNQKQFFRNLENNNHSNNEPPKTEDMYTYWQAIWGRNKQHDDAARWIREAEAESSSYNMEEVKITKLDIEQVLKKTNNWAAPGPDKVQNYWWKHFPSTYQILATLFQKALSNPAVIPRFFTLGTTVMLPKGNTTSDPKNFRPITCLPTIYKILTGTITTYIWKHVKKENILAREQNGCCRDAKGCKELLVIDQIITGQAKGKLRNISVAWVDYKKAFDSVPHSWLLKVLRLYGVSEKVINLLEHLMSTWRTTLLVENGGNSSMSNEIAIKCGIFQGDTLSPLWFCLALNLLSKLLNKTKYGYIINKIRNVKINHQLYMDDLKLFAANREELRRLLEIVSSFSQTIGMEMGLDKCAVLNVKRGRVTEDQDIKLWDESSISCLGQQETYKYLGIKQALDIRKPEVKDDFKTKYFSRLRCLLKAKLNSKALFTAINTWVLPCISYSFGVVRWTATELEAIDIQTRKLLTRYGIHHPHASVNRLYISRHEGGRGLQNILITHNRMVLQMRDYFRSRNLPFFKSVCQADEYSALQLAKPSVNLKEQSLEQLTAEWHSKALHGRYPGNLKSDNIIKNESITYLKAGYLHPETEGRLVAIQDQVVPTRAYIKRITGRNIPSDLCRRCSKALETIQHITSSCSILAPKDYTERHNAMARVYHREIALKTGLLQSKGNLCTYHPRDVLENDNYKLYWDTVIITDRSIAHNRPDIVLFDKGRSQCR

SEQ ID NO: 7618 - protein, 997 aa, Adalia bipunctata
MDANSLPDKRSEQSLKKNILLYAGINPEDRPQIPRLKGSRELLERVRNLNVVIEGSITNASTLGDIVDLVYASAVTVCEEMNKPVTQIHTRPQKKPPPWRARLEGKINKMRKEIGSLHTYLNEESASRKVHKAVRKIASEYRIPARSPERREKLQKLCDQLKQKIKAFGNRIKRYNERTKRYHNNQIFYKNQKQFFRSLEQETTVEGEPPNKEDMYNYWQTIWGKEKKHDDKANWIKEAESESWKYNMEDITISKSDVECVIKRTNNWAAPGPDKIQNYWWKHFTSTHQALASLFQKSLRDPTVIPRTFTLGTTLMIPKGNITTDPKNFRPITCLPTIYKILTGTLTMHIWKHVREHNILAPEQKGCCKDARGCRELLIIDQIITGQVKNKLRNISIAWIDYKKSFDSVPHSWLLKILKLYGISENIINLLEHLMKEWRTTLVTETKNGKSKTGEISIKRGIFQGDTLSPLWFCLALNVLSRLLNRSKYGYVLNKTRKLKVNHQLYMDDLKLLAATQEELRRLLEIVSSFSQTIGMEMGLSKCAVLNVKRGRVVEGDEIKLWDDSIISCLKPQEAYKYLGIMQTLDIRTADMKESLRTKYFTRLRSLLKAKLNSKALFTSINKWALPCISYSFGIVRWTYAELQALDIQTRKLLTRYGVHHPHSSVSRLYLSRHDGGRGLQNIQITHNKMVSEMRDYFRSKNSPFYKTICQVDESSRLQLAKSSINLKELSLEQLSEEWHSKALHGRYPGSLKSDNIIKSESLTYLKAGYLFPETEGRIIAIQDQVVPTRAYVKRITGRNLPTDVCRKCSKSLETIQHVTSSCPILAPKDYMERHNAMAKVFHRESAKRTTLIRDRGTLYTYQPSSVLENENYRLYWDTTIITDRAVPHNRPDIVLLNKMDKSVQIIDVTVPADDNIARAYTEKLTKYHDLAFELKEMYGLNKTAILPLIISVNGLVETHMIENVKRLQLDTHLISLAQKEVILGTTRMVRKFLVSS

SEQ ID NO: 7619 - protein, 1125 aa, Coccinella septempunctata
MEGFSGLDERISRPAQEPKRDGRARWTEDENVLIIRAHFIAKALEQASERTYRQLLTETWNNIKPDKQLYTNLLANRVRYLLEGEKLSSVELAAIEQSMWPHTAPPAEDQEQELQQQEELYVEQQEEDQGDQLTIKIKQAFKRNALLYTGINPEMRPKIPRMKGSRIMLEKVKVVDEIIKYNISSTTTLRDVVDLVYTGAVTVCEEMGKCITITQPHRRPKREQPPWKARLERKIIKIRKNIGLLHTYLNTEVVSNKVHKRVHWIASEARIDLRAADFRLKLETLNDSLKQKIKALGNRIKRYTERTIRYQNNQLYYRNQKQFFRNLENNNHSNNEPPKTEDMYTYWQAIWGKNKQHDDAARWIREAEAESSSYNMEEVKITKLDIEQVLKKTNNWAAPGPDKVQNYWWKHFPSTYQILATLFQKALSNPAVIPRFFTLGTTVMLPKGNTTSDPKNFRPITCLPTIYKILTGTITTYIWKHVKKENILAREQNGCCRDAKGCKELLVVDQIITGQAKGKLRNISVAWVDYKKAFDSVPHSWLLKVLRLYGVSEKVINLLEHLMSTWRTTLLVENGGNSSMSNEIAIKCGIFQGDTLSPLWFCLALNLLSKLLNKTKYGYIINKIRNVKINHQLYMDDLKLFAANREEMRRLLEIVSSFSQTIGMEMGLDKCAVLNVKRGRVTEGQDIKLWDESSISCLGQQETYKYLGIKQALDIRKPEVKDDFKTKYFSRLRCLLKAKLNSKALFTAINTWVLPCISYSFGVVRWTATELEAIDIQTRKLLTRYGIHHPHASVNRLYISRHEGGRGLQNILITHNRMVSQMRDYFRSRNLPFFKSVCQADEYSALQLAKPSVNLKEQSLEQLTAEWHSKALHGRYPGNLKSDNIIKNESITYLKAGYLHPETEGRLVAIQDQVVPTRAYIKRITGCNIPSDLCRRCSKALETIQHITSSCSILAPKDYTERHNAMARVYHREIALKTGLLQSKGNLYTYHPRDVLENDNYKLYWDTAIITDRSIAHNRPDIVLFDKREKSVQIVDVTVPADDNITKAYTEKVSKYHDLAFELKEIYGLRKTSTVPLIISVNGLVEAHMLENTKRLHLDTSLISQAQREVILGTTRIVRRFLTSS

SEQ ID NO: 7620 - protein, 1125 aa, Coccinella septempunctata
MEGFSGLDERISRPAQEPKRDGRARWTEDENVLIIRAHFIAKALEQASERTYRQLLTETWNNIKPDKQLYTNLLANRVRYLLEGEKLSSVELAAIEQSMWPHTAPPAEDQEQELQQQEELYVEQQEEDQGDQLTIKIKQAFKRNALLYTGINPEMRPKIPRMKGSRIMLEKVKVVDEIIKYNISSTTTLRDVVDLVYTGAVTVCEEMGKCITITQPHRRPKREQPPWKARLERKIIKIRKNIGLLHTYLNTEVVSNKVHKRVHWIASEARIDLRAADFRLKLETLNDSLKQKIKALGNRIKRYTERTIRYQNNQLYYRNQKQFFRNLENNNHSNNEPPKTEDMYTYWQAIWGKNKQHDDAARWIREAEAESSSYNMEEVKITKLDIEQVLKKTNNWAAPGPDKVQNYWWKHFPSTYQILATLFQKALSNPAVIPRFFTLGTTVMLPKGNTTSDPKNFRPITCLPTIYKILTGTITTYIWKHVKKENILAREQNGCCRDAKGCKELLVVDQIITGQAKGKLRNISVAWVDYKKAFDSVPHSWLLKVLRLYGVSEKVINLLEHLMSTWRTTLLVENGGNSSMSNEIAIKCGIFQGDTLSPLWFCLALNLLSKLLNKTKYGYIINKIRNVKINHQLYMDDLKLFAANREEMRRLLEIVSSFSQTIGMEMGLDKCAVLNVKRGRVTEGQDIKLWDESSISCLGQQETYKYLGIKQALDIRKPEVKDDFKTKYFSRLRCLLKAKLNSKALFTAINTWVLPCISYSFGVVRWTATELEAIDIQTRKLLTRYGTHHPHASVNRLYISRHEGGRGLQNILITHNRMVSQMRDYFRSRNLPFFKSVCQADEYSALQLAKPSVNLKEQSLEQLTAEWHSKALHGRYPGNLKSDNIIKNESITYLKAGYLHPETEGRLVAIQDQVVPTRAYIKRITGCNIPSDLCRRCSKALETIQHITSSCSILAPKDYTERHNAMARVYHREITLKTGLLQSKGNLYTYHPRDVLENDNYKLYWDTAIITDRSIAHNRPDIVLFDKREKSVQIVDVTVPADDNITKAYTEKVSKYHDLAFELKEIYGLRKTSIVPLIISVNGLVEAHMLENTKRLHLDTSLISQAQREVILGTTRIVRRFLTSS

SEQ ID NO: 7621 - protein, 1120 aa, Coccinella septempunctata
MEGFSGLDERISRPAQEPKRDGRARWTEDENVLIIRAHFIAKALEQASERTYRQLLTETWNNIKPDKQLYTNLLANRVRYLLEGEKLSSVELAAIEQSMWPHTAPPAEDQEQELQQQEELYVEQQEEDQGDQLTIKIKQAFKRNALLYTGINPEMRPKIPRMKGSRIMLEKVKVVDEIIKYNISSTTTLRDVVDLVYTGAVTVCEEMGKCITITQPHRRPKREQPPWKARLERKIIKIRKNIGLLHTYLNTEVVSNKVHKRVHWIASEARIDLRAADFRLKLETLNDSLKQKIKALGNRIKRYTERTIRYQNNQLYYRNQKQFFRNLENNNHSNNEPPKTEDMYTYWQAIWGKNKQHDDAARWIREAEAESSSYNMEEVKITKLDIEQVLKKTNNWAAPGPDKVQNYWWKHFPSTYQILATLFQKALSNPAVIPRFFTLGTTVMLPKGNTTSDPKNFRPITCLPTIYKILTGTITTYIWKHVKKENILAREQNGCCRDAKGCKELLVVDQIITGQAKGKLRNISVAWVDYKKAFDSVPHSWLLKVLRLYGVSEKVINLLEHLMSTWRTTLLVENGGNSSMSNEIAIKCGIFQGDTLSPLWFCLALNLLSKLLNKTKYGYIINKIRNVKINHQLYMDDLKLFAANREEMRRLLEIVSSFSQTIGMEMGLDKCAVLNVKRGRVTEGQDIKLWDESSISCLGQQETYKYLGIKQALDIRKPEVKDDFKTKYFSRLRCLLKAKLNSKALFTAINTWVLPCISYSFGVVRWTATELEAIDIQTRKLLTRYGIHHPHASVNRLYISRHEGGRGLQNILITHNRMVSQMRDYFRSRNLPFFKSVCQADEYSALQLAKPSVNLKEQSLEQLTAEWHSKALHGRYPGNLKSDNIIKNESITYLKAGYLHPETEGRLVAIQDQVVPTRAYIKRITGCNIPSDLCRRCSKALETIQHITSSCSILAPKDYTERHNAMARVYHREIALKTGLLQSKGNLYTYHPRDVLENDNYKLYWDTAIITDRSIAHNRPDIVLFDKREKSVQIVDVTVPADDNITKAYTEKVSKYHDLAFELKEIYGLRKTSTVPLIISVNGLVEAHMLENTKRLHLDTSLISQAQREVILGTTRIVSS

SEQ ID NO: 7622 - protein, 1089 aa, Coccinella septempunctata
MTEDDNVLLMRAHFIAKDLEQTSGRTYRQILTEVWNDIRPLYTNLLANRVRWMIENEKFSVVELRNIQLSIRPQGNEPIDEGEEHHEELQQSDDEDNGLTYEVDRYFCKNLLLYTGLSPENRPSLPRMKGSRMMVEKMLMVNKIIGKHISNNSSLGDLVDLVYAGALTVCEQLGKSVIERCTNPTGQQPPWKCRIEKKVGNIRKKIGVLHTYLNSESPSSKVHKTVRRIASEFRIKPQTSDFTGQLESLCDNLKQRVKALGKRLRRYNERIKRYQNNQMYYKNQKQFFRNLEGPDKTEEDPPEPEKLYEYWGTIWGREKQHDDGAHWIREAEDESSKYVMDNITITKQDVEEVLKRTNNWAAPGPDGIHNYWWKHFTNTHRAMAALFQKALKDPSIIPEFFTLGTTIMIPKGNTTSDPKKYRPITCLPTIYKILTGTLTRYISRHLKKHHILAREQGGCGRDTKGCKELLIVDQIIAKQVKSKQRNISISWIDYRKAFDSVPHSWLIRVLRLSGISEPIVRLLEYLMKSWRTTLLIKSKNGNKRSKMIKIKRGIFQGDTLSPLWFCLALNLLSRLLNNSSYGYVIDKIRKIKLNHQLYMDDLKLYAANEEQMRRLLEIVSSFSTAIGMEMGLDKCAVVNVKRGKIVDGEHIELWDDSRIPYLKPEESYKYLGIQQALDIKTDEAKNSFKEKYFGRLRNILKAKLNSKALFTSINTWALPCISYSFGIVRWTTAELRAVDIQTRKMLTRYGIHHPHSSVNRLYLKRHEGGRGLQNILMTHNKMVLDMRKYFQSKNSPFFRALCQVDESTALRLAKPSIHLEETSAEQLSEEWHARALHGRYPGNLNSDNILKTESLTYLTAGYLFPETEGRLVAIQDQVVPTRAYIKHITGQDILTDLCRRCSKSLETIQHITSSCPILAPREYMERHNAVAKIYHMEIARETGLSLDSRSIYEYEPRSVLENEEYKLYWDTTIMTDRAIPHNRPDLVLFNKIEKSVQIIDVAVPADENIGRSYSEKLTKYHDLAFEVKEIYGLKKTSILPLIISVNGLVEQHMIENTRRLKLDSSLISRAQKEVVLATTRVVRKFLTSS

SEQ ID NO: 7623 - protein, 1019 aa, Coccinella septempunctata
MWPQTAVPVDDDEPEHQDEQQPETQNSPLVEGTGRVFGRNLLSYAGMNPESRPMIPRMKGSRIMLEKVQLVDAIIKTHIGNTSSINDIVDLVYAGAATVCEEMGVHLKQPITKLERSQPPWKTRLERKINVIRKKIASLHTYLNTDSPPNKVYKAVRRIASELQIKAWTPDFRQKLETLCDKLKQRVKALGNRMKRYNERTKRYKNNQLYYKNQKQFFRDLENGTATDDKPPKAEDMRKYWQEIWGKDKHHDDGAGWIREAEAESTKYDMEDIHITKSDIEYVLKKTNNWAAPGPDKIHNYWWKYFPSTHQPLATLFQRALRNPSTIPKSLTLGCTRMIPKGNITTNPKNFRPITCLPTIYKILTGTITMHIRKHVGKHHILAREQGGCCKDAKGCKELLVIDQIITKQAKCKLRNISVAWIDYKKAFDSVPHSWLLKVLRLYGISETIINLLEHLMKSWRTKLVTETKDGISSSEEIAIRCGIFQGDTLSPLWFCLALNLLSKLLNKTKYGYVLNKVRHVKINHQLYMDDLKLYAANEDQMRRLLEIVSSFSQTIGMEMGLDKCAVLNVKRGKIVEGPGIRLWNDLKIECLQPQEAYKYLGIQQALDIKTTEVKETLKAKYFARIRSLLKAKLNSKALFTSINIWAVPCISYSFGVVRWTAAELQAMDIQTRKLLTRYGVHHPHSSVSRLYLSRHEGGRGLQNMQITHNKIVLQMRDYFRKKHLPFFQTVCQADESSVLQLARSSIDLKEQSLDQLSEEWHSKALHGRYPGNLKSDNILKSESLTYLKAGYLFPETEGRIVAIQDQVMPTRAYIKRITGRNILTDSCRKCAKALETIQHITSSCPILAPRDYTERHNAMARIYHREIAKKAGLIQDHGKRHTYQPRDVLENDRFKLYWDTIMITDRAIPHNRPDIVLFNKTERSVHIIDVTVPADENIPRSYTEKLTKYHDLAFELKEIYGLEKTTILPLIISVNGLVESHLVENTKRLQLNSSLISQAQKEVILATTRIVRKFLTST

SEQ ID NO: 7624 - protein, 962 aa, Harmonia axyridis
MKGSRIMLEKVRMVDAIIESHITSATTLRDIVDLVYTGAATVCEEMGKCLTEPHRKPKKEQPPWRARLERKVLKIRKNIGLLHTYLNTEVVSNKVYKAVRRIASEVRINLKASDSRMKLETLNDHLKQKIKALGNRIKRYTESKMRYENNQLYYKNQKQFFRNLENNNNSDKEPPKTEDMYTYWQAIWGNNKQHDDTARWIRESEAESSMYNMEEVEITKLDIEQVLKKTNNWAAPGPDKIQNYWWKHFPSTHQTLATLFQRALTNPTVIPGFFTLGTTIMLPKGNTTSDPKNFRPITCLPTIYKLLTGTITKYIWNHVKKENILAREQNGCCRDAKGCKELLVVDQIITGQAKGKLRNISIAWVDYRKAFDSVPHTWLLKTLRLYGISDKVINLLEHLMSAWRTTLLIDNRGESSMSKEIAIKCGIFQGDTLSPLWFCLALNLLSKLLNKSKYGYIINKTRNCKINHQLYMDDLKLFAANREEMRRLLEIVSSFSQTIGMEMGLDKCAVLDVKRGRVAEGPEIKLWNESKISCLGPQETYKYLGIQQALDIKTPEVKDNFKTKYFARLRSLLKAKLNSKALFTAINIWVLPCITYSFGVVRWTAAELQAIDIQTRKLLTRYGIHHPHSSVNRLYISRHEGGRGLQNILITHNKIVSQMRDYFRSRNLPLFKIVCQADEYSALQLAKSSVNLREQSLEQLSEEWHSKALHGRYPGNLKSDNIIKNESLTYLKAGYLHPETEGRLIAIQDQVVPTRAYIKRITGRNIPSDLCRRCSRALETIQHITSSCPILAPKDYMERHNAMARVYHREIATKTGLLQSNDGFHSYQPRDVLENDIFKLYWDTAMVTDRSIAHNRPDIVLFNKTEKSVQIIDVSVPADDNITKSYTEKVSKYHDLAFELKEIYGLRKTSIVPLIISVNGLVEAHMLENTKRLQLDTYLISQAQKQVILGTTRIVRRFLTSS

SEQ ID NO: 7625 - protein, 1100 aa, Coccinella septempunctata
MRRDGRARWTEDDNVLLMRAHFIAKDLEQTSGRTYRQILTEVWNDIRPDKPLYTNLLANRVRWMIENEKFSVVELRNIQLSIRPQGNEPIDEGEEHHEELQQSDDEDNGLTYEVDRYFCKNLLLYTGLSPENRPSIPRMKGSRMMVEKMLMVNKIIGKHISNNSSLGDLVDLVYAGALTVCEQLGKSVIERCTNPTGQQPPWKCRIEKKVGNIRKKIGVLHTYLNSESPSSKVHKTVRRIASEFRIKPQTSDFTGQLESLCDNLKQRVKALGNRLRRYNERIKRYQNNQMYYRNQKQFFRNLEGPDKTEEDLPEPEKLYEYWETIWGREKQHDDGAHWIRQAEDESSKYVMDNITITKQDVEEVLKITNNWAAPGPDGIHNYWWKHFTNTHRAMAALFQKALKDPSIIPEFFTLGTTIMIPKGNTTSDPKKYRPITCLPTIYKILTGTLTRYISRHLKKHHILAREQGGCGRDTKGCKELLIVDQIIAKQVKSKQRNISISWIDYRKAFDSVPHSWLIRVLRLSGISEPIVRLLEYLMKSWRTTLLIKSKNGNKRSKMIKIKRGIFQGDTLSPLWFCLALNLLSRLLNNSSYGYVIDKIRKIKLNHQLYMDDLKLYAANEEQMRRLLEIVSSFSTAIGMEMGLDKCAIVNVKRGKIVDGEHIELWDDSRIPYLKPEESYKYLGIQQALDIKTDEAKNSFKEKYFGRLRNILKAKLNSKALFTSINTWALPCISYSFGIVRWTTAELRAVDIQTRKMLTRYGIHHPHSSVNRLYLKRHEGGRGLQNILMTHNKMVLDMRKYFQSKNSPFFRALCQVDESTALRLAKPSIHLEETSAEQLSEEWHARALHGRYPGNLNSDNILKTESLTYLTAGYLFPETEGRLVAIQDQVVPTRAYIKHITGQDILTDLCRRCSKSLETIQHITSSCPILAPREYMERHNAVAKIYHMEIARETGLSLDSRSIYEYEPRSVLENEEYKLYWDTTIITDRAIPHNRPDLVLFKKIEKSVQIIDVAVPADENIGRYYSEKLTKYHDLAFEVKEIYGLKKTSILPLIISVNGLVEQHMIENTRRLKLDSSLISRAQKEVVLATTRVVRKFLTSS

SEQ ID NO: 7626 - protein, 973 aa, Harmonia axyridis
MNPADRPKIPRLKGSHDMLAVVRMIDATIRSNISNTSTLSDIVDLVYAGAITVCEEMGKPITQAHTKAKKHPPPWKSRLEGKINKIRREIGPLHTYLNDEPVSRKVHKAVRKIASEYRIPARTPELREKLQILYDNLKQKIKAFGNRMKRYNERTKRYHNNQLFYKNQKQFFRSLEDDTRVEGEPPKTEDMYNYWHAIWGKDKKHDDRASWIKEAESESWKYGMEDIKISRTDVQCVIKRTNNWAAPGPDKIQNYWWKHFTSTHQALANLFQKSLLDPTVIPKSLTLGTTLMIPKGNITSDPKNFLPITCLPTIYKILTGTLTMHIWKHVREHHILAREQNGCCKDAKGCKELLLIDQIITGQAKSKLRNISIAWIDYKKAFDSVPHSWLLKVLRLYGISEKIINLLEHLMKEWKTTLLIETKNGTNKTREIAIKCGIFQGDTLSPLWFCLALNILSKILNKSRYGYVLNKTRKLKVNHQLYMDDLKLFAATEAELRRLLEIVSSFSQTIGMEMGLDKCAVLNVKRGRIVDGDEIKLWDDSIIACLKPHEAYKYLGIQQALAIRTADVKETLRTKYFTRLKSLLKAKLNSKPLFTSINIWALPCLSYSFGVVRWTSAELKALDIQTRKLLTRYGVHHPHSSASRLYISRHDGGRGLQNIQITHNKIISDMRNYFRSKNSPFYETICQADDFSALQLANPSVNLEERSMEQLSEEWHSKALHGRYPGGLKSDNVLRSESLTYLKAGYLYPETEGRIVAIQDQVVPTRAYIKRITGRNIPTDVCRKCSKSLETIQHVTSSCPILAPKDYMERHNAMAKVFHRELAKKTALIRDTGTLYTYQPCSALENDVYKLYWDTTMVTDRAISHNRPDIVLFNKTEKLVQIIDITVPADDNIARAYTEKLTKYHDLAFELKEMYGLRKTSILPLIISVNGLVETHMIENTKRLQLDTYLISQAQKEVILGTTRTVRRFLTSS

SEQ ID NO: 7627 - protein, 1100 aa, Coccinella septempunctata
MRRDGRARWTEDDNVLLMRAHFIAKDLEQTSGRTHRQILTEVWNDIRPDKPLYTNLLANRVRWMIENEKFSVVELRNIQLSIRPQGNEPIDEGEEHHEELQQSDDEDNGLTYEVDRYFCKNLLLYTGLSPENRPSIPRMKGSRMMVEKMLMVNKIIGKHISNNSSLGDLVDLVYAGALTVCEQLGKSVIERCTNPTGQQPPWKCRIEKKVGNIRKKIGVLHTYLNSESPSSKVHKTVRRIASEFRIKPQTSDFTGQLESLCDNLKQRVKALGNRLRRYNERIKRYQNNQMYYKNQKQFFRNLEGPDKTEEDPLEPEKLYEYWQTIWGREKQHDDGAHWIRKAEDESSKYVMDNITITKQDVEEVLKRTNNWAAPGPDGIHNYWWKHFTNTHQAMAALFQKALKDPSIIPEFFTLGTTIMIPKGNTTSDPKKYRPITCLPTIYKILTGTLTRYISRHLKKHHILAREQGGCGRDTKGCKELLIVDQIIAKQVKSKQRNISISWIDYRKAFDSVPHSWLIRVLRLSGISEPIVRLLEYLMKSWRTTLLIKSKNGNKRSKMIKIKRGIFQGDTLSPLWFCLALNLLSRLLNNSSYGYVIDKIRKIKLNHQLYMDDLKLYAANEEQMRRLLEIVSSFSTAIGMEMGLDKCAIVNVKRGKIVDGEHIELWDDSRIPYLKPEESYKYLGIQQALDIKTDEAKNSFKEKYFGRLRNILKAKLNSKALFTSINTWALPCISYSFGIVRWTTAELRAVDIQTRKMLTRYGIHHPHSSVNRLYLKRHEGGRGLQNILMTHNKMVLDMRKYFQSKNSPFFKALCQVDESTALRLAKPSIHLEETSAEQLSEEWHARALHGRYPGNLNSDNILKTESLTYLTAGYLFPETEGRLVAIQDQVVPTRAYIKHITGQDILTDLCRRCSKSLETIQHITSSCPILAPREYMERHNAVAKIYHMEIARETGLSLDSRSIYEYEPRSVLENEEYKLYWDTTIITDRAIPHNRPDLVLFNKIEKSVQIIDVAVPADENIGRSYSEKLTKYHDLAFEVKEIYGLKKTSILPLIISVNGLVEHHMIENTRRLKLDSSLISRAQKEVVLATTRVVRKFLTSS

SEQ ID NO: 7628 - protein, 826 aa, Coccinella septempunctata
MKRYNERTKRYKNNQLYYKNQKQFFRDLENGTATDDKPPKAEDMRKYWQEIWGKDKHHDDGAGWIREAEAESTKYDMEDIHITKSDIEYVLKKTNNWAAPGPDKIHNYWLKYFPSTHQPLATLFQRALRNPSTIPKSLTLGCTRMIPKGNITTNPKNFRPITCLPTIYKILTGTITMHIWKHVGKHHILAREQGGCCKDAKGCKELLAIDQIITKQAKCKLRNISVAWIDYKKAFDSVPHSWLLKVLRLYGISETIINLLEHLMKSWRTKLVTETKDGISSSEEIAIRCGIFQGDTLSPLWFCLALNLLSKLLNKTKYGYVLNKVRHVKINHQLYMDDLKLYAANEDQMRRLLEIVSSFSQTIGMEMGLDKCAVLNVKRGKIVEGPGIRLWNDLKIECLQPQEAYKYLGIQQALDIKTTEVKETLKAKYFARIRSLLKAKLNSKALFTSINIWAVPCISYSFGVVRWTAAELQAMDIQTRKLLTRYGVHHPHSSVSRLYLSRHEGGRGLQNMQITHNKIVLQMRDYFRKKHLPFFQTVCQADESSVLQLARSSIDLKEQSLDQLSEEWHSKALHGRYPGNLKSDNILKSESLTYLKAGYLFPETEGRIVAIQDQVMPTRAYIKRITGRNILTDSCRKCAKALETIQHITSSRPILAPRDYIERHNAMARIYHREIAKKAGLIQDHGKRHTYQPRDVLENDRFKLYWDTIMITDRAIPHNRPDIVLFNKTERSVHIIDVTVPADENIPRSYTEKLTKYHDLAFELKEIYGLEKTTILPLIISVNGLVESHLVENTKRLQLNSSLISQAQKEVILATTRIVRKFLTST

SEQ ID NO: 7629 - protein, 1120 aa, Propylea japonica
MMESQSLDERESRPAQEPKRDGRARWTEDENVILIRAHYIAKSLEETSERTYRQLLTEIWRDIKPDKQLYTNLLANRVRYLLENEKLSSVELSSIECSIWPRTSLPAEEQEEQEQQEEQQKQDNDTPAEKKMKQLFDKNVLLYAGMRPDTRPKIPRMKGSRTMLEKVQAVDVIIRSHISGTTSLRDMVDLVYAGAATVCEEMGKHLTDEHKKAAKEQPPWKIRLERKITSIRKKIASLHTYLNNEVITNKVHKAVRRIASEYKINIKAPDLRMKFQILNDNLKQKIKTMGNRVRRYSERTKRYHNNQLYYKNQRQFFRNLEGNNTVTDELPKTEEMYNYWQAIWGKNKQHDDDAQWIREAENESSKYVMEEVSITKLDIQQVLKKANNWAAPGPDKIQNYWWKHFSSTHQTLANLFQRALVDPTVIPEFLTLGTTIMIPKGNVTSNPKNFRPITCLPTIYKLLTGAITMHIWKHVRREHILAREQNGCCREAKGCKEPLIIDQIITGQAKSKQRNISIAWIDYQKAFDSVPHSWLLKVLQLYGISEKVIKLLKHLMTSWRTAILIEGKDGTSKTEEIAIKCGIFQGDTLSPLWFCLALNILSKLLNNTKYGYIINKVSNKNIKVNHQLYMDDLKLFAASENQMRRLLEIVSSYSNTIGMEMGLDKCAVLNVKRGKITEGQEIKLWDESIIPSLKPEESYKYLGIQQALNIKTPEVKENFKNKYFTRLRSLLKAKLNSKALFTAINSWALPCIAYSFGVVRWTTAELNAIDIKTRKLLTRYGIHHPHSSVNRLYIGRHDGGRGLQNALITHNKIILQMREYFRSKVLPLFRAVCQADEFSTLQLAEPSISLREQTLEQLSEDWHSKALHGRYPGNLKSDNVIRTESLTYLRKGYLFPETEGRIIAIQDQVVPTRAYIKRITGRNIPSESCRKCSKALETIQHITSSCPILAPRDYMERHNAMAKVYHRELAEKTGLLKKKENLYTYQPQNILENETFKLYWDTTMVTDRSIAHNRPDIVLFNKVEKCVQIIDITVPADENIIKAYTEKITKYHDLAFELKEIYRLKNTSILPLIISVNGLVEAHMIENTKRLQLHTDLISEAQKEVILATTRMVRKFLTSS

SEQ ID NO: 7630 - protein, 990 aa, Coccinella septempunctata
MPITCVCGKSYATRTNLRDHQRRFCRGPPVEGMPEERCPICLQDYRSYASMRLHFSQAHPDEYNRSLSAEVESRSHRQPWTEGELELMAEFEASYEGDRLIDFLAENLGRPKEGVKRKRYNMTYRNILERVVRERRGREQEDRDSNIVDENDLAESGPSQQAVQDEPPQDPEESERESARAEQLEDPVLKHLLSLCAETEDIETITTCRAIALGEEGCRSIFDEWTDNICRSFGRRSGGRPPAVENQETNICRRARRAKQYKRAQVLYGKDKKKLAREILDDISPETANVRPSNDDIKATYEEIFGTEGRLVDAPLRELVGEGVNIYEPITKETIEAFIKRLGKTSAGPDGIDSARLSRIPNEKLEFLFNLMLFSKYVPKPLRVSRTILIPKKKDELHRTDNWRPLTITSILLRLLNKIVASRLAAKIQLDECQRGFTSIDGCFANSMTLQTFIKMKRKEGKPLSVITLDLKRAFDSIAHSSIKRALRRFRVDENTSKYIMANFDEFSTKISCERAEICEIMIRRGVKQGDPLSPIIFNMVLDELISNLRIRPGVKTSQLNISVLGYADDLLILAESNQDARLLLKIAVSYFEDHGLRLNPKKCTSLSLAIVPSKRKLYLQTTPKFYVYGEAIPPLTSVNEAFRYLGSMFTSRGLTTCNVRSLDEQLGRLMRSPLKPQQKWDLLKSFLVPRYIHSLQSPSVHMKILKKADQLIRRAAKKILKLPVHIIDETLYTPVALGGLGLFSMSRKIPIIMRDRMERAAAASPIFASVIEVGQQWSNRILRMIRPDCNTKTAVDRANAIRLENSFYGGGTMQAGNDSASNFWINNPPRYWNTRDYLSAIKLRTNTLPTKALPYASETSRLCRAGCLRVESLSHILQRCPLGSRGRNARHNHVAHRIAKAAMAKGWKVTEEPNIRNTRGQLNKPDLVCERGDQIIVADIGVSWECPRSLGETYNFKRATYNQPEFVEAVYLFIYLFIYYSYKPYGFIT

SEQ ID NO: 7631 - protein, 1008 aa, Coccinella septempunctata
MPITCVCGKSYATRTNLRDHQRRFCRGPPVEGMPEERCPICLQDYRSYASMRLHLSQAHPDEYNRSLSAEVESRSHRQPWTEGELELMAEFEASYEGDRLIDFLAENLGRPKGGVKRKRYNMTYRNILERVIRERRGREQEDRDSNIVDENDLAESGPSQQAVQDEPPQDPEESERESARAEQLEDPVLKHLLSLCAETEYIETITTCRAIALGEEGCRSIFDEWADNICRSFGRRFGGRPPAVENQETNICRRAKRAKQYKRAQVLYGKDKKKLAREILDDISPETANVRPSNDDIKATYEEIFGTEGRLVDAPLRELVGEGVNIYEPITKETIEAFIKRLGKTSAGPDGIDSARLSRIPIEKLEFLFNLMLFSKYVPKPLRVSRTILIPKKKDELHRTDNWRPLTITSILLRLLNKIVASRLAAKIQLDECQRGFTSIDGCFADSMTLQTFIKMKRKEGKPLSVITLDLKRAFDSIAHSSIKRALRRFRVDENTSKYITANFDEFSTKISCEHAEICEIMIRRGVKQGDSLSPILFNMVLDELISNLRIRPGVKTRQLNISVLGYADDLLILAESNQDARLLLKIAVSYFEDHGLRLNPKKCTSLSLAIVPSKRKLYVQTTPKFYVYGEAIPPLTSVNEAFRYLGSMFTSRGLTTCNVRSLDEQLGRLMRSPLKPQQKWDLLKNFLVPRYIHSLQSPSVHMKILKKADQLIRTAAKKILKLSVHIIDETLYTPVALGGLGLFSMSRTIPIIMRDRMEMAAAASPIFASVIEVGQQWSNRILRMIRPDCNTKTAVDRANAIRLENSFYGGGTMQAGNDSASNFWINNPPRYWNTRDYLSAIKLRTNTLPTKALPYASETSRLCRAGCLRVDSLSHILQRCPLGSRGRNARHNHVAHRIAKAAMAKGWKVTEEPNIRNTRGQLNKPDLVCERGDQIIVADIGVSWECPRSLGETYNFKRATYNQPEFVEAVSGIYPGKTISVLPFIIGVRGFWCRESTVLLESLGINT

SEQ ID NO: 7632 - protein, 1196 aa, Nasonia vitripennis
MEQQPHTKAIREGDFIVILLPQSDDETLCCPLCVGRGRYSGKTRVECLNRHVKEVHPDLTTTFRCWGCGFAAPGDKKYPRKIVTQHCATCVPEVSSAPSGRVDGERRVNTRRRLGIAAATEASPVRRTRRNGLASPPVEQDISQSAAPPEPARVPQHPEIVALGESADDEVFRSPVNSPPRDWRAAAPQQAASSSPPAVPGITAATPSNTTRTGNGSANSILAEHPIPTPPPTNTTEANGRADIPRSGRTPPPGQQAARRRAPTTEQRRIVGLLEAATGREQLEEATTQAMLFLARLTGRRPEPRNAIRPGPRQRHPAQEDVQAQAPDRIQEAKKLQRLYRTSKKRAVQKILAGPNMNCQIDKNTITAHFVELAARRDGGEDWPDVFDREEPTAASGEALCTPITREEVFRRLKGRNNTSPGPDGITYRDLAKADPGAHVLAALYNSIWRIEATPALWGVSNTTLIYKKGDAMDISNWRPISLGDTVPKLFAAILADRIKRWAVANGRYSASQKGFLEFEGCYEHNFVLQEAIREAKGGRKELVVAWLDLASAFTSVPHSSILQALEGHGLPSKARNIISSLYTGMTTRFHTAEGPTDPILIQSGVRQGCPLSPDVFNLTLEVVLREIQRTGEGYTIEGRRTSHLAYADDVAILADSPAGMRRLLFAAERGARAVGLTFNPAKCATLHIAGRGEEAVRPTEFSVQGTPVRALASEEAYEHLGIPTGYQVRQTPINTLRDLLADIGSIDRSLLAPWQKLDAVGTFLLPRLDFIMQGAHIDKGFLTEADKIIKKAAKSWLSLPQRASAELVFLPPSQGGGGLLPLADLYDMLTVAHSYKMLYSSDVTVSTIAGSTLRRTVSERLKKRASNIDIARFLSGDLDLPRSTSPSTFWTKVRSAALRIKTKLGLRWSWCQEGEVLLMACGDPRAPGTRVSPQTKHLVTTSLRRCLNRHYAESLLAKKDQGKVFEVTRRSGQSNHFLRSGSFTRFCDWRFIHRARLDVLPLNAAKRWQRGMDKRCRRCGSDLETLPHVLSHCGPHSAARQKRHNNIQDRLVKAASRCPGTISVNQTVVGVRGPDAALRPDIVVRDDVNRRVTIVDVAVPFENRLEAFDGVREAKIAKYTPLARQLTDSGYTVTVEAFVVGALGAWDPRNERVLSLLSISRYYAILMRRLMVSDTIRWSRDIYVEHVSGIRQYRE

SEQ ID NO: 7633 - protein, 1194 aa, Nasonia vitripennis
MEQQPHTKAIREGDFIVILLPQSDDETLCCPLCVGRGRYSGKTRVECLNRHVKEVHPDLTTTFKCWGCGFAAPGDKKYPRKIVTQHCATCVPEVSSAPSGRVDGERRVNTRRRLGIAAATEASPVRRTRRNGLASPPVEQNISQSAAPPEPARVPQHPEIVALGESADDEVFRSPVNSLPRDWRAAASQQAASSSPPAVSGITAATPSNTTRTGNGSANSILAEHPIPTPPPTNTTEANGRADIPRSGRTPPPGQQAARRRTPTTEQRRIVGLLEATTGREQLEEATTQAMLFLARLTGRRPEPRNAIRPGPRQRHPAQEDVQAQAPDRIQEAKKLQRLYRTSKKRAVQKILAGPNMNCQIDKNTITAHFVELAARRDGGEDWPDVFDREEPTAASGEALCTPITREEVFRRLKGRNNTSPGPDGITYRDLAKADPGAHVLAALYNSIWRIEATPALWGVSNTTLIYKKGDAMDISNWRPISLGEAKLFAAILADRIKRWAVANGRYSASQKGFLEFEGCYEHNFVLQEAIREAKGGRKELVVAWLDLASAFTSVPHSSILQALEGHGLPSKARNIISSLYTGMTTRFHAAEGPTDPILIQSGVRQGCPLSPDVFNLTLEVVLREIQRTGEGYTFEGRRISHLAYADDVAILADSPAGMRRLLFAAERGARAVGLTFNPAKCATLHIAGRGEEAVRPTEFPVQGTPVRALASGEAYEHLGIPTGYQVRQTPINTLRDLLADIGSIDRSLLAPWQKLDAVGTFLLPRLDFIMQGAHIDKGFLTEADKIIKKAAKSWLSLPQRASAELVFLPPSQGGGGLLPLADLYDLLTVAHSYKMLYSSDVTVSTIAGSTLRRTVSERLKKRASNIDIARFLSGDLDLPRSTSPSTFWTKVRSAALRIKTKLRLRWSWCQGGEVLLMACGDPHAPGTRVSPQTKHLVTTSLRRCLNRHYAESLLAKKDQGKVFEVTRRSGQSNHFLRSGSFTRFCDWRFIHRARLDVLPLNAAKRWQRGMDKRCRRCGSDLETLPHVLSHCGPHSAARQKRHNNIQDRLVKAASRCPGTISVNQTVVGVRGPDAALRPDIVVRDDVNRRVTIVDVAVPFENRLEAFDGVREAKIAKYTPLARQLTDSGYTVTVEAFVVGALGAWDPRNERVLSLLSISRYYAILMRRLMVSDTIRWSRDIYVEHVSGIRQYRE

SEQ ID NO: 7634 - protein, 1196 aa, Nasonia vitripennis
MEQQPHTKAIREGDFIVILLPQSDDETLCCPLCVGRGRYSGKTRVECLNRHVKEVHPDLTTTFKCWGCGFAAPGDKKYPRKIVTQHCATCVPEVSSAPSGRVDGERRVNTRRRLGIAAATEASPVRRTRRNGLASPPVEQNISQSAAPPEPARVPQHPEIVALGESADDEVFRSPVNSLPRDWRAAASQQAASSSPPAVSGITAATPSNTTRTGNGSANSILAEHPIPTPPPTNTTEANGRADIPRSGRTPPPGQQAARRRTPTTEQRRIVGLLEATTGREQLEEATTQAMLFLARLTGRRPEPRNAIRPGPRQRHPAQEDVQAQAPDRIQEAKKLQRLYRTSKKRAVQKILAGPNMNCQIDKNTITAHFVELAARRDGGEDWPDVFDREEPTAASGEALCTPITREEVFRRLKGRNNTSPGPDGITYRDLAKADPGAHVLAALYNSIWRIEATPALWGVSNTTLIYKKGDAMDISNWRPISLGDTVPKLFAAILADRIKRWAVANGRYSASQKGFLEFEGCYEHNFVLQEAIREAKGGRKELVVAWLDLASAFTSVPHSSILQALEGHGLPSKARNIISSLYTGMTTRFHTAEGPTDPILIQSGVRQGCPLSPDVFNLTLEVVLREIQRTGEGYTIEGRRISHLAYADDVAILADSPAGMRRLLFAAERGARAVGLTFNPAKCATLHIAGRGEEAVRPTEFSVQGTPVRALASGEAYEHLGIPTGYQVRQTPINTLRDLLADIGSIDRSLLAPWQKLDAVGSFLLPRLDFIMQGAHIDKGFLTEADKIIKKAAKSWLSLPQRASAELVFLPPSQGGGGLLPLADLYDLLTVAHSYKMLYSSDVTVSTIAGSTLRRTVSERLKKRASNIDIARFLSGDLDLPRSTSPSTFWTKVRSAALRIKTKLGLRWSWCQEGEVLLMACGDPHAPGTRVSPQTKHLVTTSLRRCLNRHYAESLLAKKDQGKVFEVTRRSGQSNHFLRSGSFTRFCDWRFIHRARLDVLPLNAAKRWQRGMDKRCRRCGSDLETLPHVLSHCGPHSAARQKRHNNIQDRLVKAASRCPGTISVNQTVVGVRGPDAALRPDIVVRDDVNRRVTIVDVAVPFENRLEAFDGVREAKIAKYTPLARQLTDSGYTVTVEAFVVGALGAWDPRNERVLSLLSISRYYAILMRRLMVSDTIRWSRDIYVEHVSGIRQYRE

SEQ ID NO: 7635 - protein, 951 aa, Apocrypta bakeri
MPLPSTTVEPPPPPGRLPTRRTPTSDQRRLIGVLELVTNQEQLNEELPQIMQFLARSTERRPVARPVRPESRRIVANAPAPDRIQQAKSLQRLYRTSKKRAVQRVLAESNTLCQIPKDTIQAHFVELAARRDGERSWPDVFGREEPSAVSNEVLCAPITREEVFRRLKGRSNTSPGPDGITYRDLVKADPGAHLLTALFNTIWRIEATPSLWGESNTTLIYKKGDALNISNWRPISLGDTVPKLFAAILADRVKKWAVANKRYSASQKGFLEYEGCYEHNFVLQEAIREATNGDKELVVAWLDLASAFTSVPHSSIHRALEGHGLPSRARNIISSLYSGMTTRVRTAEGFTDPILIESGVRQGCPLSPDVFNLTLEVVLRTMQLTGEGYTIGGVRISNLAYADDVAILADSPAAMRRLLMAAERGARSVGLSFNPAKCATLHIAGREDVRPTEFSVQGSPVRALATGEAYEHLGIPTGYQVKQSPTNTIKDLLQDTRSIDQSLLAPWQKLDAVGTFLLPRLDFIMQGASIEKGLLSEADRNIKRAAKNWLGLPQRASAELVYLPPSQGGGGLLPLGDLYDLLTVAHGYKMLYSSDETVSGVAESILRKTVSKRLRKRASNIDVARYLSGDLDLPPSTGRTSFWSKVRSATLRIKIKLGLRWIWCPENNHLLIACGDPNAPSMLVSPQTKNQLVSRLRSRINNIYAESLLAKQDQGKVFEATRKSGSSNHFLRNGSFTRFCDWRFIHRARLDVLPLNACKRWQRGTDKRCRRCGEGLETLPHVLGHCGLHSAARQRRHNNVQDRLVKAASRCPGTININQTVQGVHGPDAALRPDIVVRDDVNRRVTIVDVTVPFENRLAALNTAREAKIAKYSSLARQLAGKGYDVTVEAFIVGALGAWDPRNERVLSLLNISRYYATLMRRLMVSDTIRWSRDIYVEHVSGVRQYDQGGR

SEQ ID NO: 7636 - protein, 1227 aa, Apocrypta bakeri
MTSPPTVKAIREEDSIVILLPQSDDETISCPLCVGRGEYRGKTRVENLCRHAKAHHPGMNILYRCWQCGFMAPEGKAYPRKVVTQHCSSCVPNISSAPYSRATTERRANIRRELGVAAPVRRSRRNAVAAPPGGHNIGPAPTLLEPPRALITPEVEAPGESSDDDIFRSPEGSPHPSPERATLRQEPSSSTSAAIARPSLNNQTARSSTNTSTTSPAHNTLAGPPTQPTTTQAAGPATATTAGPSTGSAPTTTAEPAAASANTTTAEATRPPQHLADAAGHAATTTTVEPPPPPGRLPARRSPTSEQRRLIGILESVTSQEQLNEELPQIMQFLARSTERRPVARPARPEPRRIVANAPAPDRIQQAKSLQRLYRTSKKRAVQRVLAESNTLCQIPKNTITAHFVELAARRDGEGSWPDVFGREEPSAVSNEVLCAPITREEVSRRLKGRSNTSPGPDGITYRDLVKADPGAHLLTALYNTIWRIEATPSLWGESNTTLIYKKGDALNISNWRPISLGDTVPKLFAAILADRVKRWAVANERYSASQKGFLEYEGCYEHNFVLQEAIREATNGDKELVVAWLDLASAFTSVPHSSIHRALEGHGLPSRARNIISSLYSGMTTRVRTAEGFTDPILIESGVRQGCPLSPDVFNLTLEVVLRAMQLTGEGYTIGGVRTSNLAYADDVAILADSPAAMRRLLMAAERGARSVGLSFNPAKCASLHIAGREDVRPTEFSVQGSPIRALGPGDAYEHLGIPTGYQVKQNPTNTLRGLITDTITIDQSLLAPWQKLDAVGTFLLPRLDFAMQGSSIEKGLLTEADRSIKRAAKTWLSLPQRASAELVYLPPSQGGGGLLPLSDLYDLLTVAHGYKMLYSSDKTVSTVADSVLRKTVSERLRKRASNIDVARYLSGDMDLPRSTGRTSFWSKVRSATLRLNTKLGLRWIWCRDEEYLKIACGDVNAPRTLASPETKKQLVSALRSRLNTFYAESLLAKKDQGKVLEATRKSGSSNHFLRNGSFTRFCDWRFIHRARLDVLPLNACKRWQRGMDKRCRRCGEGLETLPHVLGHCGPHAAARQRRHNNVQDRLVKAASKCPVTITVNHTVRGVHGPDAALRPDIVVRDDVNRRITIVDVAVPFENRYAAIEEAREAKIAKYTSLARQLASNGYNVTVEAFLVGALGAWDPRNERVLSLLNVSRYYATLMRRLMVSDTIRWSRDIYVEHVSGIRQYI

SEQ ID NO: 7637 - protein, 1226 aa, Apocrypta bakeri
MASPPTIKAIREEDSIVILLPQSDDETISCPLCVGRGEYRGKTRVENLCRHAKAHHPGMNITYRCWQCGFMAPEGKAYPRKVVTQHCSSCVPNISSAPYSRATTERRANIRRELGVAAPVRRSRRNAVASPPGGHNIGPAPTLLEPPRALIPPEVEAPGESSDDDIFRSPEGSPHPSPERATLRQEPSSSTSAAIARPSLNNQTARSSTNTSTTSPAHNILAGPPTQPTTTQAAGPATATTAGPSTGSAPTTTAEPAAASANTTTAEATRPPQHLADAAGHAATTTVEPPPPPGRLPARRSPTSEQRRLIGILESVTSQEQLNEELPQIIQFLARSTERRPVARPVRPESRRIVANAPAPDRIQQAKSLQRLYRRSKKRAVQRVLAESNTLCQIPKNTIQAHFVELAARRDGEGSWPDVFGREEPSAVSNEVLCAPITREEVSRRLKGRSNTSPGPDGITYRDLVKADPGAHLLTALYNTIWRIEATPSLWGESNTTLIYKKGDALNICNWRPISLGDTVPKLFAAILADRVKRWAVANERYSASQKGFLEYEGCYEHNFVLQEAIREATNGGKELVVAWLDLASAFTSVPHSSIHRALEGHGLPSRARNIISSLYSGMTTRVRTAEGFTDPILIESGVRQGCPLSPDVFNLTLEVVLRTMQLTGEGYTIGGVRTSNLAYADDVAILADSPAAMRRLLMAAERGARSVGLSFNPAKCASLHIAGREDVRPTEFSVQGSPIRALGPGDAYEHLGIPTGYQVKQNPTNTLRGLITDINNIDQSLLAPWQKLDAVGTFLLPRLDFAMQGTSIEKGLLTEADRSIKRAAKTWLSLPQRASAELVYLPPSQGGGGLLPLSDLYDLLTVAHGYKMLYSSDKTVSTVADSVLRKTVSERLRKRASNIDVARYLSGDMDLPRSTGRTSFWSKVRSATLRLNTKLGLRWIWCRDEEYLRIACGDVNAPRTLASPETKKQLVSALRSRVNIFYAESLLAKKDQGKVLEATRKSCSSNHFLRNGSFTRFCDWRFIHRARLDVLPLNACKRWQRGMDKRCRRCGEGLETLPHVLGHCGPHAAARQKRHNNVQDRLVKAASRCPGTITVNHTVRGVHGPDAALRPDIVVRDDVNRRITIVDVAVPFENRYAAIEEAREAKKAKYTSLARQLASNGYNVTVEAFLVGALGAWDPRNERVLSLLNVSRYYATLMRRLMVSDTIRWSRDIYVEHVSGIRQYT

SEQ ID NO: 7638 - protein, 1231 aa, Apocrypta bakeri
MASPPTIKAIREEDSIVILLPQSEDETINCPLCVGCGEYRGKTRVENLARHVKTHHPGMTITYRCWRCGFMAPEGKAYPRKVVTQHCSSCVPNISSAPYSRATTERRANIRRELGVAAPVRRSRRNAVASPPGGHNIGPAPTLLEPPRALITPEVEAPGESSDDDIFRSPEGSPHPSPERATLQLEPSSSTSAVSARPSHNNSTARSSTNTSTTSPAHNTLAGPPTQPTTTQAAGPATATTAGPSTGSAPTTTAEPAAASANYTLAEATPPPQHLADAAGHAATITTVEPPPPPGRLPARRSPTSEQRRLIGILESVTSQEQLNEELPQIMQFLARSTERRPVARPARPEPRRIVADAPAPDRIQQAKSLQRLYRRSKKRAVQRVLAESNTLCQIPKNTIQAHFVELAARRDGERSWPDVFGREEPSAVSDEVLCAPITREEVFRRLKGRSNTSPGPDGITYRDLVKADPGAHLLTALFNTIWRIEATPSLWGESNTTLIYKMGDALNISNWRPISLGDTVPKLFAAILADRVKKWAVANKRYSASQKGFLEYEGCYEHNFVLQEAIREATNGDKELVVAWLDLASAFTSVPHSSIHRALEGHGLPSRARNVISSLYSGMTTRVRTAEGFTDPILIESGVRQGCPLSPDVFNLTLEVVLRTMQLTGEGYTIGGVRISNLAYADDVAILADSPAAMRRLLMAAERGARSVGLSFNPAKCASLHIAGREDVRPTEFSVQGSPIRALGPGDAYEHLGIPTGYQIKQDPTNTLRGLIADTHTIDRSLLAPWQKLDAVGTFLLPRLDFAMQGASIEKGLLTEADRNIKRAAKNWLGLPQRASAELAYLPPSQGGGGLLPLADLYDLLTVAHGYKMLYSSDKTVSGVAESILRKTVSKRLRKRASNIDVARYLSGDLDLPPSTGRTSFWSKVRSATLRLKTKLGLRWIWCQDEEVLRVACGDRNDPRTLVSPQTKQQLVSRLRSRLNIFYAESLLAKKDQGKVFEATRKSGSSNHFLRNGSFTRFCDWRFIHRARLDVLPLNACKRWQRGTDKRCRRCGEGLETLPHVLGHCGPHSAARQLRHNNIQDRLVKAASRCHGTITVNQTVQGVHGPDAALRPDIVVRDDVNRRVTIVDVTVPFENRFAALDSARDAKIAKYTPLARQLAGKGYDVTVEAFIVGALGAWDPRNERVLSLLNISRYYATLMRRLMVSDTIRWSRDIYVEHVSGIRQYDRGGH

SEQ ID NO: 7639 - protein, 1113 aa, Apocrypta bakeri
MASPPTIKAIREEDSIIILLPQSEDETINCPLCVGCGEYRGKTRVENLGRHVKVHHPGMTITYRCWQCGFMAPEGKAYPRKVVTQHCSSCVPNISSAPYSRATTERRANIRRELGVAAPVRRSRRNAVASPPGGHNIGPAPTLLEPPRALITPEVEAPGESSDDDIFRSPEGSPHPSPERATLQLEPSSSTSAVSARPSHNNSTARSSTNTSTTSPAHNTLAGPPTQPTTTQAAGPATATTAGPSTGSAPTTTAEPAAASANSTLAEAIPPPQHLADAAGHAATTTTVEPPPPPGRLPTRRTPTSDQRRLIGVLELVTNQEQLNEELPQIMQFLARSTERRPVARPVRPESRRIVANAPAPDRIQQAKSLQRLYRTSKKRAVQRVLAESNTLCQIPKDTIQAHFVELAARRDGERHWPNVFGREEPSAVSDEVLCAPITREEVFRRLKGRSNTSPGPDGITYRDLVKADPGAHLLTALFNTIWRIEATPSLWGESNTTLIYKKGDALNISNWRPISLGDTVPKLFAAILADRVKKWAVANKRYSASQKGFLEYEGCYEHNFVLQEAIREATNGDKELVVAWLDLASAFTSVPHSSIHRALEGHGLPSRARNIISSLYSGMTTRVRTAEGFTDPILIESGVRQGCPLSPDVFNLTLEVVLRTMQLTGEGYTIGGVRISNLAYADDVAILADSPAAMRRLLMAAERGARSVGLSFNPAKCATLHIAGREDVRPTEFSVQGSPVRALATGEAYEHLGIPTGYQVKQSPTNTIKDLLQDTRSIDQSLLAPWQKLDAVGTFLLPRLDFIMQGASIEKGLLSEADRNIKRAAKNWLGLPQRASAELVYLPPSQGGGGLLPLGDLYDLLTVAHGYKMLYSSDETVSGVAESILRKTVSKRLRKRASNIDVARYLSGDLDLPPSTGRTSFWSKVRSATLRIKIKLGLRWIWCPENNHLLIACGDPNAPSMLVSPQTKNQLVSRLRSRINNIYAESLLAKQDQGKVFEATRKSGSSNHFLRNGSFTRFCDWRFIHRARLDVLPLNACKRWQRGTDKRCRRCGEGLETLPHVLGHCGLHSAARQRRHNNVQDRLVKAASRCPGTININQTVQGVHGPDAALRP

SEQ ID NO: 7640 - protein, 897 aa, Apocrypta bakeri
MQFLARSTERRPVARPARPEPRRIIANAPAPDRIQQAKYLQRLYRTSKKRAVQRVLAESNTLCQIPKNTITAHFVELAARRDGEGSWPDVFGREEPSAVSNEVLCAPITREEVSRRLKGRSNTSPGPDGITYRDLVKADPGAHLLTALFNTIWRIEATPSLWGESNTTLIYKKGDALNISNWRPISLGDTVPKLFAAILADRVKRWAVANERYSASQKGFLEYEGCYEHNFVLQEAIREATNGDKELVVAWLDLASAFTSVPHSSIHRALEGHGLPSRARNIISSLYSGMTTRVRTAEGFTDPILIESGVRQGCPLSPDVFNLTLEVVLRTMQLTGEGYTIGGVRTSNLAYADDVAILADSPAAMRRLLMAAERGARSVGLSFNPAKCASLHIAGREDVRPTEFSVQGSPIRALGPGDAYEHLGIPTGYQVKQNPTNTLRGLITDINNIDQSLLAPWQKLDAVGTFLLPRLDFAMQGSSIEKGLLTEADRSIKRAAKTWLSLPQRASAELVYLPPSQGGGGLLPLSDLYDLLTVAHGYKMLYSSDKTVSTVADSVLRKTVSERLRKRASNIDVARYLSGDMDLPRSTGRTSFWSKVRSATLRLNTKLGLRWIWCRDEEYLRIACGDVNAPRTLASPETKKQLVSALRSRLNTFYAESLLAKKDQGKVLEATRKSGSSNHFLRNGSFTRFCDWRFIHRARLNVLPLNACKRWQRGMDKRCRRCGEGLETLPHVLGHCGPHAAARQRRHNNVQDRLVKAASKCPGTITVNHTVRGVHGPDAALRPDIVVRDDVNRRITIVDVAVPFENRYAAIEEAREAKIAKYTSLARQLASNGYNVTVEAFLVGALGAWDPRNERVLSLLNVSRYYATLMRRLMVSDTIRWSRDIYVEHVSGIRQYT

SEQ ID NO: 7641 - protein, 1226 aa, Apocrypta bakeri
MTSPPTVKAIREEDSIVILLPQSDDETISCPLCVGRGEYRGKTRVENLCRHAKAHHPGMNILYRCWQCGFMAPEGKAYPRKVVTQHCSSCVPNISSAPYSRATTERRANIRRELGVAAPVRRSRRNAVASPPGGHNIGPAPTLLEPPRALITPEVEAPGESSDDDIFRSPEGSPHPSPERATLRQEPSSSTSAAIARPSLNNQTARSSTNTSTTSPAHNILAGPPTQPTTTQAAGPATATTAGPSTGSAPTTTAEPAAASANTTTAEATRPPQHLADAAGHAATTTVEPPPPPGRLPARRSPTSEQRRLIGILESVTSQEQLNEELPQIMQFLARSTERRPVARPVRPESRRIVANAPAPDRIQQAKSLQRLYRTSKKRAVQRVLAESNTLCQIPKNTITAHFVELAARRDGEGSWPDVFGREEPSAVSNEVLCAPITREEVSRRLKGRSNTSPGPDGITYRDLVKADPGAHLLTALFNTIWRIEATPFLWGESNTTLIYKKGDALNISNWRPISLGDTVPKLFAAILADRVKRWAVANERYSASQKGFLEYEGCYEHNFVLQEAIREATNGGKELVVAWLDLASAFTSVPHSSIHRALEGHGLPSRARNIISSLYSGMTTRVRTAEGFTDPILIESGVRQGCPLSPDVFNLTLEVVLRTMQLTGEGYTIGGVRTSNLAYADDVAILADSPAAMRRLLMAAERGARSVGLSFNPAKCASLHIAGREDVRPTEFSVQGSPIRALGPGDAYEHLGIPTGYQVKQNPTNTLRGLITDINNIDQSLLAPWQKLDAVGTFLLPRLDFAMQGTSIEKGLLTEADRSIKRAAKTWLSLPQRASAELVYLPPSQGGGGLLPLSDLYDLLTVAHGYKMLYSSDKTVSTVADSVLRKTVSDRLRKRASNIDVARYLSGDMDLPRSTGRTSFWSKVRSATLRLNTKLGLRWIWCRDEEYLRIACGDVNAPRTLASPETKKQLVSALRSRVNIFYAESLLAKKDQGKVLEATRKSCSSNHFLRNGSFTRFCDWRFIHRARLDVLPLNACKRWQRGMDKRCRRCGEGLETLPHVLGHCGPHAAARQKRHNNVQDRLVKAASRCPGTITVNHTVRGVHGPDAALRPDIVVRDDVNRRITIVDVAVPFENRYAAIEEAREAKKAKYTSLARQLASNGNNVTVEAFLVDALGAWDPRNERVLSLLNVSRYYATLMRRLMVSDTIRWSRDIYVEHVSGIRQYT

SEQ ID NO: 7642 - protein, 901 aa, Apocrypta bakeri
MQFLARSTERRPVARPARPEPRRIVADAPAPDRIQQAKSLQRLYRRSKKRAVQRVLAESNTLCQIPKNTIQAHFVELAARRDGERSWPDVFGREEPSAVSDEVLCAPITREEVFRRLKGRSNTSPGPDGITYRDLVKADPGAHLLTALFNTIWRIEATPSLWGESNTTLIYKKGDALNISNWRPISLGDTVPKLFAAILADRVKKWAVANKRYSASQKGFLEYEGCYEHNFVLQEAIREATNGDKELVVAWLDLASAFTSVPHSSIHRALEGHGLPSRARNVISSLYSGMTTRVRTAEGFTDPILIESGVRQGCPLSPDVFNLTLEVVLRTMQLTGEGYTIGGVRISNLAYADDVAILADSPAAMRRLLMAAERGARSVGLSFNPAKCASLHIAGREDVRPTEFSVQGSPIRALGPGDAYEHLGIPTGYQIKQDPTNTLRGLIADTHTIDRSLLAPWQKLDAVGTFLLPRLDFAMQGASIEKGLLTEADRNIKRAAKNWLGLPQRASAELAYLPPSQGGGGLLPLADLYDLLTVAHGYKMLYSSDKTVSGVAESILRKTVSKRLRKRASNIDVARYLSGDLDLPPSTGRTSFWSKVRSATLRLKTKLGLRWIWCQDEEVLRVACGDRNDPRTLVSPQTKQQLVSRLRSRLNIFYAESLLAKKDQGKVFEATRKSGSSNHFLRNGSFTRFCDWRFIHRARLDVLPLNACKRWQRGTDKRCRRCGEGLETLPHVLGHCGPHSAARQLRHNNIQDRLVKAASRCHGTITVNQTVQGVHGPDAALRPDIVVRDDVNRRVTIVDVTVPFENRFAALDSARDAKIAKYTPLARQLAGKGYDVTVEAFIVGALGAWDPRNERVLSLLNISRYYATLMRRLMVSDTIRWSRDIYVEHVSGIRQYDRGGH

SEQ ID NO: 7643 - protein, 1227 aa, Apocrypta bakeri
MTSPPTVKAIREEDSIVILLPQSDDETISCPLCVGRGEYRGKTRVENLCRHAKAHHPGMNILYRCWQCGFMAPEGKAYPRKVVTQHCSSCVPNISSAPYSRATTERRANIRRELGVAAPVRRSRRNAVASPPGGHNIGPAPTLLEPPRALITPEVEAPGESSVDDIFRSPEGSPHPNPERATLQQEPSSSTSAAIARPSLNNQTARSSTNTSTTSPAHNTLAGPPTQPTTTQAAGPATATTAGPSTGSAPTTTAEPAAASANTTTAEATRPPQHLADAAGHAATTTTVEPPPPPGRLPARRSPTSEQRRLIGILESVTSQEQLNEELPQIMQFLARSTERRPVARPVRPESRRIVANAPAPDQIQQAKSLQRLYRTSKKRAVQRVLAESNTLCQIPKDTIQAHFVELAVRRDGEGSWPDVFGREEPSAVSNEVLCAPITREEVSRRLKGRSNTSPGPDGITYRDLVKADPGAHLLTALYNTIWRIEATPSLWGESNTTLIYKKGDALNISNWRPISLGDTVPKLFAAILADRVKRWAVANERYSASQKGFLEYEGCYEHNFVLQEAIREATNGDKELVVAWLDLASAFTSVPHSSIHRALEGHGLPSRARNIISSLYSGMTTRVRTAEGFTDPILIESGVRQGCPLSPDVFNLTLEVVLRTMQLTGEGYTIGGVRTSNLAYADDVAILADSPAAMRRLLMAAERGARSVGLSFNPAKCASLHIAGREDVRPTEFSVQGSPIRALGPGDAYEHLGIPTGYQVKQNPTNTLSGLITDINNIDQSLMAPWQKLDAVGTFLLPRLDFAMQGTSIEKGLLTEADRSIKRAAKTWLSLPQRASAELVYLPPSQGGGGLLPLSDLYDLLTVAHGYKMLYSSDKTVSTVADSVLRKTVSERLRKRASNIDVARYLSGDMDLPRSTGRTSFWSKVRSATLRLNTKLGLRWIWCRDEEYLKIACGDVNAPRTLASPETKKQLVSALRSRVNIFYAESLLAKKDQGKVLEATRKSGSSNHFLRNGSFTRFCDWRFIHRARLDVLPLNACKRWQRGMDKRCRRCGKGLETLPHVLGHCGPHAAARQKRHNNVQDRLVKAASRCPGTISVNHTVRGVHGPDAALRPDIVVRDDVNRRITIVDVAVPFENRYAAIEEAREAKKAKYSSLARQLASNGYNVTVEAFLVGALGAWDPRNERVLSLLNVSRYYATLMRRLMVSDTIRWSRDIYVEHVSGIRQYT

SEQ ID NO: 7644 - protein, 1013 aa, Pteromalus puparum
MLQCIARSQRSGSQVAQPVAVSFSVASDAAMHSSANYTQAGQPSTPPLPPAANPPSPSSTHPQPIRGSPDRQRVARSRGPASEQRRLVGILEAASTREQLEESTTLAMRFLGRLTVRRPATRRGSRPASRGGENTRDEAQPSDRIREATKLQRLYRTSKKRAVQQILTGPNGICEIDKATIFNHFNDLAARRDGGEEWNDLFDREEPSAASNEALCAPFTREGVLRRLRGRSNTSPGPDGITYKDLAKADPGAHVLAAMFNTVLRLETSPSSWKESNTILLYKRGDASEISNWRPISLGDTVPKLFAAMLADRVKKWAMTNGRYSSAQKGFLEYEGCFEHNFVLQEAIRDARKNNKELVVAWLDLASAFTSVPHSSIFRALEGHGVPLKVRNIITSLYDGFTTRVRTADGPTDPIQIRSGVRQGCPLSPDVFNLTLEQVLREMLHTGEGYTFEGRHITTLAYADDVAILADSPTAMRTLLLAAERGARAVGLTFNPAKCATLHITGRGGDAVWPTVFSVQGSPVQALDTGAAYEHLGIPTGYQVKQTPTQTIRDLLSDAHAIDRSMLAPWQKLEAVGTFLLPRLDFIMQGADIEKTYLSEADRVIKRLAKSWLGLPQRASAEMVFLPPSQGGAGLLPLGDLYDLLTVSHGYKMLYSEDGTVSGLARATLGRTVSERLKKRASNIDIARYLSGDLDLPRAVGLASFWTKVRNAALRCKTKLGLRWQWCAEKEEFLVVCGGANAPGVKISPQTKQHLVSSLRRGAIQYYAGTLLAKRDQGKTFEVTRRSKHSNHFLRGGNFTRFCDWRFIHRARLDVLPLNAAKRWQTGGDKRCRRCGHDLETLPHVLNHCGPHSAARQRRHNNLQDRLVKAASRCPGTVQVNQTVRGVHGLDAALRPDIVVRDDVNRRITIVDVAVPFENRQEAFDGARQDKIAKYTSLANQLTGSGFNVTVEAFIVGALGAWDPKNERVLSLLNISQRYAALMRRLMVSDTIRWSRDIYVEHLSGIRQYQPTP

SEQ ID NO: 7645 - protein, 1180 aa, Trichomalopsis sarcophagae
MEQPALKAITEGDDTIVVLLPQADNEELQCPLCTGRGRYAGKTRIENLNRHIKEHHPDRSIMFRCWRCGFTPTEGINRYPRKVVTQHCLECVPDISSVPAGRDGAQRRANIRRAMGSASAAPRATRQSTSRGDTTSPVRQNISPVASPQEPARVTQRPGRTARVESSSGDEVFHSPAAPLQRDRGQVAQPIAVSFSGAADAANSATSTQAEQLPTPASPTIPPTTDSSRPRPTQGPPHRQQAARNRGPASEQRRLAGLLEAASTREQLEESIALAMQFLGRLTVRRPATQQRERLAPRRRANIGEEAQPSDRIREATKLQRLYRTSKKRAVQQILTGPIGICEVDKTTVFNHFNDLAARRDGGEEWSDLFDRGEPSVASNEALCAPFTRDEVFRRLRGRSNTSPGPDGITYRDLTKADPGAHVLAAMFNTVLRLEASPSSWKESNTILLYKKGDASDISNWRPISLGDTVPKLFAAMLADRVKRWAMTNGRYSSAQKGFLEYEGCYEHNFVLQEAIRDARKCSKELVVAWLDLASAFTSVPHSSIFRALEGHGLPLKVRNIITSLYDGYTTRVRTAEGPTDPIRIRSGVRQGCPLSPDVFNLTLELVLREMLNTGEGYTFEGRHITTLAYADDVAILADSPAAMRKLLQAAERGARAVGLTFNPAKCATLHITGRGEDAVRPTVFSVQGSPVPALDSGAAYEHLGIPTGYQIKQTPTQTIRDLLADAHAIDRSMLAPWQKLEAVGTFLLPRLDFIMQGADIEKTYLSEADKIIKRLAKSWLSLPQRASAEVVFLPPSQGGAGLLPLADLYDLLTVSHGYKMLYSNDRTVSGLARSTLEKTVSERLKKRASNIDIARYLSGDLDLPRAVGTASFWTKVRNAALRCKTKLGLRWHWCAEKEEFLVVCGGTNTPGVKISPQTKQHLVSSLRRSAVQHYTGTLLAKRDQGKTFEVTRRSKHSNHFLRGGNFTRFCDWRFIHRARLDVLPLNAAKRWQTGEDKRCRRCGHDLETLPHVLNHCGPHAAARQRRHNNLQDRLVKAAGRCPGTVQVNRTVRGVHGLDATLRPDIVVRDDVNRRITIVDVAVPFENRQEAFDGARQEKIAKYTSLANQLTGSGFSVTVEAFIVGALGAWDPRNERVLSLLSISQHYAALMRRLIVSDTIRWSRDIYVEHMSGIRQYNEL

SEQ ID NO: 7646 - protein, 1021 aa, Campodea augens
MNTIPTPSYEDNDVCQPVGLETTCEFEEVKFAFYKNYMEYEGTSEMRRPKLPRIPYCKKSKEVVEKVNQFIGSEFKSIASLTQMILIVYCAAVVVCKEMNIKLKCQRNQTNKIPAKEKRCPSWKIRLEKKIGDIRSDLTRLGNYGNDHEKYACSQTYHKLLNKHNISQNSKDSGQQLRVAIDILKQKLAAFSKRLRRYNKSLKRKENNKKFNVNEKNFYRSMENSTHREIMKTPKMEEVTNFWKNIWSNGATHKSTSVWIEKEKLATKNLPVMKFEITMNDLVNVIKKTNNWKAAGPDSIHNYWWKNFTAVYPSLKILIEECIRMPSLLPDFLLQGSTTLIPKSGDTENPKNYRPITCLCTLYKIITSVILCNVDKYVTANNLLAEEQKGCRKHSQGCKEQLVIDIVTMKDAARRKKNISTAWIDYRKAFDSVPHSWLLEVLHIYHIDEGVTQFLQHCMQKWTTRLKLSINGCTLESDVLKINRGIFQGDSLSPYWFCLAMNPLSSLLNNTHAGYSLTKNDKISHLFYMDDLKIYATNRNNLLSMVNTVTMYSDDIQMTLNTDKCAVLHVEKGKISPSNEEISPDLCSVKFPYLADDESYKYLGIHQTFLNCTQKMKESVTKEYCSRLRKILNSMLNSKNTFKAINSWCIPILTYTFGIIPWSQTEAEDLDRKTRKILTEFRAHHPKSATERLYLPRNEGGRGLIKLSTMRKRQIVLLKKYFNEKSHTSSLHKAIIHIDANKSALNLSESNDPEPETASDLRRSWEEKPLHGKFANSLKDCNVQLCTSWLRKGELYTETEGFMIAIQDQVINTRSYQRYITKSNIPTDKCRLCNQAVESIQHLSSACSTIANTEYLHRHNLSCKIIHQLLAKQSGFVSETVPYYQYTPEPVLENQATKLYWDVPVITDKTILANRPDVILLRKTEHEAFLIDVTHPNDDNLRKAFSNKIVKYTDLANEKKLMWKLKKVTIVPVVVSVNGLIHPEQMKMLNKLEITEKNLQLMQKATIMDTCRIVRKVLNDY

SEQ ID NO: 7647 - protein, 987 aa, Harpegnathos saltator
MPGVLMDEGPSGFRCEFPGCGRVFDTKTGRGLHHRRGHPDWTDERLNVVAIKARWNDEETALLARREVELCRDGVKFMNQALSECFPERSLEAIKGKRKQPAYRQVVANLLKQVPEDQTLPPREAELDNGDTEYRKEILRTIETLPVPALGDYNAPYLLEICGSLSSNQTEAVMEKLSVYLRGIFPPKERQRKERHLEMKGLTRRQLRRADYARTQDLWLKNRGKCLRMLLDDVSDVAVPPKDVMIPYWKEVMSAKKDTSPGQEHHRPVLGELWAPIGMEEIRKSMPSNTTAAGPDGVTAKQLRKVPLEILARILNIIMWCGKAPTKLLESVTTMIPKKSKARNPEDFRPITVSSVIIRTMHKILATRMSRGIHLDQRQRAFRPTDGSADNVFLLDMLLRSHHIQHKPLFLASLDIAKAFDSVSHKTIQDTLAMMGIPAPMYKYIMDVYGRSTTALACTSWTSQRFQPRCGVKQGDPMSPIIFNLIMDRLLTTLPEDIGTQIGGVRVNAAAFADDLLLFATTPMGLQKMLNISTNFLNKCGLMVSASKCLTVALRNVPHEKKTVIDQETIFLCEGKALPALKRTDEWKYLGIPFTPEGRRKTRITQRLMESINKLTKAPLKPQQRLFALRTMVIPSLYHELELGNVDISILRKCDRMLRQAVRGWLALPTDTPNAYIHSNIKNGGLGIVSLRWTAPLRRLQRLSKLPLADLTARGTPGAFLSGEIAKCRARLSDGNTNMETRVEIEARWSRLLYASVDGGGLSQSKNVSQQHEWVGDGTRFLSGKDYLQSCKLRVNAMPTRSRTARGRPKDRMCRAGCFRVETLNHILQQCHRTHGPRIRRHNALVSYVTRTLEAADYEVTVEPKITTEMGLRKPDIIAKRGVLGIIIDAQVVNDQLNLDEAHRKKTQYYQQIAEKVKATFNVREVVTTSITLSWRGIWSEASAKSLIDLGVIKRGALKVLSSRAIIGGLSAFHFFNKATAVRGAAG

SEQ ID NO: 7648 - protein, 1342 aa, Sphenodon punctatus
MVPRGAKNPCDASKCTPNPGVMEDNLRHSRLQFLSLATQTDWRPECVTTYTQTEDTFAQNSLWEEPKSRCRFCGENQRGQTMNDPEMTSDAARRHDDIQSVLRHIEPTILLRCDPMHACLPACTWPALVEPPDAAENSEKEHDRGRLLQGKLRDKVPKTPEPDKVKRMEGSEGSTTLEVSLLNRPIHPEEESAICVTANESTPQIEYNIIERETDVIPSSSAIVQLPQTNPACPFCADRITTPALLKKHVKGYHGGKLLQFQCSKCGRLNENQHSIITHLPKCKGNSIDPALGEFHCEICNNNFLTKSGLSQHKRIRHPLVRNEERIMASQPKENSLRGKHKSCWSNDEVEQLKTLFDEFGKYKDVNKRIANLLPSKTAKQIADKRRLLNLYIKSTKTPNPIEPETQEVTIPENRESSAPVKGLCEALQSKARKNLEKESAMKFEKDFLTNWLDNMQNVRHLLEETTVDALCNFLPEPKNITKPKKDRRPVKDRKQAKSWMKKRAKKRGLYQHYQSLFLKNKTRLASIILDGTEKFECEIDPKIVYEAYKNKWESATEFKGLSNFHSFDVTDNSKFYTRISGKEVQKNIKEMSRKTAPGPDGITVEDLENVDPDGEILAALFNLWMAVGIIPDTIKECRSLLIPKTSDPEKLKDIGNWRPLTIGSIIIRLFSRILTIRLAKACPLNARQRGFIDSPGCSENLKSLQSIIEYSKKEKQQFGVVFIDIAKAFDSVSHDHIIWVLKERKVDEHIIKIIQDSYTKVSTRLKVSKTLTDSISLKVGVKQGDPMSPLLFNLAMDPLINALEEQGEGVQVEDMKLKTMAFADDLVLLSNSFEGMSKNIKILEQFCQTTGLQVQPKKCQGFLITPTKDSYIINNCKKWSIEGTEVNMIQPGQREKYLGAKIDPWTIFAEINFEEKIEDWLCKLEVAPLKPSQKLEILNIHTIPRIIYLADHTNCNITKLKNLDNMIRKRLKDWLHLPASTCHGLFYSKNRDGGLGIPRLERLIPSVQARSLHRISQSSDYKIMNIAFSCGLESEFEKKWVQAGGAKETRPNLKDILPPPPEPKYYEKLNEWEKPKLKIKFPLPLNYRKEEFREWAKLKCQGSGIQHFQDDIISNNWLRINKGITEKQFILALKLRANVFPTREFLGRGTQNANRACRHCKAKFETCSHILGQCPTLQEARIKRHNKLCTLLKEEAKKLEWEVFDEPHLHNRAGELRKPDVILVKDKKALVVDVTVRFEYKEDGLRKAAKEKASYYSDLTEPIIELTKAKKVNYFGLPIGARGKWPPENNNLLRELGMEEGRVKRLARLFSLRTLLYSTNMLHMFENIGKGQKAYFVNSNL

SEQ ID NO: 7649 - protein, 1017 aa, Blattella germanica
METNDIIYCPTCQNSIDIDLDVANLSILCGKCKFWFHGKCIGLCVEEVESYASAVSSWTCPSCETLPSSQNISLLEGDLLSCSLCPPNTGKLFKGKRGLRIHCTRAHSNTSLPSSDSTISPDTFNSQLVSCKKDILVLRRIPKGARYFAAEKLAQVIDNCMSQNTIESWHSLLSFAYIAFRVPANSSRFGKFNRPTTSLVSTIKNNLKNFTLLPSSSPRKNYTYSKDRLVEAKIADGDVRGAVRILSSEFGVATYSGSCFNALLEKHPSPSRPLLFPDPPTSDSQPLSVSVDLVSQAIHSFPNGSSSGIDGLRPQHLNDLISTSAGDAGQRLLNIITKFCNFILNGKINADICPIFYGASLIALNKKDGGLRPIAIGNVFRRLVAKLACSSVRSDLGVYLRPFQLGFGSSRGCESVIHSVRSFLHLNSGSDKVLLKLDFRNAFNCIERDTLLAAVKEQLPSLYPFLWQAYKNPSNLFHGSNIISSQRGVQQGDPTGPMLFSLATFPIIQKCSSSLNMFYLDDGTLCDEPHQVLADLQKLIVDCRSVGLELNPDKCELYFLSDKDEAVASAFQKLAPGIKVISNSELIILGSPIMLQAIEQSLSSKVQELKNTLNGLTSLKSHIGYFLLKNCLAIPKLMYFMRTTPLWMFPSLLLESDNLLRTCLKSILNLHLDDKNWTLASLPISIGGLGIRKLSDVCLPAFLASCHGVSEFINSTFSIYGDNFEVSFLSEAIQEWSVLRNLPAPPAHFEVQKNWDSISVKRTHQSLLASSTSDVDKARYLAIQEKEASSWLKALPSANIGTLMDDSTFKVAIALRLGCKLCQPHSCVCGSTVDTYGHHALSCIKSPGRFSRHFMINDIIKRALVSAGIPSILEPTGLSRSDGRRPDGLTLIPWTNGKSLLWDATCVDTVAPSHVPNTSLIAGSAAESAVVLKRNKYKSLLDSYVFVAFAVETFGSWSWDAKKMVHEIGHKIQTCNGDRRSTAYLRQRIGIAIQRGNAASFMGTFPASSSLEEIFYI

SEQ ID NO: 7650 - protein, 857 aa, Blattella germanica
MSQNTIESWHSLLSFAYIAFRVPANSSRFGKFNRPTTSLVSTIKNYLKNFTLLPSSSPRKNYTYSKDRLVEAKIADGDVRGAVRILSSEFGVATYSGSCFNALLEKHPSPSRPLLFPDPPTSDSQPLSVSVDLVSQAIHSFPNGSSSGIDGLRPQHLNDLISTSAGDAGQRLLNIITKFCNFILNGKINADICPIFYGASLIALNKKDGGLRPIAIGNVFRRLVAKLACSSVRSDLGVYLRPFQLGFGSSRGRESVIHSVRSFLHLNSGSDKVLLKLDFRNAFNCIERDTLFAAVKEQLPSLYPFLWQAYKNPSNLFHGSNIISSQRGVQQGDPTGPMLFSLATFPIIQKCSSSLNMFYLDDGTLCDEPHQVLADLQKLIVDCRSVGLELNPDKCELYFLSDKDEAVVSAFQKYAPGIKVISNSELIILGSPIMLQAIEPSLSSKVQELKNTLNGLTSLKSHIGYFLLKNCLDIPKLMYFMRTTPLWMFPSLLLESDNLLRTCLKSILNLHLDDKNWTLASLPISIGGLGIRKLSDVCLPAFLASCHGVSEFIKSTFSIYGDNFEVSLLSEAIQEWSVLRNLPAPPAHFEVQKNWDSISAKRTHQSLLASSTSDVDKARYLAIQEKEASSWLKALPSANIGTLMDDSTFKVAIALRLGCKLCQPHSCVCGSTVDTYGHHALSCIKSPGRFSRHFMINDIIKRALVSAGIPSILEPTGLSRSDGRRPDGLTLIPWTNGKSLLWDATCVDTVAPSHVPNTSLIAGSAAESAVVLKRNKYKSLLDSYVFVAFAVETFGSWSWDAKKMVLEIGHKIQTCNGDRRSTAYLRQRIGIAIQRGNAASFMGTFPASSSLEEIFYI

SEQ ID NO: 7651 - protein, 1016 aa, Blattella germanica
METNDFIYCPTCQNSIDIDLDVANLSILCGKCKFWFHGKCIGLCVEEVESYASAVSSWTCPSCETLPSSQNISLLEGDLLTCSLCPPNTGKLFKGKRGLRIHCTRAHSNTSLPSSDSTISPDTFNSQLVSCKKDILVLRRIPKGARYFAAEKLAQVIDNCMSQNTIESWHSLLSFAYIAFRVPANSSRFGKFNRPTTSLVSTIKNNLKNFTLLPSSSRKNYTYSKDRLVEAKIADGDVRGAVRILSSEFGVATYSGSCFNALLEKHPSPSRPLLFPDPPTSDSQPLSVSVDLVSQAIHSFPNGSSSGIDGLRPQHLNDLISTSAGDAGQRLLNIITKFCNFILNGKINADICPIFYGASLIALNKKDGGLRPIAIGNVFRRLVAKLACSSVRSDLGVYLRPFQLGFGSSRGCESVIHSVRSFLHLNSGSDKVLLKLDFRNAFNCIERDTLLAAVKEQLPSLYPFLWQAYKNPSNLFHGSNIISSQRGVQQGDPTGPMLFSLATFPIIQKCSSSLNMFYLDDGTLCDEPHQVLADLQKLIVDCRSVGLELNPDKCELYFLSDKDEAVVSAFQKYAPGIKVISNSELIILGSPIMLQAIEPSLSSKVQELKNTLNGLTSLKSHIGYFLLKNCLAIPKLMYFMRTTPLWMFPSLLLESDNLLRTCLKSILNLHLDDKNWTLASLPISIGGLGIRKLSDVCLPAFLASCHGVSEFIKSTFSIYGDNFEVSLLSEAIQEWSVLRNLPAPPAHFEVQKNWDSISAKRTHQSLLASSTSDVDKARYLAIQEKEASSWLKALPSANIGTLMDDSTFKVAIALRLGCKLCQPHSCVCGSTVDTYGHHALSCIKSPGRFSRHFMINDIIKRALVSAGIPSILEPTGLSRSDGRRPDGLTLIPWTNGKSLLWDATCVDTVAPSHVPNTSLIAGSAAESAVVLKRNKYKSLLDSYVFVAFAVETFGSWSWDAKKMVLEIGHKIQTCNGDRRSTAYLRQRIGIAIQRGNAASFMGTFPASSSLEEIFYI

SEQ ID NO: 7652 - protein, 975 aa, Blattella germanica
METNDIIYCPTCQNSIDIDIDVANLSILCGKCKFWFHGKCIGLCAEEVESYASAVSSWTCPSCETLPSSQNISLLEDDLLTCSLCPPNTGKLFKGMRDLRIHCTRAHSNTSLPSFDSTISPDTFNSQLASCKKDILVLRRIPKGARYFAAEKLAQVIDNCMSQNNIESWHSLLSFAYIAFRVPAKSSRFGKFNRPTTSLVSSIKNNLKNFTLSPSSSSSSSRKNYTYSKDRLVEAKIADGDVRGAVRILSSEFGVATYSGSCFDALLEKHPSPSRLLLFPDPPTSDSQPLSVSVDLVSQAIHSFPNGSSSGIDGLRPQHLNDLISTSAGDAGQRLLNTITKFCNFILNGKINADICPIFYGASLIALNKKDGGLRPIAIGNVFRRLVAKLACSSVRSDLGVYLRPYQLSFGSSRGCESVIHFVRSFLHLNSGSNKVLLKLDFRNAFNCIERDTLLAAVKEQLPSLYPFLWQAYKNPSNLYHGSNIISSQRGVQQGDPTGPMLFSLATFPIIQKCSSSLNMFYLDDGTLCDEPYQVLADLQKLIVDCRSVGLELNPDKCELYFLSDKDEAVASAFQKYAPGIKVISNSELIILGSPIMLQAIEPSLSSKVQELKNTLNGLTSLKSHIGYFLLKNCLAIPKLMYFMRTTPLWMFPSFLLESDNLLRTCLKSILNLYLDDKNWTLASLPISIGGLGIRKLSDVCLPAFLASCHGVSEFIKSTFSIYGDNFEVCFLSEAIQEWSVLRNLPAPPAHFEVQKNWDSISAKRTHQSLLASSTFDVDKARYLAIQEKEASSWLNASPSANIGTLMDDSTFKVAIALRLGCKLCQPHSCVCGSTVDTYGYHALSCIKSPGRFSRHFMINDIIKRALVSAGIPSILEPTGLSRSDGKRPDGLTLIPWTNGKSLLWDATCVDTVAPSHVPSLIAGSAAESAVVLKRNKYKSLLDSYVFVAFAVETFGSWSWDAKKIVSEIGHKIKS

SEQ ID NO: 7653 - protein, 1015 aa, Clonorchis sinensis
MVAQLACADCSRLFPTKIGLSQHRRHAHPTQHNADKLSRVKHSGARWSQQESQSLLRLANNLYPSCETQTALFARLEQYFPGRSAISIKTRLQVLNWQAQQDKSSSGGPDQTIGQIAAYSSEADDYSVWFKQTVDCAVSLLESHADSSLASVDLLAFARGLQSGIMTPEQVLSLLDLHASRTFPHTWKTVSRRRQLVYRMPVNRKQIRRANYAAIQTLYHQRRKDAASAVLDGSWKDLYKGNCGLPPDAEQYWKQVLSAPKHVDSRPSRVIVPSDWSLIEPITGEEVGRTVRSMGNSSPGLDKLTPRMLRRFNANVLAGYFNLLLLAGGCPPHLCRARITLVPKVPNPTSPDQLRPISVSSILVRCFHKVLADRWSRRLQLPSLQFAFLHRDGCLEATSLLHALLRHSSATASNLSLAFVDISKAFDSVSHDTIVRSAEAFGAPSPLVRYIAQSYENAVAVFPSSEVHCHRGVRQGDPLSPLLFIMAMDEVLGLSMPQLGYQFHDTLVDGFAFADDWVVCAESQARLKEKLEAAAVELGRAGMKINARKTKAMVICGDRKHRATAVSVEPFCFAEELITPLGPTDTVTYLGIPFTFKGKGVFNHRQHLLKLLDEVTRAPLKPHQRMEITRNYLIPRLTYSLVLGQVHRNTLKRLDNYIRQSIRGWLRLPKDTPISYIHAGKQHGGLGIPSLSATIPMQRRVRMEKLLSTQCRVLRNVVNDSAFGKVVRDLSLPIRVHGSCVNTKEELVAAWGDSLHNSVDGRGLRELVASSLSNRWLVFPERVFPRIFIRGIQLRCNLLRTRVRSARHGHGGQTILCRGNCGQPESLVHILQSCWITHDARCARHNRVARELAKRLRRLGYTVFEELRAPTSTSFIKPDLIAVRERRATVIDVSIVSDGRGVTVWNEKKQKYGADEFSLAIISALRAIGCDVDFLVHQPMIISYRGICFPQSAKAVIGLGLSKVTVSDLCLLAIVGSLRTYDTFMRGTWRRVYILAIESHARPSMTDTLCLMCES

SEQ ID NO: 7654 - protein, 990 aa, Clonorchis sinensis
MVAQLACADCSRLFPTKIGLSQHRRHAHPTQHNADKLSRVKHSGARWSQQESQSLLRLANNLYPSCETQTALFARLEQYFPGRSAISIKTRLQVLNWQAQQDESSSGGPDQTIGQIAAYSSEADDYSVWFKQTVDCAVSLLESHADSSLASVDLLAFARGLQSGIMTPEQVLSLLDLHASRTFPHTWKTVSRRRQLVYRMPVNRKQIRRANYAAIQTLYHQRRKDAASAVLDGSWKDLYKGNCGLPPDAEQYWKQVLSAPKHVDSRPSRVIVPSDWSLIEPITGEEVGRTVRSMGNSSPGLDKLTPRMLRRFNANVLAGYFNLLLLAGGCPPHLCRARITLVPKVPNPTSPDQLRPISVSSILVRCFHKVLADRWSRRLQLPSLQFAFLHRDGCLEATSLLHALLRHSSATASNLSLAFVDISKAFDSVSHDTIVRSAEAFGAPSPLVRYIAQSYENAVAVFPSSEVHCHRGVRQGDPLSPLLFIMAMDEVLGLSMPQLGYQFHDTLVDGFAFADDWVVCAESQARLKEKLEAAAVELGRAGMKINARKTKAMVICGDRKHRATAVSVEPFCFAEELITPLGPTDTVTYLGIPFTFKGKGVFNHRQHLLKLLDEVTRAPLKPHQRMEITRNYLIPRLTYSLVLGQVHRNTLKRLDNYIRQSIRGWLRLPKDTPISYIHAGKQHGGLGIPSLSATIPMQRRVRMEKLLSTQCRVLRNVVNDSAFGKVVRDLSLPIRVHGSCVNTKEELVAAWGDSLHNSVDGRGLRELVASSLSNRWLVFPERVFPRIFIRGIQLRCNLLRTRVRSARHGHGGQTILCRGNCGQPESLVHILQSCWITHDARCARHNRVARELAKRLRRLGYTVFEELRAPTSTSFIKPDLIAVRERRATVIDVSIVSDGRGVTVWNEKKQKYGADEFSLAIISALRAIGCDVDFLVHQPMIISYRGICFPQSAKAVIGLGLSKVTVSDLCLLAIVGSLRTYDTFMRGTWR

SEQ ID NO: 7655 - protein, 991 aa, Clonorchis sinensis
MVAQLACADCSRLFPTKIGLSQHRRHAHPTQHNADKLSRVKHSGARWSQQESQSLLRLANNLYPSCETQTALFARLEQYFPGRSAISIKTRLRVLNWQAQQDESSSGGPDQTIGQIAAYSSEADDYSVWFKQTVDCAVSLLESHADSSLASVDLLAFARGLQSGIMTPEQVLSLLDLHASRTFPHTWKTVSRRRRQLAHRMPVNRKQIRRANYAAIQTLYHQRWKDAASAVLDGSWKDLYKGNCGLPPDAEQYWKQVLSAPKHVDSRPSRVVVPSDWSLIEPITGEEVGRTVRSMGNSSPGLDKLTPRMLRRFNANVLAGYFNLLLLSGGCPPHLCRARITLVPKVPNPTSPDQLRPISVSSILVRCFHKVLADRWSRRLQLPSLQFAFLHRDGCLEATSLLHALLRHSSATASNLSLAFVDISKAFDSVSHDTIVRSAEAFGAPSPLVRYIAQSYENAVAVFPSSEVHCHRGVRQGDPLSPLLFIMAMDEVLGLSMPQLGYQFHDTLVDGFAFADDWVVCAESQARLKEKLEAAAVELGRAGMKINARKTKAMVICGDRKHRATAVSVEPFCFAEELITPLGPTDTVTYLGIPFTFKGKGVFNHRQHLLKLLDEVTRAPLKPHQRMEITRNYLIPRLTYSLVLGQVHRNTLKRLDNYIRQSIRGWLRLPKDTPISYIHAGKQHGGLGIPSLSATIPMQRRVRMEKLLSTQCRVLRNVVNDSAFGKVVRDLSLPIRVHGSCVNIKEELVAAWGDSLHNSVDGRGLRELVASPLSNRWLVFPERVFPRIFIRGIQLRCNLLRTRVRSARHGHGGQTILCRGNCGQPESLVHILQSCWITHDARCARHNRVARELAKRLRRLGYTVFEELRAPTSTSFIKPDLIAVRERRATVIDVSIVSDGRGMTLWNEKKQKYGADEFSLAIISALRAIGCDVDFLVHQPMVISYRGICFPQSPKAVIGLGLSKVTVSDLCLLAIVGSLRTYDTFMRGTWR

SEQ ID NO: 7656 - protein, 826 aa, Clonorchis sinensis
MTPEQVLSLLDLHASRTFPHTWKTVSRRRRQLAHRMPVNRKQIRRANYAAIQTLYHQRWKDAASAVLDGSWKDLYKGNCGLPPDAEQYWKQVLSAPKHVDSRPSRVVVPSDWSLIEPITGEEVGRTVRSMGNSSPGLDKLTPRMLRRFNANVLAGYFNLLLLSGGCPPHLCRARITLVPKVPNPTSPDQLRPISVSSILVRCFHKVLADRWSRRLQLPSLQFAFLHRDGCLEATSLLHALLRHSSATASNLSLAFVDISKAFDSVSHDTIVRSAEAFGAPSPLVRYIAQSYENAVAVFPSSEVHCHRGVRQGDPLSPLLFIMAMDEVLGLSMPQLGYQFHDTLVDGFAFADDWVVCAESQARLKEKLEAAAVELGRAGMKINARKTKAMVICGDRKHRATAVSVEPFCFAEELITPLGPTDTVTYLGIPFTFKGKGVFNHRQHLLKLLDEVTRAPLKPHQRMEITRNYLIPRLTYSLVLGQVHRNTLKRLDNYIRQSIRGWLRLPKDTPISYIHAGKQHGGLGIPSLSATIPMQRRVRMEKLLSTQCRVLRNVVNDSAFGKVVRDLSLPIRVHGSCVNTKEELVAAWGDSLHNSVDGRGLRELVASPLSNRWLVFPERVFPRIFIRGIQLRCNLLRTRVRSARHGHGGQTILCRGNCGQPESLVHILQSCWITHDARCARHNRVARELAKRLRRLGYTVFEELRAPTSTSFIKPDLIAVRERRATVIDVSIVSDGRGVTVWNEKKQKYGADEFSLAIISALRAIGCDVDFLVHQPMIISYRGICFPQSAKAVIGLGLSKVTVSDLCLLAIVGFLRTYDTFMRGTWR

SEQ ID NO: 7657 - protein, 991 aa, Clonorchis sinensis
MVAQLACADCSRLFPTKIGLSQHRRHAHPTQHNADKLSRVKHSGARWSQQESQSLLRLANNLYPSCETQTALFARLEQYFPGRSAISIKTRLRVLNWQAQQDESSSGGPDQTIGQIAAYSSEADDYSVWFKQTVDCAVSLLESHADSSLASVDLLAFARGLQSGIMTPEQVLSLLDLHASRTFPHTWKTVSRRRRQLAHRMPVNRKQIRRANYAAIQTLYHQRRKDAASAVLDGSWKDLYKGNCGLPPDAEQYWKQVLSAPKHVDSRPSRVVVPSDWSLIEPITGEEVGRTVRSMGNSSPGLDKLTPRMLRRFNANVLAGYFNLLLLAGGCPPHLCRARITLVPKVPNPTSPDQLRPISVSSILVRCFHKVLADRWSRRLQLPSLQFAFLHRDGCLEATSLLHALLRHSSATASNLSLAFVDISKAFDSVSHDTIVRSAEAFGAPSPLVRYIAQSYENAVAVFPSSEVHCHRGVRQGDPLSPLLFIMAMDEVLGLSMPQLGYQFHDTLVDGFAFADDWVVCAESQARLKEKLEAAAVELGRAGMKINARKTKAMVICGDRKHRATAVSVEPFCFAEELITPLGPTDTVTYLGIPFTFKGKGVFNHRQHLLKLLDEVTRAPLKPHQRMEITRNYLIPRLTYSLVLGQVHRNTLKRLDNYIRQSIRGWLRLPKDTPISYIHAGKQHGGLGIPSLSATIPMQRRVRMEKLLSTQCRVLRNVVNDSAFGKVVRDLSLPIRVHGSCVNTKEELVAAWGDSLHNSVDGRGLRELVASPLSNRWLVFPERVFPRIFIRGIQLRCNLLRTRVRSARHGHGGQTILCRGNCGQPESLVHILQSCWITHDARCARHNRVARELAKRLRRLGYTVFEELRAPTSTSFIKPDLIAVRERRATVIDVSIVSDGRGMTVWNEKKQKYGADEFSLAIISALRAIGCDVDFLVHQPMIISYRGICFPQSAKAVIGLGLSKVTVSDLCLLAIVGSLRTYDTFMRGTWR

SEQ ID NO: 7658 - protein, 1084 aa, Lepidiolamprologus kendalli
MLRCSSKINDNSSSSSSSSSSSRRAEPPPRGADWGSSDVSPGELRVQQLQIGPTTLFGFNVLVTFDNTENNPAGASAPASTSTQDKLVEFTCADCGKCCKSNAGFAAHRRMHLRQNDRTSSVTQLVCSECSKTFASKIGLSQHRRHAHPIQRNAEKLAHTKVSGRQWSHQETQSLLRLADSLSSSCSTRVELITQLVKYFPGRTVTSVKTRLRVLNWQAPTSETSSSDHGESRSGSNQYSSDPNMYIGWFKKTVDCTVSLLESNNEQAISSNDLLAFARGLQTGIMTREQVLSFLDLHASKTFPHTWNTISRRRQQVPRVHANRKQIRRANYASLQALYHRRRKDAASAVLDGSWKELYKENKGLPPNSEEYWTKVLSAPEYVDNRPRRALLPPDWSLIEPITGDEIKKAIRNMGNTSPGLDKITPKRLAGMDSNALAGYFNLMLLVEGCPPHLCRSRITLVPKKPNPTTCDQLRPISVSSVLVRCFHKVLADRWNSRLQLPSLQFAFLHRDGCLEATSLLHALLRHSSATASNLCAAFIDISKAFDSVSHDTVRRSAAAFGAPPPLLQYITQSYENAIAVFPHSEVRCRRGVRQGDPLSPILFIMAMDEVISSSMPELGYQFHDILVDGFAFADDWVMFAESSARLVEKLESAVISLQQAGMVINARKTQAVVIHGDRKHRATAVSNQQLNFAGETITPVGPTDNWAYLGIPFSYKGKGAVNHRQLLLNLLDEVTHAPLKPHQRMEITRTYLIPKLTHSLVLSLVHRNTLKRLDNYIRQSVRRWLRLPKDTPISYIHATRQQGGLGIPNLSTTIPLQRRTRMEKLMSSESQILRNVVSDMSFRPVVRDVNVPVRVQGVCVNTKDEAVAAWGAKLHGSVDGRGLRELVTSPLSNDWLINPDRVFPRIFIRGIHLRCNLLRTRVRNARRGHGHQTVLCRGNCGQPESLVHILQSCWITHDARCARHNRIARELAKRLRKLGYTVFEELRAPTSNSYIKPDLIAVKDRRATVIDVSIVADGRSETVWNEKRQKYGADESSLAIISALRASDCDIDVLTHHPLIISYRGICFPQSARSLLTMGLPKF

SEQ ID NO: 7659 - protein, 991 aa, Opisthorchis felineus
MVAQLACADCSRLFPTKIGLSQHRRHVHPTQHNADKLGRVKYSGARWSQQESQSLLRLANNLYPSCGTQTALFARLEQYFPGRSAISIKTRLRVLNWQAQQDESSSGGPDQTIGQTMAYSSEADDYSVWFKQTVDCAVSLLESHADSSLASVDLLAFARGLQSGIMTPEQVLSLLDLHASRTFPHIWKTVSRRRRQLAHRMPVNRKQIRRANYAAIQTLYHQRRKDAASAVLDGSWKDLYKGNCGLPLNAEQYWKQVLSAPKHVDSRPSRVVVPSDWSLIEPITGEEVGRTIRLMGNSSPGLDKLTPRMLRRFNANALAGYFNLLLLSGGCPPHLCRARITLVPKVPNPTSPDQLRPISVSSILVRCFHKVLADRWSRRLQLPSLQFAFLHRDGCLEATSLLHALLRHSSATASNLSLAFVDISKAFDSVSHDTIVRSAKAFGAPSPLVRYIAQSYENAVAVFPNSEVHCHRGVRQGDPLSPLLFIMAMDEVLGLSMPQLGYQFHDTLVDGFAFADDWVVCAESQARLKEKLEAAAVELGRAGMKINARKTKAMVICGDRKHRATAVSVEPFCFAEELITPLGPTDTVTYLGIPFTFKGKGVFNHRQHLLKLLDEVTRAPLKPHQRMEITRNYLILRLTYSLVLGQVHRNTFKRLDNYIRQSIRGWLRLPKDTPISYIHAGKQHGGLGIPSLSATIPMQRRARMEKLFSTQCRVLRNVVNDSAFGKIVRDLSLPIRVHGACVNTKEELVAAWGDSLHNSVDGRGLRELVASPLSNRWLVFPERVFPRIFIRGIQLRCNLLRTRVRNARHGHGGQTILCRGNCGQPESLVHILQSCWITHDARCARHNRVARELAKRLRRLGYTVFEELRAPTSTSFIKPDLIAVRERRATVIDVSIVSDGRGVTVWNEKKQKYGADEYSLAIISALRAIGCDVNFLVHQPMIISYRGICFPQSAKAVIGLGLPKVTVSDLCLLAIVGSLRTYDTFMRGTWR

SEQ ID NO: 7660 - protein, 930 aa, Clonorchis sinensis
MVAQLACADCSHLFPTKIGLSQHRRHAHPTQHNADKLSRVKHSGARWSQQESQSLLRLAKNLYPYSVWFKQTVDCAVSLLESHADSSLASVDLLAFARGLQSGIMTPEQVLSLLDLHASRTFPHTWKTVSRRRRQLAHRMPVNRKQIRRANYAAIQTLYHQRWKDAASAVLDGSWKDLYKGNCGLPPDAEQYWKQVLSAPKHVDSRPSRVVVPSDWSLIEPITGEEVGRTVRSMGNSSPGLDKLTPRMLRRFNANVLAGYFNLLLLSGGCPPHLCRARITLVPKVPNPTSPDQLRPISVSSILVRCFHKVLADRWSRRLQLPSLQFAFLHRDGCLEATSLLHALLRHSSATASNLSLAFVDISKAFDSVSHDTIVRSAEAFGAPSPLVRYIAQSYENAVAVFPSSEVHCHRGVRQGDPLSPLLFIMAMDEVLGLSMPQLGYQFHDTLVDGFAFADDWVVCAESQARLKEKLEAAAVELGRAGMKINARKTKAMVICGDRKHRATAVSVEPFCFAEELITPLGPTDTVTYLGIPFTFKGKGVFNHRQHLLKLLDEVTRAPLKPHQRMEITRNYLIPRLTYSLVLGQVHRNTLKRLDNYIRQSIRGWLRLPKDTPISYIHAGKQHGGLGIPSLSATIPMQRRVRMEKLLSTQCRVLRNVVNDSAFGKVVRDLSLPIRVHGSCVNTKEELVAAWGDSLHNSVDGRGLRELVASPLSNRWLVFPERVFPRIFIRGIQLRCNLLRTRVRSARHGHGGQTILCRGNCGQPESLVHILQSCWITHDARCARHNRVARELAKRLRRLGYTVFEELRAPTSTSFIKPDLIAVRERRATVIDVSIVSDGRGMTLWNEKKQKYGADEFSLAIISALRAIGCDVDFLVHQPMIISYRGICFPQSAKAVIGLGLSKVTVSDLCLLAIVGFLRTYDTFMRGTWR

SEQ ID NO: 7661 - protein, 826 aa, Clonorchis sinensis
MTPEQVLSLLDLHASRTFPHTWKTVSRHRRQLAHRMPVNRKQIRRANYTAIQTLYHQRRKDAASAVLDGSWKDLYKGNCGLPPDAEQYWKQVLSAPKHVDSRPSRVIVPSDWSLIEPITGEEVGRTVRSMGNSSPGLDKLTPRMLRRFNANVLAGYFNLLLLAGGCPPHLRRTRITLVPKVPNPTSPDQLRPISVSSILVRCFHKVLADRWSRRLQLPSLQFAFLHRDGCLEATSLLHALLRHSSATASNLSLAFVDISKAFDSVSHDTIVRSAEAFGAPSPLVRYIAQSYENAVAVFPSSEVHCHRGVRQGDPLSPLLFIMAMDEVLGLSMPQLGYQFHDTLVDGFAFADDWVVCAESQARLKEKLEAAAVELGRAGMKINARKTKAMVICGDRKHRATAVSVEPFCFAEELITPLGPTDTVTYLGIPFTFKGKGVFNHRQHLLKLLDEVTRAPLKPHQRMEITRNYLIPRLTYSLVLGQVHRNTLKRLDNYIRQSIRGWLRLPKDTPISYIHAGKQHGGLGIPSLSATIPMQRRVRMEKLLSTQCRVLRNVVNDSAFGKVVRDLSLPIRVHGSCVNTKEELVAAWGDSLHNSVDGRGLRELVASSLSNRWLVFPERVFPRIFIRGIQLRCNLLRTRVRSARHGHGGQTILCRGNCGQPESLVHILQSCWITHDARCARHNRVARELAKRLRRLGYTVFEELRAPTSTSFIKPDLIAVRERRATVIDVSIVSDGRGVTVWNEKKQKYGADEFSLAIISALRAIGCDVDFLVHQPMIISYRGICFPQSAKAVIGLGLSKVTVSDLCLLAIVGSLRTYDTFMRGTWR

SEQ ID NO: 7662 - protein, 991 aa, Clonorchis sinensis
MVAQLACADCSRLFPTKIGLSQHRRHAHPTQHNADKLSRVKHSGARWSQQESQSLLRLANNLYPSCETQTALFARLEQYFPGRSAISIKTRLRVLNWQAQQDESSSGGPDQTIGQIAAYSSEADDYSVWFKQTVDCAVSLLESHADSSLASVDLLAFARGLQSGIMTPEQVLSLLDLHASRTFPHTWKTVSRRRRQLAHRMPVNRKQIRRANYAAIQTLYHQRWKDAASAVLDGSWKDLYKGNCGLPPDAEQYWKQVLSAPKHVDSRPSRVVVPSDWSLIEPITGEEVGRTVRSMGNSSPGLDKLTPRMLRRFNANVLAGYFNLLLLSGGCPPHLCRARITLVPKVPNPTSPDQLRPISVSSILVRCFHKVLADRWSRRLQLPSLQFAFLHRDGCLEATSLLHALLRHSSATASNLSLAFVDISKAFDSVSHDTIVRSAEAFGAPSPLVRYIAQSYENAVAVFPSSEVHCHRGVRQGDPLSPLLFIMAMDEVLGLSMPQLGYQFHDTLVDGFAFADDWVVCAESQARLKEKLEAAAVELGRAGMKINARKTKAMVICGDRKHRATAVSVEPFCFAEELITPLGPTDTVTYLGIPFTFKGKGVFNHRQHLLKLFDEVTRAPLKPHQRMEITRNYLIPRLTYSLVLGQVHRNTLKRLDNYIRQSIRGWLRLPKDTPISYIHAGKQHGGLGIPSLSATIPMQRRVRMEKLLSTQCRVLRNVVNDSAFGKVVRDLSLPIRVHGSCVNTKEELVAAWGDSLHNSVDGRGLRELVASPLSNRWLVFPERVFPRIFIRGIQLRCNLLRTRVRSARHGHGGQTILCRGNCGQPESLVHILQSCWITHDARCARHNRVARELAKRLRRLGYTVFEELRAPTSTSFIKPDLIAVRERRATVIDVSIVSDGRGVTVWNEKKQKYGVDEFSLAIISALRAIGCDVDFLVHQPMIISYRGICFPQSAKAVIGLGLSKVTIGDLCLLAIVGSLRTYNTFMRDTWP

SEQ ID NO: 7663 - protein, 991 aa, Clonorchis sinensis
MVAQLACADCSHLFPTKIGLSQHRRHAHPTQHNADKLSRVKHSGARWSQQESQSLLRLAKNLYPSCETQTALFARLEQYFPGRSAISIKTRLRVLNWQAQQDESSSGGPDQTIGQIAAYSSEADDYSVWFKQTVDCAVSLLESHADSSLASVDLLAFARGLQSGIMTPEQVLSLLDLHASRTFPHTWKTVSRRRRQLAHRMPVNRKQIRRANYAAIQTLYHQRRKDAASAVLDGSWKDLYKGNCGLPPDAEQYWKQVLSAPKHVDSRPSRVVVPSDWSLIEPITGEEVGRTVRSMGNSSPGLDKLTPRMLRRFNANVLAGYFNLLLLAGGCPPHLCRARITLVPKVPNPTSPDQLRPISVSSILVRCFHKVLADRWSRRLQLPSLQFAFLHRDGCLEATSLLHALLRHSSATASNLSLAFVDISKAFDSVSHDTIVRSAEAFGAPSPLVRYIAQSYENAVAVFPSSEVHCHRGVRQGDPLSPLLFIMAMDEVLGLSMPQLGYQFHDTLVDGFAFADDWVVCAESQARLKEKLEAAAVELGRAGMKINARKTKAMVICGDRKHRATAVSVEPFCFAEELITPLGPTDTVTYLGIPFTFKGKGVFNHRQHLLKLLDEVTRAPLKPHQRMEITRNYLIPRLTYSLVLGQVHRNTLKRLDNYIRQSIRGWLRLPKDTPISYIHAGKQHGGLGIPSLSATIPMQRRVRMEKLLSTQCRVLRNVVNDSAFGKVVRDLSLPIRVHGSCVNTKEELVAAWGDSLHNSVDGRGLRELVASPLSNRWLVFPERVFPRIFIRGIQLRCNLLRTRVRSARHGHGGQTILCRGNCGQPESLVHILQSCWITHDARCARHNRVARELAKRLRRLGYTVFEELRAPTSTSFIKPDLIAVRERRATVIDVSIVSDGRGMTVWNEKKQKYGADEFSLAIISALRAIGCDVDFLVHQPMIISYRGICFPQSAKAVIGLGLSKATVSDLCLLAIVGSLRTYDTFMRGTWR

SEQ ID NO: 7664 - protein, 959 aa, Opisthorchis felineus
MQISLAEWSIPGPHWSQQESQSLLRLATNLYPTCGTQTALFARLEQYFPGRSAISIKTRLRVLNWQAQQDESSSGGPDQTIGQITAYSSEADDYSVWFKQTVDCAVSLLESHADSSLASVDLLAFARGLQSGIMTPEQVLSLLDLHASRTFPHIWKTVSRRRRQLAHRIPVNRKQIRRANYAAIQTLYHQRRKDAASAVLDGSWKDLYKGNCGLPLNAEQYWKQVLSAPKHVDSRPSRVVVPSDWSLIEPITGEEVGRTIRLMGNSSPGLDKHTPRMLRRFNANALAGYFNLLLLSGGCPPHLCRARITLVPKVPNPTSPDQLRPISVSSILVRCFHKVLADRWSRRLQLPSLKFAFLHQDGCLEATLLLHALLRHSSATASNLSLAFVDISKAFDSVSHDTIVRSSKAFGAPSPLVRYIAQSYENAVAVFPNSEVHCHRGVRQGDPLSPLLFIMAMDEVLGLSMPQLGYQFHDTLVDGFAFADDWVVCAESQARLKEKLEAAAVELGRAGMKINARKTKAMVICGDRKHRATAVSVEPFCFAEELITPLGPTDTVTYLGIPFTFKGKGVSNHRQHLLKLLDEVTRAPLKPHQRMEITRNYLIPRLTYSLVLGQVHRNTLKRLDNYIRQSIRGWLRLPKDTPISYIHAGKQHGGLGIPSLSATIPMQRRARMEKLFSTQCRVLRSVVNDSAFGKIVRDLSLPIRVHGACVNTKEELVAAWGDSLHNSVDGRGLRELVASPLSNRWLVFPERVFPRIFIRGIQLRCNLLRTRVRSARHGHGGQTILCRGNCGQPESLVHILQSCWITHDARCARHNRVARELAKRLRRLGYTGFEELRAPTSMSFIKPDLIAVRERRATVIDVSIVSDGRRVTVWNEKKQKYGADEYSLAIISALRAIGCDVDFLVHQPMIISYRGICFPQSAKAVIGLGLPKFTVSDLCLLAIVGSLHTYDTFMRGTWR

SEQ ID NO: 7665 - protein, 991 aa, Clonorchis sinensis
MVAQLACADCSRLFPTKIGLSQHRRHAHPTQHNADKLSRVKHSGARWSQQESQSLLRLAKNLYPSCETQTALFARLEQYFPGRSAISIKTRLRVLNWQAQQDESSSGGPDQTIGQIAAYSSEADDYSVWFKQTVDCAVSLLESHADSSLASVDLLAFARGLQSGIMTPEQVLSLLDLHASRTFPHTWKTVSRRRRQLAHRMPVNRKQIRRANYAAIQTLYHQRRKDAASAVLDGSWKDLYKGNCGLPPDAEQYWKQVLSAPKHVDSRPSRVVVPSDWSLIEPITGEEVGRTVRSMGNSSPGLDKLTPRMLRRFNANVLAGYFNLLLLAGGCPPHLCRARITLVPKVPNPTSPDQLRPISVSSILVRCFHKVLADRWSRRLQLPSLQFAFLHRDGCLEATSLLHALLRHSSATASNLSLAFVDISKAFDSVSHDTIVRSAEAFGAPSPLVRYIAQSYENAVAVFPSSEVHCHRGVRQGDPLSPLLFIMAMDEVLGLSMPQLGYQFHDTLVDGFAFADDWVVCAESQARLKEKLEAAAVELGRAGMKINARKTKAMVICGDRKHRATAVSVEPFCFAEELITPLGPTDTVTYLGIPFTFKGKGVFNHRQHLLKLLDEVTRAPLKPHQRMEITRNYLIPRLTYSLVLGQVHRNTLKRLDNYIRQSIRGWLRLPKDTPISYIHAGKQHGGLGIPSLSATIPMQRRVRMEKLLSTQCRVLRNVVNDSAFGKVVRDLSLPIRVHGSCVNTKEELVAAWGDSLHNSVDGRGLRELVASPLSNRWLVFPERVFPRIFIRGIQLRCNLLRTRVRSARHGHGGQTILCRGNCGQPESLVHILQSCWITHDARCARHNRVARELAKRLRRLGYTVFEELRAPTSTSFIKPDLIAVRERRATVIDVSIVSDGRGMTVWNEKKQKYGADEFSLAIISALRAIGCDVDFLVHQPMIISYRGICFPQSAKAVIGLGLSKVTVSDLCLLAIVGSLRTYDTFMRGTWR

SEQ ID NO: 7666 - protein, 991 aa, Clonorchis sinensis
MVAQLACADCSRLFPTKIGLSQHRRHAHPTQHNADKLSRVKHSGARWSQQESQSLLRLANNLYPSCETQTALFARLEQYFPGRSAISIKTRLRVLNWQAQQDESSSGGPDQTIGQIAAYSSEADDYSVWFKQTVDCAVSLLESHADSSLASVDLLAFARGLQSGIMTPEQVLSLLDLHASRTFPHTWKTVSRRRRQLAHRMPVNRKQIRRANYAAIQTLYHQRWKDAASAVLDGSWKDLYKGNCGLPPDAEQYWKQVLSAPKHVDSRPSRVVVPSDWSLIEPITGEEVGRTVRSMGNSSPGLDKLTPRMLRRFNANVLAGYFNLLLLSGGCPPHLCRARITLVPKVPNPTSPDQLRPISVSSILVRCFHKVLADRWSRRLQLPSLQFAFLHRDGCLEATSLLHALLRHSSATASNLSLAFVDISKAFDSVSHDTIVRSAEAFGAPSPLVRYIAQSYENAVAVFPSSEVHCHRGVRQGDPLSPLLFIMAMDEVLGLSMPQLGYQFHDTLVDGFAFADDWVVCAESQARLKEKLEAAAVELGRAGMKINARKTKAMVICGDRKHRATAVSVEPFCFAEELITPLGPTDTVTYLGIPFTFKGKGVFNHRQHLLKLFDEVTRAPLKPHQRMEITRNYLIPRLTYSLVLGQVHRNTLKRLDNYIRQSIRGWLRLPKDTPISYIHAGKQHGGLGIPSLSATIPMQRRVRMEKLLSTQCRVLRNVVNDSAFGKVVRDLSLPIRVHGSCVNTKEELVAAWGDSLHNSVDGRGLRELVASPLSNRWLVFPERVFPRIFIRGIQLRCNLLRTRVRSARHGHGGQTILCRGNCGQPESLVHILQSCWITHDARCARHNRVARELAKRLRRLGYTVFEELRAPTSTSFIKPDLIAVRERRATVIDVSIVSDGRGVTVWNEKKQKYGADEFSLAIISALRAIGCDVDFLVHQPMIISYRGICFPQSAKAVIGLGLSKVTVSDLCLLAIVGFLRTYDTFMRGTWR

SEQ ID NO: 7667 - protein, 991 aa, Clonorchis sinensis
MVAQLACADCSRLFPKKIGLSQHRRHAHPTQHNADKLSRVKHSGARWSQQESQSLLRLAKNLYPSCETQTALFARLEQYFPGRSAISIKTRLRVLNWQAQQDESSSGGPDQTIGQIAAYSSEADDYSVWFKQTVDCAVSLLESHADSSLASVDLLAFARGLQSGIMTPEQVLSLLDLHASRTFPHTWKTVSRRRRQLAHRMPVNRKQIRRANYAAIQTLYHQRRKDAASAVLDGSWKDLYKGNCGLPPDAEQYWKQVLSAPKHVDSRPSRVVVPSDWSLIEPITGEEVGRTVRSMGNSSPGLDKLTPRMLRRFNANVLAGYFNLLLLAGGCPPHLCRARITLVPKVPNPTSPDQLRPISVSSILVRCFHKVLADRWSRRLQLPSLQFAFLHRDGCLEATSLLHALLRHSSATASNLSLAFVDISKAFDSVSHDTIVRSAEAFGAPSPLVRYIAQSYENAVAVFPSSEVHCHRGVRQGDPLSPLLFIMAMDEVLGLSMPQLGYQFHDTLVDGFAFADDWVVCAESQARLKEKLEAAAVELGRAGMKINARKTKAMVICGDRKHRATAVSVEPFCFAEELITPLGPTDTVTYLGIPFTFKGKGVFNHRQHLLKLLDEVTRAPLKPHQRMEITRNYLIPRLTYSLVLGQVHRNTLKRLDNYIRQSIRGWLRLPKDTPISYIHAGKQHGGLGIPSLSATIPMQRRVRMEKLLSTQCRVLRNVVNDSAFGKVVRDLSLPIRVHGSCVNTKEELVAAWGDSLHNSVDGRGLRELVASPLSNRWLVFPERVFPRIFIRGIQLRCNLLRTRVRSARHGHGGQTILCRGNCGQPESLVHILQSCWITHDARCARHNRVARELAKRLRRLGYTVFEELRAPTSTSFIKPDLIAVRERRATVIDVSIVSDGRGMTVWNEKKQKYGADEFSLAIISALRAIGCDVDFLVHQPMIISYRGICFPQSAKAVIGLGLSKVTVSDLCLLAIVGSLRTYDTFMRGTWR

SEQ ID NO: 7668 - protein, 991 aa, Clonorchis sinensis
MVAQLACADCSRLFPTKIGLSQHRRHAHPTQHNADKLSRVKHSGARWSQQESQSLLRLANNLYPSCETQTALFARLEQYFPGRSAISIKTRLRVLNWQAQQDESSSGGPDQTIGQIAAYSSEADDYSVWFKQTVDCAVSLLESHADSSLASVDLLAFARGLQSGIMTPEQVLSLLDLHASRTFPHTWKTVSRRRRQLAHRMPVNRKQIRRANYAAIQTLYHQRRKDAASAVLDGSWKDLYKGNCGLPPDAEQYWKQVLSAPKHVDSRPSRVVVPSDWSLIEPITGEEVGRTVRSMGNSSPGLDKLTPRMLRRFNANVLAGYFNLLLLAGGCPPHLCRARITLVPKVPNPTSPDQLRPISVSSILVRCFHKVLADRWSRRLQLPSLQFAFLHRDGCLEATSLLHALLRHSSATASNLSLAFVDISKAFDSVSHDTIVRSAEAFGAPSPLVRYIAQSYENAVAVFPSSEVHCHRGVRQGDPLSPLLFIMAMDEVLGLSMPQLGYQFHDTLVDGFAFADDWVVCAESQARLKEKLEAAAVELGRAGMKINARKTKAMVICGDRKHRATAVSVEPFCFAEELITPLGPTDTVTYLGIPFTFKGKGVFNHRQHLLKLLDEVTRAPLKPHQRMEITRNYLIPRLTYSLVLGQVHRNTLKRLDNYIRQSIRGWLRLPKDTPISYIHAGKQHGGLGIPSLSATIPMQRRVRMEKLLSTQCRVLRNVVNDSAFGKVVRDLSLPIRVHGSCVNTKEELVAAWGDSLHNSVDGRGLRELVASPLSNRWLVFPERVFPRIFIRGIQLRCNLLRTRVRSARHGHGGQTILCRGNCGQPESLVHILQSCWITHDARCARHNRVARELAKRLRRLGYTVFEELRAPTSTSFIKPDLIAVRERRATVIDVSIVSDGRGVTVWNEKKQKYGADEFSLAIISALRAIGCDVDFLVHQPMIISYRGICFPQSAKAVIGLGLSKVTVSDLCLLAIVGSLRTYDTFMRGTWR

SEQ ID NO: 7669 - protein, 991 aa, Clonorchis sinensis
MVAQLACADCSRLFPTKIGLSQHRRHAHPTQHNADKLSRVKHSGARWSQQESQSLLRLANNLYPSCETQTALFARLEQYFPGRSAISIKTRLRVLNWQAQQDESSSGGPDQTIGQIAAYSSEADDYSVWFKQTVDCAVSLLESHADSSLASVDLLAFARGLQSGIMTPEQVLSLLDLHASRTFPHTWKTVSRRRRQLAHRMPVNRKQIRRANYAAIQTLYHQRWKDAASAVLDGSWKDLYKGNCGLPPDAEQYWKQVLSAPKHVDSRPSRVVVPSDWSLIEPITGEEVGRTVRSMGNSSPGLDKLTPRMLRRFNANVLAGYFNLLLLSGGCPPHLCRARITLVPKVPNPTSPDQLRPISVSSILVRCFHKVLADRWSRRLQLPSLQFAFLHRDGCLEATSLLHALLRHSSATASNLSLAFVDISKAFDSVSHDTIVRSAEAFGAPSPLVRYIAQSYENAVAVFPSSEVHCHRGVRQGDPLSPLLFIMAMDEVLGLSMPQLGYQFHDTLVDGFAFADDWVVCAESQARLKEKLEAAAVELGRAGMKINARKTKAMVICGDRKHRATAVSVEPFCFAEELITPLGPTDTVTYLGIPFTFKGKGVFNHRQHLLKLFDEVTRAPLKPHQRMEITRNYLIPRLTYSLVLGQVHRNTLKRLDNYIRQSIRGWLRLPKDTPISYIHAGKQHGGLGIPSLSATIPMQRRVRMEKLLSTQCRVLRNVVNDSAFGKVVRDLSLPIRVHGSCVNTKEELVAAWGDSLHNSVDGRGLRELVASPLSNRWLVFPERVFPRIFIRGIQLRCNLLRTRVRSARHGHGGQTILCRGNCGQPESLVHILQSCWITHDARCARHNRVARELAKRLRRLGYTVFEELRAPTSTSFIKPDLIAVRERRATVIDVSIVSDGRGMTVWNEKKQKYGVDEFSLAIISALRAIGCDVDFLVHQPMIISYRGICFPQSAKAVIGLGLSKVTVSDLCLLAIVGFLRTYDTFMRGTWR

SEQ ID NO: 7670 - protein, 991 aa, Opisthorchis felineus
MVAQLACADCSRLFPTKIGLSQHRRHVHPTQHNADKLGRVKYSGARWSQQESQSLLRLANNLYPSCGTQTALFARLEQYFPGRSAISIKTRLRVLNWQAQQDESSSGGPDQTIGQITAYSSEADDYSVWFKQTVDCAVSLLESHADSSLASVDLLALARGLQSGIMTPEQVLSLLDLHASRTFPHIWKTVSRRRRQLAHRIPVNRKQIRRANYAAIQTLYHQRRKDAASAVLDGSWKDLYKGNCGLPLNAEQYWKQVLSAPKHVDSRPSRVVVPSDWSLIEPITGEEVGRTIRLMGNSSPGLDKHTPRMLRRFNANALAGYFNLLLLSGGCPPHLCRARITLVSKVPNPTSLDQLRPISVSSILVRCFHKVLADRWSRRLQLPSLKFAFLHRDGCLEATSLLHALLRHSSATASNLSLAFVDISKAFDSVSHDTIVRSAKAFGAPSPLVRYIAQSYENAVAVFPNSEVHCHRGVRQGDPLSPLLFIMAMDEVLGLSMPQLGYQFHDTLVDGFAFADDWVVCAESQARLKEKLEAAAVELGRAGMKINARKTKAMVICGDRKHRATAVSVEPFCFAEELITPLGPTDTVTYLGIPFTFKGKGVFNHRQHLLKLLDEVTRAPLKPHQRMEITRNYLIPRLTYSLVLGQVHRNTLKRLDNYIRQSIRGWLRLPKDTPINYIHAGKQHGGLGIPSLSATIPMQRRARMEKLFSTQCRVLRNVVNDSAFGKIVRDLSLPIRVHGACVNTKEELVAAWGDSLHNSVDGRGLRELVASPLSNRWLVFPERVFPRIFIRGIQLRCNLLRTRVRSARHGHGGQTILCRGNCGQPESLVHILQSCWITHDARCARHNRVARELAKRLRRLGYTVFEELRAPTSTSFIKPDLIAVRERRATVIDVSIVSDGRGVTVWNEKKQKYGADEYSLAIISALRAIGCDVDFLVHQPMIISYRGICFPQSAKAVIGLGLPKFTVSDLCLLAIVGSLRTYDTFMRGTWR

SEQ ID NO: 7671 - protein, 826 aa, Clonorchis sinensis
MTPEQVLSLLDLHASRTFPHTWKTVSRRRRQLAHRMPVNRKQIRRANYAAIQTLYHQRWKDAASAVLDGSWKDLYKGNCGLPPDAEQYWKQVLSAPKHVDSRPSRVVVPSDWSLIEPITGEEVGRTVRSMGNSSPGLDKLTPRMLRRFNANVLAGYFNLLLLSGGCPPHLCRARITLVPKVPNPTSPDQLRPISVSSILVRCFHKVLADRWSRRLQLPSLQFAFLHRDGCLEATSLLHALLRHSSATASNLSLAFVDISKAFDSVSHDTIVRSAEAFGAPSPLVRYIAQSYENAVAVFPSSEVHCHRGVRQGDPLSPLLFIMAMDEVLGLSMPQLGYQFHDTLVDGFAFADDWVVCAESQARLKEKLEAAAVELGRAGMKINARKTKAMVICGDRKHRATAVSVEPFCFAEELITPLGPTDTVTYLGIPFTFKGKGVFNHRQHLLKLFDEVTRAPLKPHQRMEITRNYLIPRLTYSLVLGQVHRNTLKRLDNYIRQSIRGWLRLPKDTPISYIHAGKQHGGLGIPSLSATIPMQRRVRMEKLLSTQCRVLRNVVNDSAFGKVVRDLSLPIRVHGSCVNTKEELVAAWGDSLHNSVDGRGLRELVASPLSNRWLVFPERVFPRIFIRGIQLRCNLLRTRVRSARHGHGGQTILCRGNCGQPESLVHILQSCWITHDARCARHNRVARELAKRLRRLGYTVFEELRAPTSTSFIKPDLIAVRERRATVIDVSIVSDGRGVTVWNEKKQKYGADEFSLAIISALRAIGCDVDFLVHQPMVISYRGICFPQSAKAVIGLGLSKVTVGDLCLLAIVGSLRTYNTFMRDTWP

SEQ ID NO: 7672 - protein, 991 aa, Clonorchis sinensis
MVAQLACADCSRLFPTKIGLSQHRRHAHPTQHNADKLSRVKHSGARWSQQESQSLLRLANNLYPSCETQTALFARLEQYFPGRSAISIKTRLRVLNWQAQQDESSSGGPDQTIGQIAAYSSEADDYSVWFKQTVDCAVSLLESHADSSLASVDLLAFARGLQSGIMTPEQVLSLLDLHASRTFPHTWKTVSRRRRQLAHRMPVNRKQIRRANYAAIQTLYHQRWKDAASAVLDGSWKDLYKGNCGLPPDAEQYWKQVLSAPKHVDSRPSRVVVPSDWSLIEPITGEEVGRTVRSMGNSSPGLDKLTPRMLRRFNANVLAGYFNLLLLSGGCPPHLCRARITLVPKVPNPTSPDQLRPISVSSILVRCFHKVLADRWSRRLQLPSLQFAFLHRDGCLEATSLLHALLRHSSATASNLSLAFVDISKAFDSVSHDTIVRSAEAFGAPSPLVRYIAQSYENAVAVFPSSEVHCHRGVRQGDPLSPLLFIMAMDEVLGLSMPQLGYQFHDTLVDGFAFADDWVVCAESQARLKEKLEAAAVELGRAGMKINARKTKAMVICGDRKHRATAVSVEPFCFAEELITPLGPTDTVTYLGIPFTFKGKGVFNHRQHLLKLLDEVTRAPLKPHQRMEITRNYLIPRLTYSLVLGQVHRNTLKRLDNYIRQSIRGWLRLPKDTPISYIHAGKQHGGLGIPSLSATIPMQRRVRMEKLLSTQCRVLRNVVNDSAFGKVVRDLSLPIRVHGSCVNTKEELVAAWGDSLHNSVDGRGLRELVASPLSNRWLVFPERVFPRIFIRGIQLRCNLLRTRVRSARHGHGGQTILCRGNCGQPESLVHILQSCWITHDARCARHNRVARELAKRLRRLGYTVFEELRAPTSTSFIKPDLIAVRERRATVIDVSIVSDGRGMTLWNEKKQKYGADEFSLAIISTLRAIGCDVDFLVHQPMIISYRGICFLQSAKAVIGLGLSKVTVGDLCLLAIVGSLRTYDTFMRGTWR

SEQ ID NO: 7673 - protein, 991 aa, Clonorchis sinensis
MVVQLACADCPRLFPTEIGLSQHRRHAHPTQHNADKLSRVKYSGARWSQQESQSLLRLANNLYPSCETQTALFARLEQYFPGRSAISIKTRLRVLNWQAQQDESSSGGPDQTIGQIAAYSSEADDYSVWFKQTVDCAVSLLESHADSSLASVDLLAFARGLQSGIMTPEQVLSLLDLHASRTFPHTWKTVSRRRRQLAHRMPVNRKQIRRANYAAIQTLYHQRRKDAASAVLDGSWKDLYKGNCGLPPDAEQYWKQVLSAPKHVDSRPSRVVVPSDWSLIEPITGEEVGRTVRSMGNSSPGLDKLTPRMLRRFNANVLAGYFNLLLLAGGCPPHLCRARITLVPKVPNPTSPDQLRPISVSSILVRCFHKVLADRWSRRLQLPSLQFAFLHRDGCLEATSLLHALLRHSSATASNLSLAFVDISKAFDSVSHDTIVRSAEAFGAPSPLVRYIAQSYENAVAVFPSSEVHCHRGVRQGDPLSPLLFIMAMDEVLGLSMPQLGYQFHDTLVDGFAFADDWVVCAESQARLKEKLEAAAVELGRAGMKINARKTKAMVICGDRKHRATAVSVEPFCFAEELITPLGPTDTVTYLGIPFTFKGKGVFNHRQHLLKLLDEVTRAPLKPHQRMEITRNYLIPRLTYSLVLGQVHRNTLKRLDNYIRQSIRGWLRLPKDTPISYIHAGKQHGGLGIPSLSATIPMQRRVRMEKLLSTQCRVLRNVVNDSAFGKVVRDLSLPIRVHGSCVNTKEELVAAWGDSLHNSVDGRGLRELVASPLSNRWLVFPERVFPRIFIRGIQLRCNLLRTRVRSARHGHGGQTILCRGNCGQPESLVHILQSCWITHDARCARHNRVARELAKRLRRLGYTVFEELRAPTSTSFIKPDLIAVRERRATVIDVSIVSDGRGMTVWNEKKQKYGADEFSLAIISALRAIGCDVDFLVHQPMIISYRGICFPQSAKAVIGLGLSKVTVSDLCLLAIVGSLRTYDTFMRGTWR

SEQ ID NO: 7674 - protein, 991 aa, Clonorchis sinensis
MVAQLACADCSRLFPTKIGLSQHRRHAHPTQHNADKLSRVKHSGARWSQQESQSLLRLANNLYPSCETQTALFARLEQYFPGRSAISIKTRLRVLNWQAQQDESSSGGPDQTIGQIAAYSSEADDYSVWFKQTVDCAVSLLESHADSSLASVDLLAFARGLQSGIMTPEQVLSLLDLHASRTFPHTWKTVSRRRRQLAHRMPVNRKQIRRANYAAIQTLYHQRRKDAASAVLDGSWKDLYKGNCGLPPDAEQYWKQVLSAPKHVDSRPSRVVVPSDWSLIEPITGEEVGRTVRSMGNSSPGLDKLTPRMLRRFNANVLAGYFNLLLLAGGCPPHLCRARITLVPKVPNPTSPDQLRPISVSSILVRCFHKVLADRWSRRLQLPSLQFAFLHRDGCLEATSLLHALLRHSSATASNLSLAFVDISKAFDSVSHDTIVRSAEAFGAPSPLVRYIAQSYENAVAVFPSSEVHCHRGVRQGDPLSPLLFIMAMDEVLGLSMPQLGYQFHDTLVDGFAFADDWVVCAESQARLKEKLEAAAVELGRAGMKINARKTKAMVICGDRKHRATAVSVEPFCFAEELITPLGPTDTVTYLGIPFTFKGKGVFNHRQHLLKLLDEVTRAPLKPHQRMEITRNYLIPRLTYSLVLGQVHRNTLKRLDNYIRQSIRGWLRLPKDTPISYIHAGKQHGGLGIPSLSATIPMQRRVRMEKLLSTQCRVLRNVVNDSAFGKVVRDLSLPIRVHGSCVNTKEELVAAWGDSLHNSVDGRGLRELVASPLSNRWLVFPERVFPRIFIRGIQLRCNLLRTRVRSARHGHGGQTILCRGNCGQPESLVHILQSCWITHDARCARHNRVARELAKRLRRLGYTVFEELRAPTSTSFIKPDLIAVRERRATVIDVSIVSDGRGVTVWNEKKQKYGADEFSLAIISALRAIGCDVDFLVHQPMIISYRGICFPQSAKAVIGLGLSKVTVGDLCLLAIVGSLRTYNTFMRDTWP

SEQ ID NO: 7675 - protein, 826 aa, Opisthorchis felineus
MTPEQVLSLLDLHASRTFPHIWKTVSRRRRQLAHRIPVNRKQIRRANYAAIQTLYHQRRKDAASAVLDGLWKDLYKGNCGLPLNAEQYWKQVLSAPKHVDSRPSRVVVPSDWSLIEPITGEEVGRTIRLMGNSSPGLDKLTPRMLRRFNANALAGYFNLLLLSGGCPPHLCRARITLVPKVPNPTSPDQLRPISVSSILVRCFHKVLADRWSRRLQLPSLQFAFLHRDGCLEATSLLHALLRHSSATASNLSLAFVDISKAFDSVSHDTIVRSAKAFGAPSPLVRYIAQSYENAVAVFPNSEVHCHRGVRQGDPLSPLLFIMAMDEVLGLSMPQLGYQFHDTLVDGFAFADDWVVCAESQARLKEKLEAAAVELGRAGMKINARKTKAMVICGDRKHRATAVSVEPFCFAEELITPLGPTDTVTYLGIPFTFKGKGVFNHRQHLLKLLDEVTRAPLKPHQRMEITRNYLIPRLTYSLVLGQVHRNTLKRLDNYIRQSIRGWLRLPKDTPTSYIHAGKQHGGLGIPSLSATIPMQRRARMEKLFSTQCRVLRNVVNDSAFGKIVRDLSLPIRVHGACVNTKEELVAAWGDSLHNSVDGRGLRELVASPLSNRWLVFPERVFPRIFIRGIQLRCNLLRTRVRSARHGHGGQTILCRGNCGQPESLVHILQSCWITHDARCARHNRVARELAKRLRRLGYTVFEELRAPTSTSFIKPDLIAVRERRATVIDVSIVSDGRGVTVWNEKKQKYGADEYSLAIISALRAIGCDVDFLVHQPMIISYRGICFPQSAKAVIGLGLPKFTVSDLCLLAIVGSLRTYDTFMRGTWR

SEQ ID NO: 7676 - protein, 991 aa, Clonorchis sinensis
MVAQLACADCSRLFPTKIGLSQHRRHAHPTQHNADKLSRVKHSGARWSQQESQSLLRLANNLYPSCETQTALFARLEQYFPGRSAISIKTRLRVLNWQAQQDESSSGGPDQTIGQIAAYSSEADDYSVWFKQTVDCAVSLLESHADSSLASVDLLAFARGLQSGIMTPEQVLSLLDLHASRTFPHTWKTVSRRRRQLAHRMPVNRKQIRRANYAAIQTLYHQRWKDAASAVLDGSWKDLYKGNCGLPPDAEQYWKQVLSAPKHVDSRPSRVVVPSDWSLIEPITGEEVGRTVRSMGNSSPGLDKLTPRMLRRFNANVLAGYFNLLLLSGGCPPHLCRARITLVPKVPNPTSPDQLRPISVSSILVRCFHKVLADRWSRRLQLPSLQFAFLHRDGCLEATSLLHALLRHSSATASNLSLAFVDISKAFDSVSHDTIVRSAEAFGAPSPLVRYIAQSYENAVAVFPSSEVHCHRGVRQGDPLSPLLFIMAMDEVLGLSMPQLGYQFHDTLVDGFAFADDWVVCAESQARLKEKLEAAAVELGRAGMKINARKTKAMVICGDRKHRATAVSVEPFCFAEELITPLGPTDTVTYLGIPFTFKGKGVFNHRQHLLKLLDEVTRAPLKPHQRMEITRNYLIPRLTYSLVLGQVHRNTLKRLDNYIRQSIRGWLRLPKDTPISYIHAGKQHGGLGIPSLSATIPMQRRVRMEKLLSTQCRVLRNVVNDSAFGKVVRDLSLPIRVHGSCVNTKEELVAAWGDSLHNSVDGRGLRELVASPLSNRWLVFPERVFPRIFIRGIQLRCNLLRTRVRSARHGHGGQTILCRGNCGQPESLVHILQSCWITHDARCARHNRVARELAKRLRRLGYTVFEELRAPTSTSFIKPDLIAVRERRATVIDVSIVSDGRGVTVWNEKKQKYGADEFSLAIISALRAIGCDVDFLVHQPMIISYRGICFPQSAKAVIGLGLSKVTVSDLCLLAIVGSLRTYDTFMRGTWR

SEQ ID NO: 7677 - protein, 940 aa, Clonorchis sinensis
MVAQLACADCSRLFPTKIGLSQHRRHAHPTQHNADKLSRVKHSGARWSQQESQSLLRLANNLYPSCETQTALFARLEQYFPGRSAISIKTRLRVLNWQAQQDESSSGGPDQTIGQIAAYSSEADDYSVWFKQTVDCAVSLLESHADSSLASVDLLAFARGLQSGIMTPEQVLSLLDLHASRTFPHTWKTVSRRRRQLAHRMPVNRKQIRRANYAAIQTLYHQRWKDAASAVLDGSWKDLYKGNCGLPPDAEQYWKQVLSAPKHVDSRPSRVVVPSDWSLIEPITGEEVGRTVRSMGNSSPGLDKLTPRMLRRFNANVLAGYFNLLLLSGGCPPHLCRARITLVPKVPNPTSPDQLRPISVSSILVRCFHKVLADRWSRRLQLPSLQFAFLHRDGCLEATSLLHALLRHSSATASNLSLAFVDISKAFDSVSHDTIVRSAEAFGAPSPLVRYIAQSYENAVAVFPSSEVHCHRGVRQGDPLSPLLFIMAMDEVLGLSMPQLGYQFHDTLVDGFAFADDWVVCAESQARLKEKLEAAAVELGRAGMKINARKTKAMVICGDRKHRATAVSVEPFCFAEELITPLGPTDTVTYLGIPFTFKGKGVFNHRQHLLKLLDEVTRAPLKPHQRMEITRNYLIPRLTYSLVLGQVHRNTLKRLDNYIRQSIRGWLRLPKDTPISYIHAGKQHGGLGIPSLSATIPMQRRVRMEKLLSTQCRVLRNVVNDSAFGKVVRDLSLPIRVHGSCVNTKEELVAAWGDSLHNSVDGRGLRELVASPLSNRWLVFPERVFPRIFIRGIQLRCNLLRTRVRSARHGHGGQTILCRGNCGQPESLVHILQSCWITHDARCARHNRVARELAKRLRRLGYTVFEELRAPTSTSFIKPDLIAVRERRATVIDVSIVSDGRGVTVWNEKSRSMVLMNFPSPYSQLYVLLVVMWTFWSTNR

SEQ ID NO: 7678 - protein, 991 aa, Clonorchis sinensis
MVAQLACADCSRLFPTKIGLSQHRRHAHPTQHNADKLSRVKHSGARWSQQESQSLLRLAKNLYPSCETQTALFARLEQYFPGRSAISIKTRLRVLNWQAQQDESSSGGPDQTIGQIAAYSSEADDYSVWFKQTVDCAVSLLESHADSSLASVDLLAFARGLQSGIMTPEQVLSLLDLHASRTFPHTWKTVSRRRRQLAHRMPVNRKQIRRANYAAIQTLYHQRRKDAASAVLDGSWKDLYKGNCGLPPDAEQYWKQVLSAPKHVDSRPSRVVVPSDWSLIEPITGEEVGRTVRSMGNSSPGLDKLTPRMLRRFNANVLAGYFNLLLLAGGCPPHLCRARITLVPKVPNPTSPDQLRPISVSSILVRCFHKVLADRWSRRLQLPSLQFAFLHRDGCLEATSLLHALLRHSSATASNLSLAFVDISKAFDSVSHDTIVRSAEAFGAPSPLVRYIAQSYENAVAVFPSSEVHCHRGVRQGDPLSPLLFIMAMDEVLGLSMPQLGYQFHDTLVDGFAFADDWVVCAESQARLKEKLEAAAVELGRAGMKINARKTKAMVICGDRKHRATAVSVEPFCFAEELITPLGPTDTVTYLGIPFTFKGKGVFNHRQHLLKLLDEVTRAPLKPHQRMEITRNYLIPRLTYSLVLGQVHRNTLKRLDNYIRQSIRGWLRLPKDTPISYIHAGKQHGGLGIPSLSATIPMQRRVRMEKLLSTQCRVLRNVVNDSAFGKVVRDLSLPIRVHGSCVNTKEELVAAWGDSLHNSVDGRGLRELVASPLSNRWLVFPERVFPRIFIRGIQLRCNLLRTRVRSARHGHGGQTILCRGNCGQPESLVHILQSCWITHDARCARHNRVARELAKRLRRLGYTVFEELRAPTSTSFIKPDLIAVRERRATVIDVSIVSDGRGMTVWSEKKQKYGADEFSLAIISALRAIGCDVDFLVHQPMIISYRGICFPQSAKAVIGLGLSKVTVSDLCLLAIVGFLRTYDTFMRGTWR

SEQ ID NO: 7679 - protein, 991 aa, Clonorchis sinensis
MVAQLACADCSRLFPTKIGLSQHRRHAHPTQHNADKLSRVKHSGARWSQQESQSLLRLANNLYPSCETQTALFARLEQYFPGRSAISIKTRLRVLNWQAQQDESSSGGPDQTIGQIAAYSSEADDYSVWFKQTVDCAVSLLESHADSSLASVDLLAFARGLQSGIMTPEQVLSLLDLHASRTFPHTWKTVSRRRRQLAHRMPVNRKQIRRANYAAIQTLYHQRWKDAASAVLDGSWKDLYKGNCGLPPDAEQYWKQVLSAPKHVDSRPSRVVVPSDWSLIEPITGEEVGRTVRSMGNSSPGLDKLTPRMLRRFNANVLAGYFNLLLLSGGCPPHLCRARITLVPKVPNPTSPDQLRPISVSSILVRCFHKVLADRWSRRLQLPSLQFAFLHRDGCLEATSLLHALLRHSSATASNLSLAFVDISKAFDSVSHDTIVRSAEAFGAPSPLVRYIAQSYENAVAVFPSSEVHCHRGVRQGDPLSPLLFIMAMDEVLGLSMPQLGYQFHDTLVDGFAFADDWVVCAESQARLKEKLEAAAVELGRAGMKINARKTKAMVICGDRKHRATAVSVEPFCFAEELITPLGPTDTVTYLGIPFTFKGKGVFNHRQHLLKLLDEVTRAPLKPHQRMEITRNYLIPRLTYSLVLGQVHRNTLKRLDNYIRQSIRGWLRLPKDTPISYIHAGKQHGGLGIPSLSATIPMQRRVRMEKLLSTQCRVLRNVVNDSAFGKVVRDLSLPIRVHGSCVNTKEELVAAWGDSLHNSVDGRGLRELVASPLSNRWLVFPERVFPRIFIRGIQLRCNLLRTRVRSARHGHGGQTILCRGNCGQPESLVHILQSCWITHDARCARHNRVARELAKRLRRLGYTVFEELRAPTSTSFIKPDLIAVRERRATVIDVSIVSDGRGVTVWNEKKQKYGADEFSLAIISALRAIGCDVDFLVHQPMIISYRGICFPQSAKAVIGLGLSKVTIGDLCLLAIVGFLRTYDTFMRGTWR

SEQ ID NO: 7680 - protein, 910 aa, Opisthorchis felineus
MVAQLACTHCFRLFPTKISLSQHRWHVHPTQHNADKLGRVEYSGARWSQQESQSLLRLANNLYPSCGTQTAPFARLEQYFPGRSAIGIKTRLRVLNWQAQQDESSSGGPDQTIGQITAYSSEADDYSVWFKQTVDCAVSLLESHADSSLASVDLLAFARGLQSGIMTPEQVLSLLDLHASRTFPHIWKTVSRRRRQLAHRIPVNRKQIRRANYAAIQTLYHQRRKDAASAVLDGSWKDLYKGNCGLPLNAEQYWKQVLSAPKHVDSRPSRVVVPSDWSLIEPITGEEVGRTIRLMGNSSPGLDKHTPRMLRRFNANALAGYFNLLLLSGGCPPHLCRARITLVPKVPNPTSPDQLRPISVSSILVRCFHKVLADRWSRRLQLPSLKFAFLHRDGCLEATSLLHALLRHSSATASNLSLAFVDISKAFDSVSHDTIVRSAKAFGAPSPLVRYIAQSYENAVAVFPNSEVHCHRGVRQGDPLSPLLFIMAMDEVLGFSMSQLGYQFHDIVVDGFAFTDHWVVCAENQSRLREKLEAAAVELGRAVMRINARKTKAIVICGDRKHRATAVSVEPFCFAEELITPLGPTDTVTYLGIPFTFKGKGVFSHRQHLLKLLDEVTRAPLKRHQRMEITRNHLIPRLTYSLVLGQVHRNTIKRLDNYIRQSIRGWLRLPKDTPISYIHAGKQHGGLGIPSLSATIPMQRRTRMEKLRSTQCRVLRNEVNNSAFGKSVRDLSLPIRVHGACVNTKEELVAAWGDSLHNSVDGRGLRELVASPLSNRWLVFPERVFPRIFIRGIQLRCNLLRTRVRSARHGHGGQTILCRGNCGQPESLVHILQSCWITHDARCARHNRVARELAKRLRRLGYTVFEELRAPTSTSFIKPDLIAVRERRATVIDVSIVSDGRGVTVWNEKK

SEQ ID NO: 7681 - protein, 991 aa, Clonorchis sinensis
MVAQLACADCSRLFPTKIGLSQHRRHAHPTQHNADKLSRVKHSGARWSQQESQSLLRLANNLYPSCETQTALFARLEQYFPGRSAISIKTRLRVLNWQAQQDESSSGGPDQTIGQIAAYSSEADDYSVWFKQTVDCAVSLLESHADSSLASVDLLAFARGLQSGIMTPEQVLSLLDLHASRTFPHTWKTVSRRRRQLAHRMPVNRKQIRRANYAAIQTLYHQRWKDAASAVLDGSWKDLYKGNCGLPPDAEQYWKQVLSAPKHVDSRPSRVVVPSDWSLIEPITGEEVGRTVRSMGNSSPGLDKLTPRMLRRFNANVLAGYFNLLLLSGGCPPHLCRARITLVPKVPNPTSPDQLRPISVSSILVRCFHKVLADRWSRRLQLPSLQFAFLHRDGCLEATSLLHALLRHSSATASNLSLAFVDISKAFDSVSHDTIVRSAEAFGAPSPLVRYIAQSYENAVAVFPSSEVHCHRGVRQGDPLSPLLFIMAMDEVLGLSMPQLGYQFHDTLVDGFAFADDWVVCAESQARLKEKLEAAAVELGRAGMKINARKTKAMVICGDRKHRATAVSVEPFCFAEELITPLGPTDTVTYLGIPFTFKGKGVFNHRQHLLKLFDEVTRAPLKPHQRMEITRNYLIPRLTYSLVLGQVHRNTLKRLDNYIRQSIRGWLRLPKDTPISYIHAGKQHGGLGIPSLSATIPMQRRVRMEKLLSTQCRVLRNVVNDSAFGKVVRDLSLPIRVHGSCVNTKEELVAAWGDSLHNSVDGRGLRELVASPLSNRWLVFPERVFPRIFIRGIQLRCNLLRTRVRSARHGHGGQTILCRGNCGQPESLVHILQSCWITHDARCARHNRVARELAKRLRRLGYTVFEELRAPTSTSFIKPDLIAVRERRATVIDVSIVSDGRGVTVWNEKKQKYGVDEFSLAIISALRAIGCDVDFLVHQPMIISYRGICFPQSPKAVIGLGLSKVTVGDLCLLAIVGFLRTYDTFMRGTWR

SEQ ID NO: 7682 - protein, 991 aa, Clonorchis sinensis
MVAQLACADCSRLFPTKIGLSQHRRHAHPTQHNADKLSRVKHSGARWSQQESQSLLRLANNLYPSCETQTALFARLEQYFPGRSAISIKTRLRVLNWQAQQDESSSGGPDQTIGQIAAYSSEADDYSVWFKQTVDCAVSLLESHADSSLASVDLLAFARGLQSGIMTPEQVLSLLDLHASRTFPHTWKTVSRRRRQLAHRMPVNRKQIRRANYAAIQTLYHQRWKDAASAVLDGSWKDLYKGNCGLPPDAEQYWKQVLSAPKHVDSRPSRVVVPSDWSLIEPITGEEVGRTVRSMGNSSPGLDKLTPRMLRRFNANVLAGYFNLLLLSGGCPPHLCRARITLVPKVPNPTSPDQLRPISVSSILVRCFHKVLADRWSRRLQLPSLQFAFLHRDGCLEATSLLHALLRHSSATASNLSLAFVDISKAFDSVSHDTIVRSAEAFGAPSPLVRYIAQSYENAVAVFPSSEVHCHRGVRQGDPLSPLLFIMAMDEVLGLSMPQLGYQFHDTLVDGFAFADDWVVCAESQARLKEKLEAAAVELGRAGMKINARKTKAMVICGDRKHRATAVSVEPFCFAEELITPLGPTDTVTYLGIPFTFKGKGVFNHRQHLLKLFDEVTRAPLKPHQRMEITRNYLIPRLTYSLVLGQVHRNTLKRLDNYIRQSIRGWLRLPKDTPISYIHAGKQHGGLGIPSLSATIPMQRRVRMEKLLSTQCRVLRNVVNDSAFGKVVRDLSLPIRVHGSCVNTKEELVAAWGDSLHNSVDGRGLRELVASPLSNRWLVFPERVFPRIFIRGIQLRCNLLRTRVRSARHGHGGQTILCRGNCGQPESLVHILQSCWITHDARCARHNRVARELAKRLRRLGYTVFEELRAPTSTSFIKPDLIAVRERRATVIDVSIVSDGRGVTVWNEKKQKYGADEFSLAIISALRAIGCDVDFLVHQPMIISYRGICFPQSAKAVIGLGLSKVTVGDLCLLAIVGSLRTYNTFMRDTWP

SEQ ID NO: 7683 - protein, 991 aa, Clonorchis sinensis
MVAQLACADCSRLFPTKIGLSQHRRHAHPTQHNADKLSRVKHSGARWSQQESQSLLRLANNLYPSCETQTALFARLEQYFPGRSAISIKTRLRVLNWQAQQDESSSGGPDQTIGQIAAYSSEADDYSVWFKQTVDCAVSLLESHADSSLASVDLLAFARGLQSGIMTPEQVLSLLDLHASRTFPHTWKTVSRRRRQLAHRMPVNRKQIRRANYAAIQTLYHQRRKDAASAVLDGSWKDLYKGNCGLPPDAEQYWKQVLSAPKHVDSRPSRVVVPSDWSLIEPITGEEVGRTVRSMGNSSPGLDKLTPRMLRRFNANVLAGYFNLLLLAGGCPPHLCRARITLVPKVPNPTSPDQLRPISVSSILVRCFHKVLADRWSRRLQLPSLQFAFLHRDGCLEATSLLHALLRHSSATASNLSLAFVDISKAFDSVSHDTIVRSAEAFGAPSPLVRYIAQSYENAVAVFPSSEVHCHRGVRQGDPLSPLLFIMAMDEVLGLSMPQLGYQFHDTLVDGFAFADDWVVCAESQARLKEKLEAAAVELGRAGMKINARKTKAMVICGDRKHRATAVSVEPFCFAEELITPLGPTDTVTYLGIPFTFKGKGVFNHRQHLLKLLDEVTRAPLKPHQRMEITRNYLIPRLTYSLVLGQVHRNTLKRLDNYIRQSIRGWLRLPKDTPISYIHAGKQHGGLGIPSLSATIPMQRRVRMEKLLSTQCRVLRNVVNDSAFGKVVRDLSLPIRVHGSCVNTKEELVAAWGDSLHNSVDGRGLRELVASPLSNRWLVFPERVFPRIFIRGIQLRCNLLRTRVRSARHGHGGQTILCRGNCGQPESLVHILQSCWITHDARCARHNRVARELAKRLRRLGYTVFEELRAPTSTSFIKPDLIAVRERRATVIDVSIVSDGRGMTVWNEKKQKYGADEFSLAIISALRAIGCDVDFLVHQPMIISYRGICFPQSAKAVIGLGLSKVTIGDLCLLAIVGSLRTYNTFMRDTWP

SEQ ID NO: 7684 - protein, 991 aa, Clonorchis sinensis
MVAQLACADCSRLFPTKIGLSQHRRHAHPTQHNADKLSRVKHSGARWSQQESQSLLRLANNLYPSCETQTALFARLEQYFPGRSAISIKTRLRVLNWQAQQDESSSGGPDQTIGQIAAYSSEADDYSVWFKQTVDCAVSLLESHADSSLASVDLLAFARGLQSGIMTPEQVLSLLDLHASRTFPHTWKTVSRRRRQLAHRMPVNRKQIRRANYAAIQTLYHQRWKDAASAVLDGSWKDLYKGNCGLPPDAEQYWKQVLSAPKHVDSRPSRVVVPSDWSLIEPITGEEVGRTVRSMGNSSPGLDKLTPRMLRRFNANVLAGYFNLLLLSGGCPPHLCRARITLVPKVPNPTSPDQLRPISVSSILVRCFHKVLADRWSRRLQLPSLQFAFLHRDGCLEATSLLHALLRHSSATASNLSLAFVDISKAFDSVSHDTIVRSAEAFGAPSPLVRYIAQSYENAVAVFPSSEVHCHRGVRQGDPLSPLLFIMAMDEVLGLSMPQLGYQFHDTLVDGFAFADDWVVCAESQARLKEKLEAAAVELGRAGMKINARKTKAMVICGDRKHRATAVSVEPFCFAEELITPLGPTDTVTYLGIPFTFKGKGVFNHRQHLLKLLDEVTRAPLKPHQRMEITRNYLIPRLTYSLVLGQVHRNTLKRLDNYIRQSIRGWLRLPKDTPISYIHAGKQHGGLGIPSLSATIPMQRRVRMEKLLSTQCRVLRNVVNDSAFGKVVRDLSLPIRVHGSCVNTKEELVAAWGDSLHNSVDGRGLRELVASPLSNRWLVFPERVFPRIFIRGIQLRCNLLRTRVRSARHGHGGQTILCRGNCGQPESLVHILQSCWITHDARCARHNRVARELAKRLRRLGYTVFEELRAPTSTSFIKPDLIAVRERRATVIDVSIVSDGRGVTVWNEKKQKYGADEFSLAIISALRAIGCDVDFLVHQPMIISYRGICFPQSAKAVIGLGLSKVTVSDLCLLAIVGFLRTYDTFMRGTWR

SEQ ID NO: 7685 - protein, 990 aa, Opisthorchis felineus
MVAQLACADCSRLFPTKIGLSQHRRHVHPTQHNADKLGRVKYSGARWSQQESQSLLRLANNLYPSCGTQTALFARLEQYFPGRSAISIKTRLRVLNWQAQQDESPSGGPDQTIGQITAYSSEADDYSVWFKQTVDCAVSLLESHADSSLASVDLLAFARGLQSGIMTPEQVLSLLDLHASRTFPHIRKTVSRRRRQLAHRIPVNRKQIRRANYAAIQTLYHQRRKDAASAVLDGSWKDLYKGNCGLPLNAEQYWKQVLSAPKHVDSRPSRVVVPSDWSLIEPITGEEVGRTIRVMGNSSPGLDKLTPRMLRRFNANALAGYFNLLLLSGGCPPHLCRARITLVPKVPNPTSPDQLRPISVSSILVRCFHKVLADRWSRRLQLPSLQFAFLHRDGCLRARSPLHVLLRHSSATASNLSLAFVDISKAFDSVSHDTIVRSAKAFGAPSPLVRYIAQSYENAVAVFPNSEVHCHRGVRQGDPLSPLLFIMAMDEVLGLSMPQLGYQFHDTLVDGFAFADDWVVCAESQARLKEKLEAAAVELGRAGMKINARKTKAIVICGDRKHRATAVSVEPFCFAEELITPLGPTDTVTYLGIPFTFKGKGVFNHRQHLLKLLDEVTRAPLKPHQRMEITRNYLIPRLTYSLVLGQVHRNTLKRLDNYIRQSIRGWLRLPKDTPISYIHAGKQHGGLGIPSLSATIPMQRRARMEKLFSTQCRVLRNVVNDSAFGKIVRDLSLPIRVHGACVNTKEELVAAWGDSLHNSVDGRGLRELVASPLSNRWLVFPERVFPRIFIRGIQLRCNLLRTRVRSARHGHGGQTILCRGNCGQPESLVYILQSCCIAHDARCARHNRVARELAKCLRRLGYTFFEDLRAPTSMPFIKPDLIAVQERRATVIEVSIVSDGRGVTVWNEKKKYGDDEYSLAIISALRAIGCDVDFLVHQPMIISYRGICFPQSAKAVIGLGLPKFTVSDLCLLAIVGSLRTYDTFMLGTWR

SEQ ID NO: 7686 - protein, 990 aa, Clonorchis sinensis
MVAQLACANCSRLFPTKIGLSQHRRHAHPTQHNADKLSRVKHSGARWSQQESQSLLRLANNLYPSCETQTALFARLEQYFPGRSAISTKTRLRVLNWQAQQDESSSGGPDQTIGQIAAYSSEADDYSVWFKQTVDCAMSLLESHADSSLASVDLLAFARGLQTGIMTPEQVLSLLDLHASRTFPHTWKTVSRRRQLVYRMPVNRKQIRRANYAAIQTLYHQRRKDAASAVLDGSWKDLYKGNCGLPPDAEQYWKQVLSAPKHVDSRPSRVIVPSDWSLIEPITGEEVGRTVRSMGNSSPGLDKLTPRMLRRFNANVLAGYFNLLLLAGGCPPHLCRARITLVPKVPNPTSPDQLRPISVSSILVRCFHKVLADRWSRRLQLPSLQFAFLHRDGCLEATSLLHALLRHSSATASNLSLAFVDISKAFDSVSHDTIVRSAEAFGAPSPLVRYIAQSYENAVAVFPSSEVHCHRGVRQGDPLSPLLFIMAMDEVLGLSMPQLGYQFHDTLVDGFAFADDWVVCAESQARLKEKLEAAAVELGRAGMKINARKTKAMVICGDRKHRATAVSVEPFCFAEELITPLGPTDTVTYLGIPFTFKGKGVFNHRQHLLKLLDEVTRAPLKPHQRMEITRNYLIPRLTYSLVLGQVHRNTLKRLDNYIRQSIRGWLRLPKDTPISYIHAGKQHGGLGIPSLSATIPMQRRVRMEKLLSTQCRVLRNVVNDSAFGKVVRDLSLPIRVHGSCVNTKEELVAAWGDSLHNSVDGRGLRELVASSLSNRWLVFPERVFPRIFIRGIQLRCNLLRTRVRSARHGHGGQTILCRGNCGQPESLVHILQSCWITHDARCARHNRVARELAKRLRRLGYTVFEELRAPTSTSFIKPDLIAVRERRATVIDVSIVSDGRGVTVWNEKKQKYGADEFSLAIISALRAIGCDVDFLVHQPMIISYRGICFPQSAKAVIGLGLSKVTVSDLCLLAIVGSLRTYDTFMRGTWR

SEQ ID NO: 7687 - protein, 826 aa, Opisthorchis viverrini
MTPEQVLSLLDLHASRTFPHTWKTVSRRRRQLAHRIPVSRKQIRRANYAAIQTLYHQRRKDAASAVLDGSWKDLYKGNCGLPMDAEQYWKQVLSAPKHADSRPSRMVVPSDWSLIEPITGEEVGRTIRLMGNSSPGLDKLTPKTLRRFNANVLAGYFNLFLLSGGCPPHLCRARITLVPKVPHPTSPDQLRPISVSSILVRCFHKVLADRWSRRLQLPSLQFAFLHRDGCLEATSLLHALLRHSSATASNLSLAFVDISKAFDSVSHDTIVRSAKAFGAPSPLVRYIAQSYENAVAVFPSSEVHCHRGVRQGDPLSPLLFIMAMDEVLGLSMPQLGYQFHDTLVDGFAFADDWVVCAESQARLKEKLEAAAVELGRAGMKINARKTKVMVICGDRKHRATAVSVEPFRFAEELITPLGPTDTVTYLGIPFTSKGKGVFNHRQHLLKLLEEVTRAPLKPHQRMDITRNYLIPRLTYSLVLGQVHRNTLKRLDNYIRQYIRGWLRLPKDTPISYIHAGKQHGGLGIPSLSATIPMQRKTRMEKLLSTQCRVLRNVVNDSAFGKIVRDLSLPIRVHGACVNTKEELVAAWGESLHNSADGRGLRELVTSPLSNRWLVFPERVFPRIFIRGIQLRCNLLRTRVRSARHGHGGQTILCRGNCGQPESLVHILQSCWITHDARCARHNRVARELAKRLRRLGYTVFEELRAPTSTSFIKPDLIAVRDRRATVIDVSIDSDRRGGTVWNEKKQKYGADEHSPAIISVLHAIGCDIDFLFHQRMIISYRGICFSQSAKAVIGLGLPKVAVSDLCLLAIVGSLRTYDTFKRGTWR

SEQ ID NO: 7688 - protein, 991 aa, Opisthorchis felineus
MVAQLACAGCSRLFPTKIGLSQHRRHVHPTQHNADKLGRVKYSGARWSQQESQPFLRLANNLYPSCGRRTALFARLEQYFPGRSAISIKTRLRVLSWQAQQDESSSGGPDQTISQTTAYSSETDDYSVWFKQTVDCSVSLLESYADSSPASVDLLAFARGLQSGIMTPEQVLSLLDLHASRTFPHIWKTVSRRRRQLAHRIPVNRKQIRRANYAAIQTLYHQRRKDAASAVLDGSWKDLYKGNCGLPLNAEQYWKQVLSAPKHVDSRPSRVVVPSDWSLIEPITGEEVGRTIRLMGNSSPGLDKLTPRMLRRFNANALAGYFNLLLLSGGCPPHLCRARITLVPKVPNPTSPDQLRPISVSSILVRCFHKVLADRWSRRLQLPSLQFAFLHRDGCLEATSLLHALLRHSSATASNLSLAFVDISKAFDSVSHDTIVRSAKAFGAPSPLVRYIAQSYENAVAVFPNSEVHCHRGVRQGDPLSPLLFIMAMDEVLGLSMPQLGYQFHDTLVDGFAFADDWVVCAESQARLKEKLEAAAVELGRAGMKINARKTKAMVICGDRKHRATAVSVEPFCFAEELITPLGPTDTVTYLGIPFTFKGKGVFNHRQHLLKLLDEVTRAPLKPHQRIEITRNYLIPRLTYSLVLGQVHRNTLKRLDNYIRQSIRGWLRLPKDTRISYIHAGKQHGGLGIPSLSATIPMQRRALMEKLFSTQCRVLRNVVNDSAFGKIVRDLSLPIRVHGACVNTKEELVAAWGDSLHNSVDGRGLRELVASPLSNRWLVFPERVFPRIFIRGIQLRCNLLRTRVRSARHGHGGQTILCRGNCGQPESLVHILQSCWITHDARCARHNRVARELAKRLRRLGYTVFEELRAPTSTSFIKPDLIAVRERRATVIDVSIVSDGRGVTVWNEKKQKYGADEYSLAIISALRAIGCDVDFLVHQPMIISYRGICFPQSAKAVIGLGLPKVTVSDLCLLAIVGSLRTYDTFMRGTWR

SEQ ID NO: 7689 - protein, 1083 aa, Clonorchis sinensis
MSWFRLGSLDASLGELRVQQLQTGLTTLFGFNVLVTFDNVHYKTSGASAPVPTSTQERFVGLTCEECGKWCKSKAGLVAHHRVHDNDSVGTNMVAQLACADCSRLFPTKIGLSQHRRHAHPTQHNADKLSRVKHSGARWSQQESQSLLRLANNLYPSCETQTALFARLEQYFPGRSAISIKTRLRVLNWQAQQDESSSGGPDQTIGQIAAYSSEADDYSVWFKQTVDCAVSLLESHADSSLASVDLLAFARGLQSGIMTPEQVLSLLDLHASRTFPHTWKTVSRRRRQLAHRMPVNRKQIRRANYAAIQTLYHQRWKDAASAVLDGSWKDLYKGNCGLPPDAEQYWKQVLSAPKHVDSRPSRVVVPSDWSLIEPITGEEVGRTVRSMGNSSPGLDKLTPRMLRRFNANVLAGYFNLLLLSGGCPPHLCRARITLVPKVPNPTSPDQLRPISVSSILVRCFHKVLADRWSRRLQLPSLQFAFLHRDGCLEATSLLHALLRHSSATASNLSLAFVDISKAFDSVSHDTIVRSAEAFGAPSPLVRYIAQSYENAVAVFPSSEVHCHRGVRQGDPLSPLLFIMAMDEVLGLSMPQLGYQFHDTLVDGFAFADDWVVCAESQARLKEKLEAAAVELGRAGMKINARKTKAMVICGDRKHRATAVSVEPFCFAEELITPLGPTDTVTYLGIPFTFKGKGVFNHRQHLLKLFDEVTRAPLKPHQRMEITRNYLIPRLTYSLVLGQVHRNTLKRLDNYIRQSIRGWLRLPKDTPISYIHAGKQHGGLGIPSLSATIPMQRRVRMEKLLSTQCRVLRNVVNDSAFGKVVRDLSLPIRVHGSCVNTKEELVAAWGDSLHNSVDGRGLRELVASPLSNRWLVFPERVFPRIFIRGIQLRCNLLRTRVRSARHGHGGQTILCRGNCGQPESLVHILQSCWITHDARCARHNRVARELAKRLRRLGYTVFEELRAPTSTSFIKPDLIAVRERRATVIDVSIVSDGRGVTVWNEKKQKYGVDEFSLAIISALRAIGCDVDFLVHQPMIISYRGICFPQSAKAVIGLGLSKVTVSDLCLLAIVGSLRTYNTFMRDTWP

SEQ ID NO: 7690 - protein, 826 aa, Clonorchis sinensis
MTPEQVLSLLDLHASRTFPHTWKTVSRRRRQLAHRMPVNRKQIRRANYAAIQTLYHQRWKDAASAVLDGSWKDLYKGNCGLPPDAEQYWKQVLSAPKHVDSRPSRVVVPSDWSLIEPITGEEVGRTVRSMGNSSPGLDKLTPRMLRRFNANVLAGYFNLLLLSGGCPPHLCRARITLVPKVPNPTSPDQLRPISVSSILVRCFHKVLADRWSRRLQLPSLQFAFLHRDGCLEATSLLHALLRHSSATASNLSLAFVDISKAFDSVSHDTIVRSAEAFGAPSPLVRYIAQSYENAVAVFPSSEVHCHRGVRQGDPLSPLLFIMAMDEVLGLSMPQLGYQFHDTLVDGFAFADDWVVCAESQARLKEKLEAAAVELGRAGMKINARKTKAMVICGDRKHRATAVSVEPFCFAEELITPLGPTDTVTYLGIPFTFKGKGVFNHRQHLLKLLDEVTRAPLKPHQRMEITRNYLIPRLTYSLVLGQVHRNTLKRLDNYIRQSIRGWLRLPKDTPISYIHAGKQHGGLGIPSLSATIPMQRRVRMEKLLSTQCRVLRNVVNDSAFGKVVRDLSLPIRVHGSCVNTKEELVAAWGDSLHNSVDGRGLRELVASPLSNRWLVFPERVFPRIFIRGIQLRCNLLRTRVRSARHGHGGQTILCRGNCGQPESLVHILQSCWITHDARCARHNRVARELAKRLRRLGYTVFEELRAPTSTSFIKPDLIAVRERRATVIDVSIVSDGRGMTLWNEKKQKYGVDEFSLAIISALRAIGCDVDFLVHQPMVISYRGICFPQSAKAVIGLGLSKVTVSDLCLLAIVGSLRTYDTFMRGTWR

SEQ ID NO: 7691 - protein, 991 aa, Clonorchis sinensis
MVAQLACADCSRLFPTKIGLSQHRRHAHPTQHNADKLSRVKHSGARWSQQESQSLLRLANNLYPSCETQTALFARLEQYFPGRSAISIKTRLRVLNWQAQQDESSSGGPDQTIGQIAAYSSEADDYSVWFKQTVDCAVSLLESHADSSLASVDLLAFARGLQSGIMTPEQVLSLLDLHASRTFPHTWKTVSRRRRQLAHRMPVNRKQIRRANYAAIQTLYHQRWKDAASAVLDGSWKDLYKGNCGLPPDAEQYWKQVLSAPKHVDSRPSRVVVPSDWSLIEPITGEEVGRTVRSMGNSSPGLDKLTPRMLRRFNANVLAGYFNLLLLSGGCPPHLCRARITLVPKVPNPTSPDQLRPISVSSILVRCFHKVLADRWSRRLQLPSLQFAFLHRDGCLEATSLLHALLRHSSATASNLSLAFVDISKAFDSVSHDTIVRSAEAFGAPSPLVRYIAQSYENAVAVFPSSEVHCHRGVRQGDPLSPLLFIMAMDEVLGLSMPQLGYQFHDTLVDGFAFADDWVVCAESQARLKEKLEAAAVELGRAGMKINARKTKAMVICGDRKHRATAVSVEPFCFAEELITPLGPTDTVTYLGIPFTFKGKGVFNHRQHLLKLLDEVTRAPLKPHQRMEITRNYLIPRLTYSLVLGQVHRNTLKRLDNYIRQSIRGWLRLPKDTPISYIHAGKQHGGLGIPSLSATIPMQRRVRMEKLLSTQCRVLRNVVNDSAFGKVVRDLSLPIRVHGSCVNTKEELVAAWGDSLHNSVDGRGLRELVASPLSNRWLVFPERVFPRIFIRGIQLRCNLLRTRVRSARHGHGGQTILCRGNCGQPESLVHILQSCWITHDARCARHNRVARELAKRLRRLGYTVFEELRAPTSTSFIKPDLIAVRERRATVIDVSIVSDGRGVTVWNEKKQKYGVDEFSLAIISALRAIGCDVDFLVHQPMIISYRGICFPQSAKAVIGLGLSKVTVGDLCLLAIVGSLRTYNTFMRDTWP

SEQ ID NO: 7692 - protein, 826 aa, Opisthorchis viverrini
MTPEQVLSLLDLHASRTFPHTWKTVSRRRRQLAHRIPVSRKQIRRANYAAIQTLYHQRRKDAASAVLDGSWKDLYKGNCGLPMDAEQYWKQVLSAPKHADSRPSRMVVPSDWSLIEPITGEEVGRTIRLMGNSSPGLDKLTPRTLRRFNANVLAGYFNLFLLSGGCPPHLCRARITLVPKVPHPTSPDQLRPISVSSILVRCFHKVLADRWSRRLQLPSLQFAFLHRDGCLEATSLLHALLRHSSATASNLSLAFVDISKAFDSVSHDTIVRSAKAFGAPSPLVRYIAQSYENAVAVFPSSEVHCHRGVRQGDPLSPLLFIMAMDEVLGLSMPQLGYQFHDTLVDGFAFADDWVVCAESQARLKEKLEAAAVELGRAGMKINARKTKVMVICGDRKHRATAVSVEPFRFAEELITPLGPTDTVTYLGIPFTSKGKGVFNHRQHLLKLLEEVTRAPLKPHQRMDITRNYLIPRLTYSLVLGQVHRNTLKRLDNYIRQYIRGWLRLPKDTPISYIHAGKQHGGLGIPSLSATIPMQRKTRMEKLLSTQCRVLRNVVNDSAFGKIVRDLSLPIRVHGACVNTKEELVAAWGESLHNSADGRGLRELVTSPLSNRWLVFPERVFPRIFIRGIQLRCNLLRTRVRSARHGHGGQTILCRGNCGQPESLVHILQSCWITHDARCARHNRVSRELAKRLCRLGYTVFEELRAPTSTSFIKPDLIAVRDRRATVIDVSIVSDWRGETVWNEKKQKYGADEHSLAIISALHAIGCDIDFLVHQPMTISYRGICFPQSAKAIIGLGLPEVAVSDLCLIAIVGSLRTYDTFMRDTWR

SEQ ID NO: 7693 - protein, 854 aa, Opisthorchis felineus
MSLLESYADSSLASVDLLAFARGLQFGIMTPEQVLSLMDLHTSRTFPHIWKTVSRRRRQLAYRMPVNRKQIRRANYAAIQTLYHQRWKDAASAVLDGSWKDLYKGNCGLPLNAEQYWKQVLSAPKHVDSRPSRVVVPSDWSLIEPITGEEVGRTIRLMGNSSPGLDKLTPRMLRRFNANALAGYFNLLLLSGGCPPHLCRARITLVPKVPNPTSPDQLRPISVSSILVRCFHKVLADRWSRRLQLPSLQFAFLHRDGCLEATSLLHALLRHSSATASNLSLAFVDISKAFDSVSHDTIVRSAKAFGAPSPLVRYIAQSYENAVAVFPNSEVHCHRGVRQGDPLSPLLFIMAMDEVLGLSMPQLGYQFHDTLVDGFAFADDWVVCAESQARLKEKLEAAAVELGRAGMKINARKTKAMVICGDRKHRATAVSVEPFCFAEELITPLGPTDTVTYLGIPFTFKGKGVFNHRQHLLKLLDEVTRAPLKPHQRMEITRNYLIPRLTYSLVLSQVHRNTLKRLDNYIRQSIRGWLRLPKDTPISYIHAGKQHGGLGIPSLSATIPMQRRARMEKLFSTQCRVLRNVVNDSAFGKIVRDLSLPIRVHGACVNTKKELVAAWGDSLHNSVDGRGLRELVASPLSNRWLVFPERVFPRIFIRGIQLRCNLLRTRVRSARHGHGGQTILCRGNCGQPESLVHILQSCWITHDARCARHNRVARELAKRLRRLGYTVFEELRAPTSTSFIKPDLIAVRERRATVIDVSIVSDGRGVTVWNEKKQKYGADEYSLAIISALRAIGCDVDFLVHQPMIISYRGICFPQSAKAVIGLGLPKVTVSDLCLLAIVGSLRTYDTFMRGTWR

SEQ ID NO: 7694 - protein, 990 aa, Clonorchis sinensis
MVAQLACADCSHLFPTKIGLSQHRRHAHPTQHNADKLSRVKHSGARWSQQESQSLLRLAKNLYPSCETQTALFARLEQYFPGRSAISIKTRLQVLNWQAQQDESSSGGPDQTIGQIAAYSSEADDYSVWFKQTVDCAVSLLESHADSSLASVDLLAFARGLQSGIMTPEQVLSLLDLHASRTFPHTWKTVSRRRQLVYRMPVNRKQIRRANYAAIQTLYHQRRKDAASAVLDGSWKDLYKGNCGLPPDAEQYWKQVLSAPKHVDSRPSRVIVPSDWSLIEPITGEEVGRTVRSMGNSSPGLDKLTPRMLRRFNANVLAGYFNLLLLAGGCPPHLCRARITLVPKVPNPTSPDQLRPISVSSILVRCFHKVLADRWSRRLQLPSLQFAFLHRDGCLEATSLLHALLRHSSATASNLSLAFVDISKAFDSVSHDTIVRSAEAFGAPSPLVRYIAQSYENAVAVFPSSEVHCHRGVRQGDPLSPLLFIMAMDEVLGLSMPQLGYQFHDTLVDGFAFADDWVVCAESQARLKEKLEAAAVELGRAGMKINARKTKAMVICGDRKHRATAVSVEPFCFAEELITPLGPTDTVTYLGIPFTFKGKGVFNHRQHLLKLLDEVTRAPLKPHQRMEITRNYLIPRLTYSLVLGQVHRNTLKRLDNYIRQSIRGWLRLPKDTPISYIHAGKQHGGLGIPSLSATIPMQRRVRMEKLLSTQCRVLRNVVNDSAFGKVVRDLSLPIRVHGSCVNTKEELVAAWGDSLHNSVDGRGLRELVASSLSNRWLVFPERVFPRIFIRGIQLRCNLLRTRVRSARHGHGGQTILCRGNCGQPESLVHILQSCWITHDARCARHNRVARELAKRLRRLGYTVFEELRAPTSTSFIKPDLIAVRERRATVIDVSIVSDGRGVTVWNEKKQKYGADEFSLAIISALRAIGCDVDFLVHQPMIISYRGICFPQSAKAVIGLGLSKVTVSDLCLLAIVGSLRTYDTFMRGTWR

SEQ ID NO: 7695 - protein, 991 aa, Clonorchis sinensis
MVAQLACADCSRLFPTKIGLSQHRRHAHPTQHNADKLSRVKHSGARWSQQESQSLLRLANNLYPSCETQTALFARLEQYFPGRSAISIKTRLRVLNWQAQQDESSSGGPDQTIGQIAAYSSEADDYSVWFKQTVDCAVSLLESHADSSLASVDLLAFARGLQSGIMTPEQVLSLLDLHASRTFPHTWKTVSRRRRQLAHRMPVNRKQIRRANYAAIQTLYHQRWKDAASAVLDGSWKDLYKGNCGLPPDAEQYWKQVLSAPKHVDSRPSRVVVPSDWSLIEPITGEEVGRTVRSMGNSSPGLDKLTPRMLRRFNANVLAGYFNLLLLSGGCPPHLCRARITLVPKVPNPTSPDQLRPISVSSILVRCFHKVLADRWSRRLQLPSLQFAFLHRDGCLEATSLLHALLRHSSATASNLSLAFVDISKAFDSVSHDTIVRSAEAFGAPSPLVRYIAQSYENAVAVFPSSEVHCHRGVRQGDPLSPLLFIMAMDEVLGLSMPQLGYQFHDTLVDGFAFADDWVVCAESQARLKEKLEAAAVELGRAGMKINARKTKAMVICGDRKHRATAVSVEPFCFAEELITPLGPTDTVTYLGIPFTFKGKGVFNHRQHLLKLLDEVTRAPLKPHQRMEITRNYLIPRLTYSLVLGQVHRNTLKRLDNYIRQSIRGWLRLPKDTPISYIHAGKQHGGLGIPSLSATIPMQRRVRMEKLLSTQCRVLRNVVNDSAFGKVVRDLSLPIRVHGSCVNTKEELVAAWGDSLHNSVDGRGLRELVASPLSNRWLVFPERVFPRIFIRGIQLRCNLLRTRVRSARHGHGGQTILCRGNCGQPESLVHILQSCWITHDARCARHNRVARELAKRLRRLGYTVFEELRAPTSTSFIKPDLIAVRERRATVIDVSIVSDGRGVTVWNEKKQKYGVDEFSLAIISALRAIGCDVDFLVHQPMIISYRGICFPQSAKAVVGLGLSKVTVGDLCLLAIVGFLRTYDTFMRGTWR

SEQ ID NO: 7696 - protein, 1007 aa, Clonorchis sinensis
MVAQLACADCSRLFPTKIGLSQHRRHAHPTQHNADKLSRVKHSGARWSQQESQSLLRLANNLYPSCETQTALFARLEQYFPGRSAISTKTRLRVLNWQAQQDESSSGGPDQTIGQIAAYSSEADDYSVWFKQTVDCAVSLLESHADSSLASVDLLAFARGLQTGIMTPEQVLSLLDLHASRTFPHTWKTVSRRRQLVYRMPVNRKQIRRANYAAIQTLYHQRRKDAASAVLDGSWKDLYKGNCGLPPDAEQYWKQVLSAPKHVDSRPSRVIVPSDWSLIEPITGEEVGRTVRSMGNSSPGLDKLTPRMLRRFNANVLAGYFNLLLLAGGCPPHLCRARITLVPKVPNPTSPDQLRPISVSSILVRCFHKVLADRWSRRLQLPSLQFAFLHRDGCLEATSLLHALLRHSSATASNLSLAFVDISKAFDSVSHDTIVRSAEAFGAPSPLVRYIAQSYENAVAVFPSSEVHCHRGVRQGDPLSPLLFIMAMDEVLGLSMPQLGYQFHDTLVDGFAFADDWVVCAESQARLKEKLEAAAVELGRAGMKINARKTKAMVICGDRKHRATAVSVEPFCFAEELITPLGPTDTVTYLGIPFTFKGKGVFNHRQHLLKLLDEVTRAPLKPHQRMEITRNYLIPRLTYSLVLGQVHRNTLKRLDNYIRQSIRGWLRLPKDTPISYIHAGKQHGGLGIPSLSATIPMQRRVRMEKLLSTQCRVLRNVVNDSAFGKVVRDLSLPIRVHGSCVNTKEELVAAWGDSLHNSVDGRGLRELVASSLSNRWLVFPERVFPRIFIRGIQLRCNLLRTRVRSARHGHGGQTILCRGNCGQPESLVHILQSCWITHDARCARHNRVARELAKRLRRLGYTVFEELRAPTSTSFIKPDLIAVRERRATVIDVSIVSDGRGVTVWNEKKQKYGADEFSLAIISALRAIGCDVDFLVHQPMIISYRGICFPQSAKAVIGLGLSKVTIYNKLEVMRNTWPKNPTGVQSHTKYVKSVTGLYPVRLGRCNG

SEQ ID NO: 7697 - protein, 825 aa, Opisthorchis viverrini
MTPEQVLSLLDLHAFRTFPHTWKTVSRRRRQLAHRIPVNRKQIRRANFAAIQTLFHQRRKDSASAVLDGSWRDLYKGNCGLPTNAERPWKQVLSAPKRAGSRPSRIVVPSDWSLVEPITGEEVGRTIRLMGNSSPGLDKLTPRTLRRFNANVLAGYFNLFLLSGGCPPHLCRARITLVPKVPHPTSPDQLRPISVSSILVRCFHKVLADRWSRRLQLPSLQFAFLHRDGCLEATSLLHALLRHSSATASNLSLAFVDISKAFDSVSHDTIVRSAKAFGAPSPLVRYIAQSYENAVAVFPSSEVHCHRGVRQGDPLSPLLFIMAMDEVLGLSMPQLGYQFHDTLVDGFAFADDWVVCAESQARLKEKLEAAAVELGRAGMKINARKTKVMVICGDRKHRATAVSVEPFRFAEELITPLGPTDTVTYLGIPFTSKGKGVFNHRQHLLKLLEEVTRAPLKPHQRMDITRNYLIPRLTYSLVLGQVHRNTLKRLDNYIRQYIRGWLRLPKDTPISYIHAGKQHGGLGIPSLSATIPMQRKTRMEKLLSTQCRVLRNVVNDSAFGKIVRDLSLPIRVHGACVNTKEELVAAWGESLHNSADGRGLRELVTSPLSNRWLVFPERVFPRIFIRGIQLRCNLLRTRVRSARHGHGGQTILCRGNCGQPESLVHILQSCWITHDARCARHNRVARELAKRLRRLGYTVFEELRAPTSTSFIKPDLIAVRDRRATVIDVSIVSDGRGVIVWNEKKQKYGADEHSLAIISALHAIGCDINFSVHQPMIISYRGICFPQSAKAVIGLGLLRSDVSLFSPIFPRYSFTFKTRIHFLCL

SEQ ID NO: 7698 - protein, 951 aa, Opisthorchis felineus
MVAQLACADCSRLFPTKIGLSQHRRHAHPTQHNADKLGRVKYSGARWSQQESQSLLRLANNLYPSCGTQTALFARLEQYFPGRSAISIKTRLRVLNWQAQQDESSSGGPDQTIGQITAYSSEADDYSVWFKQTVDCAVSLLESHADSSLASVDLLAFARGLQSGIMTPEQVLSLLDLHASRTFPHIWKTVSRRRRQLAHRVPVNRMQIRRANYAAIQTLYHQRRKDAASAVLDGSWKDLYKGNCGLPLNAEQYWKQVLSAPKHVDSRPSRVVVPSDWSLIEPISGEEVGRTIRLMGNSSPGLDKLTPRMLRRFNANALAGYFNLLLLSGGCPPHLCRARITLVPKVPNPTSPDQLRPISVSSILVRCFHKVLADRWSRRLQLPSLQFAFLHRDGCLEATSLLHALLRHSSATASNLSLAFVDISKAFDSVSHDTIVRSAKAFGAPSPLVRYIAQSYENAVAVFPNSEVHCHRGVRQGDPLSPLLFIMAMDEVLGLSMPQLGYQFHDTLVDGFAFADDWVVCAESQARLKEKLEAAAVELGRAGMKINARKTKAMVICGDRKHRAIAVSVEPFCFAEELITPLGPTDTVTYLGIPFTFKGKGVFNHRQHLLKLLDEVTRAPLKPHQRMEITRNYLIPRLTYSLVLGQVHRNTLKRLDNYIRQSIRGWLRLPKDTPISYIHAGKQHGGLGIPSLSATIPMQRRARMEKLFSTQCRVLRNVVNDSAFGKIVRDLSLPIRVHGACVNTKEELVAAWGDSLHNSVDGRGLRELVASPLSNRWLVFPERVFPRIFILGIQLRFNLLRTRVRSPRHGHGGQTILCRGNCGQPESLVHILQSCWITHDARCARHNRVARELAKRLRRLGYTVCEELRAPSSTSFIKADLIAVRESRATVVDVSIVSDGRGVTVWNEKKQKYGADEYSLAIISALFAIGCDVYVLAHQPMIIYYRGLCLP

SEQ ID NO: 7699 - protein, 991 aa, Clonorchis sinensis
MVAQLACADCSRLFPTKIGLSQHRRHAHPTQHNADKLSRVKHSGARWSQQESQSLLRLANNLYPSCETQTALFARLEQYFPGRSAISIKTRLRVLNWQAQQDESSSGGPDQTIGQIAAYSSEADDYSVWFKQTVDCAVSLLESHADSSLASVDLLAFARGLQSGIMTPEQVLSLLDLHASRTFPHTWKTVSRRRRQLAHRMPVNRKQIRRANYAAIQTLYHQRWKDAASAVLDGSWKDLYKGNCGLPPDAEQYWKQVLSAPKHVDSRPSRVVVPSDWSLIEPITGEEVGRTVRSMGNSSPGLDKLTPRMLRRFNANVLAGYFNLLLLSGGCPPHLCRARITLVPKVPNPTSPDQLRPISVSSILVRCFHKVLADRWSRRLQLPSLQFAFLHRDGCLEATSLLHALLRHSSATASNLSLAFVDISKAFDSVSHDTIVRSAEAFGAPSPLVRYIAQSYENAVAVFPSSEVHCHRGVRQGDPLSPLLFIMAMDEVLGLSMPQLGYQFHDTLVDGFAFADDWVVCAESQARLKEKLEAAAVELGRAGMKINARKTKAMVICGDRKHRATAVSVEPFCFAEELITPLGPTDTVTYLGIPFTFKGKGVFNHRQHLLKLLDEVTRAPLKPHQRMEITRNYLIPRLTYSLVLGQVHRNTLKRLDNYIRQSIRGWLRLPKDTPISYIHAGKQHGGLGIPSLSATIPMQRRVRMEKLLSTQCRVLRNVVNDSAFGKVVRDLSLPIRVHGSCVNTKEELVAAWGDSLHNSVDGRGLRELVASPLSNRWLVFPERVFPRIFIRGIQLRCNLLRTRVRSARHGHGGQTILCRGNCGQPESLVHILQSCWITHDARCARHNRVARELAKRLRRLGYTVFEELRAPTSTSFIKPDLIAVRERRATVIDVSIVSDGRGVTVWNEKKQKYGVDEFSLAIISALRAIGCDVDFLVHQPMVISYRGICFPQSAKAVIGLGLSKVTVSDLCLLAIVGSLRTYDTFMRGTWR

SEQ ID NO: 7700 - protein, 826 aa, Clonorchis sinensis
MTPEQVLSLLDLHASRTFPHTWKTVSRRRRQLAHRMPVNRKQIRRANYAAIQTLYHQRWKDAASAVLDGSWKDLYKGNCGLPPDAEQYWKQVLSAPKHVDSRPSRVVVPSDWSLIEPITGEEVGRTVRSMGNSSPGLDKLTPRMLRRFNANVLAGYFNLLLLSGGCPPHLCRARITLVPKVPNPTSPDQLRPISVSSILVRCFHKVLADRWSRRLQLPSLQFAFLHRDGCLEATSLLHALLRHSSATASNLSLAFVDISKAFDSVSHDTIVRSAEAFGAPSPLVRYIAQSYENAVAVFPSSEVHCHRGVRQGDPLSPLLFIMAMDEVLGLSMPQLGYQFHDTLVDGFAFADDWVVCAESQARLKEKLEAAAVELGRAGMKINARKTKAMVICGDRKHRATAVSVEPFCFAEELITPLGPTDTVTYLGIPFTFKGKGVFNHRQHLLKLLDEVTRAPLKPHQRMEITRNYLIPRLTYSLVLGQVHRNTLKRLDNYIRQSIRGWLRLPKDTPISYIHAGKQHGGLGIPSLSATIPMQRRVRMEKLLSTQCRVLRNVVNDSAFGKVVRDLSLPIRVHGSCVNTKEELVAAWGDSLHNSVDGRGLRELVASPLSNRWLVFPERVFPRIFIRGIQLRCNLLRTRVRSARHGHGGQTILCRGNCGQPESLVHILQSCWITHDARCARHNRVARELAKRLRRLGYTVFEELRAPTSTSFIKPDLIAVRERRATVIDVSIVSDGRGVTVWNEKKQKYGVDEFSLAILSALRAIGCDVDFLVHQPMIISYRGICFPQSPKAVIGLGLSKVTVSDLCLLAIVGSLRTYDTFMRGTWR

SEQ ID NO: 7701 - protein, 991 aa, Clonorchis sinensis
MVAQLACADCSRLFPTKIGLSQHRRHAHPTQHNADKLSRVKHSGARWSQQESQSLLRLANNLYPSCETQTALFARLEQYFPGRSAISIKTRLRVLNWQAQQDESSSGGPDQTIGQIAAYSSEADDYSVWFKQTVDCAVSLLESHADSSLASVDLLAFARGLQSGIMTPEQVLSLLDLHASRTFPHTWKTVSRRRRQLAHRMPVNRKQIRRANYAAIQTLYHQRWKDAASAVLDGSWKDLYKGNCGLPPDAEQYWKQVLSAPKHVDSRPSRVVVPSDWSLIEPITGEEVGRTVRSMGNSSPGLDKLTPRMLRRFNANVLAGYFNLLLLSGGCPPHLCRARITLVPKVPNPTSPDQLRPISVSSILVRCFHKVLADRWSRRLQLPSLQFAFLHRDGCLEATSLLHALLRHSSATASNLSLAFVDISKAFDSVSHDTIVRSAEAFGAPSPLVRYIAQSYENAVAVFPSSEVHCHRGVRQGDPLSPLLFIMAMDEVLGLSMPQLGYQFHDTLVDGFAFADDWVVCAESQARLKEKLEAAAVELGRAGMKINARKTKAMVICGDRKHRATAVSVEPFCFAEELITPLGPTDTVTYLGIPFTFKGKGVFNHRQHLLKLFDEVTRAPLKPHQRMEITRNYLIPRLTYSLVLGQVHRNTLKRLDNYIRQSIRGWLRLPKDTPISYIHAGKQHGGLGIPSLSATIPMQRRVRMEKLLSTQCRVLRNVVNDSAFGKVVRDLSLPIRVHGSCVNTKEELVAAWGDSLHNSVDGRGLRELVASPLSNRWLVFPERVFPRIFIRGIQLRCNLLRTRVRSARHGHGGQTILCRGNCGQPESLVHILQSCWITHDARCARHNRVARELAKRLRRLGYTVFEELRAPTSTSFIKPDLIAVRERRATVIDVSIVSDGRGVTVWNEKKQKYGADEFSLAIISALRAIGCDVDFLVHQPMVISYRGICFPQSAKAVIGLGLSKVTIGDLCLLAIVGSLRTYNTFMRDTWP

SEQ ID NO: 7702 - protein, 826 aa, Opisthorchis viverrini
MTPEQVLSLLDLHASRTFPHNWKTVSRRRRQLAHRIPVSRKQIRQANYAAIQTLYHQRRKDAASAVLDGSWKDLYKGNCGLPTEAEQYWKQVLSAPKHADSRPSRMVVPSDWSLIEPITREEVGRTIRLISNSSPGLDKLTPRTLRRFNANVLAGYFNLFLLSGGCPPHLCRARITLVPKVPHPTSPDQLRPISVSSILIRCFHKVLADRWCRRLQLPSLQFAFLHRDGCLEATSLLHALLRHSSATASNLSLAFVDISKAFDSVSHDTIVRSAKAFGAPSPLVRYIAQSYENAVAVFPSSEVHCHRGVRQGDPLSPLLFIMAMDEVLGLSMPQLGYQFHDTLVDGFAFADDWVVCAESQARLKEKLEAAAVELGRAGMKINARKTKVMVICGDRKHRATAVSVEPFRFAEELITPLGPTDTVTYLGIPFTSKGKGVFNHRQHLLKLLEEVTRAPLKPHQRMDITRNYLIPRLTYSLVLGQVHRNTLKRLDNYIRQYIRGWLRLPKDTPISYIHAGKQHGGLGIPSLSATIPMQRKTRMEKLLSTQCRVLRNVVNDSAFGKIVRDLSLPIRVHGACVNTKEELVAAWGESLHNSADGRGLRELVTSPLSNRWLVFPERVFPRIFIRGIQLRCNLLRTRVRSARHGHGGQTILCRGNCGQPESLVHILQSCWITHDARCARHNRVARELAKRLRRLGYTVFEELRTPTSTSFIKPDLIAVRDRRATVIDVSIVSDGRGEIVWNEKKQKYGADEHSLAIISALHAIGCDIDFLVHQPVIISYRGICFPQSAKAVIGLGLPKVAVSDLCLLAIVGSLRTYDTFMRGTWR

SEQ ID NO: 7703 - protein, 905 aa, Clonorchis sinensis
MVAQLACADCSRLFPTKIGLSQHRRHAHPTQHNADKLSRVKHSGARWSQQESQSLLRLANNLYPSCETQTALFARLEQYFPGRSAISIKTRLRVLNWQAQQDESSSGGPDQTIGQIAAYSSEADDYSVWFKQTVDCAVSLLESHADSSLASVDLLAFARGLQSGIMTPEQVLSLLDLHASRTFPHTWKTVSRRRRQLAHRMPVNRKQIRRANYAAIQTLYHQRWKDAASAVLDGSWKDLYKGNCGLPPDAEQYWKQVLSAPKHVDSRPSRVVVPSDWSLIEPITGEEVGRTVRSMGNSSPGLDKLTPRMLRRFNANVLAGYFNLLLLSGGCPPHLCRARITLVPKVPNPTSPDQLRPISVSSILVRCFHKVLADRWSRRLQLPSLQFAFLHRDGCLEATSLLHALLRHSSATASNLSLAFVDISKAFDSVSHDTIVRSAEAFGAPSPLVRYIAQSYENAVAVFPSSEVHCHRGVRQGDPLSPLLFIMAMDEVLGLSMPQLGYQFHDTLVDGFAFADDWVVCAESQARLKEKLEAAAVELGRAGMKINARKTKAMVICGDRKHRATAVSVEPFCFAEELITPLGPTDTVTYLGIPFTFKGKGVFNHRQHLLKLLDEVTRAPLKPHQRMEITRNYLIPRLTYSLVLGQVHRNTLKRLDNYIRQSIRGWLRLPKDTPISYIHAGKQHGGLGIPSLSATIPMQRRVRMEKLLSTQCRVLRNVVNDSAFGKVVRDLSLPIRVHGSCVNTKEELVAAWGDSLHNSVDGRGLRELVASPLSNRWLVFPERVFPRIFIRGIQLRCNLLRTRVRSARHGHGGQTILCRGNCGQPESLVHILQSCWITHDARCARHNRVARELAKRLRRLGYTVFEELRAPTSTSFIKPDLIAVRERRATLIDVSIVSDGRGMTV

SEQ ID NO: 7704 - protein, 991 aa, Clonorchis sinensis
MVAQLACADCSRLFPKKIGLSQHRRHAHPTQHNADKLSRVKHSGARWSQQESQSLLRLANNLYPSCETQTALFARLEQYFPGRSAISIKTRLRVLNWQAQQDESSSGGPDQTIGQTAAYSSEADDYSVWFKQTVDCAVSLLESHADSSLASVDLLAFARGLQSGIMTPEQVLSLLDLHASRTFPHTWKTVSRRRRQLAHRMPVNRKQIRRANYAAIQTLYHQRRKDAASAVLDGSWKDLYKGNCGLPPDAEQYWKQVLSAPKHVDSRPSRVVVPSDWSLIEPITGEEVGRTVRSMGNSSPGLDKLTPRMLRRFNANVLAGYFNLLLLAGGCPPHLCRARITLVPKVPNPTSPDQLRPISVSSILVRCFHKVLADRWSRRLQLPSLQFAFLHRDGCLEATSLLHALLRHSSATASNLSLAFVDISKAFDSVSHDTIVRSAEAFGAPSPLVRYIAQSYENAVAVFPSSEVHCHRGVRQGDPLSPLLFIMAMDEVLGLSMPQLGYQFHDTLVDGFAFADDWVVCAESQARLKEKLEAAAVELGRAGMKINARKTKAMVICGDRKHRATAVSVEPFCFAEELITPLGPTDTVTYLGIPFTFKGKGVFNHRQHLLKLLDEVTRAPLKPHQRMEITRNYLIPRLTYSLVLGQVHRNTLKRLDNYIRQSIRGWLRLPKDTPISYIHAGKQHGGLGIPSLSATIPMQRRVRMEKLLSTQCRVLRNVVNDSAFGKVVRDLSLPIRVHGSCVNTKEELVAAWGDSLHNSVDGRGLRELVASPLSNRWLVFPERVFPRIFIRGIQLRCNLLRTRVRSARHGHGGQTILCRGNCGQPESLVHILQSCWITHDARCARHNRVARELAKRLRRLGYTVFEELRAPTSTSFIKPDLIAVRERRATVIDVSIVSDGRGVTVWNEKKQKYGADEFSLAIISALRAIGCDVDFLVHQPMIISYRGICFPQSAKAVIGLGLSKVTVSDLCLLAIVGSLRTYDTFMRGTWR

SEQ ID NO: 7705 - protein, 991 aa, Clonorchis sinensis
MVAQLACADCSRLFPTKIGLSQHRRHAHPTQHNADKLSRVKHSGARWSQQESQSLLRLANNLYPSCETQTALFARLEQYFPGRSAISIKTRLRVLNWQAQQDESSSGGPDQTIGQIAAYSSEADDYSVWFKQTVDCAVSLLESHADSSLASVDLLAFARGLQSGIMTPEQVLSLLDLHASRTFPHTWKTVSRRRRQLAHRMPVNRKQIRRANYAAIQTLYHQRWKDAASAVLDGSWKDLYKGNCGLPPDAEQYWKQVLSAPKHVDSRPSRVVVPSDWSLIEPITGEEVGRTVRSMGNSSPGLDKLTPRMLRRFNANVLAGYFNLLLLSGGCPPHLCRARITLVPKVPNPTSPDQLRPISVSSILVRCFHKVLADRWSRRLQLPSLQFAFLHRDGCLEATSLLHALLRHSSATASNLSLAFVDISKAFDSVSHDTIVRSAEAFGAPSPLVRYIAQSYENAVAVFPSSEVHCHRGVRQGDPLSPLLFIMAMDEVLGLSMPQLGYQFHDTLVDGFAFADDWVVCAESQARLKEKLEAAAVELGRAGMKINARKTKAMVICGDRKHRATAVSVEPFCFAEELITPLGPTDTVTYLGIPFTFKGKGVFNHRQHLLKLFDEVTRAPLKPHQRMEITRNYLIPRLTYSLVLGQVHRNTLKRLDNYIRQSIRGWLRLPKDTPISYIHAGKQHGGLGIPSLSATIPMQRRVRMEKLLSTQCRVLRNVVNDSAFGKVVRDLSLPIRVHGSCVNTKEELVAAWGDSLHNSVDGRGLRELVASPLSNRWLVFPERVFPRIFIRGIQLRCNLLRTRVRSARHGHGGQTILCRGNCGQPESLVHILQSCWITHDARCARHNRVARELAKRLRRLGYTVFEELRAPTSTSFIKPDLIAVRERRATVIDVSIVSDGRGVTVWNEKKQKYGADEFSLAIISALRAIGCDVDFLVHQPMIISYRGICFPQSAKAVIGLGLSKVTVSDLCLLAIVGSLRTYNTFMRDTWP

SEQ ID NO: 7706 - protein, 991 aa, Clonorchis sinensis
MVAQLACADCSRLFPTKIGLSQHRRHAHPTQHNADKLSRVKHSGARWSQQESQSLLRLANNLYPSCETQTALFARLEQYFPGRSAISIKTRLRVLNWQAQQDESSSGGPDQTIGQIAAYSSEADDYSVWFKQTVDCAVSLLESHADSSLASVDLLAFARGLQSGIMTPEQVLSLLDLHASRTFPHTWKTVSRRRRQLAHRMPVNRKQIRRANYAAIQTLYHQRWKDAASAVLDGSWKDLYKGNCGLPPDAEQYWKQVLSAPKHVDSRPSRVVVPSDWSLIEPITGEEVGRTVRSMGNSSPGLDKLTPRMLRRFNANVLAGYFNLLLLSGGCPPHLCRARITLVPKVPNPTSPDQLRPISVSSILVRCFHKVLADRWSRRLQLPSLQFAFLHRDGCLEATSLLHALLRHSSATASNLSLAFVDISKAFDSVSHDTIVRSAEAFGAPSPLVRYIAQSYENAVAVFPSSEVHCHRGVRQGDPLSPLLFIMAMDEVLGLSMPQLGYQFHDTLVDGFAFADDWVVCAESQARLKEKLEAAAVELGRAGMKINARKTKAMVICGDRKHRATAVSVEPFCFAEELITPLGPTDTVTYLGIPFTFKGKGVFNHRQHLLKLFDEVTRAPLKPHQRMEITRNYLIPRLTYSLVLGQVHRNTLKRLDNYIRQSIRGWLRLPKDTPISYIHAGKQHGGLGIPSLSATIPMQRRVRMEKLLSTQCRVLRNVVNDSAFGKVVRDLSLPIRVHGSCVNTKEELVAAWGDSLHNSVDGRGLRELVASPLSNRWLVFPERVFPRIFIRGIQLRCNLLRTRVRSARHGHGGQTILCRGNCGQPESLVHILQSCWITHDARCARHNRVARELAKRLRRLGYTVFEELRAPTSTSFIKPDLIAVRERRATVMDVSIVSDGRGVTVWNEKKQKYGADEFSLAIISALRAIGCDVDFLVHQPMIISYRGICFPQSAKAVIGLGLSKVTVSDLCLLAIVGFLRTYDTFMRGTWR

SEQ ID NO: 7707 - protein, 826 aa, Opisthorchis viverrini
MTPEQVLSLLDLHASRTFPHTWKTVSRRRRQLAHRIPVSRKQIRRANYAAIQTLYHQRRKDAASAVLDGSWKDLYKGNCGLPMDAEQYWKQVLSAPKHADSRPSRMVVPSDWSLIEPITGEEVGRTIRLMGNSSPGLDKLTPKTLRRFNANVLAGYFNLFLLSGGCPPHLCRARITLVPKVPHPTSPDQLRPISVSSILVRCFHKVLADRWSRRLQLPSLQFAFLHRDGCLEATSLLHALLRHSSATASNLSLAFVDISKAFDSVSHDTIVRSAKAFGAPSPLVRYIAQSYENAVAVFPSSEVHCHRGVRQGDPLSPLLFIMAMDEVLGLSMPQLGYQFHDTLVDGFAFADDWVVCAESQARLKEKLEAAAVELGRAGMKINARKTKVMVICGDRKHRATAVSVEPFRFAEELITPLGPTDTVTYLGIPFTSKGKGVFNHRQHLLKLLEEVTRAPLKPHQRMDITRNYLIPRLTYSLVLGQVHRNTLKRLDNYIRQYIRGWLRLPKDTPISYIHAGKQHGGLGIPSLSATIPMQRKTRMEKLLSTQCRVLRNVVNDSAFGKIVRDLSLPIRVHGACVNTKEELVAAWGESLHNSADGRGLRELVTSPLSNRWLVFPERVFPRIFIRGIQLRCNLLRTRVRSARHGHGGQTILCRGNCGQPESLVHILQSCWITHDARCARHNRVARELAKRLRRLGYTVFEELRAPTSTSFIKPDLIAVRDRRATVIDVSIISDGRGVIVWNEKKQKYGADEHSLAIISALHAIGCDIDFLVHQPMIISYRGICFPQSAKAVIGLGLPKVAVSDLCLLAIVGSLRTYDTFMRGTWR

SEQ ID NO: 7708 - protein, 939 aa, Opisthorchis felineus
MVAQLACADCSRLFPTKIGLSQHRRHVHPTQHNADKLGRVKYSGARWSQQESQSLLRLANNLYPSCGTQTALFARLEQYFPGRSAISIKTRLRVLNWQAQQDESSSGGPDQTIGQITAYSSEADDYSVWFKQTVDCAVSLLESHADSSLASVDLLAFARGLQSGIMTPEQVLSLLDLHASRTFPHIWKTVSRRRRQLAHRMPVNRKQIRRANYAAIQTLYHQRRKDAASAVLDGSWKDLYKGNCGLPLNAEQYWKQVLSAPKHVDSRPSRVVVPSDWSLIEPITGEEVGRTIRLMGNSSPGLDKLTPRMLRRFNANALAGYFNLLLLSGGCPPHLCRARITLVPKVPNPTSPDQLRPISVSSILVRCFHKVLADRWSRRLQLLSLQFAFLQRDGCLEATSLLHALLRHSSATASNLSLAFVDISKAFDSVSHDTIVRSAKAFGAPSPLVRYIAQSYENVAAVFPNSEVHCHRGVRQGDPLSPLLFIMAMDEVLGLSTPQLGYQFHDTLVDGFAFADDWVVCAESQARLKEKLEAAAVELGRAGMKINARKTKAMVICGDRKHRATAVSVKPFCFAEELITPLGPTDTVTYLGIPFTFKGKGVFNHRQHLLKLLDEVTRAPLKPHQRMEITRNYLIPRLTYSLVLGQVHRNTLKRLDNYIRQSIRGWLRLPKDTPISYIHAGKQHGGLGIPSLSATIPMQRRARMEKLFSTQCRVLRNVVNDSAFGKIVRDLSLPIRVHGACVNTKEELVAAWGDSLHNSVDGRGLRELVASPLSNRCFVFPERVFPRIFIRGIQLRCNLLRTRVRNARHGHGGQTILCRGNCGQPESLVHILQSCWITHDARCARHNRVARELAKRLRRLGYTVFEELRAPTSTSFIKLDIIAFRERRATVIDVSMASDWRGVTVWNEKKQKYGAGEYSLAIISALRAIGCDVDFLVHN

SEQ ID NO: 7709 - protein, 991 aa, Opisthorchis felineus
MVAQLACADCSCLFRTKIGLSQHRRHAHPTQHNADNLGRVKYSGARWSQQESQSLLRLANNLYPSCGTQTALFARLEQYFPGRSAISIKTRLRVLNWQAQQDESSSGGPDQTIGQITAYSSEADDYSVWFKQTVDCAVSLLESHADSSLASVDLLAFARGLQSGIMTPEQVLSLLDLHASRTFPHIWKTVSRRRRQLAHRMPVNRKQIRRANYAAIQTLYHQRRKDAASAVLDGSWKDLYKGNCGLPLNAEQYWKQVLSAPKHVDSRPSRVVVPSDWSLIEPITGEEVGRTIRLMGNSSPGLDKLTPRMLRRFNANALAGYFNLLLLSGGCPPHLCRARITLVPKVPNPTSPDQLRPISVSSILVRCFHKVLADRWSRRLQLPSLQFAFLHRDGCLEATSLLHALLRHSSATASNLSLAFVDISKAFDSVSHDTIVRSAKAFGAPSPLVRYIAQSYENAVAVFPNSEVHCHRGVRQGDPLSPLLFIMAMDEVLGLSMPQLGYQFHDTLVDGFAFADDWVVCAESQARLKEKLEAAAVELGRAGMKINARKTKAMVICGDRKHRAIAVSVEPFCFAEELITPLGPTDTVTYLGIPFTFKGKGVFNHRQHLLKLLDEVTRAPLKPHQRMEITRNYLIPRLTYSLVLGQVHRNTLKRLDNYIRQSIRGWLRLPKDTPISYIHAGKQHGGLGIPSLSATIPMQRRARMEKLFSTQCRVLRNVVNDSAFGKIVRDLSLPIRVHGACVNTKEELVAAWGDSLHNSVDGRGLRELVASPFSNRCLVFPERVFPRIFIRGIQLRCNLLRTRVRSARHGHGGQTILCRGNCGQPESLVHILQSCWITHDARCARHNRVARELAKRLRRLGYTVFEELRAPTSTSFIKPDLIAVQERRATVIDVSIVSDGRGVTVWNEKKQKYGADEYSLAIISALRAIGCDVYFLVHQPMIISYRGICFPQSAKAVIGLGLPKVTVSDLCLLAIVGSLRTYDTFMRGTWR

SEQ ID NO: 7710 - protein, 918 aa, Clonorchis sinensis
MVAQLACADCSRLFPTKIGLSQHRRHAHPTQHNADKLSRVKHSGARWSQQESQSLLRLANNLYPSCETQTALFARLEQYFPGRSAISTKTRLRVLNWQAQQDESSSGGPDQTIGQIAAYSSEADDYSVWFKQTVDCAVSLLESHADSSLASVDLLAFARGLQSGIMTPEQVLSLLDLHASRTFPHTWKTVSRRRRQLAHRMPVNRKQIRRANYAAIQTLYHQRRKDAASAVLDGSWKDLYKGNCGLPPDAEQYWKQVLSAPKHVDSRPSRVVVPSDWSLIEPITGEEVGRTVRSMGNSSPGLDKLTPRMLRRFNANVLAGYFNLLLLAGGCPPHLCRARITLVPKVPNPTSPDQLRPISVSSILVRCFHKVLADRWSRRLQLPSLQFAFLHRDGCLEATSLLHALLRHSSATASNLSLAFVDISKAFDSVSHDTIVRSAEAFGAPSPLVRYIAQSYENAVAVFPSSEVHCHRGVRQGDPLSPLLFIMAMDEVLGLSMPQLGYQFHDTLVDGFAFADDWVVCAESQARLKEKLEAAAVELGRAGMKINARKTKAMVICGDRKHRATAVSVEPFCFAEELITPLGPTDTVTYLGIPFTFKGKGVFNHRQHLLKLLDEVTRAPLKPHQRMEITRNYLIPRLTYSLVLGQVHRNTLKRLDNYIRQSIRGWLRLPKDTPISYIHAGKQHGGLGIPSLSATIPMQRRVRMEKLLSTQCRVLRNVVNDSAFGKVVRDLSLPIRVHGSCVNTKEELVAAWGDSLHNSVDGRGLRELVASPLSNRWLVFPERVFPRIFIRGIQLRCNLLRTRVRSARHGHGGQTILCRGNCGQPESLVHILQSCWITHDARCARHNRVARELAKRLRRLGYTVFEELRAPTSTSFIKPDLIAVRERRATVIDVSIVSDGRGMTVWSEKKQKYGADEF

SEQ ID NO: 7711 - protein, 991 aa, Clonorchis sinensis
MVTQLACADCSRLFPKKIGLSQHRRHAHPTQHNADKLSRVKHSGARWSQQESQSLLRLANNLYPSCETQTALFARMEQYFPGRSAISTKTRLRVLNWQAQQDESSSGGPDQTIGQMATHSSEADDYSVWFKQTVDCAVSLLESHADSSLASVDLLAFARGLQSGIMTPEQVLSLLDLHASRTFPHTWKTVSRRRRQLAHRMPVNRKQIRRANYAAIQTLYHQRRKDAASAVLDGSWKDLYKGNCGLPPDAEQYWKQVLSAPKHVDSRPSRVIVPSDWSLIEPITGEEVGRTVRSMGNSSPGLDKLTPRMLRRFNANVLAGYFNLLLLAGGCPPHLCRARITLVPKVPNPTSPDQLRPISVSSILVRCFHKVLADRWSRRLQLPSLQFAFLHRDGCLEATSLLHALLRHSSATASNLSLAFVDISKAFDSVSHDTIVRSAEAFGAPSPLVRYIAQSYENAVAVFPSSEVHCHRGVRQGDPLSPLLFIMAMDEVLGLSMPQLGYQFHDTLVDGFAFADDWVVCAESQARLKEKLEAAAVELGRAGMKINARKTKAMVICGDRKHRATAVSVEPFCFAEELITPLGPTDTVTYLGIPFTFKGKGVFNHRQHLLKLLDEVTRAPLKPHQRMEITRNYLIPRLTYSLVLGQVHRNTLKRLDNYIRQSIRGWLRLPKDTPISYIHAGKQHGGLGIPSLSATIPMQRRVRMEKLLSTQCRVLRNVVNDSAFGKVVRDLSLPIRVHGSCVNTKEELVAAWGDSLHNSVDGRGLRELVASSLSNRWLVFPERVFPRIFIRGIQLRCNLLRTRVRSARHGHGGQTILCRGNCGQPESLVHILQSCWITHDARCARHNRVARELAKRLRRLGYTVFEELRAPTSTSFIKPDLIAVRERRATVIDVSIVSDGRGVTVWNEKKQKYGADEFSLAIISALRAIGCDVDFLVHQPMIISYRGICFPQSAKAVIGLGLSKVTVSDLCLLAIVGSLRTYDTFMRGTWR

SEQ ID NO: 7712 - protein, 826 aa, Opisthorchis viverrini
MTPEQVLSLLDLHASRTFPHTWKTVSRRRRQLAHRIPVNRKQIRRANYAAIQTLYHQRRKDAASAVLDGSWKDLSNGNCGLPTDAEKCWKQVLSAPKHADSRPSRIVVPSDWSLIESITGEEVGRTIRLMGNSSPGLDKLTPRTLRRFNASVLAGYFNLFLLSGGCPPHLCRVRITLVPKVPHPTSPDQLKRISVSSILVSCFHKVLADRWRRRLQLPSLQFAFLHRDGCLEATSLLHALLRHSSATASNLSLAFVDISKAFDSVSHDTIVRSAKAFGAPSPLVRYIAQSYENAVAVFPSSEVHCHRGVRQGDPLSPLLFIMTMDEVLGLSMPQLGYQFHDTLVDGFAFADDWVVCAESQARLKEKLEAAAVELGRAGMKINARKTKVMVICGDRKHRATAVSVEPFRFAEELITPLGPTDTVTYLGIPFTSKGKGVFNHRQHLLKLLEEVTRAPLKPHQRMDITRNYLIPRLTYSLVLGQVHRNTLKRLDNYIRQYIRGWLRLPKDTPISYIHAGKQHGGLGIPSLSATIPMQRKTRMEKLLSTQCRVLRNVVNDSAFGKIVRDLSLPIRVHGACVNTKEELVAAWGESLHNSADGRGLRELVTSPLSNRWLVFPERVFPRIFIRGIQLRCNLLRTRVRSARHGHGGQTILCRGNCGQPESLVHILQSCWITHDARCARHNRVARELAKRLRRLGYTVFEELRTPTSTSFIKPDLIAVRDRRATVIDVSIVSDGRGEIVWNEKKQKYGADEHSLAIISALHAIGCDIDFLVQQPVIISYRGICFSESAKAVIGLGLPKVAVSDLCLLAIVGSLRTYDTFMRGTWR

SEQ ID NO: 7713 - protein, 786 aa, Opisthorchis felineus
MTPEQVLSLLDLHASRTFPHIWKTVSRRRRQLAHRIPVNRKQIRRANYAAIQTLYHQRPKNAASAVLDGSWKDLYKGNCGLPLNAEQYWKQVLSAPKHVDSRPSRVVVPSDWSLIEPITGEEVGRTIRLMGNSSPGLDKHTPRMLRRFNANALAGYFNLLLLSGGCPPHLCRARITLVSKVPNPTSPDQLRPISVSSILVRCFHKVLADRWSRRLQLPSLKFAFLHRDGCLEATSLLHALLRHSSATASNLSLAFVDISKAFDSVSHDTIVRSAKAFGAPSPLVRYIAQSYENAVAVFPNSEVHCHRGVRQGDPLSPLLFIMAMDEVLGLSMPQLGYQFHDTLVDGFAFADDWVVCAESQARLKEKLEAAAVELGRAGMKINARKTKAMVICGDRKHRATAVSVEPFCFAEELITPLGPTDTVTYLGIPFTFKGKGVFNHRQHLLKLLDEVTRAPLKPHQRMEITRNYLIPRLTYSLVLGQVHRNTLKRLDNYIRQSIRGWLRLPKDTPISYIHAGKQHGGLGIPSLSATIPMQRRARMEKLFSTQCRVLRNVINDSAFGKILRDLSLPIRVHGACVNTKEELVAAWGDSLHNSVDGRGLRELVASPLSNRWLVFPERVFPRIFIRGIQLRCNLLRTRVRSARHGHGGQTILCRGNCGQPESLVHILQSCWITRDARCARHNRVARELAKRLRRLGYTVFEELRAPTSTSFIKPDLIAVRERRATVIDVSIVSGGRGLTVWNEEKQKYGADEYSLAIISALRAIGCDVDFFVHQPIIISYRGICFP

SEQ ID NO: 7714 - protein, 991 aa, Opisthorchis felineus
MVAQLACAACSCLFPTKIGLSQHRRHAHSTQHNADKLGRVEYSGARWSQQESQTLLHLANNLYPSCGTLTALFARLEQYFPDRSAISIKTRLRVLNWQAQQDESSSGGPDQTIGQITAYSSEADDYSVWFKQTVDCAVSLLESHADSSLASVDLLAFARGLQSGIMTPEQVLSLLDLHASRTFPHIWKTVSRRRRQLAHRIPVNRKQIRRANYAAIQTLYHQRRKDAASAVLDGSWKDLYKGNCGLPLDAEQYWKQVLSAPKHVDSRPSRVVVPSDWSLIEPITGEEVGRTIRLMGNSSPGLDKLTPRMLRRFNANALAGYFNLLLLSGGCPPHLCRARITLVPKVPNPTSPDQLRPISVSSILVRCFHKVLADRWSRRLQLPSLKFAFQHRDGCLEATSLLHDLLRHSSATASNLSLAFVDISKAFDSVSHDTIVRSAKAFGAPSPLVRYIAQSYENAVAVFPNSEVHCHRGVRQGDPLSPLLFIMAMDEVLGLSMPQLAYQFHDTLVDGFAFADDWVVCAESQARLKEKLEAAAVELGRAGMKINARKTKAMVICGDRKHRATAVSVEPFCFAEELITPLGPTDTVTYLGIPFTFKGKGVFSHRQHLLKLLDEVTRAPLKPHQRMEITRNYLIPRLTYSLVLGQVHRNTLKRLDNYIRQSIRGWLRLPKDTPISYIHAGKQHGGLGIPSLSATIPMQRRARMEKLFSTQCRVLRNVVNDSAFGKIVRDLSLPIRVHGACVNTKKELMAAWGDSLHKSVDGRGLGELVASPLSNRWLVFPERVFPWMFIRGIQLRYNLLRTRVRSARHGHGGQTILCRGNCGQPESLVHILQSYWITHDAKCACHNRVARKLAKHLRRLGYTVFEELRATTSTSFIELGLITVLERRATVIDVSIVSDGRGLIVWNEKKQKYGADEYPLAIISALRAIVCDVDFLVHQPMIISYRGICFPQSSKAVIRLGLPKVTVSDLCLLAIVGSLRSYDTFMRGTWR

SEQ ID NO: 7715 - protein, 990 aa, Clonorchis sinensis
MVAQLACADCSHLFPTKIGLSQHRRHAHPTQHNADKLSRVKHSGARWSQQESQSLLRLANNLYPSCETQTALFARMEQYFPGRSAISTKTRLRVLNWQAQQDESSSGGPDQTIGQIAAYSSEADDYSVWFKQTVDCAMSLLESHADSSLASVDLLAFARGLQSGIMTPEQVLSLLDLHASRTFPHTWKTVSRRRQLVYRMPVNRKQIRRANYAAIQTLYHQRRKDAASAVLDGSWKDLYKGNCGLPPDAEQYWKQVLSAPKHVDSRPSRVIVPSDWSLIEPITGEEVGRTVRSMGNSSPGLDKLTPRMLRRFNANVLAGYFNLLLLAGGCPPHLCRARITLVPKVPNPTSPDQLRPISVSSILVRCFHKVLADRWSRRLQLPSLQFAFLHRDGCLEATSLLHALLRHSSATASNLSLAFVDISKAFDSVSHDTIVRSAEAFGAPSPLVRYIAQSYENAVAVFPSSEVHCHRGVRQGDPLSPLLFIMAMDEVLGLSMPQLGYQFHDTLVDGFAFADDWVVCAESQARLKEKLEAAAVELGRAGMKINARKTKAMVICGDRKHRATAVSVEPFCFAEELITPLGPTDTVTYLGIPFTFKGKGVFNHRQHLLKLLDEVTRAPLKPHQRMEITRNYLIPRLTYSLVLGQVHRNTLKRLDNYIRQSIRGWLRLPKDTPISYIHAGKQHGGLGIPSLSATIPMQRRVRMEKLLSTQCRVLRNVVNDSAFGKVVRDLSLPIRVHGSCVNTKEELVAAWGDSLHNSVDGRGLRELVASSLSNRWLVFPERVFPRIFIRGIQLRCNLLRTRVRSARHGHGGQTILCRGNCGQPESLVHILQSCWITHDARCARHNRVARELAKRLRRLGYTVFEELRAPTSTSFIKPDLIAVRERRATVIDVSIVSDGRGVTVWNEKKQKYGADEFSLAIISALRAIGCDVDFLVHQPMIISYRGICFPQSAKAVIGLGLSKVTVSDLCLLAIVGSLRTYDTFMRGTWR

SEQ ID NO: 7716 - protein, 991 aa, Clonorchis sinensis
MVAQLACADCSRLFPTKIGLSQHRRHAHPTQHNADKLSRVKHSGARWSQQESQSLLRLANNLYPSCETQTALFARLEQYFPGRSAISIKTRLRVLNWQAQQDESSSGGPDQTIGQIAAYSSEADDYSVWFKQTVDCAVSLLESHADSSLASVDLLAFARGLQSGIMTPEQVLSLLDLHASRTFPHTWKTVSRRRRQLAHRMPVNRKQIRRANYAAIQTLYHQRWKDAASAVLDGSWKDLYKGNCGLPPDAEQYWKQVLSAPKHVDSRPSRVVVPSDWSLIEPITGEEVGRTVRSMGNSSPGLDKLTPRMLRRFNANVLAGYFNLLLLSGGCPPHLCRARITLVPKVPNPTSPDQLRPISVSSILVRCFHKVLADRWSRRLQLPSLQFAFLHRDGCLEATSLLHALLRHSSATASNLSLAFVDISKAFDSVSHDTIVRSAEAFGAPSPLVRYIAQSYENAVAVFPSSEVHCHRGVRQGDPLSPLLFIMAMDEVLGLSMPQLGYQFHDTLVDGFAFADDWVVCAESQARLKEKLEAAAVELGRAGMKINARKTKAMVICGDRKHRATAVSVEPFCFAEELITPLGPTDTVTYLGIPFTFKGKGVFNHRQHLLKLFDEVTRAPLKPHQRMEITRNYLIPRLTYSLVLGQVHRNTLKRLDNYIRQSIRGWLRLPKDTPISYIHAGKQHGGLGIPSLSATIPMQRRVRMEKLLSTQCRVLRNVVNDSAFGKVVRDLSLPIRVHGSCVNTKEELVAAWGDSLHNSVDGRGLRELVASPLSNRWLVFPERVFPRIFIRGIQLRCNLLRTRVRSARHGHGGQTILCRGNCGQPESLVHILQSCWITHDARCARHNRVARELAKRLRRLGYTVFEELRAPTSTSFIKPDLIAVRERRATVIDVSIVSDGRGVTVWNEKKQKYGVDEFSLAIISALRAIGCDVDFLVHQPMIISYRGICFPQSAKAVIGLGLSKVTVSDLCLLAIVGSLRTYDTFMRDTWP

SEQ ID NO: 7717 - protein, 1008 aa, Clonorchis sinensis
MGLVAHHRVHDNDSVGTNMVAQLACADCSRLFPTKIGLSQHRRHAHPTQHNADKLSRVKHSGARWSQQESQSLLRLANNLYPSCETQTALFARLEQYFPGRSAISTKTRLRVLNWQAQQDESSSGGPDQTIGQMATHSSEADDYSVWFKQTVDCAVSLLESHADSSLASVDLLAFARGLQTGIMTPEQVLSLLDLHASRTFPHTWKTVSRRRQLVYRMPVNRKQIRRANYAAIQTLYHQRRKDAASAVLDGSWKDLYKGNCGLPPDAEQYWKQVLSAPKHVDSRPSRVIVPSDWSLIEPITGEEVGRTVRSMGNSSPGLDKLTPRMLRRFNANVLAGYFNLLLLAGGCPPHLCRARITLVPKVPNPTSPDQLRPISVSSILVRCFHKVLADRWSRRLQLPSLQFAFLHRDGCLEATSLLHALLRHSSATASNLSLAFVDISKAFDSVSHDTIVRSAEAFGAPSPLVRYIAQSYENAVAVFPSSEVHCHRGVRQGDPLSPLLFIMAMDEVLGLSMPQLGYQFHDTLVDGFAFADDWVVCAESQARLKEKLEAAAVELGRAGMKINARKTKAMVICGDRKHRATAVSVEPFCFAEELITPLGPTDTVTYLGIPFTFKGKGVFNHRQHLLKLLDEVTRAPLKPHQRMEITRNYLIPRLTYSLVLGQVHRNTLKRLDNYIRQSIRGWLRLPKDTPISYIHAGKQHGGLGIPSLSATIPMQRRVRMEKLLSTQCRVLRNVVNDSAFGKVVRDLSLPIRVHGSCVNTKEELVAAWGDSLHNSVDGRGLRELVASSLSNRWLVFPERVFPRIFIRGIQLRCNLLRTRVRSARHGHGGQTILCRGNCGQPESLVHILQSCWITHDARCARHNRVARELAKRLRRLGYTVFEELRAPTSTSFIKPDLIAVRERRATVIDVSIVSDGRGVTVWNEKKQKYGADEFSLAIISALRAIGCDVDFLVHQPMIISYRGICFPQSAKAVIGLGLSKVTVSDLCLLAIVGSLRTYDTFMRGTWR

SEQ ID NO: 7718 - protein, 1107 aa, Clonorchis sinensis
MIAKPTILSSLETLFYGLLGGCKLIRIHIHLGSLDASLGELRVQQLQTGLTTLFGFNVLVTFDNVHYKTSGASAPVPTSTQERLVGLTCEECGKWCKSKAGLVAHHRVHDNDSVGTNMVAQLACADCSHLFPTKIGLSQHRRHAHPTQHNADKLSRVKHSGARWSQQESQSLLRLANNLYPSCETQTALFARLEQYFPGRSAISIKTRLQVLNWQAQQDESSSGGPDQTIGQIAAYSSEADDYSVWFKQTVDCAVSLLESHADSSLASVDLLAFARGLQSGIMTPEQVLSLLDLHASRTFPHTWKTVSRRRQLVYRMPVNRKQIRRANYAAIQTLYHQRRKDAASAVLDGSWKDLYKGNCGLPPDAEQYWKQVLSAPKHVDSRPSRVIVPSDWSLIEPITGEEVGRTVRSMGNSSPGLDKLTPRMLRRFNANVLAGYFNLLLLAGGCPPHLCRARITLVPKVPNPTSPDQLRPISVSSILVRCFHKVLADRWSRRLQLPSLQFAFLHRDGCLEATSLLHALLRHSSATASNLSLAFVDISKAFDSVSHDTIVRSAEAFGAPSPLVRYIAQSYENAVAVFPSSEVHCHRGVRQGDPLSPLLFIMAMDEVLGLSMPQLGYQFHDTLVDGFAFADDWVVCAESQARLKEKLEAAAVELGRAGMKINARKTKAMVICGDRKHRATAVSVEPFCFAEELITPLGPTDTVTYLGIPFTFKGKGVFNHRQHLLKLLDEVTRAPLKPHQRMEITRNYLIPRLTYSLVLGQVHRNTLKRLDNYIRQSIRGWLRLPKDTPISYIHAGKQHGGLGIPSLSATIPMQRRVRMEKLLSTQCRVLRNVVNDSAFGKVVRDLSLPIRVHGSCVNTKEELVAAWGDSLHNSVDGRGLRELVASSLSNRWLVFPERVFPRIFIRGIQLRCNLLRTRVRSARHGHGGQTILCRGNCGQPESLVHILQSCWITHDARCARHNRVARELAKRLRRLGYTVFEELRAPTSTSFIKPDLIAVRERRATVIDVSIVSDGRGVTVWNEKKQKYGVDEFSLAIISALRAIGCDVDFLVHQPMIISYRGICFPQSAKAVIGLGLSKVTVSDLCLLAIVGSLRTYDTFMRDTWP

SEQ ID NO: 7719 - protein, 826 aa, Opisthorchis viverrini
MTPEQALSLLDLHASRTFPHNWKTVSRRRRQLAHRIPVSRKQIRRANYAAIQTLYHQRRKDAASAVLDGSWKDLYKGNCGLPMDAEQYWKQVLSAPKHADSRPSRMVVPSDWSLIEPITGEEVGRTIRLMGNSSPGLDKLTPKTLRRFNANVLAGYFNLFLLSGGCPPHLCRARITLVPKVPHPTSPDQLRPISVSSILVRCFHKVLADRWSRRLQLPSLQFAFLHRDGCLEATSLLHALLRHSSATASNLSLAFVDISKAFDSVSHDTIVRSAKAFGAPSPLVRYIAQSYENAVAVFPSSEVHCHRGVRQGDPLSPLLFIMAMDEVLGLSMPQLGYQFHDTLVDGFAFADDWVVCAESQARLKEKLEAAAVELGRAGMKINARKTKVMVICGDRKHRATAVSVEPFRFAEELITPLGPTDTVTYLGIPFTSKGKGVFNHRQHLLKLLEEVTRAPLKPHQRMDITRNYLIPRLTYSLVLGQVHRNTLKRLDNYIRQYIRGWLRLPKDTPISYIHAGKQHGGLGIPSLSATIPMQRKTRMEKLLSTQCRVLRNVVNDSAFGKIVRDLSLPIRVHGACVNTKEELVAAWGESLHNSADGRGLRELVTSPLSNRWLVFPERVFPRIFIRGIQLRCNLLRTRVRSARHGHGGQTILCRGNCGQPESLVHILQSCWITHDARCARHNRVARELAKRLRRLGYTVFEELRTPTSTSFIKPDLIAVRDRRATVIDVSIVSDGRGEIVWNEKKQKYGADEHSLAIISALHAIGCDIDFLVHQPVIISYRGICFPQSAKAVIGLGLPKVAVSDLCLLAIVGSLRTYDTFMRGTWR

SEQ ID NO: 7720 - protein, 1051 aa, Opisthorchis felineus
MLVTFDNVHYESSGASTPVPTSTQERLVGLTCEECGKCCKSKAGLVAHHRVHNNESVGTNMVAQLACADFSRLFPTKIGLSQHRRHVHPTQHNADKLGRVKYSGARWSQQESQSLLRLANNLYPSCGTQTALFARLEQYFPGRSAISIKTRLRVLNWQAQQDESPSGGPDQTIGQITAYSSEADDYSVWFKQTVDCAVSLLESHADSSLASVDLLAFARGLQSGIMTPEQVLSLLDLHASRTFSHIRKTVSRRRRQLAHRIPVNRKQIRRANYAAIQTLYHQRRKDAASAVLDGLWKDLYKGNCGLPLNAEQYWKQVLSAPKHVDSRPSRVVVPSDWSLIEPITGEEVGRTIRLMGNSSPGLDKLTPRMLRRFNANALAGYFNLLLLSGGCPPHLCRARITLVPKVPNPTSPDQLRPISVSSILVRCFHKVLADRWSRRLQLPSVQFAFLHRDGCLEATSLLHALLRHSSATASNLSLAFVDISKAFDSVSHDTIVRSAKAFGAPSPLVRYIAQSYENAVAVFPNSEVHCHRGVRQGDPLSPLLFIMAMDEVLGLSMPQLGYQFHDTLVDGFAFADDWVVCAESQACLKEKLEAAAVELGRAGMKINARKTKAMVICGDRKHRATAVSVEPFCFAEELITPLGPTDTVTYLGIPFTFKGKGVFNHRQHLLKLLDEVTRAPLKPHQRMEITRNYLIPRLTYSLVLGQVHRNTLKRLDNYIRQSIRGWLRLPKDTPISYIHAGKQHGGLGIPSLSATIPMQRRARMEKLFSTQCRVLRNVVNDSAFGKIVRDLSLPIRVHGACVNTKEELVAAWGDSLHNSVDGRGLRELVASPLSNRWLVFPERVFPRIFIRGIQLRCNLLRTRVRSARHGHGGQTILCRGNCGQPESLVHILQSCWITHDARCARHNRVASELAKRLRRLGYTVFEELRAPTSTSFIKPDLIAVRERRATVIDVSIVSDGRGVTVWNEKKQKYGADEYSLAIISALRAIGCDVDFLVHQPMIISYRGICFPQSAKAVIGLGLPKFTVSDLCLLAIVGSLRTYDTFMRGTWR

SEQ ID NO: 7721 - protein, 980 aa, Opisthorchis felineus
MVAQLACADCSRLFPTKIGLSQHRRHVHPTQHNADKLGRVKYSGARWSQQESQSLLRLANNLYPSCGTQTALFARLEQYFPGRSAISIKTRLRVLNWQAQQDESPSGGPDQTIGQITAYSSEADDYSVWFKQTVDYAVSLLESHADSSLASVDLLAFARGLQSGIMTPEQVLSLLDLHASRTFSHTWKTVSRRRRQLAHRMPVNRKQIRRANYAAIQTLYHQRPKNAASAVLDGSWKDLYKGNCGLPLDAEQYWKQVLSAPKHVDSRPSRVVVPSDWSLIEPITGEEVGRTIRLMGNSSPGLDKHTPRMLRRFNANALAGYFNLLLLSGGCPPHLCRARITLVPKVPNPTSPDQLRPISVSSILVRCFHKVLADRWSRRLQLPSLQFAFLHRDGCLEATSLLHALLRHSSATASNLSLAFVDISKAFDSVSHDTIVRSAKAFGAPSPLVRYIAQSYENAVAVFPNSEVHCHRGVRQGDPLSPLLFIMAMDEVLGLSMPQLGYQFQDTLVDGFAFADDWVVCAESQARLKEKLEAAAVELGRAGMKINARKTKAMVICGDRKHRATAVSVEPFCFAEELITPLGPTDTVTYLGIPFTFKGKGVFNHRQHLLKLLDEVTRAPLKPHQRMEITRNYLIPRLTYSLVLGQVHRNTLKRLDNYIRQSIRGWLRLPKDTPISYIHAGKQHGGLGIPSLSATIPMQRRARMEKLFSTQCRVLRNVVNDSAFGKIVRDLSLPIRVHGACVNTKEELVAAWGDSLHNSVDGRGLRELVASPLSNRWLVFPERVFPRIFIRGIQLRCNLLRTRVRSARHGHGGQTILCRGNCGQPESLVHILQSCWITHDARCARHNRVARELAKRLRHLGYTVFEELRAPTSTSFIKPDPIAVRERRATVIDVSIVSDGRGVTVWNEKKQKYGADEYSLAIISALRAIGRNVDFLVHQPMIISYRGICFPQSAKAVIGLDLPKVTVSGADGQLVRSVSI

SEQ ID NO: 7722 - protein, 991 aa, Clonorchis sinensis
MVAQLACADCSRLFPTKIGLSQHRRHAHPTQHNADKLSRVKHSGARWSQQESQSLLRLANNLYPSCETQTALFARLEQYFPGRSAISIKTRLQVLNWQAQQDESSSGGPDQTIGQIAAYSSEADDYSVWFKQTVDCAVSLLESHADSSLASVDLLAFARGLQSGIMTPEQVLSLLDLHASRTFPHTWKTVSRRRRQLAHRMPVNRKQIRRANYAAIQTLYHQRRKDAASAVLDGSWKDLYKGNCGLPPDAEQYWKQVLSAPKHVDSRPSRVVVPSDWSLIEPITGEEVGRTVRSMGNSSPGLDKLTPRMLRRFNANVLAGYFNLLLLAGGCPPHLCRARITLVPKVPNPTSPDQLRPISVSSILVRCFHKVLADRWSRRLQLPSLQFAFLHRDGCLEATSLLHALLRHSSATASNLSLAFVDISKAFDSVSHDTIVRSAEAFGAPSPLVRYIAQSYENAVAVFPSSEVHCHRGVRQGDPLSPLLFIMAMDEVLGLSMPQLGYQFHDTLVDGFAFADDWVVCAESQARLKEKLEAAAVELGRAGMKINARKTKAMVICGDRKHRATAVSVEPFCFAEELITPLGPTDTVTYLGIPFTFKGKGVFNHRQHLLKLLDEVTRAPLKPHQRMEITRNYLIPRLTYSLVLGQVHRNTLKRLDNYIRQSIRGWLRLPKDTPISYIHAGKQHGGLGIPSLSATIPMQRRVRMEKLLSTQCRVLRNVVNDSAFGKVVRDLSLPIRVHGSCVNTKEELVAAWGDSLHNSVDGRGLRELVASPLSNRWLVFPERVFPRIFIRGIQLRCNLLRTRVRSARHGHGGQTILCRGNCGQPESLVHILQSCWITHDARCARHNRVARELAKRLRRLGYTVFEELRAPTSTSFIKPDLIAVRERRATVIDVSIVSDGRGVTVWNEKKQKYGADEFSLAIISALRAIGCDVDFLVHQPMIISYRGICFPQSAKAVIGLGLSKVTVSDLCLLAIVGSLRTYDTFMRGTWR

SEQ ID NO: 7723 - protein, 1078 aa, Clonorchis sinensis
MGSLDASLGELRVQQLQTGLTTLFGFNVLVTFDNVHYKTSGASAPVPTSTQERFVGLTCEECGKWCKSKAGLVAHHRVHDNDSVGTNMVAQLACADCSRLFPTKIGLSQHRRHAHPTQHNADKLSRVKHSGARWSQQESQSLLRLANNLYPSCETQTALFARLEQYFPGRSAISIKTRLRVLNWQAQQDESSSGGPDQTIGQIAAYSSEADDYSVWFKQTVDCAVSLLESHADSSLASVDLLAFARGLQSGIMTPEQVLSLLDLHASRTFPHTWKTVSRRRRQLAHRMPVNRKQIRRANYAAIQTLYHQRWKDAASAVLDGSWKDLYKGNCGLPPDAEQYWKQVLSAPKHVDSRPSRVVVPSDWSLIEPITGEEVGRTVRSMGNSSPGLDKLTPRMLRRFNANVLAGYFNLLLLSGGCPPHLCRARITLVPKVPNPTSPDQLRPISVSSILVRCFHKVLADRWSRRLQLPSLQFAFLHRDGCLEATSLLHALLRHSSATASNLSLAFVDISKAFDSVSHDTIVRSAEAFGAPSPLVRYIAQSYENAVAVFPSSEVHCHRGVRQGDPLSPLLFIMAMDEVLGLSMPQLGYQFHDTLVDGFAFADDWVVCAESQARLKEKLEAAAVELGRAGMKINARKTKAMVICGDRKHRATAVSVEPFCFAEELITPLGPTDTVTYLGIPFTFKGKGVFNHRQHLLKLFDEVTRAPLKPHQRMEITRNYLIPRLTYSLVLGQVHRNTLKRLDNYIRQSIRGWLRLPKDTPISYIHAGKQHGGLGIPSLSATIPMQRRVRMEKLLSTQCRVLRNVVNDSAFGKVVRDLSLPIRVHGSCVNTKEELVAAWGDSLHNSVDGRGLRELVASPLSNRWLVFPERVFPRIFIRGIQLRCNLLRTRVRSARHGHGGQTILCRGNCGQPESLVHILQSCWITHDARCARHNRVARELAKRLRRLGYTVFEELRAPTSTSFIKPDLIAVRERRATVIDVSIVSDGRGVTVWNEKKQKYGVDEFSLAIISALRAIGCDVDFLVHQPMIISYRGICFPQSAKAVIGLGLSKVTVSDLCLLAIVGSLRTYDTFMRDTWP

SEQ ID NO: 7724 - protein, 990 aa, Clonorchis sinensis
MVAQLACADCSRLFPTKIGLSQHRRHAHPTQHNADKLSRVKHSGARWSQQESQSLLRLAKNLYPSGDTQTALFARMEQYFPGRSAISIKTRLRVLNWQAQQDESSSGGPDQTIGQIAAYSSEADDYSVWFKQTVDCAVSLLESHADSSLASVDLLAFARGLQSGIMTPEQVLSLLDLHASRTFPHTWKTVSRRRQLVYRMPVNRKQIRRANYTAIQTLYHQRRKDAASAVLDGSWKDLYKGNCGLPPDAEQYWKQVLSAPKHVDSRPSRVIVPSDWSLIEPITGEEVGRTVRSMGNSSPGLDKLTPRMLRRFNANVLAGYFNLLLLAGGCPPHLCRARITLVPKVPNPTSPDQLRPISVSSILVRCFHKVLADRWSRRLQLPSLQFAFLHRDGCLEATSLLHALLRHSSATASNLSLAFVDISKAFDSVSHDTIVRSAEAFGAPSPLVRYIAQSYENAVAVFPSSEVHCHRGVRQGDPLSPLLFIMAMDEVLGLSMPQLGYQFHDTLVDGFAFADDWVVCAESQARLKEKLEAAAVELGRAGMKINARKTKAMVICGDRKHRATAVSVEPFCFAEELITPLGPTDTVTYLGIPFTFKGKGVFNHRQHLLKLLDEVTRAPLKPHQRMEITRNYLIPRLTYSLVLGQVHRNTLKRLDNYIRQSIRGWLRLPKDTPISYIHAGKQHGGLGIPSLSATIPMQRRVRMEKLLSTQCRVLRNVVNDSAFGKVVRDLSLPIRVHGSCVNTKEELVAAWGDSLHNSVDGRGLRELVASSLSNRWLVFPERVFPRIFIRGIQLRCNLLRTRVRSARHGHGGQTILCRGNCGQPESLVHILQSCWITHDARCARHNRVARELAKRLRRLGYTVFEELRAPTSTSFIKPDLIAVRERRATVIDVSIVSDGRGVTVWNEKKQKYGADEFSLAIISALRAIGCDVDFLVHQPMIISYRGICFPQSAKAVIGLGLSKVTVSDLCLLAIVGSLRTYDTFMRGTWR

SEQ ID NO: 7725 - protein, 826 aa, Opisthorchis viverrini
MTPEQVLSLLDLHASRTFPHTWKTVSRRRRQLAHRIPVSRKQIRRANYAAIQTLYHQRRKDAASAVLDGSWKDLYKGNCGLPMDAEQYWKQVLSAPKHADSRPSRMVVPSDWSLIEPITGEEVGRTIRLMGNSSPGLDKLTPRTLRRFNANVLAGYFNLFLLSGGCPPHLCRARITLVPKVPHPTSPDQLRPISVSSILVRCFHKVLADRWSRRLQLPSLQFAFLHRDGCLEATSLLHALLRHSSATASNLSLAFVDISKAFDSVSHDTIVRSAKAFGAPSPLVRYIAQSYENAVAVFPSSEVHCHRGVRQGDPLSPLLFIMAMDEVLGLSMPQLGYQFHDTLVDGFAFADDWVVCAESQARLKEKLEAAAVELGRAGMKINARKTKVMVICGDRKHRATAVSVEPFRFAEELITPLGPTDTVTYLGIPFTSKGKGVFNHRQHLLKLLEEVTRAPLKPHQRMDITRNYLIPRLTYSLVLGQVHRNTLKRLDNYIRQYIRGWLRLPKDTPISYIHAGKQHGGLGIPSLSATIPMQRKTRMEKLLSTQCRVLRNVVNDSAFGKIVRDLSLPIRVHGACVNTKEELVAAWGESLHNSADGRGLRELVTSPLSNRWLVFPERVFPRIFIRGIQLRCNLLRTRVRSARHGHGGQTILCRGNCGQPESLVHILQSCWITHDARCARHNRVARELAKRLRRLGYTVFEELRTPTSTSFIKPDLIAVRDRRATVIDVSIVSDGRGEIVWNEKKQKYGADEHSLAIISALHAIGCDIDFLVHQPMIISIRGICFPQSAKAVIGLGLPKVAVSDLCLLAIVGSLRTYDTFMRGTWS

SEQ ID NO: 7726 - protein, 991 aa, Opisthorchis felineus
MVAQLACADCSRLFPTKIGLSQHRRHVHPTQHNADKLGRVKYSGARWSQQESQSLLRLANNLYPSCGTQTALFARLEQYFPGRSAISIKTRLRVLNWQAQQDESPSGGPDQTIGQITAYSSEADDYSVWFKQTVDCAVSLLESHADSSLASVDLLAFARGLQSGIMTPEQVLSLLDLHASRTFSHTWKTVSRRRRQLAHRMPVNRKQIRRANYAAIQTLYHQRRKDAASAVLDGSWKDLYKGNCGLPLNAEQYWKQVLSAPKHVDSRPSRVVVPSDWSLIEPITGEEVGRTIRLMGNSSPGLDKLTPRMLRRFNANALAGYFNLLLLSGGCPPHLCRARITLVPKVPNPTSPDQLRPISVSSILVRCFHKVLADRWSRRLQLPSVQFAFLHRDGCLEATSLLHALLRHSSATASNLSLAFVDISKAFDSVSHDTIVRSAKAFGAPSPLVRYIAQSYENAVAVFPNSEVHCHRGVRQGDPLSPLLFIMAMDEVLGLSMPQLGYQFHDTLVDGFAFADDWVVCAESQARLKEKLEAAAVELGRAGMKINARKTKAMVICGDRKHRATAVSVEPFCFAEELITPLGPTDTVTYLGIPFTFKGKGVFNHRQHLLKLLDEVTRAPLKPHQRMEITRNYLIPRLTYSLVLGQVHRNTLKRLDNYIRQSIRGWLRLPKDTPISYIHAGKQHGGLGIPSLSATIPMQRRARMEKLLSTQCRVLRNVVNDSAFGKIVRDLSLPIRVHGACVNTKEELVAAWGDSLHNSVDGRGLRELVASPLSNRWLVFPERVFPRIFIRGIQLRCNLLRTRVRSARHGHGGQTILCRGNCGQPESLVHILQSCWITHDARCARHNRVARELAKRLRRLGYTVFEELRAPTSTSFIKPDLIAVRERRATVIDVSIVSDGRGVTVWNEKKQKYGADEYSLAIISALRAIGCDVDFLVHQPMIISYRGICFPQSAKAVIGLGLPKFTVSDLCLLAIVGSLRTYDTFMRGTWR

SEQ ID NO: 7727 - protein, 905 aa, Opisthorchis felineus
MVDQLACADCFLLFPTKIGLSQHRRHAHPTQHNADKLGRVKYSGARWSQQESQSLLRLANNLYLSCGTQTALFARLEQYFPGRSAISIKTRLRVLNWQAQQDESSSGGPDQTIGQITAYSSEADDYSVWFKQTVDCAVSLLESHADSSLASVDLLAFARGLQSGIMTPEQVLSLLDLHASRTFPHIWKTVSRRRRQLAHRIPVNRKQIRRANYAAIQTLYHQRRKDAASAVLDGSWKDLYKGNCGLPLNAEQYWKQVLSAPKHVDSRPSRVVVPSDWSLIEPITGEEVGRTIRLMGNSSPGLDKHTPRMLRRFNANALAGYFNLLLLSGGCPPHLCRARITLVSKVPNPTSPDQLRPISVSSILVRCFHKVLADRWSCRLQLPSLQFAFLHRDGCLEATSLLHVLLRHSSATASNLSLAFVDISKAFDSVSHDTIVRSAKAFGAPSPLVRYIAQSYENAVAVFPNSEVHCHRGVRQGDPLSPLLFIMAMDEVLGLSMSQLGYQFHDTLVDGFAFADDWVVCAESQARLKEKLEAAAVELGRAGMKINARKTKAMVICGDRKHRATAVSVEPFCFAEELITPLGPTDTVTYLGIPFTFKGKGVFSHRQHLLKLLDEVTRAPLKPHQRMEITRNYLIPRLTYSLVLGQVHRNTIKRLDNYIRQSIRGWLRLPKDTPISYIHAGKQHGGLGIPSLSATIPMQRRARMEKLFSTQCRVLRNVVNDSAFGKIVRDLSLPIRVHGACVNTKEELVAAWGDSLHNSVDGRGLRELVASPLSNRWLVFPERVFPRIFIRGIQLRCNLLRTRVRSARHGHGGQTILCRGNCGQPESLVHILQSCWIMHDARCARHNRVARELAKRLRRLGYTVFEELRAPTSTSFIKPYLIAVRERRTTAIDVSIVSDGRGVTV

SEQ ID NO: 7728 - protein, 991 aa, Clonorchis sinensis
MVAQLACADCSRLFPTKIGLSQHRRHAHPTQHNADKLSRVKHSGARWSQQESQSLLRLANNLYPSCETQTALFARLEQYFPGRSAISIKTRLRVLNWQAQQDESSSGGPDQTIGQIAAYSSEADDYSVWFKQTVDCAVSLLESHADSSLASVDLLAFARGLQSGIMTPEQVLSLLDLHASRTFPHTWKTVSRRRRQLAHRMPVNRKQIRRANYAAIQTLYHQRWKDAASAVLDGSWKDLYKGNCGLPPDAEQYWKQVLSAPKHVDSRPSRVVVPSDWSLIEPITGEEVGRTVRSMGNSSPGLDKLTPRMLRRFNANVLAGYFNLLLLSGGCPPHLCRARITLVPKVPNPTSPDQLRPISVSSILVRCFHKVLADRWSRRLQLPSLQFAFLHRDGCLEATSLLHALLRHSSATASNLSLAFVDISKAFDSVSHDTIVRSAEAFGAPSPLVRYIAQSYENAVAVFPSSEVHCHRGVRQGDPLSPLLFIMAMDEVLGLSMPQLGYQFHDTLVDGFAFADDWVVCAESQARLKEKLEAAAVELGRAGMKINARKTKAMVICGDRKHRATAVSVEPFCFAEELITPLGPTDTVTYLGIPFTFKGKGVFNHRQHLLKLLDEVTRAPLKPHQRMEITRNYLIPRLTYSLVLGQVHRNTLKRLDNYIRQSIRGWLRLPKDTPISYIHAGKQHGGLGIPSLSATIPMQRRVRMEKLLSTQCRVLRNVVNDSAFGKVVRDLSLPIRVHGSCVNTKEELVAAWGDSLHNSVDGRGLRELVASPLSNRWLVFPERVFPRIFIRGIQLRCNLLRTRVRSARHGHGGQTILCRGNCGQPESLVHILQSCWITHDARCARHNRVARELAKRLRRLGYTVFEELRAPTSTSFIKPDLIAVRERRATVIDVSIVSDGRGVTVWNEKKQKYGVDEFSLAIISALRAIGCDVDFLVHQPMIISYRGICFPQSAKAVIGLGLSKVTVSDLCLLAIVGFLRTYDTFMRGTWR

SEQ ID NO: 7729 - protein, 977 aa, Clonorchis sinensis
MVAQLACADCSRLFPTKIGLSQHRRHAHPTQHNADKLSRVKHSGARWSQQESQSLLRLANNLYPSCETQTALFARLEQYFPGRSAISIKTRLRVLNWQAQQDESSSGGPDQTIGQIAAYSSEADDYSVWFKQTVDCAVSLLESHADSSLASVDLLAFARGLQSGIMTPEQVLSLLDLHASRTFPHTWKTVSRRRQLVYRMPVNRKQIRRANYAAIQTLYHQRRKDAASAVLDGSWKDLYKGNCGLPPDAEQYWKQVLSAPKHVDSRPSRVIVPSDWSLIEPITGEEVGRTVRSMGNSSPGLDKLTPRMLRRFNANVLAGYFNLLLLAGGCPPHLCRARITLVPKVPNPTSPDQLRPISVSSILVRCFHKVLADRWSRRLQLPSLQFAFLHRDGCLEATSLLHALLRHSSATASNLSLAFVDISKAFDSVSHDTIVRSAEAFGAPSPLVRYIAQSYENAVAVFPSSEVHCHRGVRQGDPLSPLLFIMAMDEVLGLSMPQLGYQFHDTLVDGFAFADDWVVCAESQARLKEKLEAAAVELGRAGMKINARKTKAMVICGDRKHRATAVSVEPFCFAEELITPLGPTDTVTYLGIPFTFKGKGVFNHRQHLLKLLDEVTRAPLKPHQRMEITRNYLIPRLTYSLVLGQVHRNTLKRLDNYIRQSIRGWLRLPKDTPISYIHAGKQHGGLGIPSLSATIPMQRRVRMEKLLSTQCRVLRNVVNDSAFGKVVRDLSLPIRVHGSCVNTKEELVAAWGDSLHNSVDGRGLRELVASSLSNRWLVFPERVFPRIFIRGIQLRCNLLRTRVRSARHGHGGQTILCRGNCGQPESLVHILQSCWITHDARCARHNRVARELAKRLRRLGYTVFEELRAPTSTSFIKPDLIAVRERRATVIDVSIVSDGRGVTVWNEKKQKYGADEFSLAIISALRAIGCDVDFLVHQPMIISYRGICFLCVRATLLCVAHGVECTFLPLNLTPDPV

SEQ ID NO: 7730 - protein, 950 aa, Clonorchis sinensis
MYLNFVSQQESQSLLRLANNLYPSCETRNALFARLEQHFPGRPAISIKTRLRVLNWQAQQDESSSGGPDQTIGQTAAYSSEADDYSVWFKQTVHCAVSLLESHADSSLASVDLLAFARGLQTGIMTPEQVLSLLDLQASRTFPHTWKTVSRHRRQLAHRMPVNRKQIRRANYAAIQTLYHQRRKDAASAVLDGSLKDLYKGNCGLPPDAEQYWKQVLSAPKHVDSRPSRVVIPSDWSLIEPITGEEVGRTVRSMGNSSPGLDKLTPRMLRRFNANVLAGYFNLLLLAGGCPPHLRRTRITLVPKVPNPTSPDQLRPISVSSILVRCFHKVLADRWSRRLQLPSLQFAFLHRDGCLEATSLLHALLRHSSATASNLSLAFVDISKAFDSVSHDTIVRSAEAFGAPSPLVRYIAQSYENAVAVFPSSEVHCHRGVRQGDPLSPLLFIMAMDEVLGLSMPQLGYQFHDTLVDGFAFADDWVVCAESQARLKEKLEAAAVELGRAGMKINARKTKAMVICGDRKHRATAVSVEPFCFAEELITPLGPTDTVTYLGIPFTFKGKGVFNHRQHLLKLLDEVTRAPLKPHQRMEITRNYLIPRLTYSLVLGQVHRNTLKRLDNYIRQSIRGWLRLPKDTPISYIHAGKQHGGLGIPSLSATIPMQRRVRMEKLLSTQCRVLRNVVNDSAFGKVVRDLSLPIRVHGSCVNTKEELVAAWGDSLHNSVDGRGLRELVASSLSNRWLVFPERVFPRIFIRGIQLRCNLLRTRVRSARHGHGGQTILCRGNCGQPESLVHILQSCWITHDARCARHNRVARELAKRLRRLGYTVFEELRAPTSTSFIKPDLIAVRERRATVIDVSIVSDGRGVTVWNEKKQKYGADEFSLAIISALRAIGCDVDFLVHQPMIISYRGICFPQSAKAVIGLGLSKVTVSDLCLLAIVGSLRTYDTFMRGTWR

SEQ ID NO: 7731 - protein, 954 aa, Clonorchis sinensis
MVAQLACADCSRLFPKKIGLSQHRRHAHPTQHNADKLSRVKHSGARWSQQESQSLLRLANNLYPSCETQTALFARLEQYFPGRSAISIKTRLRVLNWQAQQDESSSGGPDQTIGQMATHSSEADDYSVWFKQTVDCAVSLLESHADSSLASVDLLAFARGLQSGIMTPEQVLSLLDLHASRTFPHTWKTVSRRRQLVYRMPVNRKQIRRANYAAIQTLYHQRRKDAASAVLDGSWKDLYKGNCGLPPDAEQYWKQVLSAPKHVDSRPSRVIVPSDWSLIEPITGEEVGRTVRSMGNSSPGLDKLTPRMLRRFNANVLAGYFNLLLLAGGCPPHLCRARITLVPKVPNPTSPDQLRPISVSSILVRCFHKVLADRWSRRLQLPSLQFAFLHRDGCLEATSLLHALLRHSSATASNLSLAFVDISKAFDSVSHDTIVRSAEAFGAPSPLVRYIAQSYENAVAVFPSSEVHCHRGVRQGDPLSPLLFIMAMDEVLGLSMPQLGYQFHDTLVDGFAFADDWVVCAESQARLKEKLEAAAVELGRAGMKINARKTKAMVICGDRKHRATAVSVEPFCFAEELITPLGPTDTVTYLGIPFTFKGKGVFNHRQHLLKLLDEVTRAPLKPHQRMEITRNYLIPRLTYSLVLGQVHRNTLKRLDNYIRQSIRGWLRLPKDTPISYIHAGKQHGGLGIPSLSATIPMQRRVRMEKLLSTQCRVLRNVVNDSAFGKVVRDLSLPIRVHGSCVNTKEELVAAWGDSLHNSVDGRGLRELVASSLSNRWLVFPERVFPRIFIRGIQLRCNLLRTRVRSARHGHGGQTILCRGNCGQPESLVHILQSCWITHDARCARHNRVARELAKRLRRLGYTVFEELRAPTSTSFIKPDLIAVRERRATVIDVSIVSDGRGVTVWNEKKQKYGADEFSLAIISALRAIGCDVDFLVHQPMSLRTCDTFMRGTWR

SEQ ID NO: 7732 - protein, 991 aa, Opisthorchis felineus
MVTQLACADCSRLVPTKIGLSQDRWHVHPTQHNADKLGRVKYSRARWFQQESQSLLRLASNLYPSCGTQTALFARLEQYFPGRSAISIKTRLRVLNWQAQQDESSSGGPDQTIGQITAYSSEADDYSVWFKQTVDCAVSLLESHADSSLASVDLLAFARGLQSGIMTPEQVLSLLDLHASRTFPHIWKTVSRRRRQLAHRIPVNRKQIRRANYAAIQTLYHQRRKDAASAVLDGSWKDLYKGNCGLPLNAEQYWKQVLSAPKHVDSRPSRVVVPSDWSLIEPITGEEVGRTIRLMGNSSPGLDKLTPRMLRRFNANALAGYFNLLLLSGGCPPHLCRARITLVPKVPNPTSPDQLRPISVSSILVRCFHKVLADRWSRRLQLPSLKFAFLHQDGCLEATLLLHALLRHSSATASNLSLAFVDISKAFDSVSHDTIVRSSKAFGAPSPLVRYIAQSYENAVAVFPNSEVHCHRGVRQGDPLSPLLFIMAMDEVLGLSMPQLGYQFHDTLVDGFAFADDWVVCAESQARLKEKLEAAAVELGRAGMKINARKTKAMVICGDRKHRATAVSVEPFCFAEELITPLGPTDTVTYLGIPFTFKGKGVSNHRQHLLKLLDEVTRAPLKRHQRMEITRNYLIPRLTYSLVLGQVHRNTLKRLDNYIRQSIRGWLRLPKDTPISYIHAGKQHGGLGIPSLSATIPMQRRARMEKLFLTQCRVLRNVVNDSAFGKVVRDLSLPIRVHGACVNTKEELVAAWGDSLHNSVDGRGLRELVASPLSNRWLVFPERVFPRIFIRGIQLRCNLLRTRVRSARHGHGGQTILCRGNCGQPESLVHILQSCWITHDARCARHNRVARELAKRLRRLGYTVFEELRAPTSTSFIKPDLIAVRERRATVIDVSIVSDGRGVTVWNEKKQNYGADEYSLAIISALRAIGCDVDFLVHQPMIISYRGICFPQSAKAVIGLGLPKVTVSDLCLLAIVGSLRTYDTFMRGTWR

SEQ ID NO: 7733 - protein, 991 aa, Opisthorchis felineus
MFAHLAYTDCSRLFPTKIDLSQHRRHAHPTQHNADKLGRVKYSGARWSQQESQSLLRLANNLYPSCGTQTALFARLEQYFPGRSAISIKTRLRVLNWQAQQDESSSGGPDQTIGQITAYSSEADDYSVWFKQTVDCAVSLLESHADSSLASVDLLAFARGLQSGIMTPEQVLSLLDLHASRTFPHTWKTVSRRRRQLAHRMPVNRKQIRRANYAAIQTLYHQRRKDAASAVLDGSWKDLYKGNCGLPLNAEQYWKQVLSAPKHVDSRPSRVVVPSDWSLIEPITGEEVGRTIRLMGNSSPGLDKLTPRMLHRFNANALAGYFNLLLLSGGCPPHLCRARITLVPKVPNPTSPDQLRPISVSSILVRCFHKVLADRWSRRLQLPSLQFAFLHRDGCLEATSLLHALLRHSSATASNLSLAFVDISKAFDSVSHDTIVRSAKAFGAPSPLVRYIAQSYENAVAVFPNSEVHCHRGVRQGDPLSPLLFIMAMDEVLGLSMPQLGYQFHDTLVDGFAFADDWVVCAESQARLKEKLEAAAVELGRAGMKINARKTKAMVICGDRKHRATAVSVEPFCFAEELITPLGPTDTVTYLGIPFTFKGKGVFNHRQHLLKLLDEVTRAPLKPHQRMEITRNYLIPRLTYSLVLGQVHRNTLKRLDNYIRQSIRGWLRLPKDTPISYIHAGKQHGGLGIPSLSATIPMQRRARMEKLFSTQCRVLRNVVNDSAFGKIVRDLSLPIRVHGACVNTKEELVAAWGDSLHNSVDGRGLRELVASPFSNRCLVFPERVFPRIFIRGIQLRCNLLRTRVRNPRHGHGGQTILCRGNCGQPESLVHILQSCWITHDARCARHNRVARELAKRLRRLGYTVFEELRAPTSTSFIKPDLIAVRERRATVIDVSIVSDGRGVTVWNEKKQKYGADEYSLAIISSLRAIGCDVDLLVHQPTIISYRGICFPQSAKAVIGLGLPKVTVSDLCLLAIVGSLRTYDNSMRGTLR

SEQ ID NO: 7734 - protein, 991 aa, Clonorchis sinensis
MVAQLACADCSRLFPTKIGLSQHRRHAHPTQHNADKLSRVKHSGARWSQQESQSLLRLANNLYPSCETQTALFARLEQYFPGRSAISIKTRLRVLNWQAQQDESSSGGPDQTIGQIAAYSSEADDYSVWFKQTVDCAVSLLESHADSSLASVDLLAFARGLQSGIMTPEQVLSLLDLHASRTFPHTWKTVSRRRRQLAHRMPVNRKQIRRANYAAIQTLYHQRWKDAASAVLDGSWKDLYKGNCGLPPDAEQYWKQVLSAPKHVDSRPSRVVVPSDWSLIEPITGEEVGRTVRSMGNSSPGLDKLTPRMLRRFNANVLAGYFNLLLLSGGCPPHLCRARITLVPKVPNPTSPDQLRPISVSSILVRCFHKVLADRWSRRLQLPSLQFAFLHRDGCLEATSLLHALLRHSSATASNLSLAFVDISKAFDSVSHDTIVRSAEAFGAPSPLVRYIAQSYENAVAVFPSSEVHCHRGVRQGDPLSPLLFIMAMDEVLGLSMPQLGYQFHDTLVDGFAFADDWVVCAESQARLKEKLEAAAVELGRAGMKINARKTKAMVICGDRKHRATAVSVEPFCFAEELITPLGPTDTVTYLGIPFTFKGKGVFNHRQHLLKLFDEVTRAPLKPHQRMEITRNYLIPRLTYSLVLGQVHRNTLKRLDNYIRQSIRGWLRLPKDTPISYIHAGKQHGGLGIPSLSATIPMQRRVRMEKLLSTQCRVLRNVVNDSAFGKVVRDLSLPIRVHGSCVNTKEELVAAWGDSLHNSVDGRGLRELVASPLSNRWLVFPERVFPRIFIRGIQLRCNLLRTRVRSARHGHGGQTILCRGNCGQPESLVHILQSCWITHDARCARHNRVARELAKRLRRLGYTVFEELRAPTSTSFIKPDLIAVRERRATVIDVSIVSDGRGVTVWNEKKQKYGVDEFSLAIISALRAIGCDVDFLVHQPMVISYRGICFPQSAKAVIGLGLSKVTVSDLCLLAIVGSLRTYDTFMRGTWR

SEQ ID NO: 7735 - protein, 826 aa, Clonorchis sinensis
MTPEQVLSLLDLHASRTFPHTWKTVSRRRRQLAHRMPVNRKQIRRANYAAIQTLYHQRRKDAASAVLDGSWKDLYKGNCGLPPDAEQYWKQVLSAPKHVDSRPSRVVVPSDWSLIEPITGEEVGRTVRSMGNSSPGLDKLTPRMLRRFNANVLAGYFNLLLLAGGCPPHLCRARITLVPKVPNPTSPDQLRPISVSSILVRCFHKVLADRWSRRLQLPSLQFAFLHRDGCLEATSLLHALLRHSSATASNLSLAFVDISKAFDSVSHDTIVRSAEAFGAPSPLVRYIAQSYENAVAVFPSSEVHCHRGVRQGDPLSPLLFIMAMDEVLGLSMPQLGYQFHDTLVDGFAFADDWVVCAESQARLKEKLEAAAVELGRAGMKINARKTKAMVICGDRKHRATAVSVEPFCFAEELITPLGPTDTVTYLGIPFTFKGKGVFNHRQHLLKLLDEVTRAPLKPHQRMEITRNYLIPRLTYSLVLGQVHRNTLKRLDNYIRQSIRGWLRLPKDTPISYIHAGKQHGGLGIPSLSATIPMQRRVRMEKLLSTQCRVLRNVVNDSAFGKVVRDLSLPIRVHGSCVNTKEELVAAWGDSLHNSVDGRGLRELVASPLSNRWLVFPERVFPRIFIRGIQLRCNLLRTRVRSARHGHGGQTILCRGNCGQPESLVHILQSCWITHDARCARHNRVARELAKRLRRLGYTVFEELRAPTSTSFIKPDLIAVRERRATVIDVSIVSDGRGMTVWNEKKQKYGADEFSLAIISALRAIGCDVDFLVHQPMIISYRGICFPQSAKAVIGLGLSKVTVSDLCLLAIVGSLRTYDTFMRGTWR

SEQ ID NO: 7736 - protein, 990 aa, Clonorchis sinensis
MVTQLACADCSHLFPTKIGLSQHRRHAHPTQHNADKLSRVKHSGARWSQQESQSLLRLANNLYPSCETQTALFARMEQYFPGRSAISIKTRLQVLNWQAQQDESSSGGPDQTIGQIAAYSSEADDYSVWFKQTVDCAVSLLESHADSSLASVDLLAFARGLQSGIMTPEQVLSLLDLHASRTFPHTWKTVSRRRQLVYRMPVNRKQIRRANYAAIQTLYHQRRKDAASAVLDGSWKDLYKGNCGLPPDAEQYWKQVLSAPKHVDSRPSRVIVPSDWSLIEPITGEEVGRTVRSMGNSSPGLDKLTPRMLRRFNANVLAGYFNLLLLAGGCPPHLCRARITLVPKVPNPTSPDQLRPISVSSILVRCFHKVLADRWSRRLQLPSLQFAFLHRDGCLEATSLLHALLRHSSATASNLSLAFVDISKAFDSVSHDTIVRSAEAFGAPSPLVRYIAQSYENAVAVFPSSEVHCHRGVRQGDPLSPLLFIMAMDEVLGLSMPQLGYQFHDTLVDGFAFADDWVVCAESQARLKEKLEAAAVELGRAGMKINARKTKAMVICGDRKHRATAVSVEPFCFAEELITPLGPTDTVTYLGIPFTFKGKGVFNHRQHLLKLLDEVTRAPLKPHQRMEITRNYLIPRLTYSLVLGQVHRNTLKRLDNYIRQSIRGWLRLPKDTPISYIHAGKQHGGLGIPSLSATIPMQRRVRMEKLLSTQCRVLRNVVNDSAFGKVVRDLSLPIRVHGSCVNTKEELVAAWGDSLHNSVDGRGLRELVASSLSNRWLVFPERVFPRIFIRGIQLRCNLLRTRVRSARHGHGGQTILCRGNCGQPESLVHILQSCWITHDARCARHNRVARELAKRLRRLGYTVFEELRAPTSTSFIKPDLIAVRERRATVIDVSIVSDGRGVTVWNEKKQKYGADEFSLAIISALRAIGCDVDFLVHQPMIISYRGICFPQSAKAVIGLGLSKVTVSDLCLLAIVGSLRTYDTFMRGTWR

SEQ ID NO: 7737 - protein, 826 aa, Opisthorchis felineus
MTPEQVLSLLDLHASRTFPHIWKTVSRRRRQLAHRIPVNRKQIRRANYAAIQTLYHQRPKDAASAVLDGSWKDLYKGNCGLPLNTEQYWKQVLSAPKHVDSRPSRVVVPSDWSLIEPITGEEVGRTIRLMGNSSPGLDKLTPRMLRRFNANALAGYFNLLLLSGGCPPHLCRARITLVSKVPNPTSPDQLRPISVSSILVRCFHKVLADRWSRRLQLPSLQFAFLHRDGCLEATSLLHVPLRHSSATASNLSLAFVDISKAFDSVSHDTIVRSAKAFGAPSPLVRYIAQSYENAVAVFPNSEVHCHRGVRQGDPLSPLLFIMAMDEVLGLSMPQLGYQFHDTLVDGFAFADDWVVCAESQARLKEKLEAAAVELGRAGMKINARKTKAMVICGDRKHRATAVSVEPFCFAEELITPLGPTDTVTYLGIPFTFKGKGVFNHRQHLLKLLDEVTRAPLKPHQRMEITRNYLIPRLTYSLVLGQVHRNTLKRLDNYIRQSIRGWLRLPKDTPISYIHAGKQHGGLGIPSLSATIPMQRRARMEKLFSTQCRVLRNVVNDSAFGKIVRDLSLPIRVHGACVNTKEELVAAWGDSLHNSVDGRGLRELVASPLSNRWLVFPERVFPRIFIRGIQLRCNLLRTRVRSARHGHGGQTILCRGNCGQPESLVHILQSCWITHDARCARHNRVARELAKRLRRLGYTGFEELRAPTSTSFIKPDLIAVRERRATVIDVSIVSDGRGVTVWNEKKQKYGADEYSLAIISALRAIGCDVDFLVHQPMIISYRGICFPQSAKAVIGLGLPKFTVSDLCLLAIVGSLRTYDTFMRGTWR

SEQ ID NO: 7738 - protein, 826 aa, Opisthorchis felineus
MTPEQVLSLLDLHASRTFPHIWKTVSRRRRQLAHRMPVNRKQIRRANYAAIQTLYHQRRKDAASAVLDGSWKDLYKGNCGLPLNAEQYWKQVLSAPKHVDSRPSRVVVPSDWSLIEPITGEEVGRTIRLMGNSSPGLDKLTPRMLRRFNANALAGYFNLLLLSGGCPPHLCRARITLVPKVPNPTSPDQLRPISVSSILVRCFHKVLADRWSRRLQLPSLQFAFLHRDGCLEATSLLHALLRHSSATASNLSLAFVDISKAFDLVSHDTIVRSAKAFGAPSPLVRYIAQPYENAVAVFPNSEVHCHRGVRQGDPLSPLLFIMAMDEVLGLSMPQLGYQFHDTLVDGFAFADDWVVCAESQARLKEKLEAAAVELGRAGMKINARKTKAMVICGDRKHRATAVSVEPFCFAEELITPLGPTDTVTYLGIPFTFKGKGVFNHRQHLLKLLDEVTRAPLKPHQRMEITRNYLIPRLTYSLVLGQVHRNTFKRLDNYMRQSIRGWLRLPKDTPISYIHAGKQHGGLGIPSLSATIPMQRRARMEKLFSTQCRVLRNVVNDSAFGKIVRDLSLPIRVHGACVNTKEELVAAWGDSLHNSVDGRGLRELVASPLSNRCFVFPERVFPRIFIRGIQLRCNLLRTRVRNPRHGHGGQTILCRGNCGQPESLVHILQSCWITHDARCARHNRVARELAKRLRRLGYTVFEELRAPTSTSFIKPDLIAVRERRATVIDVSIVSDGRGVTVWNEKKQKYGADEYSLAIISALRAIGCDVDFLVHQPMIISYRGICFPQSAKAVIGLGLPKFTVSDLCLLAIVGSLRTYDTFMRGTWR

SEQ ID NO: 7739 - protein, 1096 aa, Clonorchis sinensis
MFGWGVVSASWTTSSWCRLGSLDASLGELRVQQLQTGLTTLFGFNVLVTFDNVHYKTSGASAPVPTSTQENLVGLTCEECGKWCKSKAGLVAHHRVHDNDSVGTNMVAQLACADCSRLFPTKIGLSQHRRHAHPTQHNADKLSRVKHSGARWSQQESQSLLRLAKNLYPSCETQTALFARLEQYFPGRSAISIKTRLRVLNWQAQQDESSSGGPDQTIGQIAAYSSEADDYSVWFKQTVDCAVSLLESHADSSLASVDLLAFARGLQSGIMTPEQVLSLLDLHASRTFPHTWKTVSRRRRQLAHRMPVNRKQIRRANYAAIQTLYHQRRKDAASAVLDGSWKDLYKGNCGLPPDAEQYWKQVLSAPKHVDSRPSRVVVPSDWSLIEPITGEEVGRTVRSMGNSSPGLDKLTPRMLRRFNANVLAGYFNLLLLAGGCPPHLCRARITLVPKVPNPTSPDQLRPISVSSILVRCFHKVLADRWSRRLQLPSLQFAFLHRDGCLEATSLLHALLRHSSATASNLSLAFVDISKAFDSVSHDTIVRSAEAFGAPSPLVRYIAQSYENAVAVFPSSEVHCHRGVRQGDPLSPLLFIMAMDEVLGLSMPQLGYQFHDTLVDGFAFADDWVVCAESQARLKEKLEAAAVELGRAGMKINARKTKAMVICGDRKHRATAVSVEPFCFAEELITPLGPTDTVTYLGIPFTFKGKGVFNHRQHLLKLLDEVTRAPLKPHQRMEITRNYLIPRLTYSLVLGQVHRNTLKRLDNYIRQSIRGWLRLPKDTPISYIHAGKQHGGLGIPSLSATIPMQRRVRMEKLLSTQCRVLRNVVNDSAFGKVVRDLSLPIRVHGSCVNTKEELVAAWGDSLHNSVDGRGLRELVASPLSNRWLVFPERVFPRIFIRGIQLRCNLLRTRVRSARHGHGGQTILCRGNCGQPESLVHILQSCWITHDARCARHNRVARELAKRLRRLGYTVFEELRAPTSTSFIKPDLIAVRERRATVIDVSIVSDGRGMTVWNEKKQKYGADEFSLAIISALRAIGCDVDFLVHQPMIISYRGICFPQSAKAVIGLGLSKVTVSDLCLLAIVGSLRTCDTFMRGTWR

SEQ ID NO: 7740 - protein, 991 aa, Clonorchis sinensis
MVAQLACADCSRLFPTKIGLSQHRRHAHPTQHNADKLSRVKHSGARWSQQESQSLLRLANNLYPSCETQTALFARLEQYFPGRSAISIKTRLRVLNWQAQQDESSSGGPDQTIGQIAAYSSEADDYSVWFKQTVDCAVSLLESHADSSLASVDLLAFARGLQSGIMTPEQVLSLLDLHASRTFPHTWKTVSRRRRQLAHRMPVNRKQIRRANYAAIQTLYHQRWKDAASAVLDGSWKDLYKGNCGLPPDAEQYWKQVLSAPKHVDSRPSRVVVPSDWSLIEPITGEEVGRTVRSMGNSSPGLDKLTPRMLRRFNANVLAGYFNLLLLSGGCPPHLCRARITLVPKVPNPTSPDQLRPISVSSILVRCFHKVLADRWSRRLQLPSLQFAFLHRDGCLEATSLLHALLRHSSATASNLSLAFVDISKAFDSVSHDTIVRSAEAFGAPSPLVRYIAQSYENAVAVFPSSEVHCHRGVRQGDPLSPLLFIMAMDEVLGLSMPQLGYQFHDTLVDGFAFADDWVVCAESQARLKEKLEAAAVELGRAGMKINARKTKAMVICGDRKHRATAVSVEPFCFAEELITPLGPTDTVTYLGIPFTFKGKGVFNHRQHLLKLLDEVTRAPLKPHQRMEITRNYLIPRLTYSLVLGQVHRNTLKRLDNYIRQSIRGWLRLPKDTPISYIHAGKQHGGLGIPSLSATIPMQRRVRMEKLLSTQCRVLRNVVNDSAFGKVVRDLSLPIRVHGSCVNTKEELVAAWGDSLHNSVDGRGLRELVASPLSNRWLVFPERVFPRIFIRGIQLRCNLLRTRVRSARHGHGGQTILCRGNCGQPESLVHILQSCWITHDARCARHNRVARELAKRLRRLGYTVFEELRAPTSTSFIKPDLIAVRERRATVIDVSIVSDGRGVTVWNEKKQKYGADEFSLAIISALRAIGCDVDFLVHQPMIISYRGICFPQSAKAVVGLGLSKVTVSDLCLLAIVGFLRTYDTFMRGTWR

SEQ ID NO: 7741 - protein, 991 aa, Clonorchis sinensis
MVAQLACADCSRLFPTKIGLSQHRRHAHPTQHNADKLSRVKHSGARWSQQESQSLLRLANNLYPSCETQTALFARLEQYFPGRSAISIKTRLRVLNWQAQQDESSSGGPDQTIGQIAAYSSEADDYSVWFKQTVDCAVSLLESHADSSLASVDLLAFARGLQSGIMTPEQVLSLLDLHASRTFPHTWKTVSRRRRQLAHRMPVNRKQIRRANYAAIQTLYHQRWKDAASAVLDGSWKDLYKGNCGLPPDAEQYWKQVLSAPKHVDSRPSRVVVPSDWSLIEPITGEEVGRTVRSMGNSSPGLDKLTPRMLRRFNANVLAGYFNLLLLSGGCPPHLCRARITLVPKVPNPTSPDQLRPISVSSILVRCFHKVLADRWSRRLQLPSLQFAFLHRDGCLEATSLLHALLRHSSATASNLSLAFVDISKAFDSVSHDTIVRSAEAFGAPSPLVRYIAQSYENAVAVFPSSEVHCHRGVRQGDPLSPLLFIMAMDEVLGLSMPQLGYQFHDTLVDGFAFADDWVVCAESQARLKEKLEAAAVELGRAGMKINARKTKAMVICGDRKHRATAVSVEPFCFAEELITPLGPTDTVTYLGIPFTFKGKGVFNHRQHLLKLLDEVTRAPLKPHQRMEITRNYLIPRLTYSLVLGQVHRNTLKRLDNYIRQSIRGWLRLPKDTPISYIHAGKQHGGLGIPSLSATIPMQRRVRMEKLLSTQCRVLRNVVNDSAFGKVVRDLSLPIRVHGSCVNTKEELVAAWGDSLHNSVDGRGLRELVASPLSNRWLVFPERVFPRIFIRGIQLRCNLLRTRVRSARHGHGGQTILCRGNCGQPESLVHILQSCWITHDARCARHNRVARELAKRLRRLGYTVFEELRAPTSTSFIKPDLIAVRERRATVMDVSIVSDGRGVTVWNEKKQKYGADEFSLAIISALRAVGCDVDFLVHQPMIISYRGICFPQSAKAVIGLGLSKVTVGDLCLLAIVGFLRTYDTFMRGTWR

SEQ ID NO: 7742 - protein, 910 aa, Opisthorchis felineus
MVAQLACADCSRLFPTKIGLSQHRRHVHPTQHNADKLGRVKYSGARWSQQESQSLLRLANNLYPSCGTQTALFARLEQYFPGRSAISIKTRLRVLNWQAQQDESSSGGPDQTIGQITAYSSEADDYSVWFKQTVDCAVSLLESHADSSLASVDLLAFARGLQSGIMTPEQVLSLLDLHASRTFPHIWKTVSRRRRQLAHRIPVNRKQIRRANYAAIQTLYHQRPKNAASAVLDGSWKDLYKGNCGLPLDAEQYWKQVLSAPKHVDSRPSRVVVPSDWSLIEPITGEEVGRTIRLMGNSSPGLDKHTPRMLRRFNANALAGYFNLLLLSGGCPPHLCRARITLVPKVPNPTSPDQLRPISVSSILVRCFHKVLADRWSRRLQLPSLKFAFLHRDGCLEATSLLHALLRHSSATASNLSLAFVDISKAFDSVSHDTIVRSAKAFGAPSPLVRYIAQSYENAVAVFPNSEVHCHRGVRQGDPLSPLLFIMAMDEVLGLSMPQLGYQFHDTLVDGFAFADDWVVCAESQACLKEKLEAAAVELGRAGMKINARKTKAMVICGDRKHRATAVSVEPFCFAEELITPLGPTDTVTYLGIPFTFKGKGVFNHRQHLLKLLDEVTRAPLKPHQRMEITRNYLIPRLTYSLVLGQVHRNTLKRLDNYIRQSIRGWLRLPKDTPISYIHAGKQHGGLGIPSLSATIPMQRRARMEKLLSTQCRVLRNVVNDSAFGKIVRDLSLPIRVHGACVNTKEELVAAWGDSLHNSVDGRGLRELVASPLSNRWLVFPERVFPRIFIRGIQLRCNLLRTRVRSARHGHGGQTILCRGNCGQPESLVHILQSCWITHDARCARHNRVARELAKRLRRLGYTGFEELRAPTSMSFIKPDLIAVRERRATVIDVSIVSDGRGVTVWNEKK

SEQ ID NO: 7743 - protein, 991 aa, Opisthorchis felineus
MVAQLACAECSRFFPTKIGLSQHRRHVHPTQHNADKLGRVKYSGARWSQQESQSLLRLANNLYPSCGTQTALFARLEQYFPGRSAISIKTRLRVLNWQAQQDESSSGGPDQTIGQITAYSSEADDYSVWFKQTVDCAVSLLESHADSSLASVDLLAFARGLQSGIMTPEQVLSLLDLHASRTFPHIWKTVSRRRRQLAHRMPVNRKQIRRANYAAIQTLYHQRRKDAASAVLDGSWKDLYKGNCGLPLNAEQYWKQVLSAPKHVDSRPSRVVVPSDWSLIEPITGEEVGRTIRLMGNSSPGLDKLTPRMLRRFNANALAGYFNLLLLSGGCPPHLCRARITLVPKVPNPTSPDQLRPISVSSILVRCFHKVLADRWSRRLQLPSLQFAFLHRDGCLEATSLLHALLRHSSATASNLSLAFVDISKAFDLVSHDTIVRSAKAFGAPSPLVRYIAQSYENAVAVFPNSEFHCHRGVRQGDPLSPLLFIMAMDEVLGLSTPQLGYQFHDTLVDGFAFADDWVVCAESQARLKEKLEAAAVELGRAGMKINARKTKAMVICGDRKHRATAVSVEPFCFAEELITPLGPTDTVTYLGIPFTFKGKGVFNHRQHLLKLLDEVTRAPLKPHQRMEITRNYLIPRLTYSLVLGQVHRNTLKRLDNYIRQSIRGWLRLPKDTPISYIHAGKQHGGLGIPSLSATIPMQRRARMEKLFSTQCRVLRNVVNDSAFGKIVRDLSLPIRVHGACVNTKEELVAAWGDSLHNSVDGRGLRELVASPLSNRCFVFPERVFPRIFIRGIQLRCNLLRTRVRSPRHGHGGQTILCRGNCGQPESLVHILQSCWITHDARCARHNRVARELAKRLRRLGYTVFEELRAPTSTSFIKPDLIAVRERRATVIDVSIVSDGRGVTVWNEKKQKYGADEYSLAIISALRAIGCDVDFLVHQPMIISYRGICFPQSAKAVIGLGLPKFTVSDLCLLAIVGSLRTYDTFMRGTWR

SEQ ID NO: 7744 - protein, 991 aa, Clonorchis sinensis
MVAQLACADCSRLFPKKIGLSQHRRHAHPTQHNADKLSRVKHSGARWSQQESQSLLRLAKNLYPSCETQTALFARLEQYFPGRSAISIKTRLRVLNWQAQQDESSSGGPDQTIGQIAAYSSEADDYSVWFKQTVDCAVSLLESHADSSLASVDLLAFARGLQSGIMTPEQVLSLLDLHASRTFPHTWKTVSRRRRQLAHRMPVNRKQIRRANYAAIQTLYHQRWKDAASAVLDGSWKDLYKGNCGLPPDAEQYWKQVLSAPKHVDSRPSRVVVPSDWSLIEPITGEEVGRTVRSMGNSSPGLDKLTPRMLRRFNANVLAGYFNLLLLSGGCPPHLCRARITLVPKVPNPTSPDQLRPISVSSILVRCFHKVLADRWSRRLQLPSLQFAFLHRDGCLEATSLLHALLRHSSATASNLSLAFVDISKAFDSVSHDTIVRSAEAFGAPSPLVRYIAQSYENAVAVFPSSEVHCHRGVRQGDPLSPLLFIMAMDEVLGLSMPQLGYQFHDTLVDGFAFADDWVVCAESQARLKEKLEAAAVELGRAGMKINARKTKAMVICGDRKHRATAVSVEPFCFAEELITPLGPTDTVTYLGIPFTFKGKGVFNHRQHLLKLFDEVTRAPLKPHQRMEITRNYLIPRLTYSLVLGQVHRNTLKRLDNYIRQSIRGWLRLPKDTPISYIHAGKQHGGLGIPSLSATIPMQRRVRMEKLLSTQCRVLRNVVNDSAFGKVVRDLSLPIRVHGSCVNTKEELVAAWGDSLHNSVDGRGLRELVASPLSNRWLVFPERVFPRIFIRGIQLRCNLLRTRVRSARHGHGGQTILCRGNCGQPESLVHILQSCWITHDARCARHNRVARELAKRLRRLGYTVFEELRAPTSTSFIKPDLIAVRERRATVIDVSIVSDGRGMTVWNEKKQKYGADEFSLAIISALRAIGCDVDFLVHQPMVISYRGICFPQSAKAVIGLGLSKVTIGDLCLLAIVGSLRTYNTFMRDTWP

SEQ ID NO: 7745 - protein, 990 aa, Clonorchis sinensis
MVAQLACADCSRLFPTKIGLSQHRRHAHPTQHNADKLSRVKHSGARWSQQESQSLLRLANNLYPSCETQTALFARLEQYFPGRSAISIKTRLRVLNWQAQQDKSSSGGPDQTIGQIAAYSSEADDYSVWFKQTVDCAVSLLESHADSSLASVDLLAFARGLQSGIMTPEQVLSLLDLHASRTFPHTWKTVSRRRQLVYRMPVNRKQIRRANYAAIQTLYHQRRKDAASAVLDGSWKDLYKGNCGLPPDAEQYWKQVLSAPKHVDSRPSRVIVPSDWSLIEPITGEEVGRTVRSMGNSSPGLDKLTPRMLRRFNANVLAGYFNLLLLAGGCPPHLCRARITLVPKVPNPTSPDQLRPISVSSILVRCFHKVLADRWSRRLQLPSLQFAFLHRDGCLEATSLLHALLRHSSATASNLSLAFVDISKAFDSVSHDTIVRSAEAFGAPSPLVRYIAQSYENAVAVFPSSEVHCHRGVRQGDPLSPLLFIMAMDEVLGLSMPQLGYQFHDTLVDGFAFADDWVVCAESQARLKEKLEAAAVELGRAGMKINARKTKAMVICGDRKHRATAVSVEPFCFAEELITPLGPTDTVTYLGIPFTFKGKGVFNHRQHLLKLLDEVTRAPLKPHQRMEITRNYLIPRLTYSLVLGQVHRNTLKRLDNYIRQSIRGWLRLPKDTPISYIHAGKQHGGLGIPSLSATIPMQRRVRMEKLLSTQCRVLRNVVNDSAFGKVVRDLSLPIRVHGSCVNTKEELVAAWGDSLHNSVDGRGLRELVASSLSNRWLVFPERVFPRIFIRGIQLRCNLLRTRVRSARHGHGGQTILCRGNCGQPESLVHILQSCWITHDARCARHNRVARELAKRLRRLGYTVFEELRAPTSTSFIKPDLIAVRERRATVIDVSIVSDGRGVTVWNEKKQKYGADEFSLAIISALRAIGCDVDFLVHQPMIISYRGICFPQSAKAVIGLGLSKVTVSDLCLLAIVGSLRTYDTFMRGTWR

SEQ ID NO: 7746 - protein, 991 aa, Clonorchis sinensis
MVAQLACADCSRLFPTKIGLSQHRRHAHPTQHNADKLSRVKHSGARWSQQESQSLLRLANNLYPSCETQTALFARLEQYFPGRSAISIKTRLRVLNWQAQQDESSSGGPDQTIGQIAAYSSEADDYSVWFKQTVDCAVSLLESHADSSLASVDLLAFARGLQSGIMTPEQVLSLLDLHASRTFPHTWKTVSRRRRQLAHRMPVNRKQIRRANYAAIQTLYHQRWKDAASAVLDGSWKDLYKGNCGLPPDAEQYWKQVLSAPKHVDSRPSRVVVPSDWSLIEPITGEEVGRTVRSMGNSSPGLDKLTPRMLRRFNANVLAGYFNLLLLSGGCPPHLCRARITLVPKVPNPTSPDQLRPISVSSILVRCFHKVLADRWSRRLQLPSLQFAFLHRDGCLEATSLLHALLRHSSATASNLSLAFVDISKAFDSVSHDTIVRSAEAFGAPSPLVRYIAQSYENAVAVFPSSEVHCHRGVRQGDPLSPLLFIMAMDEVLGLSMPQLGYQFHDTLVDGFAFADDWVVCAESQARLKEKLEAAAVELGRAGMKINARKTKAMVICGDRKHRATAVSVEPFCFAEELITPLGPTDTVTYLGIPFTFKGKGVFNHRQHLLKLFDEVTRAPLKPHQRMEITRNYLIPRLTYSLVLGQVHRNTLKRLDNYIRQSIRGWLRLPKDTPISYIHAGKQHGGLGIPSLSATIPMQRRVRMEKLLSTQCRVLRNVVNDSAFGKVVRDLSLPIRVHGSCVNTKEELVAAWGDSLHNSVDGRGLRELVASPLSNRWLVFPERVFPRIFIRGIQLRCNLLRTRVRSARHGHGGQTILCRGNCGQPESLVHILQSCWITHDARCARHNRVARELAKRLRRLGYTVFEELRAPTSTSFIKPDLIAVRERRATVIDVSIVSDGRGMTLWNEKKQKYGADEFSLAIISALRAIGCDVDFLVHQPMIISYRGICFSQSAKAVIGLGLSKVTVSDLCLLAIVGSLRTYDTFMRDTWP

SEQ ID NO: 7747 - protein, 991 aa, Opisthorchis felineus
MVAQLACADCSRLFPTKIGLSQHRRHVHPTQHNADKLGRVKYSGARWSQQESQSLLRLANNLYPSCGTQTALFARLEQYFPGRSAISIKTRLRVLNWQAQQDESPSGGPDQAIGQITAYSSEADDYSVWFKQTVDCAVSLLESHADSSLASVDLLAFARGLQSGIMTPEQVLSLLDLHASRTFPHIWKTVSRRRRQLAHRIPVNRKQIRRANYAAIQTLYHQRRKNAASAVLDGSWKDLYKGNCGLPLNAEQYWKQVLSAPKHVDSRPSRVVVPSDWSLIEPITGEEVGRTIRLMGNSSPGLDKLTPRMLRRFNANALAGYFNLLLLSGGCPPHLCRARITLVPKVPNPTSPDQLRPISVSSILVRCFHKVLADRWSRRLQLPSLQFAFLHRDGCLEATSLLHALLRHSSATASNLSLAFVDISKAFDSVSHDTIVRSAKAFGAPSPLVRYIAQSYENAVAVFPNSEVHCHRGVRQGDPLSPLLFIMAMDEVLGLSMPQLGYQFHDTLVDGFAFADDWVVCAESQARLKEKLEAAAVELGRAGMRINARKTKAIVICGDRKHRATAVSVEPFCFAEELITPLGPTDTVTYLGIPFTFKGKGVFNHRQHLLKLLDEVTRAPLKPHQRMEITRNYLIPRLTYSLVLGQVHRNTLKRLDNYIRQSIRGWLRLPKDTPISYIHAGKQHGGLGIPSLSATIPMQRRARMEKLFSTQCRVLRNVVNDSAFGKIVRDLSLPIRVHGACVNTKEELVAAWGDSLHNSVDGRGLRELVASPLSNRWLVFPERVFPRIFIRGIQLRCNLLRTRVRSARHGHGGQTILCRGNCGQPESLVHILQSCWITHDARCARHSRVARELAKRLRRLGYTVFEELRAPTSTSFIKPDLIAVRERRATVIDVSIVSDGRGVTVWNEKKQKYGADEYSLAIISALRAIGCDVDFLVHQPMIISYRGICFPQSAKAVIGLGLPKFTVSDLCLLAIVGSLRTYDTFMRGTWR

SEQ ID NO: 7748 - protein, 991 aa, Clonorchis sinensis
MVTQLACADCSRLFPTKIGLSQHRRHAHPTQHNADKLSRVKHSGARWSQQESQSLLRLANNLYPSCETQTALFARLEQYFPGRSAISIKTRLRVLNWQAQQDKSSSGGPDQTIGQTAAYSSEADDYSVWFKQTVDCAVSLLESHADSSLASVDLLAFARGLQSGIMTPEQVLSLLDLHASRTFPHTWKTVSRRRRQLAHRMPVNRKQIRRANYAAIQTLYHQRRKDAASAVLDGSWKDLYKGNCGLPPDAEQYWKQVLSAPKHVDSRPSRVVVPSDWSLIEPITGEEVGRTVRSMGNSSPGLDKLTPRMLRRFNANVLAGYFNLLLLAGGCPPHLCRARITLVPKVPNPTSPDQLRPISVSSILVRCFHKVLADRWSRRLQLPSLQFAFLHRDGCLEATSLLHALLRHSSATASNLSLAFVDISKAFDSVSHDTIVRSAEAFGAPSPLVRYIAQSYENAVAVFPSSEVHCHRGVRQGDPLSPLLFIMAMDEVLGLSMPQLGYQFHDTLVDGFAFADDWVVCAESQARLKEKLEAAAVELGRAGMKINARKTKAMVICGDRKHRATAVSVEPFCFAEELITPLGPTDTVTYLGIPFTFKGKGVFNHRQHLLKLLDEVTRAPLKPHQRMEITRNYLIPRLTYSLVLGQVHRNTLKRLDNYIRQSIRGWLRLPKDTPISYIHAGKQHGGLGIPSLSATIPMQRRVRMEKLLSTQCRVLRNVVNDSAFGKVVRDLSLPIRVHGSCVNTKEELVAAWGDSLHNSVDGRGLRELVASPLSNRWLVFPERVFPRIFIRGIQLRCNLLRTRVRSARHGHGGQTILCRGNCGQPESLVHILQSCWITHDARCARHNRVARELAKRLRRLGYTVFEELRAPTSTSFIKPDLIAVRERRATVIDVSIVSDGRGMTVWNEKKQKYGADEFSLAIISALRAIGCDVDFLVHQPMIISYRGICFPQSAKAVIGLGLSKVTVSDLCLLAIVGSLRTYDTFMRGTWR

SEQ ID NO: 7749 - protein, 990 aa, Clonorchis sinensis
MVTQLACADCSRLFPTKIGLSQHRRHAHPTQHNADKLSRVKHSGARWSQQESQSLLRLANNLYPSCETQTALFARLEQYFPGRSAISIKTRLRVLNWQAQQDESSSGGPDQTIGQIAAYSSEADDYSVWFKQTVDCAVSLLESHADSSLASVDLLAFARGLQSGIMTPEQVLSLLDLHASRTFPHTWKTVSRRRQLVYRMPVNRKQIRRANYAAIQTLYHQRRKDAASAVLDGSWKDLYKGNCGLPPDAEQYWKQVLSAPKHVDSRPSRVIVPSDWSLIEPITGEEVGRTVRSMGNSSPGLDKLTPRMLRRFNANVLAGYFNLLLLAGGCPPHLCRARITLVPKVPNPTSPDQLRPISVSSILVRCFHKVLADRWSRRLQLPSLQFAFLHRDGCLEATSLLHALLRHSSATASNLSLAFVDISKAFDSVSHDTIVRSAEAFGAPSPLVRYIAQSYENAVAVFPSSEVHCHRGVRQGDPLSPLLFIMAMDEVLGLSMPQLGYQFHDTLVDGFAFADDWVVCAESQARLKEKLEAAAVELGRAGMKINARKTKAMVICGDRKHRATAVSVEPFCFAEELITPLGPTDTVTYLGIPFTFKGKGVFNHRQHLLKLLDEVTRAPLKPHQRMEITRNYLIPRLTYSLVLGQVHRNTLKRLDNYIRQSIRGWLRLPKDTPISYIHAGKQHGGLGIPSLSATIPMQRRVRMEKLLSTQCRVLRNVVNDSAFGKVVRDLSLPIRVHGSCVNTKEELVAAWGDSLHNSVDGRGLRELVASSLSNRWLVFPERVFPRIFIRGIQLRCNLLRTRVRSARHGHGGQTILCRGNCGQPESLVHILQSCWITHDARCARHNRVARELAKRLRRLGYTVFEELRAPTSTSFIKPDLIAVRERRATVIDVSIVSDGRGVTVWNEKKQKYGADEFSLAIISALRAIGCDVDFLVHQPMIISYRGICFPQSAKAVIGLGLSKVTVSDLCLLAIVGSLRTYDTFMRGTWR

SEQ ID NO: 7750 - protein, 991 aa, Clonorchis sinensis
MVAQLACADCSRLFPTKIGLSQHRRHAHPTQHNADKLSRVKHSGARWSQQESQSLLRLANNLYPSCETQTALFARLEQYFPGRSAISIKTRLRVLNWQAQQDESSSGGPDQTIGQIAAYSSEADDYSVWFKQTVDCAVSLLESHADSSLASVDLLAFARGLQSGIMTPEQVLSLLDLHASRTFPHTWKTVSRRRRQLAHRMPVNRKQIRRANYAAIQTLYHQRRKDAASAVLDGSWKDLYKGNCGLPPDAEQYWKQVLSAPKHVDSRPSRVVVPSDWSLIEPITGEEVGRTVRSMGNSSPGLDKLTPRMLRRFNANVLAGYFNLLLLAGGCPPHLCRARITLVPKVPNPTSPDQLRPISVSSILVRCFHKVLADRWSRRLQLPSLQFAFLHRDGCLEATSLLHALLRHSSATASNLSLAFVDISKAFDSVSHDTIVRSAEAFGAPSPLVRYIAQSYENAVAVFPSSEVHCHRGVRQGDPLSPLLFIMAMDEVLGLSMPQLGYQFHDTLVDGFAFADDWVVCAESQARLKEKLEAAAVELGRAGMKINARKTKAMVICGDRKHRATAVSVEPFCFAEELITPLGPTDTVTYLGIPFTFKGKGVFNHRQHLLKLLDEVTRAPLKPHQRMEITRNYLIPRLTYSLVLGQVHRNTLKRLDNYIRQSIRGWLRLPKDTPISYIHAGKQHGGLGIPSLSATIPMQRRVRMEKLLSTQCRVLRNVVNDSAFGKVVRDLSLPIRVHGSCVNTKEELVAAWGDSLHNSVDGRGLRELVASPLSNRWLVFPERVFPRIFIRGIQLRCNLLRTRVRSARHGHGGQTILCRGNCGQPESLVHILQSCWITHDARCARHNRVARELAKRLRRLGYTVFEELRAPTSTSFIKPDLIAVRERRATVIDVSIVSDGRGMTVWNEKKQKYGADEFSLAIISALRAIGCDVDFLVHQPMIISYRGICFPQSAKAVIGLGLSKVTVGDLCLLATVDSLRTCNTFMRDTWP

SEQ ID NO: 7751 - protein, 1123 aa, Clonorchis sinensis
MKQLYNAFRHFSIDSLHLRDKISPWRHSEYNYKERSASRTTSSWCRLGSLDVSLGELRDQQLQTGLTTLFGFNVLVTFDNVHYKTSGASAPVPTSAQERLVGLTCEECGKWCKSKAGLVAHHRVHDNDSVGTNMVAQLACADCSRLFPTKIGLSQHRRHAHPTQHNADKLSRVKHSGARWSQQESQSLLRLANNLYPSCETQTALFARLEQYFPGRSAISIKTRLRVLNWQAQQDKSSSGGPDQTIGQIAAYSSEADDYSVWFKQTVDCAVSLLESHADSSLASVDLLAFARGLQSGIMTPEQVLSLLDLHASRTFPHTWKTVSRRRQLVYRMPVNRKQIRRANYAAIQTLYHQRRKDAASAVLDGSWKDLYKGNCGLPPDAEQYWKQVLSAPKHVDSRPSRVIVPSDWSLIEPITGEEVGRTVRSMGNSSPGLDKLTPRMLRRFNANVLAGYFNLLLLAGGCPPHLCRARITLVPKVPNPTSPDQLRPISVSSILVRCFHKVLADRWSRRLQLPSLQFAFLHRDGCLEATSLLHALLRHSSATASNLSLAFVDISKAFDSVSHDTIVRSAEAFGAPSPLVRYIAQSYENAVAVFPSSEVHCHRGVRQGDPLSPLLFIMAMDEVLGLSMPQLGYQFHDTLVDGFAFADDWVVCAESQARLKEKLEAAAVELGRAGMKINARKTKAMVICGDRKHRATAVSVEPFCFAEELITPLGPTDTVTYLGIPFTFKGKGVFNHRQHLLKLLDEVTRAPLKPHQRMEITRNYLIPRLTYSLVLGQVHRNTLKRLDNYIRQSIRGWLRLPKDTPISYIHAGKQHGGLGIPSLSATIPMQRRVRMEKLLSTQCRVLRNVVNDSAFGKVVRDLSLPIRVHGSCVNTKEELVAAWGDSLHNSVDGRGLRELVASSLSNRWLVFPERVFPRIFIRGIQLRCNLLRTRVRSARHGHGGQTILCRGNCGQPESLVHILQSCWITHDARCARHNRVARELAKRLRRLGYTVFEELRAPTSTSFIKPDLIAVRERRATVIDVSIVSDGRGVTVWNEKKQKYGADEFSLAIISALRAIGCDVDFLVHQPMIISYRGICFPQSAKAVIGLGLSKVTVSDLCLLAIVGSLRTYDTFMRGTWR

SEQ ID NO: 7752 - protein, 851 aa, Opisthorchis felineus
MTPEQVLSLLDLHASRTFPHIWKTVSRRRRQLAHRIPVNRKQIRRANYAAIQTLYHQRRKDAASAVLDGSWKDLYKGNCGLPLNAEQYWKQVLSAPKHVDSRPSRVVVPSDWSLIEPITGEEVGRTIRLMGNSSPGLDKLTPRMLHRFNANALAGYFNLLLLSGGCPLHRCRARITLVPKVPNPTSPDQLRPISVSSILVRCFHKVLADRWSRRLQLPSLQFAFLHRDGCLEATSLLHALLRHSSATASNLSLAFVDISKAFDSVSHDTIVRSAKAFGAPSPLVRYIAQSYENAVAVFPNSEVHCHRGVRQGDPLPPLLFIMAMDEVLGLSMPQLGYQFHDTLVDGFAFADDWVVCAESQARLKEKLEAAAVELGRAGMKINARKTKAMVICGDRKHRATAVSVEPFCFAEELITPLGPTDTVTYLGIPFTFKGKGVFNHRQHLLKLLDEVTRAPLKPHQRMEITRNYLIPRLTYSLVLGQVHRNTLKRLDNYIRQSIRGWLRLPKDTPISYIHAGKQHGGLGIPSLSATIPMQRRARMEKLFSTQCRVLRNVVNDSAFGKIVRDLSLPIRVHGACVNTKEELVAAWGDSLHNSVDGRGLRELVASPLSNRWLVFPERVFPRIFIRGIQLRCNLLRTRVRSARHGHGGQTILCRGNCGQPESLVHILQSCWITHDARCARHNRVARELAKRLRRLGYTVFEELRAPTSTSFLKPDLIAVRERQATVIDVSIVSVGRGVTVWDEKKQNYGADKYSLAIISALRAIGCDVDFLVHQPMIISYRGIYLHQSAKAVIGLGLPKFTVSDLCLLAIVGSLRTYDTFMRGTWRRVHILAIESHIRPSMTDTLCLMCEY

SEQ ID NO: 7753 - protein, 991 aa, Clonorchis sinensis
MVAQLACADCSRLFPTKIGLSQHRRHAHPTQHNADKLSRVKHSGARWSQQESQSLLRLANNLYPSCETQTALFARLEQYFPGRSAISIKTRLRVLNWQAQQDESSSGGPDQTIGQIAAYSSEADDYSVWFKQTVDCAVSLLESHADSSLASVDLLAFARGLQSGIMTPEQVLSLLDLHASRTFPHTWKTVSRRRRQLAHRMPVNRKQIRRANYAAIQTLYHQRWKDAASAVLDGSWKDLYKGNCGLPPDAEQYWKQVLSAPKHVDSRPSRVVVPSDWSLIEPITGEEVGRTVRSMGNSSPGLDKLTPRMLRRFNANVLAGYFNLLLLSGGCPPHLCRARITLVPKVPNPTSPDQLRPISVSSILVRCFHKVLADRWSRRLQLPSLQFAFLHRDGCLEATSLLHALLRHSSATASNLSLAFVDISKAFDSVSHDTIVRSAEAFGAPSPLVRYIAQSYENAVAVFPSSEVHCHRGVRQGDPLSPLLFIMAMDEVLGLSMPQLGYQFHDTLVDGFAFADDWVVCAESQARLKEKLEAAAVELGRAGMKINARKTKAMVICGDRKHRATAVSVEPFCFAEELITPLGPTDTVTYLGIPFTFKGKGVFNHRQHLLKLFDEVTRAPLKPHQRMEITRNYLIPRLTYSLVLGQVHRNTLKRLDNYIRQSIRGWLRLPKDTPISYIHAGKQHGGLGIPSLSATIPMQRRVRMEKLLSTQCRVLRNVVNDSAFGKVVRDLSLPIRVHGSCVNTKEELVAAWGDSLHNSVDGRGLRELVASPLSNRWLVFPERVFPRIFIRGIQLRCNLLRTRVRSARHGHGGQTILCRGNCGQPESLVHILQSCWITHDARCARHNRVARELAKRLRRLGYTVFEELRAPTSTSFIKPDLIAVRERRATVIDVSIVSDGRGVTVWNEKKQKYGVDEFSLAIISALRAIGCDVDFLVHQPMVISYRGICFPQSPKAVIGLGLSKVTVSDLCLLAIVGSLRTYDTFMRGTWR

SEQ ID NO: 7754 - protein, 991 aa, Clonorchis sinensis
MVAQLACADCSRLFPTKIGLSQHRRHAHPTQHNADKLSRVKHSGARWSQQESQSLLRLANNLYPSCETQTALFARLEQYFPGRSAISIKTRLRVLNWQAQQDESSSGGPDQTIGQIAAYSSEADDYSVWFKQTVDCAVSLLESHADSSLASVDLLAFARGLQSGIMTPEQVLSLLDLHASRTFPHTWKTVSRRRRQLAHRMPVNRKQIRRANYAAIQTLYHQRWKDAASAVLDGSWKDLYKGNCGLPPDAEQYWKQVLSAPKHVDSRPSRVVVPSDWSLIEPITGEEVGRTVRSMGNSSPGLDKLTPRMLRRFNANVLAGYFNLLLLSGGCPPHLCRARITLVPKVPNPTSPDQLRPISVSSILVRCFHKVLADRWSRRLQLPSLQFAFLHRDGCLEATSLLHALLRHSSATASNLSLAFVDISKAFDSVSHDTIVRSAEAFGAPSPLVRYIAQSYENAVAVFPSSEVHCHRGVRQGDPLSPLLFIMAMDEVLGLSMPQLGYQFHDTLVDGFAFADDWVVCAESQARLKEKLEAAAVELGRAGMKINARKTKAMVICGDRKHRATAVSVEPFCFAEELITPLGPTDTVTYLGIPFTFKGKGVFNHRQHLLKLLDEVTRAPLKPHQRMEITRNYLIPRLTYSLVLGQVHRNTLKRLDNYIRQSIRGWLRLPKDTPISYIHAGKQHGGLGIPSLSATIPMQRRVRMEKLLSTQCRVLRNVVNDSAFGKVVRDLSLPIRVHGSCVNTKEELVAAWGDSLHNSVDGRGLRELVASPLSNRWLVFPERVFPRIFIRGIQLRCNLLRTRVRSARHGHGGQTILCRGNCGQPESLVHILQSCWITHDARCARHNRVARELAKRLRRLGYTVFEELRAPTSTSFIKPDLIAVRERRATVIDVSIVSDGRGMTLWNEKKQKYGADEFSLAILSALRAIGCDVDFLVHQPMIISYRGICFPQSAKAVIGLGLSKVTVSDLCLLAIVGSLRTYDTFMRGTWR

SEQ ID NO: 7755 - protein, 826 aa, Opisthorchis felineus
MTPEQVLSLLDLHASRTFPHIWKTVSRRRRQLAHRIPVNRKQIRRANYAAIQTLYHQRRKDAASAVLDGLWKDLYKGNCGLPLNAEQYWKQVLSAPKHVDSRPSRVVVPSDWSLIEPITGEEVGRTIRLMGNSSPGLDKHTPRMLRRFNANALAGYFNLLLLSGGCPPHLCRARITLVPKVPNPTSPDQLRPISVSSILVRCFHKVLADRWSRRLQLPSLKFAFLHQDGCLEATLLLHALLRHSSATASNLSLAFVDISKAFDSVSHDTIVRSAKAFGAPSPLVRYIAQSYENAVAVFPNSEVHCHRSVRQGDPLSPLLFIMAMDEVLGLSMPQLGYQFHDTLVDGFAFADDWVVCAESQARLKEKLEAAAVELGRAGMKINARKTKAMVICGDRKHRATAVSVEPFCFAEELITPLGPTDTVTYLGIPFTFKGKGVFNHRQHLLKLLDEVTRAPLKPHQRMEITRNYLIPRLTYSLVLGQVHRNTLKRLDNYVRQSIRGWLRLPKDTPISYIHAGKQHGGLGIPSLSATIPMQRRARMEKLLSTQCRVLRNVVNDSALGKIVRDLSLPIRVHGACVITKVVLVTAWGDSLHNSVDGRGLRELVASPLSNRWLVFPERVFPRIFIRGIQLRCNLLRTRVRSARHGHGGQTILCRGNCGQPESLVHILQSCWITHDARCARHNRVARELAKRLRRLGYTVFEELRAPTSTSFIKPDLIAVRERRATVIDVSIVSDGRGVTVWNEKKQKYGADEYSLAIISALRAIGCDVDFLVHQPMIISYRGICFPQSAKAVIGLGLPKVTVSDLCLLAIVGSLRTYDTFMRGTWR

SEQ ID NO: 7756 - protein, 991 aa, Clonorchis sinensis
MVAQLACADCSRLFPTKIGLSQHRRHAHPTQHNADKLSRVKHSGARWSQQESQSLLRLANNLYPSCETQTALFARLEQYFPGRSAISIKTRLRVLNWQAQQDESSSGGPDQTIGQIAAYSSEADDYSVWFKQTVDCAVSLLESHADSSLASVDLLAFARGLQSGIMTPEQVLSLLDLHASRTFPHTWKTVSRRRRQLAHRMPVNRKQIRRANYAAIQTLYHQRWKDAASAVLDGSWKDLYKGNCGLPPDAEQYWKQVLSAPKHVDSRPSRVVVPSDWSLIEPITGEEVGRTVRSMGNSSPGLDKLTPRMLRRFNANVLAGYFNLLLLSGGCPPHLCRARITLVPKVPNPTSPDQLRPISVSSILVRCFHKVLADRWSRRLQLPSLQFAFLHRDGCLEATSLLHALLRHSSATASNLSLAFVDISKAFDSVSHDTIVRSAEAFGAPSPLVRYIAQSYENAVAVFPSSEVHCHRGVRQGDPLSPLLFIMAMDEVLGLSMPQLGYQFHDTLVDGFAFADDWVVCAESQARLKEKLEAAAVELGRAGMKINARKTKAMVICGDRKHRATAVSVEPFCFAEELITPLGPTDTVTYLGIPFTFKGKGVFNHRQHLLKLLDEVTRAPLKPHQRMEITRNYLIPRLTYSLVLGQVHRNTLKRLDNYIRQSIRGWLRLPKDTPISYIHAGKQHGGLGIPSLSATIPMQRRVRMEKLLSTQCRVLRNVVNDSAFGKVVRDLSLPIRVHGSCVNTKEELVAAWGDSLHNSVDGRGLRELVASPLSNRWLVFPERVFPRIFIRGIQLRCNLLRTRVRSARHGHGGQTILCRGNCGQPESLVHILQSCWITHDARCARHNRVARELAKRLRRLGYTVFEELRAPTSTSFIKPDLIAVRERRATVIDVSIVSDGRGVTVWNEKKQKYGADEFSLAIISALRAIGCDVDFLVHQPMIISYRGICFPQSAKVVIGLGLSKVTIGDLCLLAIVGFLRTYDTFMRGTWR

SEQ ID NO: 7757 - protein, 971 aa, Opisthorchis felineus
MGLTCEECGKYCKSKAGLVAHHRVHDNESVGTNMVAQLACADCSRLFPTKIGLSQQRRHTHPTQHNADKLGRVKYSGARWSQQESQSLLRLANNLYPSCGTQTALFARLEQYFPGRSAISIKTRLRVLNWQAQQDESSSGGPDQTIGQITAYSSEADDYSVWFKQTVDCAVSLLESHADSSLASVDLLAFARGLQSGIMTPEQVLSLLDLHASRTFPHIWKTVSRRRRQLAHRMPVNRKQIRRANYAAIQTLYHQRRKDAASAVLDGSWKDLYKGNCGLPLNAEQYWKQVLSAPKHVDSRPSRVVVPSDWSLIEPITGEEVGRTIRLMGNSSPGLDKLTPRMLRRFNANALAGYFNLLLLSGGCPPHLCRARITLVPKVPNPTSPDQLRPISVSSILVRCFHKVLADRWSRRLQLPSLQFAFLHRDGCLEATSLLHALLRHSSATASNLSLAFVDISKAFDLVSHDTIVRSAKAFGAPSPLVRYIAQSYENAVAVFPNSEVHCHRGVRQGDPLSPLLFIMAMDEVLGLSMPQLGYQFHDTLVDGFAFADDWVVCAESQARLKEKLEAAAVELGRAGMKINARKTKAMVICGDRKHRAIAVSVEPFCFAEELITPLGPTDTVTYLGIPFTFKGKGVFNHRQHLLKLLDEVTRAPLKPHQRMEITRNYLIPRLTYSLVLGQVHRNTLKRLDNYIRQSTCGWLRLPKDTPISYIHAGKQHGGLGIPSLSATIPMQRRARMEKLFSTQCRVLRNVVNDSAFGKIVRDLSLPIRVHGACVNTKEELVAAWGDSLHNSVDGRGLRELVASPFSNRCLVFPERVFPRIFIRGIQLRCNLLRTRVRSPRHGHGGQTILCRGNCGQPESLVHILQSCWITHDARCARHNRVARELAKRLRRLGYTVFEELRAPTSTSFIKPDLIAVRERRATVIDVSIVSDGRGVTVWNEKKQKYGADEYSLAIISALRAVGCDVDFLVH

SEQ ID NO: 7758 - protein, 853 aa, Clonorchis sinensis
MSLLESHADSSLASVDLLAFARGLQSGIMTPEQVLSLLDLHASRTFPHTWKTVSRRRQLVYRMPVNRKQIRRANYAAIQTLYHQRRKDAASAVLDGSWKDLYKGNCGLPPDAEQYWKQVLSAPKHVDSRPSRVIVPSDWSLIEPITGEEVGRTVRSMGNSSPGLDKLTPRMLRRFNANVLAGYFNLLLLAGGCPPHLCRARITLVPKVPNPTSPDQLRPISVSSILVRCFHKVLADRWSRRLQLPSLQFAFLHRDGCLEATSLLHALLRHSSATASNLSLAFVDISKAFDSVSHDTIVRSAEAFGAPSPLVRYIAQSYENAVAVFPSSEVHCHRGVRQGDPLSPLLFIMAMDEVLGLSMPQLGYQFHDTLVDGFAFADDWVVCAESQARLKEKLEAAAVELGRAGMKINARKTKAMVICGDRKHRATAVSVEPFCFAEELITPLGPTDTVTYLGIPFTFKGKGVFNHRQHLLKLLDEVTRAPLKPHQRMEITRNYLIPRLTYSLVLGQVHRNTLKRLDNYIRQSIRGWLRLPKDTPISYIHAGKQHGGLGIPSLSATIPMQRRVRMEKLLSTQCRVLRNVVNDSAFGKVVRDLSLPIRVHGSCVNTKEELVAAWGDSLHNSVDGRGLRELVASSLSNRWLVFPERVFPRIFIRGIQLRCNLLRTRVRSARHGHGGQTILCRGNCGQPESLVHILQSCWITHDARCARHNRVARELAKRLRRLGYTVFEELRAPTSTSFIKPDLIAVRERRATVIDVSIVSDGRGVTVWNEKKQKYGADEFSLAIISALRAIGCDVDFLVHQPMIISYRGICFPQSAKAVIGLGLSKVTVSDLCLLAIVGSLRTYDTFMRGTWR

SEQ ID NO: 7759 - protein, 990 aa, Clonorchis sinensis
MVAQLACADCSRLFPTKIGLSQHRRHAHPTQHNADKLSRVKHSGARWSQQESQSLLRLANNLYPSCETQTALFARMEHYFPGRSAISTKTRLRVLNWQAQQDESSSGGPDQTIGQIAAYSSEADDYSVWFKQTVDCAVSLLESHADSSLASVDLLAFARGLQSGIMTPEQVLSLLDLHASRTFPHTWKTVSRRRQLVYRMPVNRKQIRRANYAAIQTLYHQRRKDAASAVLDGSWKDLYKGNCGLPPDAEQYWKQVLSAPKHVDSRPSRVIVPSDWSLIEPITGEEVGRTVRSMGNSSPGLDKLTPRMLRRFNANVLAGYFNLLLLAGGCPPHLCRARITLVPKVPNPTSPDQLRPISVSSILVRCFHKVLADRWSRRLQLPSLQFAFLHRDGCLEATSLLHALLRHSSATASNLSLAFVDISKAFDSVSHDTIVRSAEAFGAPSPLVRYIAQSYENAVAVFPSSEVHCHRGVRQGDPLSPLLFIMAMDEVLGLSMPQLGYQFHDTLVDGFAFADDWVVCAESQARLKEKLEAAAVELGRAGMKINARKTKAMVICGDRKHRATAVSVEPFCFAEELITPLGPTDTVTYLGIPFTFKGKGVFNHRQHLLKLLDEVTRAPLKPHQRMEITRNYLIPRLTYSLVLGQVHRNTLKRLDNYIRQSIRGWLRLPKDTPISYIHAGKQHGGLGIPSLSATIPMQRRVRMEKLLSTQCRVLRNVVNDSAFGKVVRDLSLPIRVHGSCVNTKEELVAAWGDSLHNSVDGRGLRELVASSLSNRWLVFPERVFPRIFIRGIQLRCNLLRTRVRSARHGHGGQTILCRGNCGQPESLVHILQSCWITHDARCARHNRVARELAKRLRRLGYTVFEELRAPTSTSFIKPDLIAVRERRATVIDVSIVSDGRGVTVWNEKKQKYGADEFSLAIISALRAIGCDVDFLVHQPMIISYRGICFPQSAKAVIGLGLSKVTIGDLCLLAIVGSLCTYDTFMRGTWR

SEQ ID NO: 7760 - protein, 991 aa, Clonorchis sinensis
MVAQLACADCSRLFPTKIGLSQHRRHAHPTQHNADKLSRVKHSGARWSQQESQSLLRLANNLYPSCETQTALFARLEQYFPGRSAISIKTRLRVLNWQAQQDESSSGGPDQTIGQIAAYSSEADDYSVWFKQTVDCAVSLLESHADSSLASVDLLAFARGLQSGIMTPEQVLSLLDLHASRTFPHTWKTVSRRRRQLAHRMPVNRKQIRRANYAAIQTLYHQRWKDAASAVLDGSWKDLYKGNCGLPPDAEQYWKQVLSAPKHVDSRPSRVVVPSDWSLIEPITGEEVGRTVRSMGNSSPGLDKLTPRMLRRFNANVLAGYFNLLLLSGGCPPHLCRARITLVPKVPNPTSPDQLRPISVSSILVRCFHKVLADRWSRRLQLPSLQFAFLHRDGCLEATSLLHALLRHSSATASNLSLAFVDISKAFDSVSHDTIVRSAEAFGAPSPLVRYIAQSYENAVAVFPSSEVHCHRGVRQGDPLSPLLFIMAMDEVLGLSMPQLGYQFHDTLVDGFAFADDWVVCAESQARLKEKLEAAAVELGRAGMKINARKTKAMVICGDRKHRATAVSVEPFCFAEELITPLGPTDTVTYLGIPFTFKGKGVFNHRQHLLKLLDEVTRAPLKPHQRMEITRNYLIPRLTYSLVLGQVHRNTLKRLDNYIRQSIRGWLRLPKDTPISYIHAGKQHGGLGIPSLSATIPMQRRVRMEKLLSTQCRVLRNVVNDSAFGKVVRDLSLPIRVHGSCVNTKEELVAAWGDSLHNSVDGRGLRELVASPLSNRWLVFPERVFPRIFIRGIQLRCNLLRTRVRSARHGHGGQTILCRGNCGQPESLVHILQSCWITHDARCARHNRVARELAKRLRRLGYTVFEELRAPTSTSFIKPDLIAVRERRATVIDVSIVSDGRGVTVWNEKKQKYGVDEFSLAIISALRAIGCDVDFLVHQPMIISYRGICFPQSAKAVIGLGLSKVTVSDLCLLAIVGSLRTYDTFMRGTWR

SEQ ID NO: 7761 - protein, 990 aa, Clonorchis sinensis
MVAQLACADCSHLFPTKIGLSQHRRHAHPTQHNADKLSRVKHSGARWSQQESQSLLRLANNLYPSCETQTALFARLEQYFPGRSAISTKTRLRVLNWQAQQDESSSGGPDQTIGQIAAYSSEADDYSVWFKQTVDCAMSLLESHADSSLASVDLLAFARGLQSGIMTPEQVLSLLDLHASRTFPHTWKTVSRRRQLVYRMPVNRKQIRRANYAAIQTLYQQRRKDAASAVLDGSWKDLYKGNCGLPPDAEQYWKQVLSAPKHVDSRPSRVIVPSDWSLIEPITGEEVGRTVRSMGNSSPGLDKLTPRMLRRFNANVLAGYFNLLLLAGGCPPHLCRARITLVPKVPNPTSPDQLRPISVSSILVRCFHKVLADRWSRRLQLPSLQFAFLHRDGCLEATSLLHALLRHSSATASNLSLAFVDISKAFDSVSHDTIVRSAEAFGAPSPLVRYIAQSYENAVAVFPSSEVHCHRGVRQGDPLSPLLFIMAMDEVLGLSMPQLGYQFHDTLVDGFAFADDWVVCAESQARLKEKLEAAAVELGRAGMKINARKTKAMVICGDRKHRATAVSVEPFCFAEELITPLGPTDTVTYLGIPFTFKGKGVFNHRQHLLKLLDEVTRAPLKPHQRMEITRNYLIPRLTYSLVLGQVHRNTLKRLDNYIRQSIRGWLRLPKDTPISYIHAGKQHGGLGIPSLSATIPMQRRVRMEKLLSTQCRVLRNVVNDSAFGKVVRDLSLPIRVHGSCVNTKEELVAAWGDSLHNSVDGRGLRELVASSLSNRWLVFPERVFPRIFIRGIQLRCNLLRTRVRSARHGHGGQTILCRGNCGQPESLVHILQSCWITHDARCARHNRVARELAKRLRRLGYTVFEELRAPTSTSFIKPDLIAVRERRATVIDVSIVSDGRGVTVWNEKKQKYGADEFSLAIISALRAIGCDVDFLVHQPMIISYRGICFPQSAKAVIGLGLSKVTVSDLCLLAIVGSLRTYDTFMRGTWR

SEQ ID NO: 7762 - protein, 991 aa, Opisthorchis felineus
MVAQLACADCSRLSPTKIGLSQHCRHAHPTQHNADKVGRVKYSGARWSQQESQSLLRLANNLYPSCGTQTALFARLEQYFPGRSAISIKTRLRVLNWQAQQDESSSGGPDQTIGQITAYSSEADDYSVWFKQTVDCAVSLLESHADSSLASVDLLAFARGLQSGIMTPEQVLSLLDLHASRTFSHTWKTVSRRRRQLAHRMPVNRKQIRRANYAAIQTLYHQRPKNAASAVLDGSWKDLYKGNCGLPLNAEQYWKQVLSAPKHVDSRPSRVVVPSDWSLIEPITGEEVGRTIRLMGNSSPGLDKLTPRMLRRFNANALAGYFNLLLLSGGCPPHLCRARITLVPKVPNPTSPDQLKPISVSSILVRCFHKVLADHWSRRLQLPSLQFAFLHRDGCLEATSLLHALLRHSSATASNLSLAFVDISKAFDSVSHDTIVRSAKAFGAPSPLVRYIAQSYENAVAVFPNSEVHCHRGVRQGDPLSPLLFIMAMDEVLGLSMPQLGYQFHDTLVDGFAFADDWVVCAESQARLKEKLEAAAVELGRAGMKINARKTKAMVICGDRKHRATAVSVEPFCFAEELITPLGPTDTVTYLGIPFTFKGKGVFNHRQHLLKLLDEVTRAPLKPHQRMEITRNYLIPRLTYSLVLGQVHRNTLKRLDNYIRQSIRGWLRLPKDTPISYIHAGKQHGGLGIPSLSATIPMQRRARMEKLFSTQCRVLRNVVNDSAFGKIVRDLSLPIRVHGACVNTKEELVAAWGDSLHNSVDGRGLRELVASPLSNRWLVFPERVFPRIFIRGIQLRCNLLRTRVRSARHGHGGQTILCRGNCGQPESLVHILQSCWITHDARCARHNRVARELAKRLRRLGYTVFEELRAPTSTSFIKPDLIAVRERRATVIDVSIVSDGRGVTVWNEKKQKYGADEYSLAIISALRAIGCDVDFLVHQPMIISYRGICFPQSAKAVIGLGLPKFTVSDLCLLAIVGSLRTYDTFMRGTWR

SEQ ID NO: 7763 - protein, 1005 aa, Clonorchis sinensis
MMHAGEWNVNLDSPSEEEIRHGISVLKRDKAPGPDGLYLALFKEGGESLVTHLIRLIGANDSVGTNMVAQWACADCSRLFPTKIGLSQHRRHAHPTQHNADKLNRVKHSGARWSQQESQSLLRLANNLYPSCETQTALFARLEQYFPGRSAISTKTRLRVLNWQAQQDESSSGGPDQTIGKIAAYSSEADDYSVWFKQTVDCAVSLLESHADSSLASVDLLAFARGLQTGIMTPEQVLSLLDLHASRTFPHTWKTVSRRRQLVYRMPVNRKQIRRANYTAIQTLYHQRRKDAASAVLDGSWKDLYKGNCGLPPDAEQYWKQVLSAPKHVDSRPSRVIVPSDWSLIEPITGEEVGRTVRSMGNSSPGLDKLTPRMLRRFNANVLAGYFNLLLLAGGCPPHLCRARITLVPKVPNPTSPDQLRPISVSSILVRCFHKVLADRWSRRLQLPSLQFAFLHRDGCLEATSLLHALLRHSSATASNLSLAFVDISKAFDSVSHDTIVRSAEAFGAPSPLVRYIAQSYENAVAVFPSSEVHCHRGVRQGDPLSPLLFIMAMDEVLGLSMPQLGYQFHDTLVDGFAFADDWVVCAESQARLKEKLEAAAVELGRAGMKINARKTKAMVICGDRKHRATAVSVEPFCFAEELITPLGPTDTVTYLGIPFTFKGKGVFNHRQHLLKLLDEVTRAPLKPHQRMEITRNYLIPRLTYSLVLGQVHRNTLKRLDNYIRQSIRGWLRLPKDTPISYIHAGKQHGGLGIPSLSATIPMQRRVRMEKLLSTQCRVLRNVVNDSAFGKVVRDLSLPIRVHGSCVNTKEELVAAWGDSLHNSVDGRGLRELVASSLSNRWLVFPERVFPRIFIRGIQLRCNLLRTRVRSARHGHGGQTILCRGNCGQPESLVHILQSCWITHDARCARHNRVARELAKRLRRLGYTVFEELRAPTSTSFIKPDLIAVRERRATVIDVSIVSDGRGVTVWNEKKQKYGADEFSLAIISALRAIGCDVDMRGTWR

SEQ ID NO: 7764 - protein, 991 aa, Clonorchis sinensis
MVAQLACADCSRLFPTKIGLSQHRRHAHPTQHNADKLSRVKHSGAPWSQQESQSLLRLAKNLYPSCETQTALFARLEQYFPGRSAISIKTRLRVLNWQAQQDESSSGGPDQTIGQIAAYSSEADDYSVWFKQTVDCAVSLLESHADSSLASVDLLAFARGLQSGIMTPEQVLSLLDLHASRTFPHTWKTVSRRRRQLAHRMPVNRKQIRRANYAAIQTLYHQRRKDAASAVLDGSWKDLYKGNCGLPPDAEQYWKQVLSAPKHVDSRPSRVVVPSDWSLIEPITGEEVGRTVRSMGNSSPGLDKLTPRMLRRFNANVLAGYFNLLLLAGGCPPHLCRARITLVPKVPNPTSPDQLRPISVSSILVRCFHKVLADRWSRRLQLPSLQFAFLHRDGCLEATSLLHALLRHSSATASNLSLAFVDISKAFDSVSHDTIVRSAEAFGAPSPLVRYIAQSYENAVAVFPSSEVHCHRGVRQGDPLSPLLFIMAMDEVLGLSMPQLGYQFHDTLVDGFAFADDWVVCAESQARLKEKLEAAAVELGRAGMKINARKTKAMVICGDRKHRATAVSVEPFCFAEELITPLGPTDTVTYLGIPFTFKGKGVFNHRQHLLKLLDEVTRAPLKPHQRMEITRNYLIPRLTYSLVLGQVHRNTLKRLDNYIRQSIRGWLRLPKDTPISYIHAGKQHGGLGIPSLSATIPMQRRVRMEKLLSTQCRVLRNVVNDSAFGKVVRDLSLPIRVHGSCVNTKEELVAAWGDSLHNSVDGRGLRELVASPLSNRWLVFPERVFPRIFIRGIQLRCNLLRTRVRSARHGHGGQTILCRGNCGQPESLVHILQSCWITHDARCARHNRVARELAKRLRRLGYTVFEELRAPTSTSFIKPDLIAVRERRATVIDVSIVSDGRGMTVWNEKKQKYGADEFSLAIISALRAIGCDVDFLVHQPMIISYRGICFPQSAKAVIGLGLSKVTVSDLCLLAIVGSLRTYDTFMRGTWR

SEQ ID NO: 7765 - protein, 826 aa, Clonorchis sinensis
MTPEQVLSLLDLHASRTFPHTWKTVSRRRRQLAHRMPVNRKQIRRANYAAIQTLYHQRRKDAASAVLDGSWKDLYKGNCGLPPDAEQYWKQVLSAPKHVDSRPSRVVVPSDWSLIEPITGEEVGRTVRSMGNSSPGLDKLTPRMLRRFNANVLAGYFNLLLLAGGCPPHLCRARITLVPKVPNPTSPDQLRPISVSSILVRCFHKVLADRWSRRLQLPSLQFAFLHRDGCLEATSLLHALLRHSSATASNLSLAFVDISKAFDSVSHDTIVRSAEAFGAPSPLVRYIAQSYENAVAVFPSSEVHCHRGVRQGDPLSPLLFIMAMDEVLGLSMPQLGYQFHDTLVDGFAFADDWVVCAESQARLKEKLEAAAVELGRAGMKINARKTKAMVICGDRKHRATAVSVEPFCFAEELITPLGPTDTVTYLGIPFTFKGKGVFNHRQHLLKLLDEVTRAPLKPHQRMEITRNYLIPRLTYSLVLGQVHRNTLKRLDNYIRQSIRGWLRLPKDTPISYIHAGKQHGGLGIPSLSATIPMQRRVRMEKLLSTQCRVLRNVVNDSAFGKVVRDLSLPIRVHGSCVNTKEELVAAWGDSLHNSVDGRGLRELVASPLSNRWLVFPERVFPRIFIRGIQLRCNLLRTRVRSARHGHGGQTILCRGNCGQPESLVHILQSCWITHDARCARHNRVARELAKRLRRLGYTVFEELRAPTSTSFIKPDLIAVRERRATVIDVSIVSDGRGVTVWNEKKQKYGADEFSLAIISALRAIGCDVDFLVHQPMIISYRGICFPQSAKAVIGLGLSKVTVSDLCLLAIVGSLRTYDTFMRGTWR

SEQ ID NO: 7766 - protein, 825 aa, Clonorchis sinensis
MTPEQVLSLLDLHASRTFPHTWKTVSRRRQLVYRMPVNRKQIRRANYTAIQTLYHQRRKDAASAVLDGSWKDLYKGNCGLPPDAEQYWKQVLSAPKHVDSRPSRVIVPSDWSLIEPITGEEVGRTVRSMGNSSPGLDKLTPRMLRRFNANVLAGYFNLLLLAGGCPPHLCRARITLVPKVPNPTSPDQLRPISVSSILVRCFHKVLADRWSRRLQLPSLQFAFLHRDGCLEATSLLHALLRHSSATASNLSLAFVDISKAFDSVSHDTIVRSAEAFGAPSPLVRYIAQSYENAVAVFPSSEVHCHRGVRQGDPLSPLLFIMAMDEVLGLSMPQLGYQFHDTLVDGFAFADDWVVCAESQARLKEKLEAAAVELGRAGMKINARKTKAMVICGDRKHRATAVSVEPFCFAEELITPLGPTDTVTYLGIPFTFKGKGVFNHRQHLLKLLDEVTRAPLKPHQRMEITRNYLIPRLTYSLVLGQVHRNTLKRLDNYIRQSIRGWLRLPKDTPISYIHAGKQHGGLGIPSLSATIPMQRRVRMEKLLSTQCRVLRNVVNDSAFGKVVRDLSLPIRVHGSCVNTKEELVAAWGDSLHNSVDGRGLRELVASSLSNRWLVFPERVFPRIFIRGIQLRCNLLRTRVRSARHGHGGQTILCRGNCGQPESLVHILQSCWITHDARCARHNRVARELAKRLRRLGYTVFEELRAPTSTSFIKPDLIAVRERRATVIDVSIVSDGRGVTVWNEKKQKYGADEFSLAIISALRAIGCDVDFLVHQPMIISYRGICFPQSAKAVIGLGLSKVTVSDLCLLAIVGSLRTYDTFMRGTWR

SEQ ID NO: 7767 - protein, 987 aa, Opisthorchis felineus
MVAQLACADCSPLFPTKIGLSQRRRHVHPTQHNADKLGRVKYSGARWSQQESQSLLRLANNLYPSCGTQTALFARLEQYFPGRSAISIKTRLRVLNWQAQQDASPSGGPDQTIGQITAYSSEADDYSVWFKQSVSLLESHADSSPASVDLLAFARGLQSGIMTPEQVLSLLDLHASRTFPHIWKTVSRRRRQLAHRIPVNRKQIRRANYAAIQTLYHQRRKDAASAVLDGSWKDLYKGNCGLPLNAEQYWKQVLSAPKHVDSRPSRVVVPSDWSLIGPITEEEVGRTIRVLGNSSPGLDKLTPRMLRRFNANALAGYFNLLLLSGGCPPHLCRARITLVPKVPNPTSPDQLRPISVSSILVRCFHKVLADRWSRRLQLPSLQFAFLHRDGCLEATSLLHALLRHSSATASNLSMAFVDISKAFDSVSHDTIVRSAKAFGAPSPLVRYIAQSYENAVAVFPNSEVHCHRGVRQGDPLSPLLFIMAMDEVLGLSMPQLGYQFHDTLVDGFAFADDWVVCAESQARLKEKLEAAAVELGRAGMRINARKTKAMVICGDRKHRATAVSVEPFCFAEELITPLGPTDTVTYLGIPFTFKGKGVFNHRQHLLKLLDEVTRAPLKPHQRMEITRNYLIPRLTYSLVLGQVHRNTLKRLDNYIRQSIRGWLRLPKDTPISYIHAGKQHGGLGIPSLSATIPMQWRARMEKLFSTQCRVLRNVVNDSAFGKIVRDLSLPIRVHGACVNTKEELVAAWGDSLHNSVDGRGLRELVASPLSNRWLVFPERVFPRIFIRGIQLRCNLLRTRVRSARHGHGGQTILCRGNCGQPESLVHILQSCWSTHDARCARHNRVARELAKRLRRLGYTGFEELRAPTSTSFIKPDLIAVRERRATVIDVSIVSDGRGVTVWNEKKQKYGADEYSLAIISALRAIGCDVDFLVHQQMIISFRGICFPQSAKAVIGLGLPKFTVSDLCLLGIVGCLRTYDTSMRGTWR

SEQ ID NO: 7768 - protein, 991 aa, Clonorchis sinensis
MVAQLACADCSRLFPTKIGLSQHRRHAHPTQHNADKLSRVKHSGARWSQQESQSLLRLANNLYPSCETQTALFARLEQYFPGRSAISIKTRLRVLNWQAQQDESSSGGPDQTIGQMATHSSEADDYSVWFKQTVDCAMSLLESHADSSLASVDLLAFARGLQSGIMTPEQVLSLLDLQASRTFPHTWKTVSRRRRQLAHRMPVNRKQIRRANYAAIQTLYHQRRKDAASAVLDGSWKDLYKGNCGLPPDAEQYWKQVLSAPKHVDSRPSRVIVPSDWSLIEPITGEEVGRTVRSMGNSSPGLDKLTPRMLRRFNANVLAGYFNLLLLAGGCPPHLCRARITLVPKVPNPTSPDQLRPISVSSILVRCFHKVLADRWSRRLQLPSLQFAFLHRDGCLEATSLLHALLRHSSATASNLSLAFVDISKAFDSVSHDTIVRSAEAFGAPSPLVRYIAQSYENAVAVFPSSEVHCHRGVRQGDPLSPLLFIMAMDEVLGLSMPQLGYQFHDTLVDGFAFADDWVVCAESQARLKEKLEAAAVELGRAGMKINARKTKAMVICGDRKHRATAVSVEPFCFAEELITPLGPTDTVTYLGIPFTFKGKGVFNHRQHLLKLLDEVTRAPLKPHQRMEITRNYLIPRLTYSLVLGQVHRNTLKRLDNYIRQSIRGWLRLPKDTPISYIHAGKQHGGLGIPSLSATIPMQRRVRMEKLLSTQCRVLRNVVNDSAFGKVVRDLSLPIRVHGSCVNTKEELVAAWGDSLHNSVDGRGLRELVASSLSNRWLVFPERVFPRIFIRGIQLRCNLLRTRVRSARHGHGGQTILCRGNCGQPESLVHILQSCWITHDARCARHNRVARELAKRLRRLGYTVFEELRAPTSTSFIKPDLIAVRERRATVIDVSIVSDGRGVTVWNEKKQKYGADEFSLAIISALRAIGCDVDFLVHQPMIISYRGICFPQSAKAVIGLGLSKVTVSDLCLLAIVGSLRTYDTFMRGTWR

SEQ ID NO: 7769 - protein, 1083 aa, Clonorchis sinensis
MYPPGGSSLDASLGELRVQQLQTGLTTLFGFNVLVTFDNVHYKTSGASAPVPTSTQERFVGLTCEECGKWCKSKAGLVAHHRVHDNDSVGTNMVAQLACADCSRLFPTKIGLSQHRRHAHPTQHNADKLSRVKHSGARWSQQESQSLLRLANNLYPSCETQTALFARLEQYFPGRSAISIKTRLRVLNWQAQQDESSSGGPDQTIGQIAAYSSEADDYSVWFKQTVDCAVSLLESHADSSLASVDLLAFARGLQSGIMTPEQVLSLLDLHASRTFPHTWKTVSRRRRQLAHRMPVNRKQIRRANYAAIQTLYHQRWKDAASAVLDGSWKDLYKGNCGLPPDAEQYWKQVLSAPKHVDSRPSRVVVPSDWSLIEPITGEEVGRTVRSMGNSSPGLDKLTPRMLRRFNANVLAGYFNLLLLSGGCPPHLCRARITLVPKVPNPTSPDQLRPISVSSILVRCFHKVLADRWSRRLQLPSLQFAFLHRDGCLEATSLLHALLRHSSATASNLSLAFVDISKAFDSVSHDTIVRSAEAFGAPSPLVRYIAQSYENAVAVFPSSEVHCHRGVRQGDPLSPLLFIMAMDEVLGLSMPQLGYQFHDTLVDGFAFADDWVVCAESQARLKEKLEAAAVELGRAGMKINARKTKAMVICGDRKHRATAVSVEPFCFAEELITPLGPTDTVTYLGIPFTFKGKGVFNHRQHLLKLFDEVTRAPLKPHQRMEITRNYLIPRLTYSLVLGQVHRNTLKRLDNYIRQSIRGWLRLPKDTPISYIHAGKQHGGLGIPSLSATIPMQRRVRMEKLLSTQCRVLRNVVNDSAFGKVVRDLSLPIRVHGSCVNTKEELVAAWGDSLHNSVDGRGLRELVASPLSNRWLVFPERVFPRIFIRGIQLRCNLLRTRVRSARHGHGGQTILCRGNCGQPESLVHILQSCWITHDARCARHNRVARELAKRLRRLGYTVFEELRAPTSTSFIKPDLIAVRERRATVIDVSIVSDGRGVTVWNEKKQKYGVDEFSLAIISALRAIGCDVDFLVHQPMIISYRGICFPQSAKAVIGLGLSKVTVSDLCLLAIVGSLRTYNTFMRDTWP

SEQ ID NO: 7770 - protein, 977 aa, Clonorchis sinensis
MHDKTGQHDGCQDSNTICMQHNLSRVKHSGARWSQQESQSLLRLANNLYPSCETQTALFARLEQYFPGRSAISIKTRLRVLNWQAQQDESSSGGPDQTIGQIAAYSSEADDYSVWFKQTVDCAVSLLESHADSSLASVDLLAFARGLQSGIMTPEQVLSLLDLHASRTFPHTWKTVSRRRRQLAHRMPVNRKQIRRANYAAIQTLYHQRWKDAASAVLDGSWKDLYKGNCGLPPDAEQYWKQVLSAPKHVDSRPSRVVVPSDWSLIEPITGEEVGRTVRSMGNSSPGLDKLTPRMLRRFNANVLAGYFNLLLLSGGCPPHLCRARITLVPKVPNPTSPDQLRPISVSSILVRCFHKVLADRWSRRLQLPSLQFAFLHRDGCLEATSLLHALLRHSSATASNLSLAFVDISKAFDSVSHDTIVRSAEAFGAPSPLVRYIAQSYENAVAVFPSSEVHCHRGVRQGDPLSPLLFIMAMDEVLGLSMPQLGYQFHDTLVDGFAFADDWVVCAESQARLKEKLEAAAVELGRAGMKINARKTKAMVICGDRKHRATAVSVEPFCFAEELITPLGPTDTVTYLGIPFTFKGKGVFNHRQHLLKLLDEVTRAPLKPHQRMEITRNYLIPRLTYSLVLGQVHRNTLKRLDNYIRQSIRGWLRLPKDTPISYIHAGKQHGGLGIPSLSATIPMQRRVRMEKLLSTQCRVLRNVVNDSAFGKVVRDLSLPIRVHGSCVNTKEELVAAWGDSLHNSVDGRGLRELVASPLSNRWLVFPERVFPRIFIRGIQLRCNLLRTRVRSARHGHGGQTILCRGNCGQPESLVHILQSCWITHDARCARHNRVARELAKRLRRLGYTVFEELRAPTSTSFIKPDLIAVRERRATLIDVSIVSDGRGVTVWNEKKQKYGVDEFSLVIISALRAVGCDVDFLVHQPMIISYRGICFPQSAKAVIGLGLSKVTVGDLCLLAIVGFLRTYDTFMRGTWR

SEQ ID NO: 7771 - protein, 773 aa, Opisthorchis felineus
MTPEQVLSLLDLHASRTFPHIWKTVSRRRRQLAHRIPVNRKQIRRANYAAIQTLYHQRRKDAASAVLDGSWKDLYKGNCDLPLNAEQYWKQVLSAPKHVDSRPSRVVVPSDWSLIEPITGEEVGRTIRLMGNSSPGLDKLTPRMLRRFNANALAGYFNLLLLSGGCPPHLCRARITLVPKVPNPTSPDQLRPISVSSILVRCFHKVLADRWSRRLQLPSLKFAFLHRDGCLEATSLLHALLRHSSATASNLSLAFVDISKAFDSVSHDTIVRSSKAFGAPSPLVRYIAQSYENAVAVFPNSEVHCHRGVRQGDPLSPLLFIMAMDEVLGLSMPQLGYQFHDTLVDGFAFADDWVVCAESQASLKEKLEAAAVELGRAGMKINARKTKAMVICGDRKHRATAVSVEPFCFAEELITPLGPTDTVTYLGIPFTFKGKEVFNHRQHLLKLLDEVTRAPLKRHQRMEITRNYLIPRLTYSLVLGQVHRNTLKRLDNYIRQSIRGWLRLPKDTPISYIHAGKQHGGLGIPSLSATIPMQRRALMEKLFSTQCRVLRNVVNDSAFGKIVRDLSLRIRIHGACVNTKEELVAAWGDSLHNSVDGRGLRELVASPLSNRWLVFPERVFPRIFIRGIQLRCNLLRTRVRSARHGHGGQTILCRGNCGQPESLVHILQSCWITHDARCARHNRVARELAKRLRRLGYTGFEELRAPTSMSFIKPDLIAVRERRATVIDVSIVSDGRGVTVWNEKKQKYGADEYSLAIIPALRAIGCDVDFLVH

SEQ ID NO: 7772 - protein, 991 aa, Clonorchis sinensis
MVAQLACADCSRLFPTKIGLSQHRRHAHPTQHNADKLSRVKHSGARWSQQESQSLLRLANNLYPSCETQTALFARLEQYFPGRSAISIKTRLRVLNWQAQQDESSSGGPDQTIGQIAAYSSEADDYSVWFKQTVDCAVSLLESHADSSLASVDLLAFARGLQSGIMTPEQVLSLLDLHASRTFPHTWKTVSRRRRQLAHRMPVNRKQIRRANYAAIQTLYHQRWKDAASAVLDGSWKDLYKGNCGLPPDAEQYWKQVLSAPKHVDSRPSRVVVPSDWSLIEPITGEEVGRTVRSMGNSSPGLDKLTPRMLRRFNANVLAGYFNLLLLSGGCPPHLCRARITLVPKVPNPTSPDQLRPISVSSILVRCFHKVLADRWSRRLQLPSLQFAFLHRDGCLEATSLLHALLRHSSATASNLSLAFVDISKAFDSVSHDTIVRSAEAFGAPSPLVRYIAQSYENAVAVFPSSEVHCHRGVRQGDPLSPLLFIMAMDEVLGLSMPQLGYQFHDTLVDGFAFADDWVVCAESQARLKEKLEAAAVELGRAGMKINARKTKAMVICGDRKHRATAVSVEPFCFAEELITPLGPTDTVTYLGIPFTFKGKGVFNHRQHLLKLFDEVTRAPLKPHQRMEITRNYLIPRLTYSLVLGQVHRNTLKRLDNYIRQSIRGWLRLPKDTPISYIHAGKQHGGLGIPSLSATIPMQRRVRMEKLLSTQCRVLRNVVNDSAFGKVVRDLSLPIRVHGSCVNTKEELVAAWGDSLHNSVDGRGLRELVASPLSNRWLVFPERVFPRIFIRGIQLRCNLLRTRVRSARHGHGGQTILCRGNCGQPESLVHILQSCWITHDARCARHNRVARELAKRLRRLGYTVFEELRAPTSTSFIKPDLIAVRERRATVIDVSIVSDGRGVTVWNEKKQKYGVDEFSLAIISALRAIGCDVDFLVHQPMIISYRGICFPQSAKAVIGLGLSKVTVSDLCLLAIVGSLRTYDTFMRGTWR

SEQ ID NO: 7773 - protein, 974 aa, Clonorchis sinensis
MVAQLACADCSRLFPTKIGLSQHHRNAHSTQHNADKLSRVKNSGARWSQQESQSLLRLAKNLYPSCDTQTALFLRLEQYFPGRSAISIKTRLRVFNWQAQQDKSSSGVPDQTIGQIAAFSSEADDYSVWFKQTVECAVSLLESRADSSLASVDLLAFARGLQSGIMTPEQVLSLLDLHASRTFPHTWKTVSRRRRQLAHRMPVNRKQIRRANYAAIQTLYHQRRKDAASAVLDGSWKDLYKGNCGLPPDAEQYWKQVLSAPKHVDSRPSRVVVPSDWSLIEPITGEEVGRTVRSMGNSSPGLDKLTPRMLRRFNANVLAGYFNLLLLAGGCPPHLCRARITLVPKVPNPTSPDQLRPISVSSILVRCFHKVLADRWSRRLQLPSLQFAFLHRDGCLEATSLLHALLRHSSATASNLSLAFVDISKAFDSVSHDTIVRSAEAFGAPSPLVRYIAQSYENAVAVFPSSEVHCHRGVRQGDPLSPLLFIMAMDEVLGLSMPQLGYQFHDTLVDGFAFADDWVVCAESQARLKEKLEAAAVELGRAGMKINARKTKAMVICGDRKHRATAVSVEPFCFAEELITPLGPTDTVTYLGIPFTFKGKGVFNHRQHLLKLLDEVTRAPLKPHQRMEITRNYLIPRLTYSLVLGQVHRNTLKRLDNYIRQSIRGWLRLPKDTPISYIHAGKQHGGLGIPSLSATIPMQRRVRMEKLLSTQCRVLRNVVNDSAFGKVVRDLSLPIRVHGSCVNTKEELVAAWGDSLHNSVDGRGLRELVASPLSNRWLVFPEGVFPRIFIRGIQLRCNLLRTRVRSARHGHGGQTILCRGNCGQPESLVHILQSCWITHDARCARHNRVARELAKRLRHLGYTVFEELRAPTSSSFIKLDLIAVRERRATVIDVSIFSDGRGVTVWNEKKQKYGADDVDHHQPMIISYRGICFPQSAKAVIGLGLSKVTVSDLCLIAIVGSLRTYDTFMRGTWR

SEQ ID NO: 7774 - protein, 991 aa, Clonorchis sinensis
MVAQLACADCSRLFPTKIGLSQHRRHAHPTQHNADKLSRVKHSGARWSQQESQSLLRLANNLYPSCETQTALFARLEQYFPGRSAISTKTRLRVLNWQAQQDKSSSGGPDQTIGQTAAYSSEADDYSVWFKQTVDCAVSLLESHADSSLASVDLLAFARGLQSGIMTPEQVLSLLDLHASRTFPHTWKTVSRRRRQLAHRMPVNRKQIRRANYAAIQTLYHQRRKDAASAVLDGSWKDLYKGNCGLPPDAEQYWKQVLSAPKHVDSRPSRVVVPSDWSLIEPITGEEVGRTVRSMGNSSPGLDKLTPRMLRRFNANVLAGYFNLLLLAGGCPPHLCRARITLVPKVPNPTSPDQLRPISVSSILVRCFHKVLADRWSRRLQLPSLQFAFLHRDGCLEATSLLHALLRHSSATASNLSLAFVDISKAFDSVSHDTIVRSAEAFGAPSPLVRYIAQSYENAVAVFPSSEVHCHRGVRQGDPLSPLLFIMAMDEVLGLSMPQLGYQFHDTLVDGFAFADDWVVCAESQARLKEKLEAAAVELGRAGMKINARKTKAMVICGDRKHRATAVSVEPFCFAEELITPLGPTDTVTYLGIPFTFKGKGVFNHRQHLLKLLDEVTRAPLKPHQRMEITRNYLIPRLTYSLVLGQVHRNTLKRLDNYIRQSIRGWLRLPKDTPISYIHAGKQHGGLGIPSLSATIPMQRRVRMEKLLSTQCRVLRNVVNDSAFGKVVRDLSLPIRVHGSCVNTKEELVAAWGDSLHNSVDGRGLRELVASPLSNRWLVFPERVFPRIFIRGIQLRCNLLRTRVRSARHGHGGQTILCRGNCGQPESLVHILQSCWITHDARCARHNRVARELAKRLRRLGYTVFEELRAPTSTSFIKPDLIAVRERRATVIDVSIVSDGRGMTVWNEKKQKYGADEFSLAIISALRAIGCDVDFLVHQPMIISYRGICFPQSAKAVIGLGLSKVTVSDLCLLAIVGSLRTYDTFMRGTWR

SEQ ID NO: 7775 - protein, 991 aa, Clonorchis sinensis
MVTQLACADCSRLFPKKIGLSQHRRHAHPTQHNADKLSRVKHSGARWSQQESQSLLRLANNLYPSCETQTALFARLEQYFPGRSAISIKTRLRVLNWQAQQDESSSGGPDQTIGQIAAYSSEADDYSVWFKQTVDCAVSLLESHADSSLASVDLLAFARGLQSGIMTPEQVLSLLDLHASRTFPHTWKTVSRRRRQLAHRMPVNRKQIRRANYAAIQTLYHQRWKDAASAVLDGSWKDLYKGNCGLPPDAEQYWKQVLSAPKHVDSRPSRVVVPSDWSLIEPITGEEVGRTVRSMGNSSPGLDKLTPRMLRRFNANVLAGYFNLLLLSGGCPPHLCRARITLVPKVPNPTSPDQLRPISVSSILVRCFHKVLADRWSRRLQLPSLQFAFLHRDGCLEATSLLHALLRHSSATASNLSLAFVDISKAFDSVSHDTIVRSAEAFGAPSPLVRYIAQSYENAVAVFPSSEVHCHRGVRQGDPLSPLLFIMAMDEVLGLSMPQLGYQFHDTLVDGFAFADDWVVCAESQARLKEKLEAAAVELGRAGMKINARKTKAMVICGDRKHRATAVSVEPFCFAEELITPLGPTDTVTYLGIPFTFKGKGVFNHRQHLLKLLDEVTRAPLKPHQRMEITRNYLIPRLTYSLVLGQVHRNTLKRLDNYIRQSIRGWLRLPKDTPISYIHAGKQHGGLGIPSLSATIPMQRRVRMEKLLSTQCRVLRNVVNDSAFGKVVRDLSLPIRVHGSCVNTKEELVAAWGDSLHNSVDGRGLRELVASPLSNRWLVFPERVFPRIFIRGIQLRCNLLRTRVRSARHGHGGQTILCRGNCGQPESLVHILQSCWITHDARCARHNRVARELAKRLRRLGYTVFEELRAPTSTSFIKPDLIAVRERRATVIDVSIVSDGRGVTVWNEKKQKYGADEFSLAIISALRAIGCDVDFLVHQPMIISYRGICFPQSAKAVIGLGLSKVTVSDLCLLAIVGFLRTYDTFMRGTWR

SEQ ID NO: 7776 - protein, 991 aa, Clonorchis sinensis
MVAQLACADCSRLFPTKIGLSQHRRHAHPTQHNADKLSRVKHSGARWSQQESQSLLRLANNLYPSCETQTALFARLEQYFPGRSAISIKTRLRVLNWQAQQDESSSGGPDQTIGQIAAYSSEADDYSVWFKQTVDCAVSLLESHADSSLASVDLLAFARGLQSGIMTPEQVLSLLDLHASRTFPHTWKTVSRRRRQLAHRMPVNRKQIRRANYAAIQTLYHQRWKDAASAVLDGSWKDLYKGNCGLPPDAEQYWKQVLSAPKHVDSRPSRVVVPSDWSLIEPITGEEVGRTVRSMGNSSPGLDKLTPRMLRRFNANVLAGYFNLLLLSGGCPPHLCRARITLVPKVPNPTSPDQLRPISVSSILVRCFHKVLADRWSRRLQLPSLQFAFLHRDGCLEATSLLHALLRHSSATASNLSLAFVDISKAFDSVSHDTIVRSAEAFGAPSPLVRYIAQSYENAVAVFPSSEVHCHRGVRQGDPLSPLLFIMAMDEVLGLSMPQLGYQFHDTLVDGFAFADDWVVCAESQARLKEKLEAAAVELGRAGMKINARKTKAMVICGDRKHRATAVSVEPFCFAEELITPLGPTDTVTYLGIPFTFKGKGVFNHRQHLLKLFDEVTRAPLKPHQRMEITRNYLIPRLTYSLVLGQVHRNTLKRLDNYIRQSIRGWLRLPKDTPISYIHAGKQHGGLGIPSLSATIPMQRRVRMEKLLSTQCRVLRNVVNDSAFGKVVRDLSLPIRVHGSCVNTKEELVAAWGDSLHNSVDGRGLRELVASPLSNRWLVFPERVFPRIFIRGIQLRCNLLRTRVRSARHGHGGQTILCRGNCGQPESLVHILQSCWITHDARCARHNRVARELAKRLRRLGYTVFEELRAPTSTSFIKPDLIAVRERRATVIDVSIVSDGRGVTVWNEKKQKYGADEFSLAIISALRAIGCDVDFLVHQPMVISYRGICFPQSAKAVIGLGLSKVTVSDLCLLAIVGSLRTYNTFMRDTWP

SEQ ID NO: 7777 - protein, 1003 aa, Opisthorchis felineus
MVAQLACADCSRLFPTKIGLSQYRRHVHPTQHNADKLGRVKYSGARWSQQESQSLLRLANNLYPSCGTQTALFARLEQYFPGRSAISIKTRLRVLNWQAQQDESSSGGPDQTIGQITAYSSEADDYSVWFKQTVDCAVSLLESHADSSLASVDLLAFARGLQSGIMTPEQVLSLLDLHASRTFPHIWKTVSRRRRQLAHRIPVNRKQIRRANYAAIQTLYHQRRKDAASAVLDGSWKDLYKGNCGLPLNAEQYWKQVLSAPKHVDSRPSRVVVPSDWSLIEPITGEEVGRTVRLMGNSSPGLDKLTPRMLHRFNANALAGYFNLLLLSGGCPPHLCRARITLVPKVPNPTSPDQLRPISVSSILVRCFHKVLADRWSRRLQLPSLQFAFLHRDGCLEATSLLHALLRHSSATASNLSLAFVDISKAFDSVSHDTIVRSAKAFGAPSPLVRYIAQSYENAVAVFPNSEVHCHIGVRQGDPLSPLLFIMAMDEVLGLSMPQLGYQFHDTLVDGFAFADDWVVCAESQARLKEKLEAAAVELGRAGMKINARKTKAMVICGDRKHRATAVSVEPFCFAEELITPLGPTDTVTYLGIPFTFKGKGVFNHRQHLLKLLDEVTRAPLKPHQRMEITRNYLIPRLTYSLVLGQVHRNTLKRLDNYIRQSIRGWLRLPKDTPISYIHAGKQHGGLGIPSLSATIPMQRRARMEKLFSTQCRVLRNVVNDSAFGKIVRDLSLPIRVHGACVNTKEELVAAWGDSLHNSVDGRGLRELVASPLSNRWLVFPERVFPRIFIRGIQLRCNLLRTRVRSARHGHGGQTILCRGNCGQPESLVHILQSCWITHDARCARHNRVARELAKRLRRLGYTVFEELRAPTSTSFIKPDLIAVRERRATVIDVSTVSDGRGVTLWNEKKQKDGADEYSLATISALSAIGCDVDFLVHQPMIISYRGICFPQSAKAAIGLGLPKVTVSDLCLLAIVGSLRTYDTFMRGVQFTFLPLTFTPDPV

SEQ ID NO: 7778 - protein, 991 aa, Clonorchis sinensis
MVAQLACADCSRLFPTKIGLSQHRRHAHPTQHNADKLSRVKHSGARWSQQESQSLLRLAKNLYPSCETQTALFARLEQYFPGRSAISIKTRLRVLNWQAQQDESSSGGPDQTIGQIAAYSSEADDYSVWFKQTVDCAVSLLESHADSSLASVDLLAFARGLQSGIMTPEQVLSLLDLHASRTFPHTWKTVSRRRRQLAHRMPVNRKQIRRANYAAIQTLYHQRRKDAASAVLDGSWKDLYKGNCGLPPDAEQYWKQVLSAPKHVDSRPSRVVVPSDWSLIEPITGEEVGRTVRSMGNSSPGLDKLTPRMLRRFNANVLAGYFNLLLLAGGCPPHLCRARITLVPKVPNPTSPDQLRPISVSSILVRCFHKVLADRWSRRLQLPSLQFAFLHRDGCLEATSLLHALLRHSSATASNLSLAFVDISKAFDSVSHDTIVRSAEAFGAPSPLVRYIAQSYENAVAVFPSSEVHCHRGVRQGDPLSPLLFIMAMDEVLGLSMPQLGYQFHDTLVDGFAFADDWVVCAESQARLKEKLEAAAVELGRAGMKINARKTKAMVICGDRKHRATAVSVEPFCFAEELITPLGPTDTVTYLGIPFTFKGKGVFNHRQHLLKLLDEVTRAPLKPHQRMEITRNYLIPRLTYSLVLGQVHRNTLKRLDNYIRQSIRGWLRLPKDTPISYIHAGKQHGGLGIPSLSATIPMQRRVRMEKLLSTQCRVLRNVVNDSAFGKVVRDLSLPIRVHGSCVNTKEELVAAWGDSLHNSVDGRGLRELVASPLSNRWLVFPERVFPRIFIRGIQLRCNLLRTRVRSARHGHGGQTILCRGNCGQPESLVHILQSCWITHDARCARHNRVARELAKRLRRLGYTVFEELRAPTSTSFIKPDLIAVRERRATVIDVSIVSDGRGMTVWNEKKQKYGADEFSLAIISALRAIGCDVDFLVHQPMIISYRGICFPQSAKAVIGLGLSKVTVGDLCLLAIVGFLRTYDTFMRGTWR

SEQ ID NO: 7779 - protein, 991 aa, Clonorchis sinensis
MVAQLACADCSHLFPTKIGLSQHRRHAHPTQHNADKLSRVKHSGARWSQQESQSLLRLAKNLYPSCETQTALFARLEQYFPGRSAISIKTRLRVLNWQAQQDESSSGGPDQTIGQIAAYSSEADDYSVWFKQTVDCAVSLLESHADSSLASVDLLAFARGLQSGIMTPEQVLSLLDLHASRTFPHTWKTVSRRRRQLAHRMPVNRKQIRRANYAAIQTLYHQRRKDAASAVLDGSWKDLYKGNCGLPPDAEQYWKQVLSAPKHVDSRPSRVVVPSDWSLIEPITGEEVGRTVRSMGNSSPGLDKLTPRMLRRFNANVLAGYFNLLLLAGGCPPHLCRARITLVPKVPNPTSPDQLRPISVSSILVRCFHKVLADRWSRRLQLPSLQFAFLHRDGCLEATSLLHALLRHSSATASNLSLAFVDISKAFDSVSHDTIVRSAEAFGAPSPLVRYIAQSYENAVAVFPSSEVHCHRGVRQGDPLSPLLFIMAMDEVLGLSMPQLGYQFHDTLVDGFAFADDWVVCAESQARLKEKLEAAAVELGRAGMKINARKTKAMVICGDRKHRATAVSVEPFCFAEELITPLGPTDTVTYLGIPFTFKGKGVFNHRQHLLKLLDEVTRAPLKPHQRMEITRNYLIPRLTYSLVLGQVHRNTLKRLDNYIRQSIRGWLRLPKDTPISYIHAGKQHGGLGIPSLSATIPMQRRVRMEKLLSTQCRVLRNVVNDSAFGKVVRDLSLPIRVHGSCVNTKEELVAAWGDSLHNSVDGRGLRELVASPLSNRWLVFPERVFPRIFIRGIQLRCNLLRTRVRSARHGHGGQTILCRGNCGQPESLVHILQSCWITHDARCARHNRVARELAKRLRRLGYTVFEELRAPTSTSFIKPDLIAVRERRATVIDVSIVSDGRGMTVWNEKKQKYGADEFSLAIISALRAIGCDVDFLVHQPMIISYRGICFPQSAKAVIGLGLSKVTVSDLCLLAIVGSLRTYDTFMRGTWR

SEQ ID NO: 7780 - protein, 1051 aa, Clonorchis sinensis
MSTTFDNVHYKTSGASAPVPTSTQERLVGLTCEECGKWCKSKAGFVAHHRVHDNDSVGTNMVAQFACADCSRLFPTKIGLSQHRRHAHPTQRNADKLSRVKHSGARWSQQESQSLLRLANNLYPSCETQTALFARLEQYFPGRSAISIKTRLRVLNWQAQQDESSSGGPDQTIGQIAAYSSEADDYSVWFKQTVDCAVSLLESHADSSLASVDLLAFARGLQSGIMTPEQVLSLLDLHASRTFPHTWKTVSRRRRQLAHRMPVNRKQIRRANYAAIQTLYHQRRKDAASAVLDGSWKDLYKGNCGLPPDAEQYWKQVLSAPKHVDSRPSRVVVPSDWSLIEPITGEEVGRTVRSMGNSSPGLDKLTPRMLRRFNANVLAGYFNLLLLAGGCPPHLCRARITLVPKVPNPTSPDQLRPISVSSILVRCFHKVLADRWSRRLQLPSLQFAFLHRDGCLEATSLLHALLRHSSATASNLSLAFVDISKAFDSVSHDTIVRSAEAFGAPSPLVRYIAQSYENAVAVFPSSEVHCHRGVRQGDPLSPLLFIMAMDEVLGLSMPQLGYQFHDTLVDGFAFADDWVVCAESQARLKEKLEAAAVELGRAGMKINARKTKAMVICGDRKHRATAVSVEPFCFAEELITPLGPTDTVTYLGIPFTFKGKGVFNHRQHLLKLLDEVTRAPLKPHQRMEITRNYLIPRLTYSLVLGQVHRNTLKRLDNYIRQSIRGWLRLPKDTPISYIHAGKQHGGLGIPSLSATIPMQRRVRMEKLLSTQCRVLRNVVNDSAFGKVVRDLSLPIRVHGSCVNTKEELVAAWGDSLHNSVDGRGLRELVASPLSNRWLVFPERVFPRIFIRGIQLRCNLLRTRVRSARHGHGGQTILCRGNCGQPESLVHILQSCWITHDARCARHNRVARELAKRLRRLGYTVFEELRAPTSTSFIKPDLIAVRERRATVIDVSIVSDGRGVTVWNEKKQKYGADEFSLAIISALRAIGCDVDFLVHQPMIISYRGICFPQSAKAVIGLGLSKVTVSDLCLLAIVGSLRTYDTFMRGTWR

SEQ ID NO: 7781 - protein, 826 aa, Clonorchis sinensis
MTPEQVLSLLDLHASRTFPHTWKTVSRRRRQLAHRMPVNRKQIRRANYAAIQTLYHQRWKDAASAVLDGSWKDLYKGNCGLPPDAEQYWKQVLSAPKHVDSRPSRVVVPSDWSLIEPITGEEVGRTVRSMGNSSPGLDKLTPRMLRRFNANVLAGYFNLLLLSGGCPPHLCRARITLVPKVPNPTSPDQLRPISVSSILVRCFHKVLADRWSRRLQLPSLQFAFLHRDGCLEATSLLHALLRHSSATASNLSLAFVDISKAFDSVSHDTIVRSAEAFGAPSPLVRYIAQSYENAVAVFPSSEVHCHRGVRQGDPLSPLLFIMAMDEVLGLSMPQLGYQFHDTLVDGFAFADDWVVCAESQARLKEKLEAAAVELGRAGMKINARKTKAMVICGDRKHRATAVSVEPFCFAEELITPLGPTDTVTYLGIPFTFKGKGVFNHRQHLLKLFDEVTRAPLKPHQRMEITRNYLIPRLTYSLVLGQVHRNTLKRLDNYIRQSIRGWLRLPKDTPISYIHAGKQHGGLGIPSLSATIPMQRRVRMEKLLSTQCRVLRNVVNDSAFGKVVRDLSLPIRVHGSCVNTKEELVAAWGDSLHNSVDGRGLRELVASPLSNRWLVFPERVFPRIFIRGIQLRCNLLRTRVRSARHGHGGQTILCRGNCGQPESLVHILQSCWITHDARCARHNRVARELAKRLRRLGYTVFEELRAPTSTFFIKPDLIAVRERRATVIDVSIVSDGRGVTVWNEKKQKYGVDEFSLAIISALRAIGCDVDFLVHQPMIISYRGICFPQSAKAVIGLGLSKVTVSDLCLLAIVGSLRTYDTFMRDTWP

SEQ ID NO: 7782 - protein, 826 aa, Opisthorchis felineus
MTPEQVLSLLDLHASRTFPHIWKTVSRRRRQLAHRMPVNRKQIRRANYAAIQTLYHQRRKDAASAVLDGSWKDLYKGNCGLPLNAEQYWKQVLSAPKHVDSRPSRVVVPSDWSLIEPITGEEVGRTIRLMGNSSPGLDKLTPRMLRRFNANALAGYFNLLLLSGGCPPHLCRARITLVPKVPNPTSPDQLRPISVSSILVRCFHKVLADRWSRRLQLPSLQFAFLHRDGCLEATSLLHALLRHSSATASNLSLAFVDISKAFDLVSHDTIVRSAKAFGAPSPLVRYIAQSYENAVAVFPNSEVHCHRGVRQGDPLPPLLFIMAMDEVLGLSMPQLGYQFHDTLVDGFAFADDWVVCAESQARLKEKLEAAAVELGRAGMKINARKTKAMVICGDRKHRATAVSVEPFCFAEELITPLGPTDTVTYLGIPFTFKGKGVFNHRQHLLKLLDEVTRAPLKPHQRMEITRNYLIPRLTYSLVLGQVHRNTLKRLDNYIRQSIRGWLRLPKDTPISYIHAGKQHGGLGIPSLSATIPMQRRARMEKLFSTQCRVLRNVVNDSAFGKIVRDLSLPIRVHGACVNTKEELVAAWGDSLHNSVDGRGLRELVASPLSNRCFVFPERVFPRIFIRGIQLRCNLLRTRVRNPRHGHGGQTILCRGNCGQPESLVHILQSCWITHDARCARHNRVARELAKRLRRLGYTVFEELRAPTSTSFIKPDLIAVRERRATVIDVSIVSDGRGVTVWNEKKQKYGADEYSLAIISALRAIGCDVDFLVHQPMIICYRGICFPQSAKAIIGLGLPKFTISDLCLLAIVGSLRTYDTFMRGTWR

SEQ ID NO: 7783 - protein, 826 aa, Clonorchis sinensis
MTPEQVLSLLDLHASRTFPHTWKTVSRRRRQLAHRMPVNRKQIRRANYAAIQTLYHQRWKDAASAVLDGSWKDLYKGNCGLPPDAEQYWKQVLSAPKHVDSRPSRVVVPSDWSLIEPITGEEVGRTVRSMGNSSPGLDKLTPRMLRRFNANVLAGYFNLLLLSGGCPPHLCRARITLVPKVPNPTSPDQLRPISVSSILVRCFHKVLADRWSRRLQLPSLQFAFLHRDGCLEATSLLHALLRHSSATASNLSLAFVDISKAFDSVSHDTIVRSAEAFGAPSPLVRYIAQSYENAVAVFPSSEVHCHRGVRQGDPLSPLLFIMAMDEVLGLSMPQLGYQFHDTLVDGFAFADDWVVCAESQARLKEKLEAAAVELGRAGMKINARKTKAMVICGDRKHRATAVSVEPFCFAEELITPLGPTDTVTYLGIPFTFKGKGVFNHRQHLLKLLDEVTRAPLKPHQRMEITRNYLIPRLTYSLVLGQVHRNTLKRLDNYIRQSIRGWLRLPKDTPISYIHAGKQHGGLGIPSLSATIPMQRRVRMEKLLSTQCRVLRNVVNDSAFGKVVRDLSLPIRVHGSCVDTKEELVAAWGDSLHNSVDGRGLRELVASPLSNRWLVFPERVFPRIFIRGIQLRCNLLRTRVRSARHGHGGQTILCRGNCGQPESLVHILQSCWITHDARCARHNRVARELAKRLRRLGYTVFEELRAPTSTSFIKPDLIAVRERRATVIDVSIVSDGRGVTVWNEKKQKYGVDEFSLAIISALRAIGCDVDFLVHQPMIISYRGICFPQSAKAVIGLGLSKVTVSDLCLPAIVGSLCTCDTFMSGTWR

SEQ ID NO: 7784 - protein, 991 aa, Clonorchis sinensis
MVAQLACADCSRLFPTKIGLSQHRRHAHPTQHNADKLSRVKHSGARWSQQESQSLLRLANNLYPSCETQTALFARLEQYFPGRSAISIKTRLRVLNWQAQQDESSSGGPDQTIGQIAAYSSEADDYSVWFKQTVDCAVSLLESHADSSLASVDLLAFARGLQSGIMTPEQVLSLLDLHASRTFPHTWKTVSRRRRQLAHRMPVNRKQIRRANYAAIQTLYHQRWKDAASAVLDGSWKDLYKGNCGLPPDAEQYWKQVLSAPKHVDSRPSRVVVPSDWSLIEPITGEEVGRTVRSMGNSSPGLDKLTPRMLRRFNANVLAGYFNLLLLSGGCPPHLCRARITLVPKVPNPTSPDQLRPISVSSILVRCFHKVLADRWSRRLQLPSLQFAFLHRDGCLEATSLLHALLRHSSATASNLSLAFVDISKAFDSVSHDTIVRSAEAFGAPSPLVRYIAQSYENAVAVFPSSEVHCHRGVRQGDPLSPLLFIMAMDEVLGLSMPQLGYQFHDTLVDGFAFADDWVVCAESQARLKEKLEAAAVELGRAGMKINARKTKAMVICGDRKHRATAVSVEPFCFAEELITPLGPTDTVTYLGIPFTFKGKGVFNHRQHLLKLFDEVTRAPLKPHQRMEITRNYLIPRLTYSLVLGQVHRNTLKRLDNYIRQSIRGWLRLPKDTPISYIHAGKQHGGLGIPSLSATIPMQRRVRMEKLLSTQCRVLRNVVNDSAFGKVVRDLSLPIRVHGSCVNTKEELVAAWGDSLHNSVDGRGLRELVASPLSNRWLVFPERVFPRIFIRGIQLRCNLLRTRVRSARHGHGGQTILCRGNCGQPESLVHILQSCWITHDARCARHNRVARELAKRLRRLGYTVFEELRAPTSTSFIKPDLIAVRERRATVIDVSIVSDGRGMTLWNEKKQKYGVDEFSLAIISALRAIGCDVDFLVHQPMVISYRGICFPQSAKAVIGLGLSKVTVSDLCLLAIVGSLRTYDTFMRDTWP

SEQ ID NO: 7785 - protein, 998 aa, Clonorchis sinensis
MLHKVDECVHVAHVGLTCEECGKWCKSKAGLVAHHRVHDNDSVGTNMVAQLACADCSRLFPTKIGLSQHRRHAHPTQHNADKLSRVKHSGARWSQQESQSLLRLANNLYPSCETQTALFARLEQYFPGRSAISTKTRLRVLNWQAQQDESSSGGPDQTIGQMATHSSEADDYSVWFKQTVDCAMSLLESHADSSLASVDLLAFARGLQSGIMTPEQVLSLLDLQASRTFPHTWKTVSRRRQLVYRMPVNRKQIRRANYAAIQTLYHQRRKDAASAVLDGSWKDLYKGNCGLPPDAEQYWKQVLSAPKHVDSRPSRVIVPSDWSLIEPITGEEVGRTVRSMGNSSPGLDKLTPRMLRRFNANVLAGYFNLLLLAGGCPPHLCRARITLVPKVPNPTSPDQLRPISVSSILVRCFHKVLADRWSRRLQLPSLQFAFLHRDGCLEATSLLHALLRHSSATASNLSLAFVDISKAFDSVSHDTIVRSAEAFGAPSPLVRYIAQSYENAVAVFPSSEVHCHRGVRQGDPLSPLLFIMAMDEVLGLSMPQLGYQFHDTLVDGFAFADDWVVCAESQARLKEKLEAAAVELGRAGMKINARKTKAMVICGDRKHRATAVSVEPFCFAEELITPLGPTDTVTYLGIPFTFKGKGVFNHRQHLLKLLDEVTRAPLKPHQRMEITRNYLIPRLTYSLVLGQVHRNTLKRLDNYIRQSIRGWLRLPKDTPISYIHAGKQHGGLGIPSLSATIPMQRRVRMEKLLSTQCRVLRNVVNDSAFGKVVRDLSLPIRVHGSCVNTKEELVAAWGDSLHNSVDGRGLRELVASSLSNRWLVFPERVFPRIFIRGIQLRCNLLRTRVRSARHGHGGQTILCRGNCGQPESLVHILQSCWITHDARCARHNRVARELAKRLRRLGYTVFEELRAPTSTSFIFGWRGLIFWRGLSGKDPFSVFLNPPKLLLDWGFLRSLSVTCVCSSLWALCVRATLLCVAHGVECTFLPLNLTPDPV

SEQ ID NO: 7786 - protein, 991 aa, Clonorchis sinensis
MVAQLACADCSRLFPTKIGLSQHRRHAHPTQHNADKLSRVKHSGARWSQQESQSLLRLANNLYPSCETQTALFARLEQYFPGRSAISIKTRLRVLNWQAQQDESSSGGPDQTIGQIAAYSSEADDYSVWFKQTVDCAVSLLESHADSSLASVDLLAFARGLQSGIMTPEQVLSLLDLHASRTFPHTWKTVSRRRRQLAHRMPVNRKQIRRANYAAIQTLYHQRWKDAASAVLDGSWKDLYKGNCGLPPDAEQYWKQVLSAPKHVDSRPSRVVVPSDWSLIEPITGEEVGRTVRSMGNSSPGLDKLTPRMLRRFNANVLAGYFNLLLLSGGCPPHLCRARITLVPKVPNPTSPDQLRPISVSSILVRCFHKVLADRWSRRLQLPSLQFAFLHRDGCLEATSLLHALLRHSSATASNLSLAFVDISKAFDSVSHDTIVRSAEAFGAPSPLVRYIAQSYENAVAVFPSSEVHCHRGVRQGDPLSPLLFIMAMDEVLGLSMPQLGYQFHDTLVDGFAFADDWVVCAESQARLKEKLEAAAVELGRAGMKINARKTKAMVICGDRKHRATAVSVEPFCFAEELITPLGPTDTVTYLGIPFTFKGKGVFNHRQHLLKLFDEVTRAPLKPHQRMEITRNYLIPRLTYSLVLGQVHRNTLKRLDNYIRQSIRGWLRLPKDTPISYIHAGKQHGGLGIPSLSATIPMQRRVRMEKLLSTQCRVLRNVVNDSAFGKVVRDLSLPIRVHGSCVNTKEELVAAWGDSLHNSVDGRGLRELVASPLSNRWLVFPERVFPRIFIRGIQLRCNLLRTRVRSARHGHGGQTILCRGNCGQPESLVHILQSCWITHDARCARHNRVARELAKRLRRLGYTVFEELRAPTSTSFIKPDLIAVRERRATVIDVSIVSDGRGVTVWNEKKQKYGVDEFSLAIISALRAIGCDVDFLVHQPMIISYRGICFPQSAKAVIGLGLSKVTVSDLCLLAIVGFLRTYDTFMRGTWR

SEQ ID NO: 7787 - protein, 991 aa, Clonorchis sinensis
MVAQLACADCSRLFPTKIGLSQHRRHAHPTQHNADKLSRVKHSGARWSQQESQSLLRLANNLYPSCETQTALFARLEQYFPGRSAISIKTRLRVLNWQAQQDESSSGGPDQTIGQIAAYSSEADDYSVWFKQTVDCAVSLLESHADSSLASVDLLAFARGLQSGIMTPEQVLSLLDLHASRTFPHTWKTVSRRRRQLAHRMPVNRKQIRRANYAAIQTLYHQRWKDAASAVLDGSWKDLYKGNCGLPPDAEQYWKQVLSAPKHVDSRPSRVVVPSDWSLIEPITGEEVGRTVRSMGNSSPGLDKLTPRMLRRFNANVLAGYFNLLLLSGGCPPHLCRARITLVPKVPNPTSPDQLRPISVSSILVRCFHKVLADRWSRRLQLPSLQFAFLHRDGCLEATSLLHALLRHSSATASNLSLAFVDISKAFDSVSHDTIVRSAEAFGAPSPLVRYIAQSYENAVAVFPSSEVHCHRGVRQGDPLSPLLFIMAMDEVLGLSMPQLGYQFHDTLVDGFAFADDWVVCAESQARLKEKLEAAAVELGRAGMKINARKTKAMVICGDRKHRATAVSVEPFCFAEELITPLGPTDTVTYLGIPFTFKGKGVFNHRQHLLKLFDEVTRAPLKPHQRMEITRNYLIPRLTYSLVLGQVHRNTLKRLDNYIRQSIRGWLRLPKDTPISYIHAGKQHGGLGIPSLSATIPMQRRVRMEKLLSTQCRVLRNVVNDSAFGKVVRDLSLPIRVHGSCVNTKEELVAAWGDSLHNSVDGRGLRELVASPLSNRWLVFPERVFPRIFIRGIQLRCNLLRTRVRSARHGHGGQTILCRGNCGQPESLVHILQSCWITHDARCARHNRVARELAKRLRRLGYTVFEELRAPTSTSFIKPDLIAVRERRATVIDVSIVSDGRGMTLWNEKKQKYGVDEFSLAIISALRAIGCDVDFLVHQPMVISYRGICFSQSAKAVIGLGLSKVTVSDLCLLAIVGSLRTYDTFMRGTWR

SEQ ID NO: 7788 - protein, 826 aa, Opisthorchis felineus
MTPEQVLSLLDLHASRTFPHIWKTVSRRRRQLAHRMPVNRKQIRRANYAAIQTLYHQRRKDAASAVLDGSWKDLYKGNCGLPLNAEQYWKQVLSAPKHVDSRPSRVVVPSDWSLIEPITGEEVGRTIRLMGNSSPGLDKLTPRMLRRFNANALAGYFNLLLLSGGCPPHLCRARITLVPKVPNPTSPDQLRPISVSSILVRCFHKVLADRWSRRLQLPSLQFAFLHRDGCLEATSLLHALLRHSSATASNLSLAFVDISKAFDSVSHDTIVRSAKAFGAPSPLVRYIAQSYENVVAVFPNSEVHCHRGVRQGDPLSPLLFIMAMDEVLGLSMPQLGYQFHDTLVDGFAFADDWVVCAESQARLKEKLEAAAVELGRAGMKINARKTKAMVICGDRKHRATAVSVEPFCFAEELITPLGPTDTVTYLGIPFTFKGKGVFNHRQHLLKLLDEVTRAPLKPHQRMEITRNYLIPRLTYSLVLGQVHRNTLKRLDNYIKQSIRGWLRLPKDTPISYIHAGKQHGGLGIPSLSATIPMQRRARMEKLFSTQCRVLRNVVNDSAFGKIVRDLSLPIRVHGACVNTKEELVAAWGDSLHNSVDGRGLRELVASPLSNRWLVFPERVFPRIFIRGIQLRCNLLRTRVRSPRHGHGGQTILCRGNCGQPESLVHILQSCWITHDARCARHNRVARELAKRLRRLGYTVFEELRAPTSTSFIKPDLIAVRERRATVIDVSIVSDGRGVTVWNEEKQKYGADEYSLAIISALRAIGCDVDFLVHQPMIISYRGICFPQSAKAVIGLGLPKFTVSDLFLLAIVGSLRTYDTFMRGTWR

SEQ ID NO: 7789 - protein, 990 aa, Clonorchis sinensis
MVAQLACADCSRLFPTKIGLSQHRRHAHPTQHNADKLSRVKHSGARWSQQESQSLLRLANNLYPSCETQTALFARMEQYFPGRSAISIKTRLRVLNWQAQQDESSSGGPDQTIGQIAAYSSEADDYSVWFKQTVDCAVSLLESHADSSLASVDLLAFARGLQSGIMTPEQVLSLLDLHASRTFPHTWKTVSRRRQLVYRMPVNRKQIRRANYAAIQTLYHQRRKDAASAVLDGSWKDLYKGNCGLPPDAEQYWKQVLSAPKHVDSRPSRVIVPSDWSLIEPITGEEVGRTVRSMGNSSPGLDKLTPRMLRRFNANVLAGYFNLLLLAGGCPPHLCRARITLVPKVPNPTSPDQLRPISVSSILVRCFHKVLADRWSRRLQLPSLQFAFLHRDGCLEATSLLHALLRHSSATASNLSLAFVDISKAFDSVSHDTIVRSAEAFGAPSPLVRYIAQSYENAVAVFPSSEVHCHRGVRQGDPLSPLLFIMAMDEVLGLSMPQLGYQFHDTLVDGFAFADDWVVCAESQARLKEKLEAAAVELGRAGMKINARKTKAMVICGDRKHRATAVSVEPFCFAEELITPLGPTDTVTYLGIPFTFKGKGVFNHRQHLLKLLDEVTRAPLKPHQRMEITRNYLIPRLTYSLVLGQVHRNTLKRLDNYIRQSIRGWLRLPKDTPISYIHAGKQHGGLGIPSLSATIPMQRRVRMEKLLSTQCRVLRNVVNDSAFGKVVRDLSLPIRVHGSCVNTKEELVAAWGDSLHNSVDGRGLRELVASSLSNRWLVFPERVFPRIFIRGIQLRCNLLRTRVRSARHGHGGQTILCRGNCGQPESLVHILQSCWITHDARCARHNRVARELAKRLRRLGYTVFEELRAPTSTSFIKPDLIAVRERRATVIDVSIVSDGRGVTVWNEKKQKYGADEFSLAIISALRAIGCDVDFLVHQPMIISYRGICFPQSAKAVIGLGLSKVTVSDLCLLAIVGSLRTYDTFMRGTWR

SEQ ID NO: 7790 - protein, 991 aa, Clonorchis sinensis
MVAQLACADCSHLFPTKIGLSQHRRHAHPTQHNADKLSRVKHSGARWSQQESQSLLRLANNLYPSCETQTALFARLEQYFPGRSAISIKTRLRVLNWQAQQDESSSGGPDQTIGQIAAYSSEADDYSVWFKQTVDCAVSLLESHADSSLASVDLLAFARGLQSGIMTPEQVLSLLDLHASRTFPHTWKTVSRRRRQLAHRMPVNRKQIRRANYAAIQTLYHQRWKDAASAVLDGSWKDLYKGNCGLPPDAEQYWKQVLSAPKHVDSRPSRVVVPSDWSLIEPITGEEVGRTVRSMGNSSPGLDKLTPRMLRRFNANVLAGYFNLLLLSGGCPPHLCRARITLVPKVPNPTSPDQLRPISVSSILVRCFHKVLADRWSRRLQLPSLQFAFLHRDGCLEATSLLHALLRHSSATASNLSLAFVDISKAFDSVSHDTIVRSAEAFGAPSPLVRYIAQSYENAVAVFPSSEVHCHRGVRQGDPLSPLLFIMAMDEVLGLSMPQLGYQFHDTLVDGFAFADDWVVCAESQARLKEKLEAAAVELGRAGMKINARKTKAMVICGDRKHRATAVSVEPFCFAEELITPLGPTDTVTYLGIPFTFKGKGVFNHRQHLLKLFDEVTRAPLKPHQRMEITRNYLIPRLTYSLVLGQVHRNTLKRLDNYIRQSIRGWLRLPKDTPISYIHAGKQHGGLGIPSLSATIPMQRRVRMEKLLSTQCRVLRNVVNDSAFGKVVRDLSLPIRVHGSCVNTKEELVAAWGDSLHNSVDGRGLRELVASPLSNRWLVFPERVFPRIFIRGIQLRCNLLRTRVRSARHGHGGQTILCRGNCGQPESLVHILQSCWITHDARCARHNRVARELAKRLRRLGYTVFEELRAPTSTSFIKPDLIAVRERRATVIDVSIVSDGRGVTVWNEKKQKYGVDEFSLAIISALRAIGCDVDFLVHQPMIISYRGICFPQSAKAVIGLGLSKVTVGDLCLLAIVGSLRTYNTFMRDTWP

SEQ ID NO: 7791 - protein, 1171 aa, Clonorchis sinensis
MNSGFTGLRIEAEPSQRVQTMLWTPQMDIHSTKFPDKIVSYFPQKHSAFFKVSIPFTCKTYDEDEDVPVGRLKDLTEAVRLESASWTTSSWCRLGSLDASLGELRVQQLQTGLTTLFGFNVLVTFDNVHYKTSGASAPVPTSTQENLVGLTCEECGKCCKSKAGLVAHHRVHDNDSVGTNMVAQLACADCSRLFPTKIGLSQHRRHAHPTQHNADKLSRVKHSGARWSQQESQSLLRLAKNLYPSCETQTALFARLEQYFPGRSAISIKTRLRVLNWQAQQDESSSGGPDQTIGQIAAYSSEADDYSVWFKQTVDCAVSLLESHADSSLASVDLLAFARGLQSGIMTPEQVLSLLDLHASRTFPHTWKTVSRRRRQLAHRMPVNRKQIRRANYAAIQTLYHQRRKDAASAVLDGSWKDLYKGNCGLPPDAEQYWKQVLSAPKHVDSRPSRVVVPSDWSLIEPITGEEVGRTVRSMGNSSPGLDKLTPRMLRRFNANVLAGYFNLLLLAGGCPPHLCRARITLVPKVPNPTSPDQLRPISVSSILVRCFHKVLADRWSRRLQLPSLQFAFLHRDGCLEATSLLHALLRHSSATASNLSLAFVDISKAFDSVSHDTIVRSAEAFGAPSPLVRYIAQSYENAVAVFPSSEVHCHRGVRQGDPLSPLLFIMAMDEVLGLSMPQLGYQFHDTLVDGFAFADDWVVCAESQARLKEKLEAAAVELGRAGMKINARKTKAMVICGDRKHRATAVSVEPFCFAEELITPLGPTDTVTYLGIPFTFKGKGVFNHRQHLLKLLDEVTRAPLKPHQRMEITRNYLIPRLTYSLVLGQVHRNTLKRLDNYIRQSIRGWLRLPKDTPISYIHAGKQHGGLGIPSLSATIPMQRRVRMEKLLSTQCRVLRNVVNDSAFGKVVRDLSLPIRVHGSCVNTKEELVAAWGDSLHNSVDGRGLRELVASPLSNRWLVFPERVFPRIFIRGIQLRCNLLRTRVRSARHGHGGQTILCRGNCGQPESLVHILQSCWITHDARCARHNRVARELAKRLRRLGYTVFEELRAPTSTSFIKPDLIAVRERRATVIDVSIVSDGRGMTVWNEKKQKYGADEFSLAIISALRAIGCDVDFLVHQPMIISYRGICFPQSAKAVIGLGLSKVTVSDLCLLAIVGSLRTYDTFMRGTWR

SEQ ID NO: 7792 - protein, 991 aa, Clonorchis sinensis
MVAQLACADCSRLFPAKIGLSQHRRHAHPTQHNADKLSRVKHSGARWSQQESQSLLRLANNLYPSCETQTALFARLEQYFPGRSAISIKTRLRVLNWQAQQDESSSGGPDQTIGQIAAYSSEADDYSVWFKQTVDCAVSLLESHADSSLASVDLLAFARGLQSGIMTPEQVLSLLDLHASRTFPHTWKTVSRRRRQLAHRMPVNRKQIRRANYAAIQTLYHQRRKDAASAVLDGSWKDLYKGNCGLPPDAEQYWKQVLSAPKHVDSRPSRVVVPSDWSLIEPITGEEVGRTVRSMGNSSPGLDKLTPRMLRRFNANVLAGYFNLLLLAGGCPPHLCRARITLVPKVPNPTSPDQLRPISVSSILVRCFHKVLADRWSRRLQLPSLQFAFLHRDGCLEATSLLHALLRHSSATASNLSLAFVDISKAFDSVSHDTIVRSAEAFGAPSPLVRYIAQSYENAVAVFPSSEVHCHRGVRQGDPLSPLLFIMAMDEVLGLSMPQLGYQFHDTLVDGFAFADDWVVCAESQARLKEKLEAAAVELGRAGMKINARKTKAMVICGDRKHRATAVSVEPFCFAEELITPLGPTDTVTYLGIPFTFKGKGVFNHRQHLLKLLDEVTRAPLKPHQRMEITRNYLIPRLTYSLVLGQVHRNTLKRLDNYIRQSIRGWLRLPKDTPISYIHAGKQHGGLGIPSLSATIPMQRRVRMEKLLSTQCRVLRNVVNDSAFGKVVRDLSLPIRVHGSCVNTKEELVAAWGDSLHNSVDGRGLRELVASPLSNRWLVFPERVFPRIFIRGIQLRCNLLRTRVRSARHGHGGQTILCRGNCGQPESLVHILQSCWITHDARCARHNRVARELAKRLRRLGYTVFEELRAPTSTSFIKPDLIAVRERRATVIDVSIVSDGRGMTVWNEKKQKYGADEFSLAIISALRAIGCDVDFLVHQPMIISYRGICFPQSAKAVIGLGLSKVTVSDLCLLAIVGSLRTYDTFMRGTWR

SEQ ID NO: 7793 - protein, 991 aa, Opisthorchis felineus
MVAQLACADCSRLFPTKIGLSQHRRHVHPTQHNADKLGRVKYSGARWSQQESQSLLRLANNLYPSCGTQTALFARLEQYFPGRSAISIKTRLRVLNWQAQQDESSSGGPDQTIGQITAYSSEADDYSVWFKQTVDCAVSLLESHADSSLASVDLLAFARGLQSGIMTPEQVLSLLDLHASRTFPHIWKTVSRRRRQLAHRMPVNRKQIRRANYAAIQTLYHQRRKDAASAVLDGSWKDLYKGNCGLPLNAEQYWKQVLSAPKHVDSRPSRVVVPSDWSLIEPITGEEVGRTIRLMGNSSPGLDKLTPRMLHRFNANALAGYFNLLLLSGGCPPHLCRARITLVPKVPNPTSPDQLRPISVSSILVRCFHKVLADRWSRRLQLPSLQFAFLHRDGCLEATSLLHALLRHSSATASNLSLAFVDISKAFDSVSHDTIVRSAKAFGAPSPLVRYIAQSYENAVAVFPNSEVHCHRGVRQGDPLSPLLFIMAMDEVLGLSMPQLGYQFHDTLVDGFAFADDWVVCAESQARLKEKLEAAAVELGRAGMKINARKTKAMVICGDRKHRATAVSVEPFCFAEELITPLGPTDTVTYLGIPFTFKGKGVFNHRQHLLKLLDEVTRAPLKPHQRMEITRNYLIPRLTYSLVLGQVHRNTLKRLDNYIRQSIRGWLRLPKDTPISYIHAGKQHGGLGIPSLSATIPMQRRARMEKLFSTQCRVLRNVVNDSAFGKIVRDLSLPIRVHGACVNTKEELVAAWGDSLHNSVDGRGLRELVASPFSNRCLVFPERVFPRIFIRGIQLRCNLLRTRVRNPRHGHGGQTILCRGNCGQPESLVHILQSCWITHDARCARHNRVARELAKRLRRLGYTVFEELRAPTSTSFIKPDLIAVRERRATVIDVSIVSDGRGVTVWNEKKQKYGADEYSLAIISALCAIGCDVDFLVHQPMIISYRGICFPQSAKAVIGLGLPKFTVSDLCLLAIVGSLRTDDTFMSGIWR

SEQ ID NO: 7794 - protein, 991 aa, Clonorchis sinensis
MVAQLACADCSRLFPTKIGLSQHRRHAHPTQHNADKLSRVKHSGARWSQQESQSLLRLANNLYPSCETQTALFARLEQYFPGRSAISIKTRLRVLNWQAQQDESSSGGPDQTIGQIAAYSSEADDYSVWFKQTVDCAVSLLESHADSSLASVDLLAFARGLQSGIMTPEQVLSLLDLHASRTFPHTWKTVSRRRRQLAHRMPVNRKQIRRANYAAIQTLYHQRWKDAASAVLDGSWKDLYKGNCGLPPDAEQYWKQVLSAPKHVDSRPSRVVVPSDWSLIEPITGEEVGRTVRSMGNSSPGLDKLTPRMLRRFNANVLAGYFNLLLLSGGCPPHLCRARITLVPKVPNPTSPDQLRPISVSSILVRCFHKVLADRWSRRLQLPSLQFAFLHRDGCLEATSLLHALLRHSSATASNLSLAFVDISKAFDSVSHDTIVRSAEAFGAPSPLVRYIAQSYENAVAVFPSSEVHCHRGVRQGDPLSPLLFIMAMDEVLGLSMPQLGYQFHDTLVDGFAFADDWVVCAESQARLKEKLEAAAVELGRAGMKINARKTKAMVICGDRKHRATAVSVEPFCFAEELITPLGPTDTVTYLGIPFTFKGKGVFNHRQHLLKLFDEVTRAPLKPHQRMEITRNYLIPRLTYSLVLGQVHRNTLKRLDNYIRQSIRGWLRLPKDTPISYIHAGKQHGGLGIPSLSATIPMQRRVRMEKLLSTQCRVLRNVVNDSAFGKVVRDLSLPIRVHGSCVNTKEELVAAWGDSLHNSVDGRGLRELVASPLSNRWLVFPERVFPRIFIRGIQLRCNLLRTRVRSARHGHGGQTILCRGNCGQPESLVHILQSCWITHDARCARHNRVARELAKRLRRLGYTVFEELRAPTSTSFIKPDLIAVRERRATVIDVSIVSDGRGVTVWNEKKQKYGVDEFSLAIISALRAIGCDVDFLVHQPMIISYRGICFPQSAKAVIGLGLSKVTIGDLCLLAIVGSLRTYDTFMRGTWR

SEQ ID NO: 7795 - protein, 990 aa, Clonorchis sinensis
MVAQLACADCSRLFPTKIGLSQHRRHAHPTQHNADKLSRVKHSGARWSQQESQSLLRLANNLYPSCETQTALFARMEQYFPGRSAISIKTRLQVLNWQAQQDESSSGGPDQTIGQIAAYSSEADDYSVWFKQTVDCAVSLLESHADSSLASVDLLAFARGLQSGIMTPEQVLSLLDLHASRTFPHTWKTVSRRRQLVYRMPVNRKQIRRANYAAIQTLYHQRRKDAASAVLDGSWKDLYKGNCGLPPDAEQYWKQVLSAPKHVDSRPSRVIVPSDWSLIEPITGEEVGRTVRSMGNSSPGLDKLTPRMLRRFNANVLAGYFNLLLLAGGCPPHLCRARITLVPKVPNPTSPDQLRPISVSSILVRCFHKVLADRWSRRLQLPSLQFAFLHRDGCLEATSLLHALLRHSSATASNLSLAFVDISKAFDSVSHDTIVRSAEAFGAPSPLVRYIAQSYENAVAVFPSSEVHCHRGVRQGDPLSPLLFIMAMDEVLGLSMPQLGYQFHDTLVDGFAFADDWVVCAESQARLKEKLEAAAVELGRAGMKINARKTKAMVICGDRKHRATAVSVEPFCFAEELITPLGPTDTVTYLGIPFTFKGKGVFNHRQHLLKLLDEVTRAPLKPHQRMEITRNYLIPRLTYSLVLGQVHRNTLKRLDNYIRQSIRGWLRLPKDTPISYIHAGKQHGGLGIPSLSATIPMQRRVRMEKLLSTQCRVLRNVVNDSAFGKVVRDLSLPIRVHGSCVNTKEELVAAWGDSLHNSVDGRGLRELVASSLSNRWLVFPERVFPRIFIRGIQLRCNLLRTRVRSARHGHGGQTILCRGNCGQPESLVHILQSCWITHDARCARHNRVARELAKRLRRLGYTVFEELRAPTSTSFIKPDLIAVRERRATVIDVSIVSDGRGVTVWNEKKQKYGADEFSLAIISALRAIGCDVDFLVHQPMIISYRGICFPQSAKAVIGLGLSKVTVSDLCLLAIVGSLRTYDTFMRGTWR

SEQ ID NO: 7796 - protein, 991 aa, Clonorchis sinensis
MVAQLACADCSRLFPTKIGLSQHRRHAHPTQHNADKLSRVKHSGARWSQQESQSLLRLANNLYPSCETQTALFARMEQYFPGRSAISIKTRLRVLNWQAQQDESSSGGPDQTIGQIAAYSSEADDYSVWFKQTVDCAVSLLESHADSSLASVDLLAFARGLQSGIMTPEQVLSLLDLHASRTFPHTWKTVSRRRRQLAHRMPVNRKQIRRANYAAIQTLYHQRWKDAASAVLDGSWKDLYKGNCGLPPDAEQYWKQVLSAPKHVDSRPSRVVVPSDWSLIEPITGEEVGRTVRSMGNSSPGLDKLTPRMLRRFNANVLAGYFNLLLLSGGCPPHLCRARITLVPKVPNPTSPDQLRPISVSSILVRCFHKVLADRWSRRLQLPSLQFAFLHRDGCLEATSLLHALLRHSSATASNLSLAFVDISKAFDSVSHDTIVRSAEAFGAPSPLVRYIAQSYENAVAVFPSSEVHCHRGVRQGDPLSPLLFIMAMDEVLGLSMPQLGYQFHDTLVDGFAFADDWVVCAESQARLKEKLEAAAVELGRAGMKINARKTKAMVICGDRKHRATAVSVEPFCFAEELITPLGPTDTVTYLGIPFTFKGKGVFNHRQHLLKLFDEVTRAPLKPHQRMEITRNYLIPRLTYSLVLGQVHRNTLKRLDNYIRQSIRGWLRLPKDTPISYIHAGKQHGGLGIPSLSATIPMQRRVRMEKLLSTQCRVLRNVVNDSAFGKVVRDLSLPIRVHGSCVNTKEELVAAWGDSLHNSVDGRGLRELVASPLSNRWLVFPERVFPRIFIRGIQLRCNLLRTRVRSARHGHGGQTILCRGNCGQPESLVHILQSCWITHDARCARHNRVARELAKRLRRLGYTVFEELRAPTSTSFIKPDLIAVRERRATVIDVSIVSDGRGVTVWNEKKQKYGVDEFSLAIISALRAIGCDVDFLVHQPMIISYRGICFPQSPKAVIGLGLSKVTVSDLCLLAIVGSLRTYDTFMRGTWR

SEQ ID NO: 7797 - protein, 826 aa, Opisthorchis felineus
MTPEQVLSLLDLHASRTFPHIWKTVSRRRRQLAHRIPVNRKQIRRANYAAIQTLYHQRRKDAASAVLDGLWKDLYKGNCGLPLNAEQYWKQVLSAPKHVDSRPSRVVVPSDWSLIEPITGEEVGRTIRLMGNSSPGLDKHTPRMLRRFNANALAGYFNLLLLSGGCPPHLCRARITLVPKVPNPTSPDQLRPISVSSILVRCFHKVLADRWSRRLQLPSLKFAFLHQDGCLEATLLLHALLRHSSATASNLSLAFVDISKAFDSVSHDTIVRSAKAFGAPSPLVRYIAQSYENAVAVFPNSEVHCHRGVRQGDPLSPLLFIMAMDEVLGLSMPQLGYQFHDTLVDGFAFADDWVVCAESQARLKEKLEAAAVELGRAGMKINARKTKAMVICGDRKHRATAVSVEPFCFAEELITPLGPTDTVTYLGIPFIFKGKGVSSHRQHLLKLLDEVTRAPLKPHQRMEITRNYLIPRLTYSLVLGQVHRNTLKRLDNYIRQSIRGWLRLPKDTPISYIHAGKQHGGLGIPSLSATIPMQRRARMEKLFSTQCRVLRNVVNDSAFGKIVRDLSLPIRVHGACVNTKEELVAAWGDSLHNSVDGRGLRELVASPLSNRWLVFPERVFPRIFIRGIQLRCNLLRTRVRSARHGHGGQTILCRGNCGQPESLVHILQSCWITHDARCARHNRVARELAKRLRRLGYTVFEELRAPTSTSFIKPDLIAVRERRATVIDVSIVSDGRGVTVWNEKKQKYGADEYSLAIISALRAIGCDVDFLVHQPMIISYRGICFPQSAKAVIGLGLPKFTVSDLCLLAIVGSLRTYDTFMRGTWR

SEQ ID NO: 7798 - protein, 991 aa, Clonorchis sinensis
MVAQLACADCSRLFPTKIGLSQHRRHAHPTQHNADKLSRVKHSGARWSQQESQSLLRLANNLYPSCETQTALFARLEQYFPGRSAISIKTRLRVLNWQAQQDESSSGGPDQTIGQTAAYSSEADDYSVWFKQTVDCAVSLLESHADSSLASVDLLAFARGLQSGIMTPEQVLSLLDLHASRTFPHTWKTVSRRRRQLAHRMPVNRKQIRRANYAAIQTLYHQRRKDAASAVLDGSWKDLYKGNCGLPPDAEQYWKQVLSAPKHVDSRPSRVVVPSDWSLIEPITGEEVGRTVRSMGNSSPGLDKLTPRMLRRFNANVLAGYFNLLLLAGGCPPHLCRARITLVPKVPNPTSPDQLRPISVSSILVRCFHKVLADRWSRRLQLPSLQFAFLHRDGCLEATSLLHALLRHSSATASNLSLAFVDISKAFDSVSHDTIVRSAEAFGAPSPLVRYIAQSYENAVAVFPSSEVHCHRGVRQGDPLSPLLFIMAMDEVLGLSMPQLGYQFHDTLVDGFAFADDWVVCAESQARLKEKLEAAAVELGRAGMKINARKTKAMVICGDRKHRATAVSVEPFCFAEELITPLGPTDTVTYLGIPFTFKGKGVFNHRQHLLKLLDEVTRAPLKPHQRMEITRNYLIPRLTYSLVLGQVHRNTLKRLDNYIRQSIRGWLRLPKDTPISYIHAGKQHGGLGIPSLSATIPMQRRVRMEKLLSTQCRVLRNVVNDSAFGKVVRDLSLPIRVHGSCVNTKEELVAAWGDSLHNSVDGRGLRELVASPLSNRWLVFPERVFPRIFIRGIQLRCNLLRTRVRSARHGHGGQTILCRGNCGQPESLVHILQSCWITHDARCARHNRVARELAKRLRRLGYTVFEELRAPTSTSFIKPDLIAVRERRATVIDVSIVSDGRGVTVWNEKKQKYGADEFSLAIISALRAIGCDVDFLVHQPMIISYRGICFPQSAKAVIGLGLSKVTVSDLCLLAIVGSLRTYDTFMRGTWR

SEQ ID NO: 7799 - protein, 991 aa, Clonorchis sinensis
MVAQLACANCSRLFPTKIGLSQHRRHAHPTQHNADKLSRVKHSGARWSQQESQSLLRLAKNLYPSCETQTALFARLEQYFPGRSAISIKTRLRVLNWQAQQDESSSGGPDQTIGQIAAYSSEADDYSVWFKQTVDCAVSLLESHADSSLASVDLLAFARGLQSGIMTPEQVLSLLDLHASRTFPHTWKTVSRRRRQLAHRMPVNRKQIRRANYAAIQTLYHQRRKDAASAVLDGSWKDLYKGNCGLPPDAEQYWKQVLSAPKHVDSRPSRVVVPSDWSLIEPITGEEVGRTVRSMGNSSPGLDKLTPRMLRRFNANVLAGYFNLLLLAGGCPPHLCRARITLVPKVPNPTSPDQLRPISVSSILVRCFHKVLADRWSRRLQLPSLQFAFLHRDGCLEATSLLHALLRHSSATASNLSLAFVDISKAFDSVSHDTIVRSAEAFGAPSPLVRYIAQSYENAVAVFPSSEVHCHRGVRQGDPLSPLLFIMAMDEVLGLSMPQLGYQFHDTLVDGFAFADDWVVCAESQARLKEKLEAAAVELGRAGMKINARKTKAMVICGDRKHRATAVSVEPFCFAEELITPLGPTDTVTYLGIPFTFKGKGVFNHRQHLLKLLDEVTRAPLKPHQRMEITRNYLIPRLTYSLVLGQVHRNTLKRLDNYIRQSIRGWLRLPKDTPISYIHAGKQHGGLGIPSLSATIPMQRRVRMEKLLSTQCRVLRNVVNDSAFGKVVRDLSLPIRVHGSCVNTKEELVAAWGDSLHNSVDGRGLRELVASPLSNRWLVFPERVFPRIFIRGIQLRCNLLRTRVRSARHGHGGQTILCRGNCGQPESLVHILQSCWITHDARCARHNRVARELAKRLRRLGYTVFEELRAPTSTSFIKPDLIAVRERRATVIDVSIVSDGRGMTVWNEKKQKYGADEFSLAIISALRAIGCDVDFLVHQPMIISYRGICFPQSAKAVIGLGLSKVTVSDLCLLAIVGSLRTYDTFMRGTWR

SEQ ID NO: 7800 - protein, 1050 aa, Clonorchis sinensis
MCWLLSTMYTTKHLAPPHQFQPVHRRLVGLTCEECGKWCKSKAGLVAHHRVHDSDSVGTNMVAQLACADCSRLFPTKIGLSQHRRHAHPTQHNADKLSRVKHSGARWSQQESQSLLRLANNLYPSCETQTALFARLEQYFPGRSAISIKTRLRVLNWQAQQDESSSGGPDQTIGQIAAYSSEADDYSVWFKQTVDCAVSLLESHADSSLASVDLLAFARGLQSGIMTPEQVLSLLDLHASRTFPHTWKTVSRRRRQLAHRMPVNRKQIRRANYAAIQTLYHQRRKDAASAVLDGSWKDLYKGNCGLPPDAEQYWKQVLSAPKHVDSRPSRVVVPSDWSLIEPITGEEVGRTVRSMGNSSPGLDKLTPRMLRRFNANVLAGYFNLLLLAGVVPHICVVPITLVPKVPNPTSPDQLRPISVSSILVRCFHKVLADRWSRRLQLPSLQFAFLHRDGCLEATSLLHALLRHSSATASNLSLAFVDISKAFDSVSHDTIVRSAEAFGAPSPLVRYIAQSYENAVAVFPSSEVHCHRGVRQGDPLSPLLFIMAMDEVLGLSMPQLGYQFHDTLVDGFAFADDWVVCAESQARLKEKLEAAAVELGRAGMKINARKTKAMVICGDRKHRATAVSVEPFCFAEELITPLGPTDTVTYLGIPFTFKGKGVFNHRQHLLKLLDEVTRAPLKPHQRMEITRNYLIPRLTYSLVLGQVHRNTLKRLDNYIRQSIRGWLRLPKDTPISYIHAGKQHGGLGIPSLSATIPMQRRVRMEKLLSTQCRVLRNVVNDSAFGKIVRDLSLPIRVHGSCVNTKEELVAAWGDSLHNSVDGRGLRELVASPLSNRWLVFPERVFPRIFIRGIQLRCNLLRTRVRSARHGHGGQTILCRGNCGQPESLVHILQSCWITHDARCARHNRVARELAKRLRRLGYTVFEELRAPTSTSFIKPDLIAVRERRATVIDVSIVSDGRGVTVWNEKKQKYGADEFSLAIISALRAIGCDVDFLVHQPMIISYRGICFPQSAKAVIGLGLSKVTVSDLCLLAIVGSLRTYDTFMRGTWR

SEQ ID NO: 7801 - protein, 991 aa, Clonorchis sinensis
MVAQLACADCSRLFPTKIGLSQHRRHAHPTQHNADKLSRVKHSGARWSQQESQSLLRLANNLYPSCETQTALFARLEQYFPGRSAISIKTRLRVLNWQAQQDESSSGGPDQTIGQIAAYSSEADDYSVWFKQTVDCAVSLLESHADSSLASVDLLAFARGLQSGIMTPEQVLSLLDLHASRTFPHTWKTVSRRRRQLAHRMPVNRKQIRRANYAAIQTLYHQRWKDAASAVLDGSWKDLYKGNCGLPPDAEQYWKQVLSAPKHVDSRPSRVVVPSDWSLIEPITGEEVGRTVRSMGNSSPGLDKLTPRMLRRFNANVLAGYFNLLLLSGGCPPHLCRARITLVPKVPNPTSPDQLRPISVSSILVRCFHKVLADRWSRRLQLPSLQFAFLHRDGCLEATSLLHALLRHSSATASNLSLAFVDISKAFDSVSHDTIVRSAEAFGAPSPLVRYIAQSYENAVAVFPSSEVHCHRGVRQGDPLSPLLFIMAMDEVLGLSMPQLGYQFHDTLVDGFAFADDWVVCAESQARLKEKLEAAAVELGRAGMKINARKTKAMVICGDRKHRATAVSVEPFCFAEELITPLGPTDTVTYLGIPFTFKGKGVFNHRQHLLKLFDEVTRAPLKPHQRMEITRNYLIPRLTYSLVLGQVHRNTLKRLDNYIRQSIRGWLRLPKDTPISYIHAGKQHGGLGIPSLSATIPMQRRVRMEKLLSTQCRVLRNVVNDSAFGKVVRDLSLPIRVHGSCVNTKEELVAAWGDSLHNSVDGRGLRELVASPLSNRWLVFPERVFPRIFIRGIQLRCNLLRTRVRSARHGHGGQTILCRGNCGQPESLVHILQSCWITHDARCARHNRVARELAKRLRRLGYTVFEELRAPTSTSFIKPDLIAVRERRATVIDVSIVSDGRGMTLWNEKKQKYGADEFSLAIISALRAIGCDVDFLVHQPMVISYRGICFPQSAKAVIGLGLSKVTVSDLCLLAIVGSLRTYNTFMRDTWP

SEQ ID NO: 7802 - protein, 991 aa, Clonorchis sinensis
MVAQLACADCSHLFPTKIGLSQHRRHAHPTQHNADKLSRVKHSGARWSQQESQSLLRLANNLYPSCETQTALFARLEQYFPGRSAISIKTRLRVLNWQAQQDESSSGGPDQTIGQIAAYSSEADDYSVWFKQTVDCAVSLLESHADSSLASVDLLAFARGLQSGIMTPEQVLSLLDLHASRTFPHTWKTVSRRRRQLAHRMPVNRKQIRRANYAAIQTLYHQRWKDAASAVLDGSWKDLYKGNCGLPPDAEQYWKQVLSAPKHVDSRPSRVVVPSDWSLIEPITGEEVGRTVRSMGNSSPGLDKLTPRMLRRFNANVLAGYFNLLLLSGGCPPHLCRARITLVPKVPNPTSPDQLRPISVSSILVRCFHKVLADRWSRRLQLPSLQFAFLHRDGCLEATSLLHALLRHSSATASNLSLAFVDISKAFDSVSHDTIVRSAEAFGAPSPLVRYIAQSYENAVAVFPSSEVHCHRGVRQGDPLSPLLFIMAMDEVLGLSMPQLGYQFHDTLVDGFAFADDWVVCAESQARLKEKLEAAAVELGRAGMKINARKTKAMVICGDRKHRATAVSVEPFCFAEELITPLGPTDTVTYLGIPFTFKGKGVFNHRQHLLKLFDEVTRAPLKPHQRMEITRNYLIPRLTYSLVLGQVHRNTLKRLDNYIRQSIRGWLRLPKDTPISYIHAGKQHGGLGIPSLSATIPMQRRVRMEKLLSTQCRVLRNVVNDSAFGKVVRDLSLPIRVHGSCVNTKEELVAAWGDSLHNSVDGRGLRELVASPLSNRWLVFPERVFPRIFIRGIQLRCNLLRTRVRSARHGHGGQTILCRGNCGQPESLVHILQSCWITHDARCARHNRVARELAKRLRRLGYTVFEELRAPTSTSFIKPDLIAVRERRATVMDVSIVSDGRGVTVWNEKKQKYGADEFSLAIISALRAIGCDVDFLVHQPMIISYRGICFPQSAKAVIGLGLSKVTVSDLCLLAIVGSLRTYDTFMRDTWP

SEQ ID NO: 7803 - protein, 1075 aa, Clonorchis sinensis
MDASLGELRVQQLQTGLTTLFGFNVLVTFDNVHYKTSGASAPVPTSTQERFVGLKCEECGKWCKSKAGLVAHHRVHDNDSVGTNMVAQLACADCSRLFPTKIGLSQHRRHAHPTQHNADKLSRVKHSGARWSQQESQSLLRLANNLYPSCETQTALFARLEQYFPGRSAISIKTRLRVLNWQAQQDESSSGGPDQTIGQIAAYSSEADDYSVWFKQTVDCAVSLLESHADSSLASVDLLAFARGLQSGIMTPEQVLSLLDLHASRTFPHTWKTVSRRRRQLAHRMPVNRKQIRRANYAAIQTLYHQRRKDAASAVLDGSWKDLYKGNCGLPPDAEQYWKQVLSAPKHVDSRPSRVVVPSDWSLIEPITGEEVGRTVRSMGNSSPGLDKLTPRMLRRFNANVLAGYFNLLLLAGGCPPHLCRARITLVPKVPNPTSPDQLRPISVSSILVRCFHKVLADRWSRRLQLPSLQFAFLHRDGCLEATSLLHALLRHSSATASNLSLAFVDISKAFDSVSHDTIVRSAEAFGAPSPLVRYIAQSYENAVAVFPSSEVHCHRGVRQGDPLSPLLFIMAMDEVLGLSMPQLGYQFHDTLVDGFAFADDWVVCAESQARLKEKLEAAAVELGRAGMKINARKTKAMVICGDRKHRATAVSVEPFCFAEELITPLGPTDTVTYLGIPFTFKGKGVFNHRQHLLKLLDEVTRAPLKPHQRMEITRNYLIPRLTYSLVLGQVHRNTLKRLDNYIRQSIRGWLRLPKDTPISYIHAGKQHGGLGIPSLSATIPMQRRVRMEKLLSTQCRVLRNVVNDSAFGKVVRDLSLPIRVHGSCVNTKEELVAAWGDSLHNSVDGRGLRELVASPLSNRWLVFPERVFPRIFIRGIQLRCNLLRTRVRSARHGHGGQTILCRGNCGQPESLVHILQSCWITHDARCARHNRVARELAKRLRRLGYTVFEELRAPTSTSFIKPDLIAVRERRATVIDVSIVSDGRGVTVWNEKKQKYGADEFSLAIISALRAIGCDVDFLVHQPMIISYRGICFPQSAKAVIGLGLSKVTVSDLCLLAIVGSLRTYDTFMRGAWR

SEQ ID NO: 7804 - protein, 977 aa, Opisthorchis felineus
MCWLLSTMYNTNHLAPPHQVPTSTQERLVGLTCKECGKCCKSKAGLVAHHRVHNNESVGTNMVAQLACADCSRLFPTKIGLSQHRRHVHPTQHNADKLGRVKYSGARWSQQESQSLLRLANNLYPSCGTQTALFARLEQYFPGRSAISIKTRLRVLNWQAQQDESSSGGPDQTIGQITAYSSEADDYSVWFKQTVDCAVSLLESHADSSLASVDLLAFARGLQSGIMTPEQVLSLLDLHASRTFSHTWKTVSRRRRQLAHRMPVNRKQIRRANYAAIQTLYHQRPKNAASAVLDGSWKDLYKGNCGLPLDAEQYWKQVLSAPKHVDSRPSRVVVPSDWSLIEPITGEEVGRTIRLMGNSSPGLDKLTPRMLRRFNANALAGYFNLLLLSGGCPPHLCRARITLVPKVPNPTSPDQLRPISVSSILVRCFHKVLADRWSRRLQLPSLQFIFLHRDGCLEATSLLHALLRHSSATASNLSLAFVDISKAFDSVSHDTIVRSAKAFGAPSPLVRYIAQSYENAVAVFPNSEVHCHRGVRQGDPLSPLLFIMAMDEVLGLSMPQLGYQFHDTLVDGFAFADDWVVCAESQARLKEKLEAAAVELGRAGMKINARKTKAMVICGDRKHRATAVSVEPFCFAEELITPLGPTDTVTYLGIPFTFKGKGVFNHRQHLLKLLDEVTRAPLKPHQRMEITRNYLIPRLTYSLVLGQVHRNTLKRLDNYIRQSIRGWLRLPKDTRISYIHAGKQHGGLGIPSLSATIPMQRRARMEKLFSTQCRVLRNVVNDSAFGKIVRDLSLPIRVHGACVNTKEELVAAWGDSLHNSVDGRGLRELVASPLSNRWLVFPERVFPRIFIRGIQLRCNLLRTRVRSARHGHGGQTILCRGNCGQPESLVHILQSCWITHDARCARHNRVARELAKRLRRLGYTVFEELRAPTSTSFIKPDLIAVRERRATVIDVSVVSDGRGVTVWNEKKQKYGVD

SEQ ID NO: 7805 - protein, 973 aa, Dermanyssus gallinae
MNEELSSQPPLKKARWDPQDRELLAYLEASLVSENSETTPCEINKLLLSKFPDRTLESIKRQRKSAAYKARVNEFVHKRTRSPSGSDDESGDPYPKRSDLDSQETKFSSPKDAIIARIQALTNTLPPHSSTTDLTHLANIICQGEAHFQILNDFLHKHINATTHPRTAVTPPSTDRALSKRKLRREHYAITQKLYNKNRSKCAQGILDGVRRINNMNDAEVVEHWTTAMTQPPPPPLTPNPYIPNPDLNCVSTPISLLETQSALRGTSKALGLDGIKLASLRKLPLENVCGLLNILFISDVPPCQQKARVAFIPKVTDASSPSDLRPISIRSYLQRTLNKIFSKRIQKSIKILPTQRAFLPFDGTFENLTVLDGIIHDAKSTGRELRIASVDLRKAFDSISHDAVLWTLGARGYPEVFIEYIERLYQSSQTLLEFGKECRTIRPTRGVRQGDPLSPLLFNLVLDDILRKINLDNLGYRLKEGNRLMGLAFADDLILLASTKNTLQQLLDLAFPLLKERGLEINTDKSFTISHLYDSRVKKSLYQSTPEFSVGGRHLPAKGICARWRYLGIEFDSNGRVDTAKVTLLELLGRLTSAPLKPQQRLTILKQFLIPKILYKLVAGPRPSQKFLLELDCEIRRTVKLQWLKLENSVPNAFLYAHISHGGLDIPCLRTLIPRLRLSRLTALHIGTQWLLSTEYHSKELAKTSALCVFDDTTIEDAAHETEYWSRTLHNTVDGAHLKHTHLTPFTNDWVKGTPYLSGREYINLIKLRINALPTRARLARGRPGYDKFCRHRCNAVETLAHIAQVCDHTHRPIIKRHDDICERVTRLLRAKGMQVERERTFRRPAAPARRPDLVITTPTRVWVLDAEVCGPSRDLALARRDKIRKYDIPGVRDQLPSSLPHRFGSITVSMTGVWEPESVKDLLTLGLSKKNLIDLTVLAMQGTLRVFRAHRDHKSWVRRGGGAGELTGRRF

SEQ ID NO: 7806 - protein, 1227 aa, Dermanyssus gallinae
MDSRNLACPICDRRCKTGAGLSSHMRSHSTRVGNESTNTPSLVNSLIPPPPPSNNNDNINNSSTAPDSGAPLPTSSQRLIAANINNNRPNINSLSTSNSIIADSTPPPPVQEPSPIPSGSGVSFNSSDNQLNHNAIGVEANTPGTSGITPTNPPPPRRVSPSSPPHGPSPLNLICPVADCSRSFLSKSGLAIHVRRKHPILMNEELSSQPPLKKARWDPQDRELLAYLEASLISENSETTPCEINKLLVSKFPDRTLESIKRQRKSAAYKARVNEFVHKRTRSPSGSDDESGDPYPKRYDLDSQETKFPSPKDAIIARIQALTNTLPPHSSTTDLTHLANIICQGEAHSQILNDFLHKHINATTHPRTVVTPPSTDRALSKRKLRREHYAITQKLYNKNRSKCAQGILDGVRRINNMNDTEVVEHWATAMTQPPPPPLTPNPYIPNPDLNCVSTPISLLETQSALRGTSKALGLDGIKLASLRKLPLENVCCILNILFISDVPPCQQKARVAFIPKVTDASSPSDLRPISISSYLQRTLNKILSKRIQKSIKILPTQRAFLPFDGTFENLTVLDGIIHDAKSTGRELRIASVDLRKAFDSISHDAVLWTLGARGYPEVFIEYIERLYQSSQTLLEFGKECRTIRPTRGVRQGDPLSPLLFNLVLDDILRKINLDNLGYRLKEGNRLMGLAFADDLILLASTKNTLQQLLDLAFPLLKERGLEINTDKSFTISHLYDSRVKKSLYQSTPEFSVGGRQLPAKGICARWRYLGIEFDSNGRVDTAKVTLLELLGRLTSAPLKPQQRLTILKQFLIPKILYKLVAGPRPSQKFLLELDCEIRRTVKLQWLKLENSVPNAFLYAHISHGGLDIPCLRTLIPRLRLSRLTALNRSSHIGTQWLLSTDYHRKELAKTSALCVFDDTTIEDAAHETEYWSRTLHNTVDGAHLKHTHLTPFTNDWVKGTPYLSGREYINLIKLRINALPTRARLARGRPGYDKFCRHGCNAVETLAHIAQVCDHTHRPIIKRHDDICERVTRLLRAKGMQVERERTFRRPAAPARRPDLVITTPTRVWVLDAEVCGPSRDLALARRDKIRKYDIPGVRDQLPSSLPHRFGSITVSMTGVWEPESVKDLLTLGLSKKKPDRPNRPGHAGYPTGLPGAPGPQELGPSWRRSRRTHREAILNYFFRRALPQCANVQLLNKFNVVFKYIYIYIYIYIYIYIYIYIHLAEI

SEQ ID NO: 7807 - protein, 977 aa, Dermanyssus gallinae
MNEELSSQPPLKKARWDPQDRELLAYLEASLVSENSETTPCEINKLLVSKFPDRTLESINRQRKSAAYKARVNEFVHKRTRSPSGSDDESGDPYPKRSDLDSQETKFPSPKDAIIARIQALTNTLPPHSSTTDLTHLANIICQGEAHSQILNDFLHKHINATTHPRTVVTPPSTDRALSKRKLRREHYAITQKLYNKNRSKCAQGILDGVRRINNMNDTEVVEHWATAMTQPPPPPLTPNPYIPNPDLNCVSTPISLLETQSALRGTSKALGLDGIKLASLRKLPLENVCCLLNILFISDVPPCQQKARVAFIPKVTDASSPSDLRPISISSYLQRTLNKILSKRIQKSIKILPTQRAFLPFDGTFENLTVLDGIIHDAKSTGRELRIASVDLRKAFDSIGHDAVLWTLGARGYPEVFIEYIERLYQSSQTLLEFGKECRTIRPTRGVRQGDPLSPLLFNLVLDDILRKINLDNLGYRLKEGNRLMGLAFADDLILLASTKNTLQQLLDLAFPLLKERGLEINTDKSFTISHLYDSRVKKSLYQSTPEFSVGGRQLPAKGICARWRYLGIEFDSNGRVDTAKVTLLELLGRLTSAPLKPQQRLTILKQFLIPKILYKLVAGPRPSQKFLLELDCEIRRTVKLQWLKLENSVPNAFLYAHISHGGLDIPCLRTLIPRLRLSRLTALNRSSHIGTQWLLSTDYHRKELAKTSALCVFDDTTIEDAAHETEYWSRTLHNTVDGAHLKHTHLTPFTNDWVKGTPYLSGREYINLIKLRINALPTRARLARGRPGYDKFCRHGCNAVETLAHIAQVCDHTHRPIIKRHDDICERVTRLLRAKGMQVERERTFRRPAAPARRPDLVITTPTRVWVLDAEVCGPSRDLALARRDKIRKYDIPGVRDQLPSSLPHRFGSITVSMTGVWEAESVKDLLTLGLSKKNLIDLTVLAMQGTLRVFRAHRDHKSWVRRGGGAGELTGRRF

SEQ ID NO: 7808 - protein, 762 aa, Dermanyssus gallinae
MNDTEVVEHWATAMTQPPPPPLTPNPYIPNPNLNCVSTPISLLETQSALRGTSKALGLDGIKLASLRKLPLENVCCLLNILFISDVPPCQQKARVAFIPKVTDASSPSDLRPISISSYLQRTLNKILSKRIQKSIKILPTQRAFLPFDGTFENLTVLDGIIHDAKSTGRELRIASVDLRKAFDSISHDAVLWTLGARGYPEVFIEYIERLYQSSQTLLEFGKECRTIRPTRGVRQGDPLSPLLFNLVLDDILRKINLDNLGYRLKEGNRLMGLAFADDLILLASTKNTLQQLLDLAFPLLKERGLEINTDKSFTISHLYDSRVKKSLYQSTPEFSVGGRQLPAKGICARWRYLGIEFDSNGRVDTAKVTLLELLGRLTSAPLKPQQRLTILKQFLIPKILYKLVAGPRPSQKFLLELDCEIRRTVKLQWLKLENSVPNAFLYAHISHGGLDIPCLRTLIPRLRLSRLTALNRSSHIGTQWLLSTDYHRKELAKTSALCVFDDTTIEDAAHETEYWSRTLHNTVDGAHLKHTHLTPFTNDWVKGTPYLSGREYINLIKLRINALPTRARLARGRPGYDKFCRHGCNAVETLAHIAQVCDHTHRPIIKRHDDICERVTRLLRAKGMQVERERTFRRPAAPARRPDLVITTPTRVWVLDAEVCGPSRDLALARRDKIRKYDIPGVRDQLPSSLPHRFGSITVSMTGVWEPESVKDLLTLGLSKKNLIDLTVLAMQGTLRVFRAHRDHKSWVRRGGGAGELTGRRF

SEQ ID NO: 7809 - protein, 1178 aa, Dermanyssus gallinae
MDSRNLACPICDRRCKTGAGLSSHMRSHSTRVGNESTNTPSLVNSLIPTPPPSNNNDNINNSSTAPDSGAPLPTSSQRLIAANINNNRPNINSRSTSNSIIADSTPPPPVQEPSPIPSGSGVSFNSSDNQLNHNAIGVEANTPGTSGITPTNPPPPRRVSPPSPPHGPSPLNLICPVADCSRSFLSKSGLAIHVRRKHPILMNEELNSQPPLKKARWDPQDRELLAYLEASLVSENSETTPCEINNLLLSKFPDRTLESIKRQRKSAAYKARVNEFVHKRTRSPSGSDDESGDPYPKRSDLDSQETKFPSPKDAIIARIQALTNKLPPTSSTTDLTHLANIICQGEAHSQILNDFLHKHINATTHPRTAVTPPSTDRALSKRKLRRQHYAITQKLYNKNRSKCAQGILDGVRRINNMNDTEVVEHWTTAMTQPPPPPLTPNPYIPNPDLNCVSTPISLLETQSALRGTSKALGLDGIKLASLRKLPLENVCCLLNILFISDVPPCQQKARVAFIPKVTDASSPSDLRPISISSYLQRTLNKILSKRIQKSIKILPTQRAFLPFDGTFENLTVLDGIIHDAKSTGRELRIASVDLRKAFDSISHDAVLWTLGARGYPEVFIEYIERLYQSSQTLLEFGKECRTIRPTRGVRQGDPLSPLLFNLVLDDILRKINLDNLGYRLKEGNRLMGLAFADDLILLASTKNTLQQLLDLAFPLLKERGLEINTDKSFTISHLYDSRVKKSLYQSTPEFSVGGRQLPAKGICARWRYLGIEFDSNGRVDTAKVTLLELLGRLTSAPLKPQQRLTILKQFLIPKILYKLVAGPRPSQKFLLELDCEIRRTVKLQWLKLENSVPNAFLYAHISHGGLDIPCLRTLIPRLRLSRLTALNRSSHIGTQWLLSTEYHSKELAKTSALCVFDDTTIEDAAHETEYWSRTLHNTVDGAHLKHTHLTPFTNDWVKGTPYLSGREYINLIKLRINALPTRARLARGRPGYDKFCRHGCNAVETLAHIAQVCDHTHRPIIKRHDDICERVTRLLRAKGMQVERERTFRRPAAPARRPDLVITTPTRVWVLDAEVCGPSRDLASARRDKIRKYDIPGVRDQLPSSLPHRFGSITVSMTGVWEPESVKDLLTLGLSKKNLIDLTVLAMQGTLRVFRAHRDHKSWVRRGGGAGELTGRRF

SEQ ID NO: 7810 - protein, 977 aa, Dermanyssus gallinae
MNEELSSQPPLKKARWDPQDRELLACLEASLVSENSETTPCEINKLLLSKFPDRTLESIKRQRKSAAYKARVNEFVHKRTRSPSGSDDESGDPYPKRSDLDSQETKFPSPKDAIIARIQALTNTLPPHSSTTDLTHLANIICQGEAHFQILNDFLHKHINATTHPRTAVTPPSTDRALSKRKLRREHYAITQKLYNKNRSKCAQGILDGVRRINNMNDTEVVEHWTTAMTQPPPPPLTPNPYIPNPDLNCVSTPISLLETQSALRGTSKALGLDGIKLASLRKLFLENVCCLLNILFISDVPPCQQKARVAFIPKVTDASSPSDLRPISISSYLQRTLNKILSKRIQKSIKILPTQRAFLPFDGTFENLTVLDGIIHDAKSTGRELRIASVDLRKAFDSISHDAVLWTLGARGYPEVFIEYIERLYQSSQTLLEFGKECRTIRPTRGVRQGDPLSPLLFNLVLDDILRKINLDNLGYRLKEGNRLMGLAFADDLILLASTKNTLQQLLDLAFPLLKERGLEINTDKSFTISHLYDSRVKKSLYQSTPEFSVGGRQLPAKGICARWRYLGIEFDSNGRVDTAKVTLLELLGRLTSAPLKPQQRLTILKQFLIPKILYKLVAGPRPSQKFLLELDCEIRRTVKLQWLKLENSVPNAFLYAHISHGGLDIPCLRTLIPRLRLSRLTALNRSSHIGTQWLLSTEYHSKELAKTSALCVFDDTIIEDAAHETEYWSRTLHNTVDGAHLKHTHLTPFTNDWVKGTPYLSGREYINLIKLRINALPTRARLARGRPGYDKFCRHGCNAVETLAHIAQVCDHTHRPIIKRHDDICERVTRLLRAKGMQVERERTFRRPAAPARRPDLVITTPTRVWVLDAEVCGPSRDLALARRDKIRKYDIPGVRDQLPSSLPHRFGSITVSMTGVWEPESVKDLLTLGLSKKNLIDLTVLAMQGTLRVFRAHRDHKSWVRRGGGAGEVTGRRF

SEQ ID NO: 7811 - protein, 982 aa, Dermanyssus gallinae
MNQTDNGTAEEVWDPTIFEGSAKYQRQRNTQIIATLLKFPDRTLESIKRQRKSAAYKARVNEFVHKRTRSPSGSDDESGDPYPKRYDLDSQETKFPSPKDAIIARIQALTNTLPPHLSTTDLTHLANIICQAEAHSQILNDFLHKHINATTHPRTVVTPPSTDRALSKRKLRREHYAITQKLYNKNRSKCAQGILDGVRRINNMNDTEVVEHWATAMTQPPPPPLTPNPYIPNPDLNCVSTPISLLETQSALRGTSKALGLDGIKLASLRKLPLENVCCLLNILFISDVPPCQQKARVAFIPKVTDASSPSDLRPISISSYLQRTLNKILSKRIQKSIKILPTQRAFLPFDGTFENLTVLDGIIHDAKSTGRELRIASVDLRKAFDSISHDAVLWTLGARGYPEVFIEYIERLYQSSQTLLEFGKECRTIRPTRGVRQGDPLSPLLFNLVLDDILRKINLDNLGYRLKEGNRLMGLAFADDLILLASTKNTLQQLLDLAFPLLEERGLEINTDKSFTISHLYDSRVKKSLYQSTPEFSVGGRQLPAKGICARWRYLGIEFDSNGRVDTAKVTLLELLGRLTSAPLKPQQRLTILKQFLIPKILYKLVAGPRPSQKFLLELDCEIRRTVKLQWLKLENSVPNAFLYAHISHGGLDIPCLRTLIPRLRLSRLTALNRSSHIGTQWLLSTDYHRKELAKTSALCVFDDTTIEDAAHETEYWSRTLHNTVDGAHLKHTHLTPFTNDWVKGTPYLSGREYINLIKLRINALPTRARLARGRPGYDKFCRHGCNAVETLAHIAQVCDHTHRPIIKRHDDICERVTRLLRAKGMQVERERTFRRPAAPARRPDLVITTPTRVWVLDAEVCGPSRDLALARRDKIRKYDIPGVRDQLPSSLPHRFGSITVSMTGVWEPESVKDLLTLGLSKKNLIDLTVLAMQGTLRVFRAHRDHKSWVRRGGGAGELTGRRFKTIFLGGHCLSVQMCNY

SEQ ID NO: 7812 - protein, 1177 aa, Dermanyssus gallinae
MDSRNLACPICDRRCKTGAGLSSHMRSLRRRVGNESTNTPSLVNSLIPPPPPSNNNDNINNSSTAPDSGAPLPTSSQRLIAANINNNRPNINSLSTSNSIIADSTPPPPVQEPSPIPSGSGVSFNSSDNLIHNAIGVEANTPGTSGISPTNPPPPRRVSPSSPPHGPSPLNLICPVADCSRSFLSKSGLAIHVRRKHPILMNEELSSQPPLKKARWDPQDRELLAYLEASLVSESSETTPCEINKLLVSKFPDRTLESINRQRKSAAYKARVNEFVHKRTRSPSGSDDESGDPYPKRSDLDSQETKFPSPKDAIIARIQALTNTLPPHSSTTDLTHLANIICQGEAHSQILNDFLHKHINATTHPRTVVTPPSTDRALSKRKLRREHYAITQKLYNKNRSKCAQGILDGVRRINNMNDTEVVEHWATAMTQPPPPPLTPNPYIPNPDLNCVSTPISLLETQSALRGTSKALGLDGIKLASLRKLPLENVCCLLNILFISDVPPCQQKARVAFIPKVTDASSPSDLRPISISSYLQRTLNKILSKRIQKSIKILPTQRAFLPFDGTFENLTVLDGIIHDAKSTGRELRIASVDLRKAFDSIGHDAVLWTLGARGYPEVFIEYIERLYQSSQTLLEFGKECRTIRPTRGVRQGDPLSPLLFNLVLDDILRKINLDNLGYRLKEGNRLMGLAFADDLILLASTKNTLQQLLDLAFPLLKERGLEINTDKSFTISHLYDSRVKKSLYQSTPEFSVGGRQLPAKGICARWRYLGIEFDSNGRVDTAKVTLLELLGRLTSAPLKPQQRLTILKQFLIPKILYKLVAGPRPSQKFLLELDCEIRRTVKLQWLKLENSVPNAFLYAHISHGGLDIPCLRTLIPRLRLSRLTALNRSSHIGTQWLLSTDYHRKELAKTSALCVFDDTTIEDAAHETEYWSRTLHNTVDGAHLKHTHLTPFTNDWVKGTPYLSGREYINLIKLRINALPTRARLARGRPGYDKFCRHGCNAVETLAHIAQVCDHTHRPIIKRHDDICERVTRLLCAKGMQVERERTFRRPAAPARRPDLVITTPTRVWVLDAEVCGPSRDLALARRDKIRKYDIPGVRDQLPSSLPHRFGSITVSMTGVWEPESVKDLLTLGLSKKNLIDLTVLAMQGTLRVFRAHRDHKSWVRRGGGAGELTGRRF

SEQ ID NO: 7813 - protein, 1044 aa, Dermanyssus gallinae
MLLVSRLTPPTLVALLPQTPLPLAGCPLYPPHGPSPLNLICPVADCSRSFLSKSGLAIHVRRKHPILMNEELSSQPPLKKARWDPQDRELLAYLEASLVSENSETTPCEINKLLMSKFPDRTLESIKRQRKSAAYKARVNEFVHKRTRSPSGSDDESGDPYPKRSDLDSQETKCPSPKDAIIARIQALTNTLPPHSSTTDLTHLAKIICQGEAHSQILNDFLQKHINATTHPRTAVTPPSTDRALSKRKLRREHYAITQKLYNKNRSKCAQGILDGVRRINNMNDTEVVEHWTTAMTQPPPPPLTPNPYIPNPDLNCVSTPISLLETQSALRGTSNALGLDGIKLASLRKLPLENVCCLLNILFISDVPPCQQKARVAFIPKVTDASSPSDLRPISISSYLQRTLNKILSKRIQKSIKILPTQRAFLPFDGTFENLTVLDGIIHDAKSTGRELRIASVDLRKAFDSISHDAVLWTLGARGYPEVFIEYIERLYQSSQTLLQFGKECRTIRPTRGVRQGDPLSPLLFNLVLDDILRKINLDNLGYRLKEGNRLMSLAFADDLILLASTKNTLQQLLDLAFLLLKERGLEINTDKSFTISHLYDSRVKKSLYQSTPEFSVGGRQLPAKGICARWRYLGIEFDSNGRVDTAKVTLLELLGRLTSAPLKPQQRLTILKQFLIPKILYELVAGPRPSQKFLLELDCEIRRTVKLQWLKLENSVPNAFLYAHISHGGLDIPCLRTLIPRLRLSRLTALNRSSHIGTQWLLSTDYHRKELAKTSALCVFDDTTIKDAAHETEYWSRTLHNTVDGAHLKHTHLTPFTNDWVKGTPYLSGREYINLIKLRINALPTRARLARGRPGYDKFCRHGCNAVETLAHIAQVCDHTHRPIIKRHDDICERVTRLLRGKGMQVERERTFRRPAAPAQRPDLVITTPTRVWVLEPEVCGPSRDLALARRDKIRKYDIPGVRDQLPSSLSHRFGSITVSMTGVWEPESVKDLLTLGLSKKNLIDLTVLAMQGTLRVFRAHRDHKSWVRRGGGAGELTGRRF

SEQ ID NO: 7814 - protein, 977 aa, Dermanyssus gallinae
MNEELSSQPPLKKARWDPQDRELLAYLEASLVSENSETTPCEINKLLVSKFPDRTLESIKRQRKSAAYKARVNEFVHKRTRSPSGPDDESGDPYPKRYDLDSQETKFPSPKDAIIARIQALTNTLPPHSSTTDLTHLANIICQGEAHSQILNDFLHKHINATTHPRTVVTPPSTDRALSKRKLRREHYAITQKLYNKNRSKCAQGILDGVRRINNMNDTEVVEHWATAMTQPPPPPLTPNPYIPNPDLNCVSTPISLLETQSALRGTSKALGLDGIKLASLRKLPLENVCCLLNILFISDVPPCQQKARVAFIPKVTDASSPSDLRPISISSYLQRTLNKILSKRIQKSIKILPTQRAFLPFDGTFENLTVLDGIIHDAKSTGRELRIASVDLRKAFDSISHDAVLWTLGARGYPEVFIEYIERLYQSSQTLLEFGKECRTIRPTRGVRQGDPLSPLLFNLVLDDILRKINLDNLGYRLKEGNRLMGLAFADDLILLASTKNTLQQLLDLAFPLLKERGLEINTDKSFTISHLYDSRVKKSLYQSTPEFSVGGRQLLAKGICARWRYLGIEFDSNGRVDTAKVTLLELLGRLTSAPLKPQQRLTILKQFLIPKILYKLVAGPRPSQKFLLELDCEIRRTVKLQWLKLENSVPNAFLYAHISHGGLDIPCLRTLIPRLRLSRLTALNRSSHIGTQWLLSTDYHRKELAKTSALCVFDDTTIEDAAHETEYWSRTLHNTVDGAHLKHTHLTPFTNDWVKGTPYLSGREYINLIKLRINALPTRARLARGRPGYDKFCRHGCNAVETLAHIAQVCDHTHRPIIKRHDDICERVTRLLRAKGMQVERERTFRRPAAPARRPDLVITTPTRVWVLDAEVCGPSRDLALARRDKIRKYDIPGVRDQLPSSLPHRFGSITVSMTGVWEPESVKDLLTLGLSKKNLIDLTVLAMQGTLRVFRAHRDHKSWVRRGGGAGELTGRRF

SEQ ID NO: 7815 - protein, 977 aa, Dermanyssus gallinae
MNEELSSQPPLKKARWDPQDRELLAYLEASLVSENSETTPCEINKLLLSKFPDRTLESIKRQRKSAAYKARVNEFVHKRTRSPSGSDDESGDPYPKRSDLDSQETKFPSPKDAIIARIQALTNTLPPHSSTTDLTHLANIICQGEAHFQILNDFLHKHINATTHPRTAVTPPSTDRALSKRKLRREHYAITQKLYNKNRSKCAQGILDGVRRINNMNDTEVVEHWTTAMTQPPPPPLTPNPYIPNPDLNCVSTPISLLETQSALRGTSKALGLDGIKLASLRKLPLENVCCLLNILVISDVPPCQQKARVAFIPKVTDASSPSDLRPISISSYLQRTLNKILSKRIQKSIKILPTQRAFLPFDGTFENLTVLDGIIHDAKSTGRELRIASVDLRKAFDSISHDAVLWTLGARGYPEVFIEYIERLYQSSQTLLEFGKECRTIRPTRGVRQGDPLSPLLFNLVLDDILRKINLDNLGYRLKEGNRLMGLAFADDLILLASTKNTLQQLLDLAFPLLKERGLEINTDKSFTISHLYDSRVKKSLYQSTPEFSVGGRQLPAKGICARWRYLGIEFDSNGRNDTAKVTLLELLGRLTSAPLKPQQRLTILKQFLIPKILYKLVAGPRPSQKFLLELDCEIKRTVKLQWLKLENSVPNAFLYAHISHGGLDIPCLRTLIPRLRLSRLTALNRSSHIGTQWLLSTEYHSKELAKTSALCVFDDTTIEDAAHETEYWSRTLHNTVDGAHLKHTHLTPFTNDWVKGTPYLSGREYINLIKLRINALPTRARLARGRPGYDKFCRHGCNAVETLAHIAQVCDHTHRPIIKRHDDICERVTRLLRAKGMQVERERTFRRPAAPARRPDLVITTPTRVWVLDAEVCGPSRDLALARRDKIRKYDIPGVRDQLPSSLPHRFGSITVSMTGVWEPESVKDLLTLGLSKKNLIDLTVLAMQGTLRVFRAHRDHKSWVRRGGGAGELTGRRF

SEQ ID NO: 7816 - protein, 1106 aa, Dermanyssus gallinae
MDSRNLACPICDRRCKTGAGLSSHMRSHSTRVGNESTNTPSLVNSLIPPPPPPSNNNDNINNSSTAPDSGAPLPTSSQRLIAANINNNRPNINSRSTSNSIIADSTPPPPVQEPSPIPSGSGVSFNSSDNQLNHNAIGVEANTPGTSGITPTNPPPPRRVSPSSPPHGPSPLNLICPVADCSRSFLSKSGLAIHVRRKHPILMNEALSSQPPLKKARWDPQDRELLAYLEASLVSENSESDAIIARIQALTNTLPPHSSTTDLTHLANIICQGEAHFQILNDFLHKHINATTHPRTAVTPPSTDRALSKRKLRRERYAITQKLYNKNRSKCAQGILDGVRRINNMNDTEVVEHWTTAMTQPPPPPLTPNPYIPNPDLNCVSTPISLLETQSALRGTSKALGLDGIKLASLRKLPLENVCCLLNILFISDVPPCQQKARVAFIPKVTDASSPSDLRPISISSYLQRTLNKILSKRIQKSIKILPTQRAFLPFDGTFENLTVLDGIIHDAKSTGRELRIASVDLRKAFDSISHDAVLWTLGARGYPEVFIEYIERLNQSSQTLLEFGKECRTIRPTRGVRQGDPLSPLLFNLVLDDILRKINLDNLGYRLKEGNRLMGLAFADDLILLASTKNTLQQLLDLAFPLLKERGLEINTDKSFTISHLYDSRVRKSLYQSTPEFSVGGRQLPAKGICARWRYLGIEFDSNGRVDTAKVTLLELLGRLTSAPLKPQQRLTILKQFLIPKILYKLVAGPRPSQKFLLELDCEIRRTVKLQWLKLENSVPNAFLYAHISHGGLDIPCLRTLIPRLRLSRLTALNRSSHIGTQWLLSTEYHSKELAKTSALCVFDDTTIEDAAHETEYWSRTLHNTVDGAHLKHTHLTPFTNDWVKGTPYLSGREYINLIKLRINALPTRARLARGRPGYDKFCRHGCNAVETLAHIAQVCDHTHRPIIKRHDDICERVTRLLRAKGMQVERERTFRRPVAPARRPDLVITTPTRVWVLDAEVCGPSRDLALARRDKIRKYDIPGVRDQLPSSLPHRFGSITVSMTGVWEPESVKDLLTLGLSKKNLIDLTVLAMQGTLRVFRAHRDHKSWVRRGGGAGEVTGRRF

SEQ ID NO: 7817 - protein, 762 aa, Dermanyssus gallinae
MNDTEVVEHWTTAMTQPPPPPLTPNPYIPNPDLNCVSTPISLLETQSALRGTSKALGLDGIKLASLRKLPLENVCCLLNILFISDVPPCQQKARVAFIPKVTDASSPSDLRPISISSYLQRTLNKILSKRIQKSIKILPTQRAFLPFDGTFENLTVLDGIIHDAKSTGRELRIASVDLRKAFDSISHDAVLWTLGARGYPEVFIEYIERLYQSSQTLLEFGKECRTIRPTRGVRQGDPLSPLLFNLVLDDILRKINLDNLGYRLKEGNRLMGLAFADDLILLASTKNTLQQLLDLAFPLLKERGLEINTDKSFTISHLYDSRVKKSLYQSTPEFSVGGRQLPAKGICARWRYLGIEFDSNGRVDTAKVTLLELLGRLTSAPLKPQQRLTILKQFLIPKILYKLVAGPRPSQKFLLELDCEIRRTVKLQWLKLENSVPNAFLYAHISHGGLDIPCLRTLIPRLRLSRLTALNRSSHIGTQWLLSTEYHSKELAKTSALCVFDDTTIEDAAHETEYWSRTLHNTVDGAHLKHTHLTPFTNDWVKGTPYLSGREYINLIKLRINALPTRARLARGRPGYDKFCRHGCNAVETLAHIAQVCDHTHRPIIKRHDDICERVTRLLRAKGMQVERERTFRRPAAPARRPDLVITTPTRVWVLDAEVCGPSRDLALARRDKIRKYDIPGVRDQLPSSLPHRFGSITVSMTGVWEPESVKDLLTLGLSKKNLIDLTVLAMQGTLRVFRAHRDHKSWVRRGGGAGELTGRRF

SEQ ID NO: 7818 - protein, 872 aa, Dermanyssus gallinae
METTFPSPKDAIIAHIQALTHKLPRHTSTADLTLLTNIICRGEAHTDALNIFLDKHLNNKHTRSTAVTTPSTDRVLSKRQLRREHYALTQKLYNKNRSKCAQGILDGTRRINNINDTDVVEHWTNAMTQPPPPPLTPNPYIPNPDLKCVSNPISLFETQRALRGSSKALGLDGIKLASLRKLPEETVCCLLNILIISDIPPCQQKARVAFIPKVTNASSPSDLRPISISSYLQRTLNKILSKRIQTSMKILHTQRAFIPYDGTFENLNVLDGIIHDAKTTGRELRIASIDLRKAFDSISHDAVLWTLESRGYPRVFIDYIERLYQSSLTLLEFGKECRTIRPTRGVRQGDPLSPLLFNLVFDDILRKLNDTNIGYQLKEGTRLMGLAFADDLILLASTKNTLQQLLDLANPLLKARGLEINPDKSFTISHLYDGRVKKSFYQNSPEFTVGERLLPTKGLSARWRYLGIEFDNTGRVDSAKDTLLDFLSRLTIAPLKPQQRLAILKQFAIPKILYRLVAGPRPSRAFLLELDNEIRRTVKLHWLKLENSVPNAFLYAHTAHGGLDIPCLRTLITRLRLSRLTNLQKSPHIGTQWLLSSDYHRDELAKTSALCEFGDTTIENAAQETEYWALTLHNTFDGAHLKNAHKSPFTQNWVKGTAYLSGKEYINLIKLRINALPTRARLARGRPWYDKFCRHGCNAVETLAHVSQLCDYTHLPIIKRHDDICERVSRLLRGKGLQVDRERTFRRPTAPSLRPDLVITTPTGVWVLDTEVCGPSRDLARARRDKIRKYDIPEIRDQLPGSSHRFGSITVSMTGVWEPESVKDLLTLGVSKKNLIDLTVLTMQGTLRVYRAHQDHKSWGRRRGRQGGLVGR

SEQ ID NO: 7819 - protein, 977 aa, Dermanyssus gallinae
MNEELSSQPPLKKARWDPQDRELLAYLEASLVSENSETTPCEINKLLVSKFPDRTLESIKRQRKSAAYKARVNEFVHKRTRSPSGSDDESGDPYPKRYDLDSQETKFPSPKDAIIARIQALTNTLPPHSSTTDLTHLANIICQGEAHSQILNDFLHKHINTTTHPRTVVTPPSTDRALSKRKLRREHYAITQKLYNKNRSKCAQGILDGVRRINNMNDTEVVEHWATAMTQPPPPPLTPNPYIPNPDLNCVSTPISLLETQSALRGTSKALGLDGIKLASLRKLPLENVCCLLNIIFISAVPPCQQKARVAFIPKVTDASSPSDLRPISISSYLQRTLNKILSKRIQKSIKILPTQRAFLPFDGTFENLTVLDGIIHDAKSTGRELRIASVDLRKAFDSISHDAVLWTLGARGYPEVFIEYIERLYQSSQTLLEFGKECRTIRPTRGVRQGDPLSPLLFNLVLDDILRKINLDNLGYRLKEGNRLMGLAFADDLILLASTKNTLQQLLDLAFPLLKERGLEINTDKSFTISHLYDSRVKKSLYQSTPEFSVGGRQLPAKGICARWRYLGIEFDSNGRVDTAKVTLLELLGRLTSAPLKPQQRLTILKQFLIPKILYKLVAGPRPSQKFLLELDCEIRRTVKLQWLKLENSVPNAFLYAHISHGGLDIPCLRTLIPRLRLSRLTALNRSSHIGTQWLLSTDYHRKELAKTSALCVFDDTTIEDAAHETEYWSRTLHNTVDGAHLKHTHLTPFTNDWVKGTPYLSGREYINLIKLRINALPTRARLARGRPGYDKFCRHGCNAVETLAHIAQVCDHTHRPIIKRHDDICERVTRLLRAKGMQVERERTFRRPAAPARRPDLVITTPTRVWVLDAEVCGPSRDLALARRDKIRKYDIPGVRDQLPSSLPHRFGSITVSMTGVWEPESVKDLLTLGLSKKNLIDLTVLAMQGTLRVFRAHRDHKSWVRRGGGAGELTGRRF

SEQ ID NO: 7820 - protein, 977 aa, Dermanyssus gallinae
MNEELSSQPPLKKARWDPQDRELLAYLEASLVSENSETTPCEINKLLVSKFPDRTLESINRQRKSAAYKARVNEFVHKRTRSPSGSDDESGDPYPKRSDLDSQETKFPSPKDAIIARIQALTNTLPPHSSTTDLTHLANIICQGEAHSQILNDFLHKHINATTHPRTVVTPPSTDRALSKRKLRREHYAITQKLYNKNRSKCAQGILDGVRRINNMNDTEVVEHWATAMTQPPPPPLTPNPYIPNPDLNCVSTPISLLETQSALRGTSKALGLDGIKLASLRKLPLENVCCLLNILFISDVPPCQQKARVAFIPKVTDASSPSDLRPISISSYLQRTLNKILSKRIQKSIKILPTQRAFLPFDGTFENLTVLDGIIHDAKSTGRELRIASVDLRKAFDSIGHDAVLWTLGARGYPEVFIEYIERLYQSSQTLLEFGKECRTIRPTRGVRQGDPLSPLLFNLVLDDILRKINLDNLGYRLKEGNRLMGLAFADDLILLASTKNTLQQLLDLAFPLLKERGLEINTDKSFTISHLYDSRVKKSLYQSTPEFSVGGRQLPAKGICARWRYLGIEFDSNGRVDTAKVTLLELLGRLTSAPLKPQQRLTILKQFLIPKILYKLVAGPRPSQKFLLELDCEIRRTVKLQWLKLENSVPNAFLYAHISHGGLDIPCLRTLIPRLRLSRLTALNRSSHIGTQWLLSTDYHRKELAKTSALCVFDDTTIEDAAHETEYWSRTLHNTVDGAHLKHTHLTPFTNDWVKGTPYLSGREYINLIKLRINALPTRARLARGRPGYDKFCRHGCNAVETLAHIAQVCDHTHRPIIKRHDDICERVTRLLRAKGMQVERERTFRRPAAPARRPDLVITTPTRVWVLDAEVCGPSRDLALARRDKIRKYDIPGVRDQLPSSLPHRFGSITVSMTGVWEPESVKDLLTLGLSKKNLIDLTVLAMQGTLRVFRAHRDHKSWVRRGGGAGELTGRRF

SEQ ID NO: 7821 - protein, 977 aa, Dermanyssus gallinae
MNEELSSQPPLKKARWDPQDRELLAYLEASLVSENSETTPCEINKLLVSKFPDRTLESINRQRKSAAYKARVNEFVHKRTRSPSGSDDESGDPYPKRSDLDSQETKFPSPKDAIIARIQALTNTLPPHSSTTDLTHLANIICQGEAHSQILNDFLHKHINATTHPRTVVTPPSTDRALSKRKLRREHYAITQKLYNKNRSKCAQGILDGVRRINNMNDTEVVEHWATAMTQPPPPPLTPNPYIPNPDLNCVSTPISLLETQSALRGTSKALGLDGIKLASLRKLPLENVCCLLNILFISDVPPCQQKARVAFIPKVTDASSPSDLRPISISSYLQRTLNKILSKRIQKSIKILPTQRAFLPFDGTFENLTVLDGIIHDAKSTGRELRIASVDLRKAFDSIGHDAVLWTLGARGYPEVFIEYIERLYQSSQTLLEFGKECRTIRPTRGVRQGDPLSPLLFNLVLDDIFRKINLDNLRYRLKEGNRLMGLAFADDLILLASTKNTLQQLLDLAFPLLKERGLEINTDKSFTISHLYDSRVKKSLYQSTPEFSVGGRQLPAKGICARWRYLGIEFDSNGRVDTAKVTLLELLGRLTSAPLKPQQRLTILKQFLIPKILYKLVAGPRPSEKFLLELDCEIRRTVKLQWLKLENSVPNAFLYAHISHGGLDIPCLRTLIPRLRLSRLTALNRSSHIGTQWLLSTDYHRKELAKTSALCVFDDTTIEDAAHETEYWSRTLHNTVDGAHLKHTHLTPFTNDWVKGTPYLSGREYINLIKLRINALPTRARLARGRPGYDKFCRHGCNAVETLAHIAQVCDHTHRPIIKRHDDICERVTRLLRAKGMQVERERTFRRPAAPARRPDLVITTPTRVWVLDAEVCGPSRDLALARRDKIRKYDIPGVRDQLPSSLPHRFGSITVSMTGVWEPESVKDLLTLGLSKKNLIDLTVLAMQGTLRVFRAHRDHKSWVRRGGGAGELTGRRF

SEQ ID NO: 7822 - protein, 977 aa, Dermanyssus gallinae
MNEELSSQPPLKKARWDPQDRELLAYLEASLVSENSETTPCEINKLLVSKFPDRTLESINRQRKSAAYKARVNEFVHKRTRSPSGSDDESGDPYPKRSDLDSQETKFPSPKDAIIARIQALTNTLPPHSSTTDLTHLANIIFQGEAHSQILNDFLHKHINATTHPRTVVTPPSTDRALSKRKLRREHYAITQKLYNKNRSKCAQGILDGVRRINNMNDTEVVEHWATAMTQPPPPPLTPNPYIPNPDLNCVSTPISLLETQSALRGTSKALGLDGIKLASLRKLPLENVCCLLNILFISDVPPCQQKARIAFIPKVTDASSPSDLRPISISSYLQRTLNKILSKRIQKSIKILPTQRAFLPFDGTFENLTVLDGIIHDAKSTGRELRIASVDLRKAFDSIGHDAVLWTLGARGYPEVFIEYIERLYQSSQTLLEFGKECRTIRPTRGVRQGDPLSPLLFNLVLDDILRKINLDNLGYRLKEGNRLMGLAFADDLILLASTKNTLQQLLDLAFPLLKERGLEINTDKSFTISHLYDSRVKKSLYQSTPEFSVGGRQLPAKGICARWRYLGIEFDSNGRVDTAKVTLLELLGRLTSAPLKPQQRLTILKQFLIPKILYKLVAGPRPSQKFLLELDCEIRRTVKLQWLKLENSVPNAFLYAHISHGGLDIPCLRTLIPRLRLSRLTALNRSSHIGTQWLLSTDYHRKELAKTSALCVFDDTTIEDAAHETEYWSRTLHNTVDGAHLKHTHLTPFTNDWVKGTPYLSGREYINLIKLRINALPTRARLARGRPGYDKFCRHGCNAVETLAHIAQVCDHTHRPIIKRHDDICERVTRLLRAKGMQVERERTFRRPAAPARRPDLVITTPTRVWVLDAEVCGPSRDLALARRDKIRKYDIPGVRDQLPSSLPHRFGSITVSMTGVWEPESVKDLLTLGLSKKNLIDLTVLAMQGTLRVFRAHRDHKSWVRRGGGAGELTGRRF

SEQ ID NO: 7823 - protein, 872 aa, Dermanyssus gallinae
METTFPSPKDAIIAHIQALTHKLPRHTSTADLTLLTNIICRGEAHTDALNIFLDKHLNNKHTRSTAVTTPSTDRVLSKRQLRREHYALTQKLYNKNRSKCAQGILDGTRRINNINDTDVVEHWTNAMTQPPPPPLTPNPYIPNPDLKCVSNPISLFETQRALRGSSKALGLDGIKLASLRKLPEETVCCLLNILIISDIPPCQQKARVAFIPKVTNASSPSDLRPISISSYLQRTLNKILSKRIQTSMKILHTQRAFIPYDGTFENLNVLDGIIHDAKTTGRELRIASIDLRKAFDSISHDAVLWTLESRGYPRVFIDYIERLYQSSLTLLEFGKECRTIRPTRGVRQGDPLSPLLFNLVFDDILRKLNDTNIGYQLKEGTRLMGLAFADDLILLASTKNTLQQLLDLANPLLKARGLEINPDKSFTISHLYDGRVKKSFYQNSPEFTVGERLLPTKGLSARWRYLGIEFDNTGRVDSAKDTLLDFLSRLTIAPLKPQQRLAILKQFAIPKILYRLVAGPRPSRAFLLELDNEIRRTVKLHWLKLENSVPNAFLYAHTAHGGLDIPCLRTLIPRLRLSRLTNLQKSPHIGTQWLLSSDYHRDELAKTSALCEFGDTTIENAAQETEYWALTLHNTFDGAHLKNAHKSPFTQNWVKGTAYLSGKEYINLIKLRINALPTRARLARGRPWYDKFCRHGCNAVETLAHVSQLCDYTHLPIIKRHNDICERVSRLLRGKGLQVDRERTFRRPTAPSLRPDLVITTPTGVWVLDTEVCGPSRDLARARRDKIRKYDIPEIRDQLPGSSHRFGSITVSMTGVWEPESVKDLLTLGVSKKNLIDLTVLTMQGTLRVYRAHQDHKSWGRRRGRQGGLVGR

SEQ ID NO: 7824 - protein, 977 aa, Dermanyssus gallinae
MNEELSSQPPLKKARWDPQDRELLAYLEASLVSENSETTPCEIYKLLVSKFPDRTLESIKRQRKSAAYKARVNEFVHKRTRSPSGSDDESGDPYPKRSDLDSQETKFPSPKDAIIARIQALTNTLPPHSSTTDLTHLANIICQGEAHSQLLNDFLHKHINATTHPRTVVTPPSTDRALSKRKLRREHYAITQKLYNKNRSKCAQGILDGVRRINNMNDTEVVEHWATAMTQPPPPPLTPNPYIPNPDLNCVSTPISLLETQSALRGTSKALGLDGIKLASLRKLPLENVCCLLNILFISDVPPCQQKARVAFIPKVTDASSPSDLRPISISSYLQRTLNKILSKRIQKSIKILPTQRAFLPFDGTFENLTVLDGIIHDAKSTGRELRIASVDLRKAFDSISHDAVLWTLGARGYPEVFIEYIERLYQSSQTLLEFGKECRTIRPTRGVRQGDPLSPLLFNLVLDDILRKINLDNLGYRLKEGNRLMGLAFADDLILLASTKNTLQQLLDLAFPLLKERGLEINTDKSFTISHLYDSRVKKSLYQSTPEFSVGGRQLPAKGICARWRYLGIEFDSNGRVDTAKVTLLELLGRLTSAPLKPQQRLTILKQFLIPKILYKLVAGPRPSQKFLLELDCEIRRTVKLQWLKLENSVPNAFLYAHISHGGLDIPCLRTLIPRLRLSRLTALNRSSHIGTQWLLSTDYHRKELAKTSALCVFDDTTIEDAAHETEYWSRTLHNTVDGAHLKHTHLTPFTNDWVKGTPYLSGREYINLIKLRINALPTRARLARGRPGYDKFCRHGCNAVETLAHIAQVCDHTHRPIIKRHDDICERVTRLLRAKGMQVERERTFRRPAAPARRPDLVITTPTRVWVLDAEVCGPSRDLALARRDKIRKYDIPGVRDQLPSSLPHRFGSITVSMTGVWEPESVKDLLTLGLSKKNLIDLTVLVMQGTLRVFRAHRDHKSWVRRGGGAGELTGRRF

SEQ ID NO: 7825 - protein, 977 aa, Dermanyssus gallinae
MNEELSSQPPLKKARWDPQDRELLAYLEASLVSENSETTPCEINKLLVSKFPDRTLESIKRQRKSAAYKARVNEFVHKRTRSPSGSDDESGDPYPKRYDLDSQETKFPSPKDAIIARIQALTNTLPPHSSTTDLTLLANIICQGEAHSQILNDFLHKHINATTHPRTVVTPPSTDRALSKRKLRREHYAITQKLYNKNRSKCAQGILDGVRRINNMNDTEVVEHWATAMTQPPPPPLTPNPYIPNPDLNCVSTPISLLETQSALRGTSKALGLDGIKLASLRKLPLENVCCLLNILFISDVPPCQQKARVAFIPKVTDASSPSDLRPISISSYLQRTLNKILSKRIQKSIKILPTQRAFLPFDGTFENLTVLDGIIHDAKSTGRELWIASVDLRKAFDSISHDAVLWTLGARGYPEVFIEYIERLYQSSQTLLEFGTECRTIRPTRGVRQGDPLSPLLFNLVLDDILRKINLDNLGYRLKEGNRLMGLAFADDLILLASTKNTLQQLLDLAFPLLKERGLEINTDKSFTISHLYDSRVKKSLYQSTPEFSVGGRQLPAKGICARWRYLGIEFDSNGRVDTAKVTLLELLGRLTSAPLKPQQRLTILKQFLIPKILYKLVAGPRPSQKFLLELDCEIRRTVKLQWLKLENSVPNAFLYAHISHGGLDIPCLRTLIPRLRLSRLTALNRSSHIGTQWLLSTDYHRKELAKTSALCVFDDTTIEDAAHETEYWSRTLHNTVDGAHLKHTHLTPFTNNWVKGTPYLSGREYINLIKLRINALPTRARLARGRPGYDKFCRHGCNAVETLAHIAQVCDHTHRPIIKRHDDICERVTRLLRAKGMQVERERTFRRPAAPARRPDLVITTPTRVWVLDAEVCGPSRDLALARRDKIRKYDIPGVRDQLPSSLPHRFGSITVSMTGVWEPESVKDLLTLGLSKKNLIDLTVLAMQGTLRVFRAHRDHKSWVRRGGGAGELTGRRF

SEQ ID NO: 7826 - protein, 977 aa, Dermanyssus gallinae
MNEELSSQPPLKKARWDPQDRELLAYLEASLVSENSETTPCEINKLLVSKFPDRTLESIKRQRKSAAYKARVNEFVHKRTRSPSGPDDESGDPYPKRYDLDSQETKFPSPKDAIIARIQALTNTLPPHSSTTDLTHLANIICQGEAHSQILNDFLHKHINATTHPRTVVTPPSTDRALSKRKLRREHYAITQKLYNKNRSKCAQGILDGVRRINNMNDTEVVEHWATAMTQPPPPPLTPNPYIPNPDLNCVSTPISLLETQSALRGTSKALGLDGIKLASLRKLPLENVCCLLNILFISDVPPCQQKARVAFIPKVTDASSPSDLRPISISSYLQRTLNKILSKRIQKSIKILPTQRAFLPFDGTFENLTVLDGIIHDAKSTGRELRIASVDLRKAFDSISHDAVLWTLGARGYPEVFIEYIERLYQSSQTLLEFGKECRTIRPTRGVRQGDPLSPLLFNLVLDDILRKINLDNLGYRLKEGNRLMGLAFADDLILLASTKNTLQQLLDLAFPLLKERGLEINTDKSFTISHLYDSRVKKSLYQSTPEFSVGGRQLPAKGICARWRYLGIEFDSNGRVDTAKVTLLELLGRLTSAPLKPQQRLTILKQFLIPKILYKLVAGPRPSQKFLLELDCEIRRTVKLQWLKLENSVPNAFLYAHISHGGLDIPCLRTLIPRLRLSRLTALNRSSHIGTQWLLSTDYHRKELAKTSALCVFDDTTIEDAAHETEYWSRTLHNTVDGAHLKHTHLTPFTNDWVKGTPYLSGREYINLIKLRINALPTRARLARGRPGYDKFCRHGCNAVETLAHIAQVCDHTHRPIIKRHDDICERVTRLLLAKGMQVERERTFRRPAAPARRPDLVITTPTRVWVLDAEVCGPSRDLALARRDKIRKYDIPGVRDQLPSSLPHRFGSITVSMTGVWEPESVKDLLTLGLSKKNLIDLTVLAMQGTLRVFRAHRDHKSWVRRGGGAGELTGRRF

SEQ ID NO: 7827 - protein, 1123 aa, Dermanyssus gallinae
MDSRNLACPICDRRCKTGAGLSSHMRSHSTRVGNESTNTPSLVNSLIPPPPPSNNNDNINNSSTAPDSGAPLPTSSQRLIAANINNNRPNINSRSTSNSILADSTPPPPVQEPPPIPSGSGVSFNSSDNQLNHNAIGVEANTPGTSGITPTNPPPPRRVSPSSPPHGPSPLNLICPVADCSRSFLSKSGLAIHVRRKHPILMNEELSSQPPLKKARWDPQDRELLAYLEASLVSENSETTPCEINKLLLSKFPDRTLESIKRQRKSAAYKARVNEFVHKRTRSPSGSDDEFPSPKDAIIARIQALTNTLPPHSSTTDLTHLANIICQGEAHFQILNDFLHKHINATTHPRTAVTPPSTDRALSKRKLRREHYAITQKLYNKNRSKCAQGILDGVRRINNMNDTEVVEHWTTAMTQPPPPPLTPNPYIPNPDLNCVSTPISLLETQSVLRGTSKALGLDGIKLASLRKLPLENVCCLLNILFISDVPPCQQKARVAFIPKVTDASSPSDLRPISISSYLQRTLNKILSKRIQKSIKILPTQRAFLPFDGTFENLTVLDGIIHDAKSTGRELRIASVDLRKAFDSISHDAVLWTLGARGYPEVFIEYIERLYQSSQTLLEFGKECRTIRPTRGVRQGDPLSPLLFNLVLDDIFRKINLDNLGYRLKEGNRLMGLAFADDLILLASTKNTLQQLLDLAFPLLKERGLEINTDKSFTISHLYDSRVKKSLYQSTPEFSVGGRQFPAKGICARWRYLGIEFDSNGRVDTAKVTLLELLGRLTSAPLKPQQRLTILKQFLIPKILYKLVAGPRPSQKFLLELDCEIRRTVKLQWLKLENSVPNAFLYAHISHGGLDIPCLRTLIPRLRLSRLTALNRSSHIGTQWLLSTEYHSKELAKTSALCVFDDTTIEDAAHETEYWSRTLHNTVDGAHLKHTHLTPFTNDWVKGTPYLSGREYINLIKLRINALPTRARLARGRPGYDKFCRHGCNAVETLAHIAQVCDHTHRPIIKRHDDICERVTRLLRAKGMQVERERTFRRPAAPARRPDLVITTPTRVWVLDAEVCGPSRDLALARRDKIRKYDIPGARDQLPSSLPHRFGSITVSMTGVWEPESVKDLLTLGLSKKKPD

SEQ ID NO: 7828 - protein, 1070 aa, Dermanyssus gallinae
MVVPIVIIIIIIMIVLEIIIIVIITIIKTMLLMPRLIPKTSTTSPQMPPHPHAGCHPLPQSRSLPPPRNQCPVADCLRSFNSIAGLRIHIRRKHPSEWNDNVSSQPPLKKARWDPQDRDLLAYLEVSLQSENNNVTPGEIIDHLVSKFPDRTVGSIKSQRKTTAYKAKVSELARKRTRQSSSSDEAGDPYPKRLTDGPMETTFPSPKDAIIAHIQALTHKLPRHTSTADLTLLTNIICRGEAHTDALNIFLDKHLNNKHTRSTAVTTPSTDRVLSKRQLRREHYALTQKLYNKNRSKCAQGILDGTRRINNINDTDVVEHWTNAMTQPPPPPLIPNPYIPNPDLKCVSNPISLFETQRALRGSSKALGLDGIKLASLRKLPEETVCCLLNILIISDIPPCQQKARVAFIPKVTNASSPSDLRPISISSYLQRTLNKILSKRIQTSMKILHTQRAFIPYDGTFENLNVLDGIIHDAKTTGRELRIASIDLRKAFDSISHDAVLWTLESRGYPRVFIDYIERLYQSSLTLLEFGKECRTIRPTRGVRQGDPLSPLLFNLVFDDILRKLNDTNIGYQLKEGTRLMGLAFADDLILLASTKNTLQQLLDLANPLLKARGLEINPDKSFTISHLYDGRVKKSFYQNSPEFTVGERLLPTKGLSARWRYLGIEFDNTGRVDSAKDTLLDFLSRLTIAPLKPQQRLAILKQFAIPKILYRLVAGPRPSRAFLLELDNEIRRTVKLHWLKLENSVPNAFLYAHTAHGGLDIPCLRTLIPRLRLSRLTNLQKSPHIGTQWLLSSDYHRDELAKTSALCEFGDTTIENAAQETEYWALTLHNTFDGAHLKNAHKSPFTQNWVKGTAYLSGKEYINLIKLRINALPTRARLARGRPWYDKFCRHGCNAVETLAHVSQLCDYTHLPIIKRHDDICERVSRLLRGKGLQVDRERTFRRPTAPSLRPDLVITTPTGVWVLDTEVCGPSRDLARARRDKIRKYDIPEIRDQLPGSSHRFGSITVSMTGVWEPESVKDLLTLGVSKKNLIDLTVLTMQGTLRVYRAHQDHKSWGRRRGRQGGLVGR

SEQ ID NO: 7829 - protein, 872 aa, Dermanyssus gallinae
METTFPSPKDAIIAHIQALTHKLPRHTSTADLTLLTNIICRGEAHTDALNIFLDKHLNNKHTRSTAVTTPSTDRVLSKRQLRREHYALTQKLYNKNRSKCAQGILDGTRRINNINDTDVVEHWTNAMTQPPPPPLTPNPYIPNPDLKCVSNPISLFETQRALRGSSKALGLDGIKLASLRKLPEETVCCLLNILIISDIPPCQQKARVAFIPKVTNASSPSDLRPISISSYLQRTLNKILSKRIQTSMKILHTQRAFIPYDGTFENLNVLDGIIHDAKTTGRELRIASIDLRKAFDSISHDAVLWTLESRGYPRVFIDYIERLYQSSLTLLEFGKKCRTIRPTRGVRQGDPLSPLLFNLVFDDILRKLNDTNIGYQLKEGTRLMGLAFADDLILLASTKNTLQQLLDLANPLLKARGLEINPDKSFTISHLYDGRVKKSFYQNSPEFTVGERLLPTKGLSARWRYLGIEFDNTGRVDSAKDTLLDFLSRLTIAPLKPQQRLAILKQFAIPKILYRLVAGPRPSRAFLLELDNEIRRTVKLHWLKLENSVPNAFLYAHTAHGGLDIPCLRTLIPRLRLSRLTNLQKSPHIGTQWLLSSDYHRDELAKTSALCEFGDTTIENAAQETEYWALTLHNTFDGAHLKNAHKSPFTQNWVKGTAYLSGKEYINLIKLRINALPTRARLARGRPWYDKFCRHGCNAVETLAHVSQLCDYTHLPIIKRHNDICERVSRLLRGKGLQVDRERTFRRPTAPSLRPDLVITTPTGVWVLDTEVCGPSRDLARARRDKIRKYDIPEIRDQLPGSSHRFGSITVSMTGVWEPESVKDLLTLGVSKKNLIDLTVLTMQGTLRVYRAHQDHKSWGRRRGRQGGLVGR

SEQ ID NO: 7830 - protein, 1078 aa, Dermanyssus gallinae
MVVPIVIIIIIIIIIIIIIIMIVLEIIIIVIITIIKNDAIDAEVNTEDINNISPNAPTSPRRVPPPPPVTVPPPPVNQCPVADCLRSFNSIAGLRIHIRRKHPSEWNDNVSSQPPLKKARWDPQDRDLLAYLEVSLQSENNNVTPGEIIDHLVSKFPDRTVGSIKSQRKTTAYKAKVSELARKRTRQSSSSDEAGDPYPKRLTDGPMETTFPSPKDAIIAHIQALTHKLPRHTSTADLTLLTNIICRGEAHTDALNIFLDKHLNNKHTRSTAVTTPSTDRVLSKRQLRREHYALTQKLYNKNRSKCAQGILDGTRRINNINDTDVVEHWTNAMTQPPPPPLTPNPYIPNPDLKCVSNPISLFETQRALRGSSKALGLDGIKLASLRKLPEETVCCLLNILIISDIPPCQQKARVAFIPKVTNASSPSDLRPISISSYLQRTLNKILSKRIQTSMKILHTQRAFIPYDGTFENLNVLDGIIHDAKTTGRELRIASIDLRKAFDSISHDAVLWTLESRGYPRVFIDYIERLYQSSLTLLEFGKECRTIRPTRGVRQGDPLSPLLFNLVFDDILRKLNDTNIGYQLKEGTRLMGLAFADDLILLASTKNTLQQLLDLANPLLKARGLEINPDKSFTISHLYDGRVKKSFYQNSPEFTVGERLLPTKGLSARWRYLGIEFDNTGRVDSAKDTLLDFLSRLTIAPLKPQQRLAILKQFAIPKILYRLVAGPRPSRAFLLELDNEIRRTVKLHWLKLENSVPNAFLYAHTAHGGLDIPCLRTLIPRLRLSRLTNLQKSPHIGTQWLLSSDYHRDELAKTSALCEFGDTTIENAAQETEYWALTLHNTFDGAHLKNAHKSPFTQNWVKGTAYLSGKEYINLIKLRINALPTRARLARGRPWYDKFCRHGCNAVETLAHVSQLCDYTHLPIIKRHDDICERVSRLLRGKGLQVDRERTFRRPTAPSLRPDLVITTPTGVWVLDTEVCGPSRDLARARRDKIRKYDIPEIRDQLPGSSHRFGSITVSMTGVWEPESVKDLLTLGVSKKNLIDLTVLTMQGTLRVYRAHQDHKSWGRRRGRQGGLVGR

SEQ ID NO: 7831 - protein, 977 aa, Dermanyssus gallinae
MNEELSSQPPLKKARWDPQDRELLAYLEASLVSENSETTPCEINKLLVSKFPDRTLESIKRQRKSAAYKARVNEFVHKRTRSPSGSDDESGDPYPKRYDLDSQETKFPSPKDAIIARIQALTNTLPPHSSTTDLTHLANIICQGEAHSQILNDFLHKHINATTHPRTVVTPPSTDRALSKRKLRREHYAITQKLYNKNRSKCAQGILDGVRRINNMNDTEVVEHWATAMTQPPPPPLTPNPYIPNPDLNCVSTPISLLETQSALRGTSKALGLDGIKLASLRKLPLENVCCLLNILFISDVPPCQQKARVAFIPKVTDASSPSDLRPISISSYLQRTLNKILSKRIQKSIKILPTQRAFLPFDGTFENLTVLDGIIHDAKSTGRELRIASVDLRKAFDSISHDAVLWTLGARGYPEVFIEYIERLYQSSQTLLEFGKECRTIRPTRGVRQGDPLSPLLFNLVLDDILRKINLDNLGYRLKEGNRLMGLAFADDLILLASTKNTLQQLLDLAFPLLKERGLEINTDKSFTISHLYDSRVKKSLYQSTPEFSVGGRQLPAKGICARWRYLGIEFDSNGRVDTAKVTLLELLGRLTSAPLKPQQRLTILKQFLIPKILYKLVAGPRPSQKFLLELDCEIRRTVKLQWLKLENSVPNAFLYAHISHGGLDIPCLRTLIPRLRLSRLTALNRSSHIGTQWLLSTDYHRKELAKTSALCVFDDTTIEDAAHETEYWSRTLHNTVDGAHLKHTHLTPFTNDWVKGTPYLSGREYINLIKLRINALPTRARLARGRPGYDKFCRHGCNAVETLAHIAQVCDHTHRPIIKRHDDICERVTRLLRAKGMQVERERTFRRPAAPARRPDLVITTPTRVWVLDAEVCGPSRDLALARRDKIRKYDIPGVRDQLPSSLPHRFGSITVSMTGVWEPESVKDLLTLGLSKKNLIDLTVLAMQGTLRVFRAHRDHKSWVRRGGGAGELTGRRF

SEQ ID NO: 7832 - protein, 977 aa, Dermanyssus gallinae
MNEELSSQPPLKKARWDPQDRELLAYLEASLVSENSETTPCEINKLLVSKFPDRTLESIKRQRKSVAYKARVNEFVHKRTRSPSGSDDESGDPYPKRYGLDSQETKFPSPKDAIIARIQALTNTFPPHSSTTDLTHLANIICQGEAHSQILNDFLHKHINATTHPRTVVTPPSTDRALSKRKLRREHYAITQKLYNKNRSKCAQGILDGVRRINNMNDTEVVEHWATAMTQPPPPPLTPNPYIPNPDLNCVSTPISLLETQSALRGTSKALGLDGIKLASLRKLPLENVCCLLNILFISDVPPCQQKARVAFIPKVTDASSPSDLRPISISSYLQRTLNKILSKRIQKSIKILPTQRAFLPFDGTFENLTVLDGIIHDAKSTGRELRIASVDLRKAFDSISHDAVLWTLGARGYPEVFIEYIERLYQSSQTLLEFGKECRTIRPTRGVRQGDPLSPLLFNLVLDDILRKINLDNLGYRLKEGNRLMGLAFADDLILLASTKNTLQQLLDLAFPLLKERGLEINTDKSFTISHLYDSRVKKSLYQSTPEFSVGGRQLPAKGICARWRYLGIEFDSNGRVDTAKVTLLELLGRLTSAPLKPQQRLTILKQFLIPKILYKLVAGPRPSQKFLLELDCEIRRTVKLQWLKLENSVPNAFLYAHISHGGLDIPCLRTLIPRLRLSRLTALNRSSHIGTQWLLSTDYHRKELAKTSALCVFDDTTIEDAAHETEYWSRTLHNTVDGAHLKHTHLTPFTNDWVKGTPYLSGREYINLIKLRINALPTRARLARGRPGYDKFCRHGCNAVETLAHIAQVCDHTHRPIIKRHDDICERVTRLLRAKGMQVERERTFRRPAAPARRPDLVITTPTRVWVLDAEVCGPSRDLALARRDKIRKYDIPGVRDQLPSSLPHRFGSITVSMTGVWEPESVKDLLTLGLSKKNLIDLTVLAMQGTLRVFRAHRDHKSWVRRGGGAGELTGRRF

SEQ ID NO: 7833 - protein, 977 aa, Dermanyssus gallinae
MNEELSSQPPLKKARWDPQDRELLAYLEASLVSENSETTPCEINKLLLSKFPDRTLESIKRQRKSAAYKARVNEFVHKRTRSPSGSDDESGDPYPKRSDLDSQETKFPSPKDAIIARIQALTNTLPPHSSTTDLTHLANIICQGEAHFQILNDFLHKHINATTHPRTAVTPPSTDRALSKRKLRREHYAITQKLYNKNRSKCAQGILDGVRRINNMNDTEVVEHWTTAMTQPPPPPLTPNPYIPNPDLNCVSTPISLLETQSALRGTSKALGLDGIKLASLRKLPLENVCCLLNILFISDVPPCQQKARVAFIPKVTNASSPSDLRPISISSYLQRTLNKILSKRIQKSIKILPTQRAFLPFDGTFENLTVLDGIIHDAKSTGRELRIASVDLRKAFDSISHDAVLWTLGARGYPEVFIEYIERLYQSSQTLLEFGKECRTIRPTRGVRQGDPLSPLLFNLVLDDILRKINLDNLGYRLKEGNRLMGLAFADDLILLASTKNTLQQLLDLAFPLLKERGIEINTDKSFTISHLYDSRVKKSLYQSTPEFSVGGRQLPAKGICARWRYLGIEFDSNGRVDTAKVTLLELLGRLTSAPLKPQQRLTILKQFLIPKILYKLVAGPRPSQKFLLELDCEIRRTVKLQWLKLENSVPNAFLYAHISHGGLDIPCLRTLIPRLRLSRLTALNRSSHIGTQWLLSTEYHSKELAKTSALCVFDDTTIEDAAHETEYWSRTLHNTVDGAHLKHTHLTPFTNDWVKGTPYLSGREYINLIKLRINALPTRARLARGRPGYDKFCRHGCNAVETLAHIAQVCDHTHRPIIKRHDDICERVTRQLRAKGMQVERERTFRRPAAPARRPDLVITTPTRVWVLDAEVCGPSRDLALARRDKIRKYDIPGVRDQLPSSLPHRFGSITVSMTGVWEPESVKDLLTLGLSKKNLIDLTVLAMQGTLRVFRAHRDHKSWVRRGGGAGGLTGRRF

SEQ ID NO: 7834 - protein, 1178 aa, Dermanyssus gallinae
MDSRNLACPICDRRCKTGAGLSSHMRSHSTRVGNESTNTPSLVNSLIPPPPPSNNNDNINNSSTAPDSGAPLPTSSQRLIAANINNNRPNINSLSTSNSIIADSTPPPPVQEPSPIPSGSGVSFNSSDNQLNHNAIGVEANTPGTSGITPTNPPPPRRVSPSSPPHGLSPLNLICPVADCSRSFLSKSGLAIHVRRKHPILMNEELSSQPPLKKARWDPQDRELLAYLEASLVSENSETTPCEINKLLVSKFPDRTLESIKRQRKSAAYKARVNEFVHKRTRSPSGPDDESGDPYPKRYDLDSQETKFPSPKDAIIARIQALTNTLPPHSSTTDLTHLANIICQGEAHSQILNDFLHKHINATTHPRTVVTPPSTDRALSKRKLRREHYAITQKLYNKNRSKCAQGILDGVRRINNMNDTEVVEHWATAMTQPPPPPLTPNPYIPNPDLNCVSTPISLLETQSALRGTSKALGLDGIKLASLRKLPLENVCCLLNILFISDVPPCQQKARVAFIPKVTDASSPSDLRPISISSYLQRTLNKILSKRIQKSIKILPTQRAFLPFDGTFENLTVLDGIIHDAKSTGRELRIASVDLRKAFDSISHDAVLWTLGARGYPEVFIEYIERLYQSSQTLLEFGKECRTIRPTRGVRQGDPLSPLLFNLVLDDILRKINLDNLGYRLKEGNRLMGLAFADDLILLASTKNTLQQLLDLAFPLLKERGLEINTDKSFTISHLYDSRVKKSLYQSTPEFSVGGRQLPAKGICARWRYLGIEFDSNGRVDTAKVTLLELLGRLTSAPLKPQQRLTILKQFLIPKILYKLVAGPRPSQKFLLELDCEIRRTVKLQWLKLENSVPNAFLYAHISHGGLDIPCLRTLIPRLRLSRLTALNRSSHIGTQWLLSTDYHRKELAKTSALCVFDDTTIEDAAHETEYWSRTLHNTVDGAHLKHTHLTPFTNDWVKGTPYLSGREYINLIKLRINALPTRARLARGRPGYDKLCRHGCNAVETLAHIAQVCDHTHRPIIKRHDDICERVTRLLRAKGMQVERERTFRRPAAPARRPDLVITTPTRVWVLDAEVCGPSRDLALARRDKIRKYDIPGVRDQLPSSLPHRFGSITVSMTGVWEPESVKDLLTLGLSKKNLIDLTVLAMQGTLRVFRAHRDHKSWVRRGGGAGELTGRRF

SEQ ID NO: 7835 - protein, 872 aa, Dermanyssus gallinae
METTFPSPKDAIIAHIQALTHKLPRHTSTADLTLLTNIICRGEAHTDALNIFLDKHLNNKHTRSTAVTTPSTDRVLSKRQLRREHYALTQKLYNKNRSKCAQGILDGTRRINNINDTDVVEHWTNAMTQPPPPPLTPNPYIPNPDLKCVSNPISLFETQRALRGSSKALGLDGIKLASLRKLPEETVCCLLNILIISDIPPCQQKARVAFIPKVTNASSPSDLRPISISSYLQRTLNKILSKRIQTSMKILHTQRAFIPYDGTFENLNVLDGIIHDAKTTGRELRIASIDLRKAFDSISHDAVLWTLESRGYPRVFIDYIERLYQSSLTLLEFGKECRTIRPTRGVRQGDPLSPLLFNLVFDDILRKLNDTNIGYQLKEGTRLMGLAFADDLILLASTKNTLQQLLDLANPLLKARGLEINPDKSFTISHLYDGRVKKSFYQNSPEFTVGERLLPTKGLSARWRYLGIEFDNTGRVDSAKDTLLDFLSRLTIAPLKPQQRLAILKQFAIPKILYRLVAGPRPSRAFLLELDNEIRRTVKLHWLKLENSVPNAFLYAHTAHGGLDIPCLRTLIPRLRLSRLTNLQKSPHIGTQWLLSSDYHRDELAKTSALCEFGDTTIENAAQETEYWALTLHNTFDGAHLKNAHKSPFTQNWVKGTAYLSGKEYINLIKLRINALPTRARLARGRPWYDKFCRHGCNAVETLAHVSQLCDYTHLPIIKRHDDICERVSRLLRGKGLQVDRERTFRRPTAPSLRPDLVITTPTGVWVLDTEVCGPSRDLARARRDKIRKYDIPEIRDQLPGSSHRFGSITVSMTGVWEPESVKDLLTLGVSKKNLIDLTVLTMQGTLRVYRAHQDHKSWGRRRGRQGGLVGR

SEQ ID NO: 7836 - protein, 977 aa, Dermanyssus gallinae
MNKELSSQPPLKKARWDPQDRELLAYLEASLVSENSETTPCEINKLLLSKFPDRTLESIKRQRKSAAYKARVNEFVHKRTRSPSGSDDESGDPYPKRSDLDSQETKFPSPNDAIIARIQALTNTLPPHSSTTDLTHLANIICQGEAHFQILNDFLHKHINATTHPRTAVTPPSTDRALSKRKLRREHYAITQKLYNKNRSKRAQGILDGVRRINNMNNTEVVEHWATAMTQPPPPPLTPNPYIPNPDLNCVSTPISLLETQSALRGTSKALGLDGIKLASLRKLPLENVCCLLNILFISDVPPCQQKARVAFIPKVTDASSPSDLRPISISSYLQRTLNKILSKRIQKSIKILPTQRAFLPFDGTFENLTVLDGIIHDAKSTGRELRIASVDLRKAFDSISHDAVLWTLGARGYPEVFIEYIERLYQSSQTLLEFGKECRTIRPTRGVRQGDPLSPLLFNLVLDDILRKINLDNLGYRLKEGNRLMGLAFADDLILLASTKNTLQQLLDLAFPLLKERGLEINTDKSFTISHLYDSRVKKSLYQSTPEFSVGGRQLPAKGICARWRYLGIEFDSNGRVDTAKVTLLELLGRLTSAPLKPQQRLTILKQFLIPKILYKLVAGPRPSQKFLLELDCEIRRTVKLQWLKLENSVPNAFLYAHISHGGLDIPCLRTLIPRLRLSRLTALNRSSHIGTQWLLSTEYHSKELAKTSALCVFDDTTIEDAAHETEYWSRTLHNTVDGAHLKHTHLTPFTNDWVKGTPYLSGREYINLIKLRINALPTRARLARGRPGYDKFCRHGCNAVETLAHIAQVCDHTHRPIIKRHDDICERVTRLLRAKGMQVERERTFRRPAAPARRPDLVITTPTRVWVLDAEVCGPSRDLALARRDKIRKYDIPGVRDQLPSSLPHRFGSITVSMTGVWEPESVKDLLTLGLSKKNLIDLTVLAMQGTLRVFRAHRDHKSWVRRGGGAGEVTGRRF

SEQ ID NO: 7837 - protein, 977 aa, Dermanyssus gallinae
MNEELSSQPPLKKARWDPQDRELLAYLEASLVSENSETTPCEINKLLVSKFPDRTLESIKRQRKSAAYKARVNEFVHKRTRSPSGSDDESGDPYPKRYDLDSQETKFPSPKDAIIARIQALTNTLPPHSSTTDLTHLANIICQGEAHSQILNDFLHKHINATTHPRTVVTPPSTDRALPKRKLRREHYAITQKLYNKNRSKCAQGILDGVRRINNMNDTEVVEHWATAMTQPPPPPLTPNPYIPNPDLNCVSTPISLLETQSALRGTSKALGLDGIKLASLRKLPLENVCCLLNILFISDVPPCQQKARVAFIPKVTDASSPSDLRPISISSYLQRTLNKILSKRIQKSIKILPTQRAFLPFDGTFENLTVLDGIIHDAKSTGRELRIASVDLRKAFDSISHDAVLWTLGARGYPEVFIEYIERLYQSSQTLLEFGKECRTIRPTRGVRQGDPLSPLLFNLVLDDILRKINLDNLGYRLKEGNRLMGLAFADDLILLASTKNTLQQLLDLAFPLLKERGLEIKTDKSFTISHLYDSRVKKSFYQSTPEFSVGGRQLPAKGICARWRYLGIEFDSNGRVDTAKVTLLELLGRLTSAPLKPQQRLTILKQFLIPKILYKLVAGPRPSQKFLLELDCEIRRTVKLQWLKLENSVPNAFLYAHISHGGLDIPCLRTLIPRLRLSRLTALNRSSHIGTQWLLSTDYHRKELAKTSALCVFDDTTIEDAAHETEYWSRTLHNTVDGAHLKHTHLTPFTNDWVKGTPYLSGREYINLIKLRINALPTRARLARGRPGYDKFCRHGCNAVETLAHIAQVCDHTHRPIIKRHDDICERVTRLLRAKGMQVERERTFRRPAAPARRPDLVITTPTRVWVLDAEVCGPSRDLALARRDKIRKYDIPGVRDQLPSSLPHRFGSITVSMTGVWEPESVKDLLTLGLSKKNLIDLTVLAMQGTLRVFRAHRDHKSWVRRGGGAGELTGRRF

SEQ ID NO: 7838 - protein, 1195 aa, Dermanyssus gallinae
MDPRRLTCPICDRKCKTGAGLAAHMRSHNSQVVNPTSPSLNNPLTPPPAPNSDNNQLHHSCPDPTQLGASPTVRSPRTTTYNNNRPNRNTPSNRNNNIADSLNTHIQEPTPIPSGSGVSSINNGCTNSNNNNNNNNNNDSIRNNNNSNNNDNKNDAIDAEVNTEDINNISPNAPTSPRRVPPPPPVTVPPPPVNQCPVADCLRSFNSIAGLRIHIRRKHPSEWNDNVSSQPPLKKARWDPQDRDLLAYLEVSLQSENNNVTPGEIIDHLVSKFPDRTVGSIKSQRKTTAYKAKVSELARKRTRQSSSSDEAGDPYPKRLTDGPMETTFPSPKDAIIAHIQALTHKLPRHTSTADLTLLTNIICRGEAHTDALNIFLDKHLNNKHTRSTAVTTPSTDRVLSKRQLRREHYALTQKLYNKNRSKCAQGILDGTRRINDINDTDVVEHWTNAMTQPPPPPLTPNPYIPNPDLKCVSNPISLFETQRALRGSSKALGLDGIKLASLRKLPEETVCCLLNILIISDIPPCQQKARVAFIPKVTNASSPSDLRPISISSYLQRTLNKILSKRIQTSMKILHTQRAFIPYDGTFENLNVLDGIIHDAKTTGRELRIASIDLRKAFDSISHDAVLWTLESRGYPRVFIDYIERLYQSSLTLLEFGKECRTIRPTRGVRQGDPLSPLLFNLVFDDILRKLNDTNIGYQLKEGTRLMGLAFADDLILLASTKNTLQQLLDLANPLLKARGLEINPDKSFTISHLYDGRVKKSFYQNSPEFTVGERLLPTKGLSARWRYLGIEFDNTGRVDSAKDTLLDFLSRLTIAPLKPQQRLAILKQFAIPKILYRLVAGPRPSRAFLLELDNEIRRTVKLHWLKLENSVPNAFLYAHTAHGGLDIPCLRTLIPRLRLSRLTNLQKSPHIGTQWLLSSDYHKDELAKTSALCEFGDTTIENAAQETEYWALTLHNTFDGAHLKNAHKSPFTQNWVKGTAYLSGKEYINLIKLRINALPTRARLARGRPWYDKFCRHGCNAVETLAHVSQLCDYTHLPIIKRHDDICERVSRLLRGKGLQVDRERTFRRPTAPSLRPDLVITTPTGVWVLDTEVCGPSRDLARARRDKIRKYDIPEIRDQLPGSSHRFGSITVSMTGVWEPESVKDLLTLGVSKKNLIDLTVLTMQGTLRVYRAHQDHKSWGRRRGRQGGLVGR

SEQ ID NO: 7839 - protein, 977 aa, Dermanyssus gallinae
MNEELSSQPPLKKARWDPQDRELLAYLEASLVSENSETTPCEINKLLLSKFPDRTLESIKRQWKSAAYKARVNEFVHKRTRSPSGSDDESSDPYPKRSDLDSQETKFPSPKDAIIARIQALTNTLPPHSSTTDLTHLANIICQGEAHFQILNDFLHKHINATTHPRTAVTPPSTDRALSKRELRREHYAITQKLYNKNRSKCAQGILDGVRRINNMNDTEVVEHWTTAMTQPPPPPLTPNPYIPNPDLNCVSTPISLLETQSALRGTSKALGLDGIKLASLRKLPLENVCCLLNILFISDVPPCQQKARVAFIPKVTDASSPSDLRPISISSYLQRTLNKILSKRIQKYIKILPTQRAFLPFDGTFENLTVLDGIIHDAKSTGRELRIASVDLRKAFDSISHDAVLWTLGARGYPEVFIEYIERLYQSSQTLLEFGKECRTIRPTRGVRQGDPLSPLLFNLVLDDILRKINLDNLGYRLKEGNRLMGLAFADDLILLASTKNTLQQLLDLAFPLLKERGLEINTDKSFTISHLYDSRVKKSLYQSTPEFSVGGRQLPAKGICARWRYLGIEFDSNGRVDTAKVTLLELLGRLTSAPLKPQQRLTILKQFLIPKILYQLVAGPRPSQKFLLELDCEIRRTVKLQWLKLENSVPNAFLYAHISHGGLDIPCLRTLIPRLRLSRLTALNRSSHIGTQWLLSTEYHSKELAKTSALCVFDDTTIEDAAHETEYWSRTLHNTVDGAHLKHTHLTPFTNDWVKGTPYLSGREYINLIKLRINALPTRARLARGRPGYDKFCRHGCNAVETLAHIVQVCDHTHRPIIKRHDDICERVTRLLRAKGIQVERERTFRRPAAPARRPDLVITTPTRVWVLDAEVCGPSRDLALARRDKIRKYDIPGVRDQLPSSLPHRFGSITVSMTGVWEPESVKDLLTLGLSKKNLIDLTVLAMQGTLRVFRAHRDHRSWVRRGGGAGELTGRRF

SEQ ID NO: 7840 - protein, 1178 aa, Dermanyssus gallinae
MDSRNLACPICDRRCKTGAGLSSHMRSHSTRVGNESTNTPSLVNSLIPPPPPSNNNDNINNSSTAPDSGAPLPTSSQRLIAANINNNRPNINSLSTSNSIIADSTPPPPVQEPSPIPSGSGVSFNSSDNQLNHNAIGVEANTPGTSGITPTNPPPPRRVSPSSPPHGPSPLNLICPVADCSRSFLSKSGLAIHVRRKHPILMNEELSSQPPLKKARWDPQDRELLAYLEASLVSENSETTPCEINKLLVSKFPDRTLESIKRQRKSAAYKARVNEFVHKRTRSPSGPDDESGDPYPKRYDLDSQETKFPSPKDAIIARIQALTNTLPPHSSTTDLTHLANIICQGEAHSQILNDFLHKHINATTHPRTVVTPPSTDRALSKRKLRREHYAITQKLYNKNRSKCAQGILDGVRRINNMNDTEVVEHWATAMTQPPPPPLTPNPYIPNPDLNCVSTPISLLETQSALRGTSKALGLDGIKLASLRKLPLENVCCLLNILFISDVPPCQQKARVAFIPKVTDASSPSDLRPISISSYLQRTLNKILSKRIQKSIKILPTQRAFLPFDGTFENLTVLDGIIHDAKSTGRELRIASVDLRKAFDSISHDAVLWTLGARGYPEVFIEYIERLYQSSQTLLEFGKECRTIRPTRGVRQGDPLSPLLFNLVLDDILRKINLDNLGYRLKEGNRLMGLAFADDLILLASTKNTLQQLLDLAFPLLKERGLEINTDKSFTISHLYDSRVKKSLYQSTPEFSVGGRQLPAKGICARWRYLGIEFDSNGRVDTAKVTLLELLGRLTSAPLKPQQRLTILKQFLIPKILYKLVAGPRPSQKFLLELDCEIRRTVKLQWLKLENSVPNAFLYAHISHGGLDIPCLRTLIPRLRLSRLTALNRSSHIGTQWLLSTDYHRKELAKTSALCVFDDTTIEDAAHETEYWSRTLHNTVDGAHLKHTHLTPFTNDWVKGTPYLSGREYINLIKLRINALPTRARLARGRPGYDKFCRHGCNAVETLAHIAQVCDHTHRPIIKRHDDICERVTRLLRAKGMQVERERTFRRPAAPARRPDLVITTPTRVWVLDAEVCGPSRDLALARRDKIRKYDIPGVRDQLPSSLPHRFGSITVSMTGVWEPESVKDLLTLGLSKKNLIDLTVLAMQGTLRVFRAHRDHKSWVRRGGGAGELTGRRF

SEQ ID NO: 7841 - protein, 1053 aa, Dermanyssus gallinae
MCLFTFFCRLLTASTHFLVRQRDTPPLLSDLEILLPYLQPYLGFDQTEISIVYIYIYIYIYIYIYIYIYIYIYPILINEELSSQPPLKKARWDPQDRELLAYLEASLVSENSETTPCEINKLLVSKFPDRTLESIKRQRKSAAYKARVNEFVHKRTRSPSGPDDESGDPYPKRYDLDSQETKFPSPKDAIIARIQALTNTLPPHSSTTDLTHLANIICQGEAHSQILNDFLHKHINATTHPRTVVTPPSTDRALSKRKLRREHYAITQKLYNKNRSKCAQGILDGVRRINNMNDTEVVEHWATAMTQPPPPPLTPNPYIPNPDLNCVSTPISLLETQSALRGTSKALGLDGIKLASLRKLPLENVCCLLNILFISDVPPCQQKARVAFIPKVTDASSPSDLRPISISSYLQRTLNKILSKRIQKSIKILPTQRAFLPFDGTFENLTVLDGIIHDAKSTGRELRIASVDLRKAFDSISHDAVLWTLGARGYPEVFIEYIERLYQSSQTLLEFGKECRTIRPTRGVRQGDPLSPLLFNLVLDDILRKINLDNLGYRLKEGNRLMGLAFADDLILLASTKNTLQQLLDLAFPLLKERGLEINTDKSFTISHLYDSRVKKSLYQSTPEFSVGGRQLPAKGICARWRYLGIEFDSNGRVDTAKVTLLELLGRLTSAPLKPQQRLTILKQFLIPKILFKLVAGPRPSQKFLLELDCEIRRTVKLQWLKLENSVPNAFLYAHISHGGLDIPCLRTLIPRLRLSRLTALNRSSHIGTQWLLSTDYHRKELAKTSALCVFDDTTIEDAAHETEYWSRTLHNTVDGAHLKHTHLTPFTNDWVKGTPYLSGREYINLIKLRINALPTRARLARGRPGYDKFCRHGCNAVETLAHIAQVCDHTHRPIIKRHDDICERVTRLLRAKGMQVERERTFRRPAAPARRPDLVITTPTRVWVLDAEVCGPSRDLALARRDKIRKYDIPGVRDQLPSSLPHRFGSITVSMTGVWEPESVKDLLTLGLSKKNLIDLTVLAMQGTLRVFRAHRDHKSWVRRGGGAGELTGRRF

SEQ ID NO: 7842 - protein, 977 aa, Dermanyssus gallinae
MNEELSSQPPLKKARWDPQDRELLACLEASLVSENSETTPCEINKLLLSKFPDRTLESIKRQRKSAAYKARVNEFVHKRTRSPSGSDDESGDPYPKRSDLDSQETKFPSPKDAIIARIQALTNTLPPHSSTTDLTHLANIICQGEAHFQILNDFLHKHINATTHPRTAVTPPSTDRALSKRKLRREHYAITQKLYNKNRSKCAQGILDGVRRINNMNDTEVVEHWTTAMTQPPPPPLTPNPYIPNPDLNCVSTPISLLETQSALRGTSKALGLDGIKLASLRKLPLENVCCLLNILFISDVPPCQQKARVAFIPKVTDASSPSDLRPISISSYLQRTLNKILSKRIQKSIKILPTQRAFLPFDGTFENLTVLDGIIHDAKSTGRELRIASVDLRKAFDLISHDAVLWTLGARGYPEVFIEYIERLYQSSQTLLEFGKECRTIRPTRGVRQGDPLSPLLFNLVLDDILRKINLDNLGYRLKEGNRLMGLAFADDLILLASTKNTLQQLLDLALPLLKERGLEINTDKSFTISHLYDSRVKKSLYQSTPEFSVGGRQLPAKGICARWRYLGIEFDSNGRVDMAKVTLLELLGRLTSAPLKPQQRLTILKQFLIPKILYKLVAGPRPSQKFLLELDCEIRRTVKLQWLKLENSVPNAFLYAHISHGGLDIPCLRTLIPRLRLSRLTALNRSSHIGTQWLLSTEYHSKELAKTSALCVFDDTTIEDAAHETEYWSRTLHNTVDGAHLKHTHLTPFTNDWVKGTPYLSGREYINLIKLRINALPTRARLARGRPGYDKFCRHGCNAVETLAHIAQVCDHTHRPIIKRHDDICERVTRLLRAKGMQVERERTFRRPAAPARRPDLVITTPTRVWVLDAEVCGPSRDLALARRDKIRKYDIPGVRDQLPSSLPHRFGSITVSMTGVWEPESVKDLLTLGLSKKNLIDLTVLAMQGTLRVFRAHRDHKSWVRRGGGAGEVTGRRF

SEQ ID NO: 7843 - protein, 977 aa, Dermanyssus gallinae
MNEELSSQPPLKKARWDPQDRELLAYLEASLVSENSETTPCEINKLLVSKFPDRTLESIKRQRKSAAYKARVNEFVHKRTRSPSGSDDESGHPYPKRYDLDSQETKFPSPKDAIIARIQALTNTLPPHSSTTDLTHLANIICQGEAHSQILNDFLHKHINATTHPRTVVTPPSTDRALSKRKLRREHYAITQKLYNKNRSKCAQGILDGVRRINNMNDTEVVEHWATAMTQPPPPPLTPNPYIPNPDLNCVSTPISLLETQSALRGTSKALGLDGIKLASLRKLPLENVCCLLNILFISDVPPCQQKARVAFIPKVTDASSPSDLRPISISSYLQRTLNKILSKRIQKSIKILPTQRAFLPFDGTFENLTVLDGIIHDAKSTGRELRIASVDLRKAFDSISHDAVLWTLGARGYPEVFIEYIERLYQSSQTLLEFGKECRTIRPTRGVRQGDPLSPLLFNLVLDDILRKINLDNLGYRLNEGNRLMGLAFADDLILLASTKNTLQQLLDLAFPLLKERGLEINTDKSFTISHLYDSRVKKSLYQSTPEFSVGGRQLPAKGICARWRYLGIEFDSNGRVDTAKVTLLELLGRLTSAPLKPQQRLTILKQFLIPKILYKLVAGPRPSQKFLLELDCEIRRTVKWQWLKLENSVPNAFLYAHISHGGLDIPCLRTLIPRLRLSRLTALNRSSHIGTQWLLSTDYHRKELAKTSALCVFDDTTIEDAAHETEYWSRTLHNTVDGAHLKHTHLTPFTNDWVKGTPYLSGREYINLIKLRINALPTRARLARGRPGYDKFCRHGCNAVETLAHIAQVCDHTHRPIIKRHDDICERVTRLLRAKGMQVERERTFRRPAAPARRPDLVITTPTRVWVLDAEVCGPSRDLALARRDKIRKYDIPGVRDQLPSSLPHRFGSITVSMTGVWEPESVKDLLTLGLSKKNLIDLTVLAMQGTLRVFRAHRDHKSWVRRGGGAGELTGRRF

SEQ ID NO: 7844 - protein, 954 aa, Dermanyssus gallinae
MTLFLAYLEVSLQSENNNVTPGEIIDHQLSKFPDRTVESIKSQRKTTAYKAKVSELARKRTRLSSSSDEAGDPYPKRLTDDPMETMFPSPKDAIIAHIQALTNKLPPHTSTTDLTHLTNIICRGETHTDALNIFLDKHLNNMHTPSRAATTPSTDRVLSKRQLRREHYAITQKLYNKNRSKCAQGILDGTRRINNMNDTEVVEHWTNAMTQPPPPPLTPSTYIPNPDLTSASIPISLFETQIAIRGSSKALGLDGIKLASLRKLPEETVCCLLNILFISDIPPCQQKARVAFIPKVTNASSPSDLRPISISSYLQRTLNKILSKRIQTSMKILHTQRAFIPYDGTFENLNVLDGIIHDAKSTGRELRIASIDLRKAFDSISHDAVLWTLESRGYPRVFIDYIERLYQSSQTLLEFGKECRTIRPTRGVRQGDPLSPLLFNLVLDDILRKLNDTNIGYQLKEGTRLMGLAFADDLILLASTKNTLQQLLDLANPLLKVRGLEINPDKSFTISHLYDGREKKSFYQSSPEFTVGERLLPTKGLSARWRYLGIEFDNTGRVDSAKDTLLEFLSRLTIAPLKPQQRLVILKQFAIPKILYRLVAGPRPSRAFLIELDNEIRRTVKLHWLKLENSVPNAFLYAHTAHGGLDVPCLRTLIPRLRLSRLTNLQKSPHIGTQWLLSSDYHKDELAKTSALCVFGDTTIENAAQETDYWALTLHNTFDGAHLKDAHKSPFTQNWVKGTPYLSGKEYINLIKMRINALPTRARLARGRPGYDKFCRHGCNAVETLAHVSQLCDYTHLPITKRHDDICERVSRLLREKGLQVDRERTFRRPTAPSLRPDLVITTPTEVWVLDTEVCGPSRDLARARRDKIRKYDIPEIRDQLPGSSHRFGSITVSMTGVWEPESVKDLLTLGVSKKNLIDLTVLTVQGTLRVYRAHQDHKSWGRRRGRQGGLVGR

SEQ ID NO: 7845 - protein, 872 aa, Dermanyssus gallinae
METTFPSPKDAIIAHIQALTHKLPRHTSTADLTLLTNIICRGEAHTDALNIFLDKHLNNKHTRSTAVTTPSTDRVLSKRQLRREHYALTQKLYNKNRSKCAQGILDGTRRINNINDTDVVEHWTNAMTQPPPPPLTPNPYIPNPDLKCVSNPISLFETQRVLRGSSKALGLDGIKLASLRKLPEETVCCLLNILIISDIPPCQQKARVAFIPKVTNASSPSDLRPISISSYLQRTLNKILSKRIQTSMKILHTQRAFIPYDGTFENLNVLDGIIHDAKTTGRELRIASIDLRKAFDSISHDAVLWTLESRGYPRVFIDYIERLYQSSLTLLEFGKECRTIRPTRGVRQGDPLSPLLFNLVFDDILRKLNYTNIGYQLKEGTRLMGLAFADDLILLASTKNTLQQLLDLANPLLKARGLEINPDKSFTISHLYDGRVKKSFYQNSPEFTVGERLLPTKGLSARWRYLGIEFDNTGRVDSAKDTLLDFLSRLTIAPLKPQQRLAILKQFAIPKILYRLVAGPRPSRAFLLELDNEIRRTVKLHWLKLENSVPNAFLYAHTAHGGLDIPCLRTLIPRLRLSRLTNLQKSPHIGTQWLLSSDYHRDELAKTSALCEFGDTTIENAAQETEYWALTLHNTFDGAHLKNAHKSPFTQNWVKGTAYLSGKEYINLIKLRINALPTRARLARGRPWYDKFCRHGCNAVETLAHVSQLCDYTHLPIIKRHNDICERVSRLLRGKGLQVDRERTFRRPTAPSLRPDLVITTPTGVWVLDTEVCGPSRDLARARRDKIRKYDIPEIRDQLPGSSHRFGSITVSMTGVWEPESVKDLLTLGVSKKNLIDLTVLTMQGTLRVYRAHQDHKSWGRRRGRQGGLVGR

SEQ ID NO: 7846 - protein, 1178 aa, Dermanyssus gallinae
MDSRNLACPICDRRCKTGAGLSSHMRSHSTRVGNESTNTPSLVNSLIPPPPPSNNNDNINNSSTAPDSGAPLPTSSQRLIAANINNNRPNINSLSTSNSIIADSTPPPPVQEPSPIPSGSGVSFNSSDNQLNHNAIGVEANTPGTSGITPTNPPPPRRVSPSSPPHGPSPLNLICPVADCSRSFLSKSGLAIHVRRKHPILMNEELSSQPPLKKARWDPQDRELLAYLEASLVSENSETTPCEINKLLVSKFPDRTLESIKRQRKSAAYKARVNEFVHKRTRSPSGSDDESGDPYPKRYDLDSQETKFPSPKDAIIARIQALTNTLPPHSSTTDLTHLANRICQGEAHSQILNDFLHKHINATTHPRTVVTPPSTDRALSKRKLRREHYAITQKLYNKNRSKCAQGILDGVRRINNMNDTEVVEHWATAMTQPPPPPLTPNPYIPNPDLNCVSTPISLLETQSALRGTSKALGLDGIKLASLRKLPLENVCCLLNILFISDVPPCQQKARVAFIPKVTDASSPSDLRPISISSYLQRTLNKILSKRIQKSIKILPTQRAFLPFDGTFENLTVLDGIIHDAKSTGRELRIASVDLRKAFDSISHDAVLWTLGARGYPEVFIEYIERLYQSSQTLLEFGKECRTIRPTRGVRQGDPLSPLLFNLVLDDILRKINLDNLGYRLKEGNRLMGLAFADDLILLASTKNTLQQLLDLAFPLLKERGLEINTDKSFTISHLYDSRVKKSLYQSTIEFSVGGRQLPAKGICARWRYLGIEFDSNGRVDTAKVTLLELLGRLTSAPLKPQQRLTILKQFLIPKILYKLVAGPRPSQKFLLELDCEIRRTVKLQWLKLENSVPNAFLYAHISHGGLDIPCLRTLIPRLRLSRLTALNRSSHIGTQWLLSTDYHRKELAKTSALCVFDDTTIEDAAHETEYWSRTLHNTVDGAHLKHTHLTPFTNDWVKGTPYLSGREYINLIKLRINALPTRARLARGRPGYDKFCRHGCNAVETLAHIAQVCDHTHRPIIKRHDDICERVTRLLRAKGMQVERERTFRRPAAPARRPDLVITTPTRVWVLDAEVCGPSRDLALARRDKIRKYDIPGVRDQLPSSLPHRFGSITVSMTGVWEPESVKDLLTLGLSKKNLIDLTVLAMQGTLRVFRAHRDHKSWVRRGGGAGELTGRRF

SEQ ID NO: 7847 - protein, 1178 aa, Dermanyssus gallinae
MDSRNLACPICDRRCKTGAGLSSHMRSHSTRVGNESTNTPSLVNSLIPPPPPSNNNDNINNSSTAPDSGAPLPTSSQRLIAANNNNNRPNINSRSTSNSIIADSTPPPPVQEPSPIPSGSGVSINSSDNQLNHNAIGVEANTPGTSGITPTNPPPPRRVSPSSPPHGSSPLNLICPVADCSRSFLSKSGLAIHVRRKHPILMNEELSSQPPLKKARWDPQDRELLAYLEASLVSENSETTPCEINKLLLSKFPDRTLESIKRQRKSAAYKARVNEFVHKRTRSPSGSDDESGDPYPKRSDLDSQETKFPSPKDAIIARIQALTNTLPPHSSTTDLTHLANIICQGEAHFQILNDFLHKHINATTHPRTAATPPSTDRALSKRKLRREHYAITQKLYNKNRSKCAQGILDGVRRINNMKDTEVVEHWTTAMTQPPPPPLTPNPYIPNPDLNCVSTPISLLETQSALRGTSKALGLDGIKLASLRKLPLENVCCLLNILFISDVPPCQQKARVAFIPKVTDASSPSDLRPISISSYLQRTLNKILSKRIQKSIKILPTQRAFLPFDGTFENLTVLDGIIHDAKFTGRELRIASVDLRKAFDSISHDAVLWTLGARGYPEVFIEYIERLYQSSQTLLEFGKECRTIRPTRGVRQGDPLPPLLFNLVLDDILRKINFDNLGYRLKEGNRLMGLAFADDLILLASIKNTLQQLLDLAFPLLKERGLEINTDKSFTISHLYDSRVKKSLYQSTPEFSVGGRQLPAKGICARWRYLGIEFDSNGRVDTAKVTLLELLGRLTSAPLKPQQRLTILKQFLIPKILYKLVAGPRPSQKFLLELDCEIRRTVKLQWLKLENSVPNAFLYAHISHGGLDIPCLRTLIPRLRLSRLTALNRSSHIGTQWLLSTEYHSKELAKTSALCVFDDTTIEDAAHETEYWSRTLHNTVDGAHLKHTHLTPFTNDWVKGTPYLSGREYINLIKLRINALPTRARLARGRPGYDKFCRHGCNAVETLAHIAQVCDHTHRPIIKRHDDICERVTRLLRAKGMQVERERTFRRPAAPARRPDLVITTPTRVWVLDAEVCGPSRDLALARRDKIRKYDIPGVRDQLPSSLPHRFGSITVSMTGVWEPESVKDLLTLGLSKKNLIDLTVLAMQGTLRVFRAHRDHKSWVRRGGGAGELTRRRF

SEQ ID NO: 7848 - protein, 884 aa, Dermanyssus gallinae
MSPHSSTTDLTHLANIICQGEAHSQILNDFLHKHINATTHPRTVVTPPSTDRALSKRKLRREHYAITQKLYNKNRSKCAQGILDGVRRINNMNDTEVVEHWATAMTQPPPPPLTPNPYIPNPDLNCVSTPISLLETQSAYRGTSKALGLDGIKLASLRKLPLENVCCLLNILFISDVPPCQQKARVAFIPKVTDASSPSDLRPISISSYLQRTLNKIFSKRIQKSIKILPTQRAFLPFDGTFEHLTVLDGIIHDAKSTGRELRIASVDLRKAFDSISHDAVLWTLGARGYPEVFIEYIERLYQSSQTLLEFGKECRTIRPTRGVRQGDPLSPLLFNLVLDDILRKINLDNLGYRLKEGNRLMGLAFADDLILLASTKNTLQQLLDLAFPLLKERGLEINTDKSFTISHLYDSRVKKSLYQSTPEFSVGGRQLPAKGICARWRYLGIEFDSNGRVDTAKVTLLELLGRLTSAPLKPQQRLTILKQFLIPKILYKLVAGPRLSQKFLLELDCEIRRTVKLQWLKLENSVPNAFLYAHISHGGLDIPCLRTLIPRLRPLRLTALNRSSHIGTQWLLSTDYHRKELAKTSALCVFDDTTIEDAAHEIEYWSCTLHNTVDGAHLKHTHLTPFTNDWVKGTPYLSGREYINLIKFRINALPTRARLARSRPGYDKFCRHGCNAVETLAHIAQVCDHTHRPIIKRHDDICERVTRLLRAKGMQVERERTFRRPAAPARRPDLVITTPTRVWVLDAEVCGPSRDLALARRDKIRKYDIPGVRDQLPSSLPHRFGSITVSMTGVWEPESVKDLLTLGLSKKNLIDLTVLAMQGTLRVPGAPGPQELGPSRRRSRRTHREAILNYFFRRALPQCANVQSLNKFNVVFQYLEFSG

SEQ ID NO: 7849 - protein, 977 aa, Dermanyssus gallinae
MNEELSSQPPLKKARWDPQDRELLAFLEASLVSENSETTPCEINKLLLSKFPDRTLESIKRQRKSAAYKARVNEFVHKRTRFPSGSDDESGDPYPKRSDLDSQETKFPSPKDAIIARIQALTNTLPPHSSTTDLTHLANIICQGEAHFQILNDFLHKHINATTHPRTAVTPPSTDRALSKRKLRREHYAITQKLYNKNRSKCAQGILDGVRRINNMNDTEVVEHWTTAMTQPPPPPLTPNPYIPNPDLNCVSTPISLLETQSALRGTSKALGLDGIKLASLRKLPLENVCCLLNILFISDVPPCQQKARVAFIPKVTDASSPSDLRPISISSYLQRTLNKILSKRIQKSIKILPTQRAFLPFDGTFENLTVLDGIIHDAKSTGRELRIASVDLRKAFDSISHDAVLWTLGARGYPEVFIEYIERLYQSSQTLLEFGKECRTIRPTRGVRQGDPLSPLLFNLVLDDILRKINLDNLGYRLKEGNRLMGLAFADDLILLASTKNTLQQLLDLAFPLLKERGLEINTDKSFTISHLYDSRVKKSLYQSTPEFSVGGRHLPAKGICARWRYLGIEFDSNGRVDTAKVTLLELLGRLTSAPLKPQQRLTILKQFLIPKILYKLVAGPRPSQKFLLELDCEIRRTVKLQWLKLENSVPNAFLYAHISHGGLDIPCLRTLIPRLRLSRLTALNRSSHIGTQWLLSTEYHSKELAKTSALCVFDDTTIEDAAHETEYWSRTLHNTVDGAHLKHTHLTPFTNDWVKGTPYLSGREYINLIKLRINALPTRARLARGRPGYDKFCRHGCNAVETLAHIAQVCDHTHRPIIKRHDDICERVTRLLRAKGMQVERERTFRRPAAPARRPDLVITTPTRVWVLDAEVCGPSRDLALARRDKIRKYDIPGVRDQLPSSLPHRFGSITVSMTGVWEPESVKDLLTLGLSKKNLIDLTVLAMQGTLRVFRAHRDHKSWVRRGGGAGELTGRRF

SEQ ID NO: 7850 - protein, 977 aa, Dermanyssus gallinae
MNEELSSQPPLKKARWDPQDRELLAYLEASLVSENSETTPCEINNLLLSKFPDRTLESIKRQRKSAAYKARVNEFVHKRTRSPSGSDDESGDPYPKRSDLDSQETKFPSPKDAIIARIQALTNTLPPHSSTTDLTHLANIICQGEAHSQILNDFLQKHINATTHPRTAVTPPSTDRALSKRKVRREHYAITQKLYNKNRSKCAQGILDGVRRINNMNDTEVVEHWTTAMTQPPPPPLTPNPYIPNPDLNCVSTPISLLETQSALRGTSKALGLDGIKLASLRKLPLENVCCLLNILFISDVPPCQQKARVAFIPKVTDASSPSDLRPISISSYLQRTLNKILSKRIQKSIKILSTQRAFLPFDGTFENLTVLDGIIHDAKSTGRELRIASVDLRKAFDSISHDAVLWTLGARGYPEVFIEYIERLYQSSQTLLEFGKECRTIRPTRGVRQGDPLSPLLFNLVLDDILRKINLDNLGYRLKEGNRLMGLAFADDLILLASTKNTLQQLLDLAFPLLKERGLEINTDKSFTISHLYDSRMKKSLYQSTPEFSVGGRQLPAKGICARWRYLGIEFDSNGRVDTAKVTLLELLGRLTSAPLKPQQRLTILKQFLIPKILYKLVAGPRPSQKFLLELDCEIRRTVKLQWLKLENSVPNAFLYAHISHGGLDIPCLRTLIPRLRLSRLTALNRSSHIGTQWLLSTEYHSKELAKTSALCVLDDTTIEDAAHETEYWSRTLHNTVDGAHLKHTHLTPFTNDWVKGTPYLSGREYINLIKLRINALPTRARLARGRPGYDKFCRHGCNAVETLAHIAQVCDHTHRPIIKRHDDICERVTRLLRAKGMQVERERTFRRPAAPARRPDLVITTPTRVWVLDAEVCGPSRDLALARRDKIRKYDIPGVRDQLPSSLPHRFGSITVSITGVWEPESVKDLLTLGLSKKNLIDLTVLAMQGTLRVFRAHRDHKSWVRRGGGAGELTGRRF

SEQ ID NO: 7851 - protein, 1151 aa, Morbakka virulenta
MNQENISDNNVNGAGACIGEGSSFGRCPVDEQRRPGRYSVTVNRRGERINWRPFNKIVMECYYEGEPERRGFMKRMKRNWDDRGLFEVSTQRLLDQVRVIKTNEYLSKVELEEIRRKVKNRNNEEMQVSEQQDSNVSEQGINTENVETSEQERLGQLEVENEPTQGETELITSEFHILTDSELTEEQLEMIKIICELSKKKEKITNVSFRNADRKKLKEITSIVNKVLKYIMTDDVTKTNDLINAVAVYVRQWLGLKQRKDKVFQEPFWKRRIQLDINELRKTVGKLDRYARGQIKDVKKLEQIFKKYHVKKKGVHVVMEELKQRITAKAAKIDRYEKRINQFRINRMFSSNQKRVFVELNGEVIKENTIPNADDSRKFWSEIWDNPVEHNDDAEWLREIETELSGVNKQDNVRITVQDVRKQTGKMPNWKAAGPDGVQGYWLKNLSSLHDRIACQLNAVVESGDVPAWMTYGRTVLCVKDRSKGNPASNFRPISCLPLMWKLLTGMLSEQLYEHVDTNNLLPSEQKGCRKKTRGTKDQLLIDRMVLKNCKRRHTNLAMAYVDYKKAYDMVPHSWILKSLQLIGAADNIMNALEKSMKKWQVQLNAADKVLGVVNVKRGIFQGDSLSPLLFVICLLPMSLILRKMKAGYSLGKNHPKLNHLLYMDDLKLFGQSKGDIESLVNTVHRFSCDIGMRFGIEKCGVIIMKRGKMVICDGIELPDGEKMKSVNEEGYKYLGIVELDGIKEKKMKERFTKEYKRRIKLILKSNLNSRNAVSAMNIWAVAVMRYGAGIVKWTKEELEKLDRQTRKIMTMNGALHPKSDVDRLYIARQRGGRGLQSVLETIQSEENSLRWYVKNSQEQLLKAVHEQQEMNNDISNPSEYKDQRRREREVKWHEKVMHGQFFRDTDGIVDRKKSWLWLKSGDLKKGTEALVMAAQEQAIRTNYVKHHIDKSRDSPTCRLCGEKGETVSHIICECSKLAQKEYKRRHDNVARIVHWEICKKYDLPRAEQWYNHKPEGVTANESIKVLWDFNINTDYEIEHRRPDIVVELKPEKECLIIDIAVPGDTRIKQKEQEKIEKYQELKREIARLGRLRKVSVIPVVVGALGCVTKEAEQYIEKIGIKIRTEVIQKTVLLGTARTLRKVLETCGYFF

SEQ ID NO: 7852 - protein, 1123 aa, Morbakka virulenta
MNQENISDNNVNGAGTCIGEGSSFGRCPLDEQRRPGRFSVTVNRRGERINWRPFNKIVMECYYEGEPERRGFMKRMKRNWDDRGLFEVSTQRLLDQVRVIKTNEYLSKVELEEIRRKVKNRNNEEMQVSEQQDSNVSEQGINTENVETSEQERLGQLEVENEPTQGETELVTSEFHILTDSELTEEQLEMIKIICELSKKKEKITNVSFRNADRKKLKEITSIVNKVLKYIMTDDVTKTNDLINAVAVYVRQWLGLKQRKDKVFQEPFWKRRIQLDINELRKTVGKLDRYARGQIKDVKKLEQIFKKYHVKKKGVHVVMEELKQRITAKAAKIDRYEKRINQFRINRMFSSNQKRVFVELNGEVIKENTIPNADDSRKFWSEIWDNPVEHNDDAEWLREIETELSGVNKQDNVRITVQDVRKQTGKMPNWKAAGPDGVQGYWLKNLSSLHDRIACQLNAVVESGDVPAWMTYGRTVLCVKDRSKGNPASNFRPISCLPLMWKLLTGMLSEQLYEHVDTNNLLPSEQKGCRKKTRGTKDQLLIDRMVLKNCKRRHTNLAMAYVDYKKAYDMVPHSWILKSLQLIGAADNIMNALEKSMKKWQVQLNAADKVLGVVNVKRGIFQGDSLSPLLFVICLLPMSLILRKMKAGYSLGKNHPKLNHLLYMDDLKLFGQSKGDIESLVNTVHRFSCDIGMRFGIEKCGVIIMKRGKMVICDGIELPDGEKMKSVNEEGYKYLGIVELDGIKEKKMKERFTKEYKRRIKLILKSNLNSRNAVSAMNIWAVAVMRYGAGIVKWTKEELEKLDRQTRKIMTMNGALHPKSDVDRLYIARQRGGRGLQSVLETIQSEENSLRWYVKNSQEQLLKAVHEQQEMNNDISNPSEYKDQRRREREVKWHEKVMHGQFFRDTDGIVDRKKSWLWLKSGDLKKGTEALVMAAQEQAIRTNYVKHHIDKSRDSPTCRLCGEKGETVSHIICECSKLAQKEYKRRHDNVARIVHWEICKKYDLPRAEQWYNHKPEGVTANESIKVLWDFNINTDYEIEHRRPDIVVELKPEKECLIIDIAVPGDTRIKQKEQEKIEKYQELKRKIARSWRLRKVSVIAVVVGALGCATKEAEHRKNRDQDQD

SEQ ID NO: 7853 - protein, 1146 aa, Morbakka virulenta
MNQENISDNNVNGAGACIGEGSSFGRCPVDEQRRPGRYSVTVNRRGERINWRPFNKIVMECYYEGEPERRGFMKRMKRNWDDRGLFEVSTQRLLDQVRVIKTNEYLSKVELEEIRRKVKNRNNEEMQVSEQQDSNVSEQGINTENVETSEQERLGQLEVENEPTQGETELVTSEFHILTDSELTEEQLEMIKIICELSKKKEKITNVSFRNADRKKLKEITSIVNKVLKYIMTDDVTKTNDLINAVAVYVRQWLGLKQRKDKVFQEPFWKRRIQLDINELRKTVGKLDRYARGQIKDVKKLEQIFKKYHVKKKGVHVVMEELKQRITAKAAKIDRYEKRINQFRINRMFSSNQKRVFVELNGEVIKENTIPNADDSRKFWSEIWDNPVEHNDDAEWLREIETELSGVNKQDNVRITVQDVRKQTGKMPNWKAAGPDGVQGYWLKNLSSLHDRIACQLNAVVESGDVPAWMTYGRTVLCVKDRSKGNPASNFRPISCLPLMWKLLTGMLSEQLYEHVDTNNLLPSEQKGCRKKTRGTKDQLLIDRMVLKNCKRRHTNLAMAYVDYKKAYDMVPHSWILKSLQLIGAADNIMNALEKSMKKWQVQLNAADKVLGVVNVKRGIFQGDSLSPLLFVICLIPMSLILRKMKAGYSLGKNHPKLNHLLYMDDLKLFGQSKGDIESLVNTVHRFSCDIGMRFGIEKCGVIIMKRGKMVICDGIELPDGEKMKSVNEEGYKYLGIVELDGIKEKKMKERFTKEYKRRIKLILKSNLNSRNAVSAMNIWAVAVMRYGAGIVKWTKEELEKLDRQTRKIMTMNGALHPKSDVDRLYIARQRGGRGLQSVLETIQSEENSLRWYVKNSQEQLLKAVHEQQEMNNDISNPSEYKDQRRREREVKWHEKVMHGQFFRDTDGIVDRKKSWLWLKSGDLKKGTEALVMAAQEQAIRTNYVKHHIDKSRDSPTCRLCGEKGETVSHIICECSKLAQKEYKRRHDNVARIVHWEICKKYDLPRAEQWYNHKPEGVTANESIKVLWDFNINTDYEIEHRRPDIVVELKPEKECLIIDIAVPGDTRIKQKEQEKIEKYQELKREIARLWRLRKVSVIPVVVGALGCVTKEAEQYIEKIGIKIRTEVIQKTVLLGTARTLRKVLET

SEQ ID NO: 7854 - protein, 1167 aa, Morbakka virulenta
MNQENISDNNVNGAGTCIGEGSSFGRCPVDEQRRPGRYSVTVNRRGERINWRPFNKIVMECYYEGEPERRGFMKRMKRNWDDRGLFEVSTQRLLDQVRVIKTNEYLSKVELEEVRRKVKNRNNEEMQVSEQQDSNVSEQGINTENVETSEQERLGQLEVENEPTQGETELVTSEFHILTDSELTEEQLEMIKIICELSKKKEKITNVSFRNADRKKLKEITSIVNKVLKYIMTDDVTKTNDLINAVAVYVRQWLGLKQRKDKVFQEPFWKRRIQLDINELRKTVGKLDRYARGQIKDVKKLEQIFKKYHVKKKGVHVVMEELKQRITAKAAKIDRYEKRINQFRINRMFSSNQKRVFVELNGEVIKENTIPNADDSRKFWSEIWDNPVEHNDDAEWLREIETELSGVNKQDNVRITVQDVRKQTGKMPNWKAAGPDGVQGYWLKNLSSLHDRIACQLNAVVESGDVPAWMTYGRTVLCVKDRSKGNPASNFRPISCLPLMWKLLTGMLSEQLYEHVDTNNLLPSEQKGCRKKTRGTKDQLLIDRMVLKNCKRRHTNLAMAYVDYKKAYDMVPHSWILKSLQLIGAADNIMNALEKSMKKWQVQLNAADKVLGVVNVKRGIFQGDSLSPLLFVICLIPMSLILRKMKAGYSLGKNHPKLNHLLYMDDLKLFGQSKGDIESLVNTVHRFSCDIGMRFGIEKCGVIIMKRGKMVICDGIELPDGEKMKSVNEEGYKYLGIVELDGIKEKKMKERFTKEYKRRIKLILKSNLNSRNAVSAMNIWAVAVMRYGAGIVKWTKEELEKLDRQTRKIMTMNGALHPKSDVDRLYIARQRGGRGLQSVLETIQSEENSLRWYVKNSQEQLLKAVHEQQEMNNDISNPSEYKDQRRREREVKWHEKVMHGQFFRDTDGIVDRKKSWLWLKSGDLKKGTEALVMAAQEQAIRTNYVKHHIDKSRDSPTCRLCGEKGETVSHIICECSKLAQKEYKRRHDNVARIVHWEICKKYDLPRAEQWYNHKPEGATANESIKLLWDFNINTDYEIEHRRPDIVVELKPEKECLIIDIAVPGDTRIKQKEQEKIEKYQELSIYLSTYLYIYLSIYPSIYPSFYSSIYPSIFLPIHLSIHLSIHLSIYLSIYLSIYLSIYLSIYISIYLDLSIHLSFFFLSIHLSI

SEQ ID NO: 7855 - protein, 1146 aa, Morbakka virulenta
MNQENISDNNVNGAGACIGEGSSFGRCPVDEQRRPGRYSVTVNRRGERINWRPFNKIVMECYYEGEPERRGFMKRMKRNWDDRGLFEVSTQRLLDQVRVIKTNEYLSKVELEEIRRKVKNRNNEEMQVSEQQDSNVSEQGINTENVETSEQERLGQLEVENEPTQGETELITSEFHILTDSELTEEQLEMIKIICELSKKKEKITNVSFRNADRKKLKEITSIVNKVLKYIMTDDVTKTNDLINAVAVYVRQWLGLKQRKDKVFQEPFWKRRIQLDINELRKTVGKLDRYARGQIKDVKKLEQIFKKYHVKKKGVHVVMEELKQRITAKAAKIDRYEKRINQFRINRMFSSNQKRVFVELNGEVIKENTIPNADDSRKFWSEIWDNPVEHNDDAEWLREIETELSGVNKQDNVRITVQDVRKQTGKMPNWKAAGPDGVQGYWLKNLSSLHDRIACQLNAVVESGDVPAWMTYGRTVLCVKDRSKGNPASNFRPISCLPLMWKLLTGMLSEQLYEHVDTNNLLPSEQKGCRKKTRGTKDQLLIDRMVLKNCKRRHTNLAMAYVDYKKAYDMVPHSWILKSLQLIGAADNIMNALEKSMKKWQVQLNAADKVLGVVNVKRGIFQGDSLSPLLFVICLIPMSLILRKMKAGYSLGKNHPKLNHLLYMDDLKLFGQSKGDIESLVNTVHRFSCDIGMRFGIEKCGVIIMKRGKMVICDGIELPDGEKMKSVNEEGYKYLGIVELDGIKEKKMKERFTKEYKRRIKLILKSNLNSRNAVSAMNIWAVAVMRYGAGIVKWTKEELEKLDRQTRKIMTMNGALHPKSDVDRLYIARQRGGRGLQSVLETIQSEENSLRWYVKNSQEQLLKAVHEQQEMNNDISNPSEYKDQRRREREVKWHEKVMHGQFFRDTDGIVDRKKSWLWLKSGDLKKGTEALVMAAQEQAIRTNYVKHHIDKSRDSPTCRLCGEKGETVSHIICECSKLAQKEYKRRHDNVARIVHWEICKKYDLPRAEQWYNHKPEGVTANESIKVLWDFNINTDYEIEHRRPDIVVELKPEKECLIIDIAVPGDTRIKQKEQEKIEKYQELKREIARLWRLRKVSVIPVVVGALGCVTKEAEQYIEKIGIKIRTEVIQKTVLLGTARTLRKVLET

SEQ ID NO: 7856 - protein, 1146 aa, Morbakka virulenta
MNQENISDNNVNGAGACIGEGSSFGRCPVDEQRRPGRYSVTVNRRGERINWRPFNKIVMECYYEGEPERRGFMKRMKRNWDDRGLFEVSTQRLLDQVRVIKTNEYLSKVELEEIRRKVKNRNNEEMQVSEQQDSNVSEQGINTENVETSEQERLGQLEVENEPTQGETELVTSEFHILTDSELTEEQLEMIKIICELSKKKEKITNVSFRNADRKKLKEITSIVNKVLKYIMTDDVTKTNDLINAVAVYVRQWLGLKQRKDKVFQEPFWKRRIQLDINELRKTVGKLDRYARGQIKDVKKLEQIFKKYHVKKKGVHVVMEELKQRITAKAAKIDRYEKRINQFRINRMFSSNQKRVFVELNGEVIKENTIPNADDSRKFWSEIWDNPVEHNDDAEWLREIETELSGVNKQDNVRITVQDVRKQTGKMPNWKAAGPDGVQGYWLKNLSSLHDRIACQLNAVVESGDVPAWMTYGRTVLCVKDRSKGNPASNFRPISCLPLMWKLLTGMLSEQLYEHVDTNNLLPSEQKGCRKKTRGTKDQLLIDRMVLKNCKRRHTNLAMAYVDYKKAYDMVPHSWILKSLQLIGAADNIMNALEKSMKKWQVQLNAADKVLGVVNVKRGIFQGDSLSPLLFVICLLPMSLILRKMKAGYSLGKNHPKLNHLLYMDDLKLFGQSKGDIESLVNTVHRFSCDIGMRFGIEKCGVIIMKRGKMVICDGIELPDGEKMKSVNEEGYKYLGIVELDGIKEKKMKERFTKEYKRRIKLILKSNLNSRNAVSAMNIWAVAVMRYGAGIVKWTKEELEKLDRQTRKIMTMNGALHPKSDVDRLYIARQRGGRGLQSVLETIQSEENSLRWYVKNSQEQLLKAVHEQQEMNNDISNPSEYKDQRRREREVKWHEKVMHGQFFRDTDGIVDRKKSWLWLKSGDLKKGTEALVMAAQEQAIRTNYVKHHIDKSRDSPTCRLCGEKGETVSHIICECSKLAQKEYKRRHDNVARIVHWEICKKYDLPRAEQWYNHKPEGVTANESIKVLWDFNINTDYEIEHRRPDIVVELKPEKECLIIDIAVPGDTRIKQKEQEKIKKYQELKREIARLWRLRKVSVIPVVVGALGCVTKEAEQYIEKIGIKIRTEVIQKTVLLGSARTLRKVLET

SEQ ID NO: 7857 - protein, 1146 aa, Morbakka virulenta
MNQENISDNNVNGAGACIGEGSSFGRCPVDEQRRPGRYSVTVNRRGERINWRPFNKIVMECYYEGEPERRGFMKRMKRNWDDRGLFEVSRQRLLDQVRVIKTNEYLSKVELEEIRRKVKNRNNEEMQVSEQQDSNVSEQGINTENVETSEQERLGQLEVENEPTQGETELVTSEFHILTDSELTEEQLEMIKIICELSKKKEKITNVSFRNADRKKLKEITSIVNKVLKYIMTDDVTKTNDLINAVAVYVRQWLGLKQRKDKVFQEPFWKRRIQLDINELRKTVGKLDRYARGQIKDVKKLEQIFKKYHVKKKGVHVVMEELKQRITAKAAKIDRYEKRINQFRINRMFSSNQKRVFVELNGEVIKENTIPNADDSRKFWSEIWDNPVEHNDDAEWLREIETELSGVNKQDNVRITVQDVRKQTGKMPNWKAAGPDGVQGYWLKNLSSLHDRIACQLNAVVESGDVPAWMTYGRTVLCVKDRSKGNPASNFRPISCLPLMWKLLTGMLSEQLYEHVDTNNLLPSEQKGCRKKTRGTKDQLLIDRMVLKNCKRRHTNLAMAYVDYKKAYDMVPHSWILKSLQLIGAADNIMNALEKSMKKWQVQLNAADKVLGVVNVKRGIFQGDSLSPLLFVICLIPMSLILRKMKAGYSLGKNHPKLNHLLYMDDLKLFGQSKGDIESLVNTVHRFSCDIGMRFGIEKCGVIIMKRGKMVICDGIELPDGEKMKSVNEEGYKYLGIVELDGIKEKKMKERFTKEYKRRIKLILKSNLNSRNAVSAMNIWAVAVMRYGAGIVKWTKEELEKLDRQTRKIMTMNGALHPKSDVDRLYIARQRGGRGLQSVLETIQSEENSLRWYVKNSQEQLLKAVHEQQEMNNDISNPSEYKDQRRREREVKWHEKVMHGQFFRDTDGIVDRKKSWLWLKSGDLKKGTEALVMAAQEQAIRTNYVKHHIDKSRDSPTCRLCGEKGETVSHIICECSKLAQKEYKRRHDNVARIVHWEICKKYDLPRAEQWYNHKPEGVTANESIKVLWDFNINTDYEIEHRRPDIVVELKPEKECLIIDIAVPGDTRIKQKEQEKIEKYQELKREIARLWRLRKVSVIPVVVGALGCVTKEAEQYIEKIGIKIRTEVIQKTVLLGTARTLRKVLET

SEQ ID NO: 7858 - protein, 1146 aa, Morbakka virulenta
MNQENNSDNNVNGAGACIGEGSSFGRCPVDEQRRPGRYSVTVNRRGERINWRPFNKIVMECYYEGEPERRGFMKRMKRNWDDRGLFEVSTQRLLDQVRVIKTNEYLSKVELEEVRRKVKNRNNEEMQVSEQQDSNVSEQGINTENVETSEQERLGQLEVENEPTQGETELVTSEFHILTDSELTEEQLEMIKIICELSKKKEKITNVSFRNADRKKLKEITSIVNKVLKYIMTDDVTKTNDLINAVAVYVRQWLGLKQRKDKVFQEPFWKRRIQLDINELRKTVGKLDRYARGQIKDVKKLEQIFKKYHVKKKGVHVVMEELKQRITAKAAKIDRYEKRINQFRINRMFSSNQKRVFVELNGEVIKENTIPNADDSRKFWSEIWDNPVEHNDDAEWLREIETELSGVNKQDNVRITVQDVRKQTGKMPNWKAAGPDGVQGYWLKNLSSLHDRIACQLNAVVESGDVPAWMTYGRTVLCVKDRSKGNPASNFRPISCLPLMWKLLTGMLSEQLYEHVDTNNLLPSEQKGCRKKTRGTKDQLLIDRMVLKNCKRRHTNLAMAYVDYKKAYDMVPHSWILKSLQLIGAADNIMNALEKSMKKWQVQLNAADKVLGVVNVKRGIFQGDSLSPLLFVICLIPMSLILRKMKAGYSLGKNHPKLNHLLYMDDLKLFGQSKGDIESLVNTVHRFSCDIGMRFGIEKCGVIIMKRGKMVICDGIELPDGEKMKSVNEEGYKYLGIVELDGIKEKKMKERFTKEYKRRIKLILKSNLNSRNAVSAMNIWAVAVMRYGAGIVKWTKEELEKLDRQTRKIMTMNGALHPKSDVDRLYIARQRGGRGLQSVLETIQSEENSLRWYVKNSQEQLLKAVHEQQEMNNDISNPSEYKDQRRREREVKWHEKVMHGQFFRDTDGIVDRKKSWLWLKSGDLKKGTEALVMAAQEQAIRTNYVKHHIDKSRDSPTCRLCGEKGETVSHIICECSKLAQKEYKRRHDNVARIVHWEICKKYDLPRAEQWYNHKPEGVTANESIKVLWDFNINTDYEIEHRRPDIVVELKPEKECLIIDIAVPGDTRIKQKEQEKIEKYQELKREIARLWRLRKVSVIPVVVGALGCVTKEAEQYIEKIGIKIRTEVIQKTVLLGTARTLRKVLET

SEQ ID NO: 7859 - protein, 1146 aa, Morbakka virulenta
MNQENISDDNVNGAGACIGEGSSFGRCPVDEQRRPGRYSVTVNRRGERINWRPFNKIVMECYYEGEPERRGFMKRMKRNWDDRGLFEVSTQRLLDQVRVIKTNEYLSKVELEEVRRKVKNRNNEEMQVSEQQDSNVSEQGINTENVETSEQERLGQLEVENEPTQGETELVTSEFHILTDSELTEEQLEMIKIICELSKKKEKITNVSFRNADRKKLKEITSIVNKVLKYIMTDDVTKTNDLINAVAVYVRQWLGLKQRKDKVFQEPFWKRRIQLDINELRKTVGKLDRYARGQIKDVKKLEQIFKKYHVKKKGVHVVMEELKQRITAKAAKIDRYEKRINQFRINRMFSSNQKRVFVELNGEVIKENTIPNADDSRKFWSEIWDNPVEHNDDAEWLREIETELSGVNKQDNVRITVQDVRKQTGKMPNWKAAGPDGVQGYWLKNLSSLHDRIACQLNAVVESGDVPAWMTYGRTVLCVKDRSKGNPASNFRPISCLPLMWKLLTGMLSEQLYEHVDTNNLLPSEQKGCRKETRGTKDQLLIDRMVLKNCKRRHTNLAMAYVDYKKAYDMVPHSWILKSLQLIGAADNIMNALEKSMKKWQVQLNAADKVLGVVNVKRGIFQGDSLSPLLFVICLIPMSLILRKMKAGYSLGKNHPKLNHLLYMDDLKLFGQSKGDIESLVNTVHRFSCDIGMRFGIEKCGVIIMKRGKMVICDGIELPDGEKMKSVNEEGYKYLGIVELDGIKEKKMKERFTKEYKRRIKLILKSNLNSRNAVSAMNIWAVAVMRYGAGIVKWTKEELEKLDRQTRKIMTMNGALHPKSDVDRLYIARQRGGRGLQSVLETIQSEENSLRWYVKNSQEQLLKAVHEQQEMNNDISNPSEYKDQRRREREVKWHEKVMHGQFFRDTDGIVDRKKSWLWLKSGDLKKGTEALVMAAQEQAIRTNYVKHHIDKSRDSPTCRLCGEKGETVSHIICECSKLAQKEYKRRHDNVARIVHWEICKKYDLPRAEQWYNHKPEGVTANESIKVLWDFNINTDYEIEHRRPDIVVELKPEKECLIIDIAVPGDTRIKQKEQEKIEKYQELKREIARLWRLRKVSVIPVVVGALGCVTKEAEQYIEKIGIKIRTEVIQKTVLLGTARTLRKVLET

SEQ ID NO: 7860 - protein, 1146 aa, Morbakka virulenta
MNQENISDNNVNGAGACIGEGSSFGRCPVDEQRRPGRYSVTVNRRGERINWRPFNKIVMECYYEGEPERRGFMKRMKRNWDDRGLFEVSTQRLLDQVRVIKTNEYLSKVELEEVRRKVKNRNNEEMQVSEQQDSNVSEQGINTENVETSEQERLGQLEVENEPTQGETELITSEFHILTDSELTEEQLEMIKIICELSKKKEKITNVSFRNADRKKLKEITSIVNKVLKYIMTDDVTKTNDLINAVAVYVRQWLGLKQRKDKVFQEPFWKRRIQLDINELRKTVGKLDRYARGQIKDVKKLEQIFKKYHVKKKGVHVVMEELKQRITAKAAKIDRYEKRINQFRINRMFSSNQKRVFVELNGEVIKENTIPNADDSRKFWSEIWDNPVEHNDDAEWLREIETELSGVNKQDNVRITVQDVRKQTGKMPNWKAAGPDGVQGYWLKNLSSLHDRIACQLNAVVESGDVPAWMTYGRTVLCVKDRSKGNPASNFRPISCLPLMWKLLTGMLSEQLYEHVDTNNLLPSEQKGCRKKTRGTKDQLLIDRMVLKNCKRRHTNLAMAYVDYKKAYDMVPHSWILKSLQLIGAADNIMNALEKSMKKWQVQLNAADKVLGVVNVKRGIFQGDSLSPLLFVICLIPMSLILRKMKAGYSLGKNHPKLNHLLYMDDLKLFGQSKGDIESLVNTVHRFSCDIGMRFGIEKCGVIIMKRGKMVICDGIELPDGEKMKSVNEEGYKYLGIVELDGIKEKKMKERFTKEYKRRIKLILKSNLNSRNAVSAMNIWAVAVMRYGAGIVKWTKEELEKLDRQTRKIMTMNGALHPKSDVDRLYIARQRGGRGLQSVLETIQSEENSLRWYVKNSQEQLLKAVHEQQEMNNDISNPSEYKDQRRREREVKWHEKVMHGQFFRDTDGIVDRKKSWLWLKSGDLKKGTEALVMAAQEQAIRTNYVKHHIDKSRDSPTCRLCGEKGETVSHIICECSKLAQKEYKRRHDNVARIVHWEICKKYDLPRAEQWYNHKPEGVTANESIKVLWDFNINTDYEIEHRRPDIVVELKPEKECLIIDIAVPGDTRIKQKEQEKIEKYQELKREIARLWRLRKVSVIPVVVGALGCVTKEAEQYIEKIGIKIRTEVIQKTVLLGTARTLRKVLET

SEQ ID NO: 7861 - protein, 1088 aa, Morbakka virulenta
MECYYEGEPERRGFMKRMKRNWDDRGLFEVSTQRLLDQVRVIKTNEYLSKVELEEIRRKVKNRNNEEMQVSEQQDSNVSEQGINTENVETSEQERLGQLEVENEPTQGETELITSEFHILTDSELTEEQLEMIKIICELSKKKEKITNVSFRNADRKKLKEITSIVNKVLKYIMTDDVTKTNDLINAVAVYVRQWLGLKQRKDKVFQEPFWKRRIQLDINELRKTVGKLDRYARGQIKDVKKLEQIFKKYHVKKKGVHVVMEELKQRITAKAAKIDRYEKRINQFRINRMFSSNQKRVFVELNGEVIKENTIPNADDSRKFWSEIWDNPVEHNDDAEWLREIETELSGVNKQDNVRITVQDVRKQTGKMPNWKAAGPDGVQGYWLKNLSSLHDRIACQLNAVVESGDVPAWMTYGRTVLCVKDRSKGNPASNFRPISCLPLMWKLLTGMLSEQLYEHVDTNNLLPSEQKGCRKKTRGTKDQLLIDRMVLKNCKRRHTNLAMAYVDYKKAYDMVPHSWILKSLQLIGAADNIMNALEKSMKKWQVQLNAADKVLGVVNVKRGIFQGDSLSPLLFVICLIPMSLILRKMKAGYSLGKNHPKLNHLLYMDDLKLFGQSKGDIESLVNTVHRFSCDIGMRFGIEKCGVIIMKRGKMVICDGIELPDGEKMKSVNEEGYKYLGIVELDGIKEKKMKERFTKEYKRRIKLILKSNLNSRNAVSAMNIWAVAVMRYGAGIVKWTKEELEKLDRQTRKIMTMNGALHPKSDVDRLYIARQRGGRGLQSVLETIQSEENSLRWYVKNSQEQLLKAVHEQQEMNNDISNPSEYKDQRRREREVKWHEKVMHGQFFRDTDGIVDRKKSWLWLKSGDLKKGTEALVMAAQEQAIRTNYVKHHIDKSRDSPTCRLCGEKGETVSHIICECSKLAQKEYKRRHDNVARIVHWEICKKYDLPRAEQWYNHKPEGVTANESIKVLWDFNINTDYEIEHRRPDIVVELKPEKECLIIDIAVPGDTRIKQKEQEKIEKYLELKREIARLWRLRKVSVIPVVVGALGCVTKEAEQYIEKIGIKIRTEVIQKTVLLGTARTLRKVLET

SEQ ID NO: 7862 - protein, 1088 aa, Morbakka virulenta
MECYYEGEPERRGFMKRMKRNWDDRGLFEVSTQRLLDQVRVIKTNEYLSKVELEEIRRKVKNRNNEEMQVSEQQDSNVSEQGINTENVETSEQERLGQLEVENEPTQGETELITSEFHILTDSELTEEQLEMIKIICELSKKKEKITNVSFRNADRKKLKEITSIVNKVLKYIMTDDVTKTNDLINAVAVYVRQWLGLKQRKDKVFQEPFWKRRIQLDINELRKTVGKLDRYARGQIKDVKKLEQIFKKYHVKKKGVHVVMEELKQRITAKAAKIDRYEKRINQFRINRMFSSNQKRVFVELNGEVIKENTIPNADDSRKFWSEIWDNPVEHNDDAEWLREIETELSGVNKQDNVRITVQDVRKQTGKMPNWKAAGPDGVQGYWLKNLSSLHDRIACQLNAVVESGDVPAWMTYGRTVLCVKDRSKGNPASNFRPISCLPLMWKLLTGMLSEQLYEHVDTNNLLPSEQKGCRKKTRGTKDQLLIDRMVLKNCKRRHTNLAMAYVDYKKAYDMVPHSWILKSLQLIGAADNIMNALEKSMKKWQVQLNAADKVLGVVNVKRGIFQGDSLSPLLFVICLIPMSLILRKMKAGYSLGKNHPKLNHLLYMDDLKLFGQSKGDIESLVNTVHRFSCDIGMRFGIEKCGVIIMKRGKMVICDGIELPDGEKMKSVNEEGYKYLGIVELDGIKEKKMKERFTKEYKRRIKLILKSNLNSRNAVSAMNIWAVAVMRYGAGIVKWTKEELEKLDRQTRKIMTMNGALHPKSDVDRLYIARQRGGRGLQSVLETIQSEENSLRWYVKNSQEQLLKAVHEQQEMNNDISNPSEYKDQRRREREVKWHEKVMHGQFFRDTDGIVDRKKSWLWLKSGDLKKGTEALVMAAQEQAIRTNYVKHHIDKSRDSPTCRLCGEKGETVSHIICECSKLAQKEYKRRHDNVARIVHWEICKKYDLPRAEQWYNHKPEGVTANESIKVLWDFNINTDYEIEHRRPDIVVELKPKKECLIIDIAVPGDTRGKQKEQEKIEKYQELKREIARLWRLRKVSVIPVVVGALGCVTKEAEQYIEKIGIKIRTEMIQKTVLLGTARTLRKVLET

SEQ ID NO: 7863 - protein, 1146 aa, Morbakka virulenta
MNQENISDNNVNGAGACIGEGSSFGRCPVDEQRRPGRYSVTVNRRGERINWRPFNKIVMECYYEGEPERRGFMKRMKRNWDDRGLFEVSTQRLLDQVRVIKTNEYLSKVELEEVRRKVKNRNNEEMQVSEQQDSNVSEQGINTENVETSEQERLGQLEVENEPTQGETELVTSEFHILTDSELTEEQLEMIKIICELSKKKEKITNVSFRNADRKKLKEITSIVNKVLKYIMTDDVTKTNDLINAVAVYVRQWLGLKQRKDKVFQEPFWKRRIQLDINELRKTVGKLDRYARGQIKDVKKLEQIFKKYHVKKKGVHVVMEELKQRITAKAAKIDRYEKRINQFRINRMFSSNQKRVFVELNGEVIKENTIPNADDSRKFWSEIWDNPVEHNDDAEWLREIETELSGVNKQDNVRITVQDVRKQTGKMPNWKAAGPDGVQGYWLKNLSSLHDRIACQLNAVVESGDVPAWMTYGRTVLCVKDRSKGNPASNFRPISCLPLMWKLLTGMLSEQLYEHVDTNNLLPSEQKGCRKKTRGTKDQLLIDRMVLKNCKRRHTNLAMAYVDYKKAYDMVPHSWILKSLQLIGAADNIMNALEKSMKKWQVQLNAADKVLGVVNVKRGIFQGDSLSPLLFVICLLPMSLILRKMKAGYSLGKNHPKLNHLLYMDDLKLFGQSKGDIESLVNTVHRFSCDIGMRFGIEKCGVIIMKRGKMVICDGIELPDGEKMKSVNEEGYKYLGIVELDGIKEKKMKERFTKEYKRRIKLILKSNLNSRNAVSAMNIWAVAVMRYGAGIVKWTKEELEKLDRQTRKIMTMNGALHPKSDVDRLYIARQRGGRGLQSVLETIQSEENSLRWYVKNSQEQLLKAVHEQQEMNNDISNPSEYKDQRRREREVKWHEKVMHGQFFRDTDGIVDRKKSWLWLKSGDLKKGTEALVMAAQEQAIRTNYVKHHIDKSRDSPTCRLCGEKGETVSHIICECSKLAQKKYKRRHDNVARIVHWEICKKYDLPRAEQWYNHKPEGVTANESIKVLWDFNINTDYEIEHRRPDIVVELKPEKECLIIDIAVPGDTRIKQKEQEKIEKYQELKREIARLWRLRKVSVIPVVVGALRCVTKEAEQYIEKIGIKIRTEVIQKTVLLGTARTLRKVLET

SEQ ID NO: 7864 - protein, 1146 aa, Morbakka virulenta
MNQENISDNNVNGAGACIGEGSSFGRCPVDEQRRPGRYSVTVNRRGERINWRPFNKIVMECYYEGEPERRGFMKRMKRNWDDRGLFEVSTQRLLDQVRVIKTNEYLSKVELEEVRRKVKNRNNEEMQVSEQQDSNVSEQGINTENVETSEQERLGQLEVENEPTQGETELVTSEFHILTDSELTEEQLEMIKIICELSKKKEKITNVSFRNADRKKLKEITSIVNKVLKYIMTDDVTKTNDLINAVAVYVRQWLGLKQRKDKVFQEPFWKRRIQLDINELRKTVGKLDRYARGQIKDVKKLEQIFKKYHVKKKGVHVVMEELKQRITAKAAKIDRYEKRINQFRINRMFSSNQKRVFVELNGEVIKENTIPNADDSRKFWSEIWDNPVEHNDDAEWLREIETELSGVNKQDNVRITVQDVRKQTGKMPNWKAAGPDGVQGYWLKNLSSLHDRIACQLNAVVESGDVPAWMTYGRTVLCVKDRSKGNPASNFRPISCLPLMWKLLTGMLSEQLYEHVDTNNLLPSEQKGCRKKTRGTKDQLLIDRMVLKNCKRRHTNLAMAYVDYKKAYDMVPHSWILKSLQLIGAADNIMNALEKSMKKWQVQLNAADKVLGVVNVKRGIFQGDSLSPLLFVICLIPMSLILRKMKAGYSLGKNHPKLNHLLYMDDLKLFGQSKGDIESLVNTVHRFSCDIGMRFGIEKCGVIIMKRGKMVICDGIELPDGEKMKSVNEEGYKYLGIVELDGIKEKKMKERFTKEYKRRIKLILKSNLNSRNAVSAMNIWAVAVMRYGAGIVKWTKEELEKLDRQTRKIMTMNGALHPKSDVDRLYIARQRGGRGLQSVLETIQSEENSLRWYVKNSQEQLLKAVHEQQEMNNDISNPSEYKDQRRREREVKWHEKVMHGQFFRDTDGIVDRKKSWLWLKSGDLKKGTEALVMAAQEQAIRTNYVKHHIDKSRDSPTCRLCGEKGETVSHIICECSKLAQKEYKRRHDNVARIVHWEICKKYDLPRAEQWYNHKPEGVTANESIKVLWDFNINTDYEIEHRRPDIVVELKPEKECLIIDIAVPGDTRIKQKEQEKIEKYQELKREIARLWRLRKVSVIPVVVGALGCVTKEAEQYIEKIGIKIRTEVIQKTVLLGTARTLRKVLET

SEQ ID NO: 7865 - protein, 1014 aa, Morbakka virulenta
MQVSEQQDSNVSEQGINIENVETSEQERLGQLEVENEPTQGERELVTSEFHILTDSELTEEQLEMIKIVCELSKKKEKITNVSFRNADRKRLKEITSIVNKVLKYIVTDDVTKTNDLINAVAVYVSQWLGLKQRKDKVFQEPFWKRRIQLDINELRKTVGKLDRYARGQIKDVKKLEQIFKKYHVKKKGVHVVMEELKQRITAKAAKIDRYEKRINQFRINRMFSSNQKRVFVELNGEVIKENTIPNADDSRKFWSEIWDNPVEHNDDAEWLREIETELSGVNKQDNVRITVQDVRKQTGKMPNWKAAGPDGVQGYWLKNLSSLHDRIACQLNAVVESGDVPAWMTYGRTVLCVKDRSKGNPASNFRPISCLPLMWKLLTGMLSEQLYEHVDTNNLLPSEQKGCRKKTRGTKDQLLIDRMVLKNCKRRHTNLAMAYVDYKKAYDMVPHSWILKSLQLIGAADNIMNALEKSMKKWQVQLNAADKVLGVVNVKRGIFQGDSLSPLLFVICLLPMSLILRKMKAGYSLGKNHPKLNHLLYMDDLKLFGQSKGDIESLVNTVHRFSCDIGMRFGIEKCGVIIMKRGKMVICDGIELPDGEKMKSVNEEGYKYLGIVELDGIKEKKMKERFTKEYKRRIKLILKSNLNSRNAVSAMNIWAVAVMRYGAGIVKWTKEELEKLDRQTRKIMTMNGALHPKSDVDRLYIARQRGGRGLQSVLETIQSEENSLRWYVKNSQEQLLKAVHEQQEMNNDISNPSEYKDQRRREREVKWHEKVMHGQFFRDTDGIVDRKKSWLWLKSGDLKKGTEALVMAAQEQAIRTNYVKHHIDKSRDSPTCRLCGEKGETVSHIICECSKLAQKEYKRRHDNVARIVHWEICKKYDLPRAEQWYNHKPEGVTANESIKVLWDFNINTDYEIEHRRPDIVVELKPEKECLIIDIAVPGDTRAKQKEQEKIEKYQELKREIARLRRLRKVSVIPVVVGALGCVTKEAEQYIEKIGIKIRTEVIQKRHCWELQEH

SEQ ID NO: 7866 - protein, 1146 aa, Morbakka virulenta
MNQENISDNNVNGAGACIGEGSSFGRCPVDEQRRPGRYSVTVNRRGERINWRPFNKIVMECYYEGEPERRGFMKRMKRNWDDRGLFEVSTQRLLDQVRVIKTNEYLSKVELEEIRRKVKNRNNEEMQVSEQQDSNVSEQGINTENVETSEQERLGQLEVENEPTQGETELVTSEFHILTDSELTEEQLEMIKIICELSKKKEKITNVSFRNADRKKLKEITSIVNKVLKYIMTDDVTKTNDLINAVAVYVRQWLGLKQRKDKVFQEPFWKRRIQLDINELRKTVGKLDRYARGQIKDVKKLEQIFKKYHVKKKGVQVVMEELKQRITAKAAKIDRYEKRINQFRINRMFSSNQKRVFVELNGEVIKENTIPNADDSRKFWSEIWDNPVEHNDDAEWLREIETELSGVNKQDNVRITVQDVRKQTGKMPNWKAAGPDGVQGYWLKNLSSLHDRIACQLNAVVESGDVPAWMTYGRTVLCVKDRSKGNPASNFRPISCLPLMWKLLTGMLSEQLYEHVDTNNLLPSEQKGCRKKTRGTKDQLLIDRMVLKNCKRRHTNLAMAYVDYKKAYDMVPHSWILKSLQLIGAADNIMNALEKSMKKWQVQLNAADKVLGVVNVKRGIFQGDSLSPLLFVICLLPMSLILRKMKAGYSLGKNHPKLNHLLYMDDLKLFGQSKGDIESLVNTVHRFSCDIGMRFGIEKCGVIIMKRGKMVICDGIELPDGEKMKSVNEEGYKYLGIVELDGIKEKKMKERFTKEYKRRIKLILKSNLNSRNAVSAMNIWAVAVMRYGAGIVKWTKEELEKLDRQTRKIMTMNGALHPKSDVDRLYIARQRGGRGLQSVLETIQSEENSLRWYVKNSQEQLLKAVHEQQEMNNDISNPSEYKDQRRREREVKWHEKVMHGQFFRDTDGIVDRKKSWLWLKSGDLKKGTEALVMAAQEQAIRTNYVKHHIDKSRDSPTCRLCGEKGETVSHIICECSKLAQKEYKRRHDNVARIVHWEICKKYDLPRAEQWYNHKPEGVTANESIKVLWDFNINTDYEIEHRRPDIVVELKPEKECLIIDIAVPGDTRIKQKEQEKIEKYQELKREIARLWRLRKVSVIPVVVGALGCVTKEPEQYIEKIGIKIRTEVIQKTVLLGTARTLRKVLET

SEQ ID NO: 7867 - protein, 891 aa, Morbakka virulenta
MIIIIIIIIIIINNKRRIQLDINELRKTVGKLDRYARGQIKDVKKLEQIFKKYHVKKKGVHVVMEELKQRITAKAAKIDRYEKRINQFRISRVFSSNQKRVFVELNGEVIKENTIPNADDSRKFWSEIWDNPVEHNDDVEWLREIETELSGVNKQDNVRITVQDVRKQTGKMPNWKAAGPDGVQGYWLKNLSSLHDRIACQLNAVVESGDVPAWMTYGRTVLCVKDRSKGNPASNFRPISCLPLMWKLLTGMLSEQLYEHVDTNNLLPSEQKGCRKETRGTKDQLLIDRMVLKNCKRRHTNLAMAYVDYKKAYDMVPHSWILKSLQLIGAADNIMNALEKSMKKWQVQLNAADKVLGVVNVKRGIFQGDSLSPLLFVICLIPMSLILRKMKAGYSLGKNHPKLNHLLYMDDLKLFGQSKGDIESLVNTVHRFSCDIGMRFGIEKCGVIIMKRGKMVICDGIELPDGEKMKSVNEEGYKYLGIVELDGIKEKKMKERFTKEYKRRIKLILKSNLNSRNAVSAMNIWAVAVMRYGAGIVKWTKEELEKLDRQTRKIMTMNGALHPKSDVDRLYIARQRGGRGLQSVLETIQSEENSLRWYVKNSQEQLLKAVHEQQEMNNDISNPSEYKDQRRREREVKWHEKVMHGQFFRDTDGIVDRKKSWLWLKSGDLKKGTEALVMAAQEQAIRTNYVKHHIDKSRDSPTCRLCGEKGETVSHIICECSKLAQKEYKRRHDNVARIVHWEICKKYDLPRAEQWYNHKPEGVTANESIKVLWDFNINTDYEIEHRRPDIVVELKPEKECLIIDIAVPGDTRIKQKEQEKIEKYQELKREIARLWRLRKVSVIPVVVGALGCVTKEAEQYIEKIGIKIRTEVIQKTVLLKTTRTLRKVLET

SEQ ID NO: 7868 - protein, 1041 aa, Morbakka virulenta
MNQENISDNNVNGAGACIGEGSSFGRCPVDEQRRPGRYSVTVNRRGERINWRPFNKIVMECYYEGEPERRGFMKRMKRNWDDRGLFEVSTQRLLDQVRVIKTNEYLSKVELEEIRRKVKNRNNEEMQVSEQQDSNVSEQGINTENVETSEQERLGQLEVENEPTQGETELITSEFHILTDSELTEEQLEMIKIICELSKKKEKITNVSFRNADRKKLKEITSIVNKVLKYIMTDDVTKTNDLINAVAVYVRQWLGLKQRKDKVFQEPFWKRRIQLDINELRKTVGKLDRYARGQIKDVKKLEQIFKKYHVKKKGVHVVMEELKQRITAKAAKIDRYEKRINQFRINRMFSSNQKRVFVELNGEVIKENTIPNADDSRKFWSEIWDNPVEHNDDAEWLREIETELSGVNKQDNVRITVQDVRKQTGKMPNWKAAGPDGVQGYWLKNLSSLHDRIACQLNAVVESGDVPAWMTYGRTVLCVKDRSKGNPASNFRPISCLPLMWKLLTGMLSEQLYEHVDTNNLLPSEQKGCRKKTRGTKDQLLIDRMVLKNCKRRHTNLAMAYVDYKKAYDMVPHSWILKSLQLIGAADNIMNALEKSMKKWQVQLNAADKVLGVVNVKRGIFQGDSLSPLLFVICLIPMSLILRKMKAGYSLGKNHPKLNHLLYMDDLKLFGQSKGDIESLVNTVHRFSCDIGMRFGIEKCGVIIMKRGKMVICDGIELPDGEKMKSVNEEGYKYLGIVELDGIKEKKMKERFTKEYKRRIKLILKSNLNSRNAVSAMNIWAVAVMRYGAGIVKWTKEELEKLDRQTRKIMTMNGALHPKSDVDRLYIARQRGGRGLQSVLETIQSEENSLRWYVKNSQEQLLKAVHEQQEMNNDISNPSEYKDQRRREREVKWHEKVMHGQFFRDTDGIVDRKKSWLWLKSGDLKKGTEALVMAAQEQAIRTNYVKHHIDKSRDSPTCRLCGEKGETVSHIICECSKLAQKEYKRRHDNVARIVHWEICKKYDLPRAEQWYNHKPEGVTANESIEVLWDFNIDTDYKIEHR

SEQ ID NO: 7869 - protein, 1152 aa, Temnothorax curvispinosus
MVRPGRRARRRLSDGSSGGDSPPPITPANNPNNNNDIDLVFNNNNISLPLSNHTNVLDSTNVSEAVPLRRGDESGGAAGMRAEIRDTPGHPSVPVSVRGVMGRRPRARVTGGSGASEMTPPRANNRRRGGGGHRRRPQRVEAPPVQPSGGRPASAAAAKRSKEERAAVRDELAGRAEAVASIADLEEFAASVAAFFGEDATGVARGGAPGARDRPHRSREARARRGEGDRPGRDGGNDNRGPAPAGPPPSQSGEGSGGWVREATRIQALYRANRRKAVREVLQGSADFCQVPKERVQQYFEGLYCGGEDLAGPDVEAEQPTPPSQAGDAACLMDPFTWREVDRRVRRMTNSAPGPDGVTYRNLRAADSGMRLLTACYNACLRLEAVPASWKTSKTVLVYKKGDRDDLNNWRPLALGDTTPKLFAALIADRMTEWVIKNKKLSPVQKGFLRDEGCYEHNFVLQEILTHCRRTRRQVVVAWLDLSNAFGSIPHSTIHRAFVRAGVPGGCINIWRSMYDGCSTRVQTVDGLTAPIPVRSGVRQGCPWSPIGFNLGTDVLLRAANALDVGLELWGSRFNILAYADDIALVADTPEGMRRLLATVEAAALSVGLRFNPAKCATLHIGAGAGSRVLLTTFEIQGQPIHHLAEGEPYRHLGVPTRFSVDATPFQTIDGLLGGLRAVDRSLLTPWQRVEVVATHLLPRMDFLLRGAAVEKRPLIAADKLIRRAAKAWLNLPQRASAEPVYLPPSRGGCGLLPLADLADVLSVAHAFRMLTAGDETVRGLAWASLRGVVARRIGHPPTNEELASFLSGSLEGRMRDGGERSLWSRARNAARRQSERLSLRWEWCAATEEMMVVCRGARGATVKMPPGARSQVVHRLRSAVVEYYTDRLLNKPDQGKVFEVSLRARASNHFVRNGSFTRFADWRFIHRAKLDVLPLNGARRWGEPDKRCRRCGGAAETLPHVLNHCGVHSAAIQLRHDAVLHRLWKACRLPGDKRVNQRVEGVEGELEGLRPDLVVRHEPSKSVVICDVTVPFENRWQAFEDARERKLAKYSLLAEALQRKGYRVVVTAFVVGALGSWDPNNEGVLRLLRVGSAYATMMRRLIVSDTIRWSRDIYVEHVSGVRQYAAPSRLSADGIPATPPREIRRRWPTNE

SEQ ID NO: 7870 - protein, 1727 aa, Camponotus floridanus
MSASPQVVVLHYPFPARVYCPRCWRREDPEVRSRGEFCDPLHLAKHLKAKHPGDTITYECAECDFRGYGAYPVRPVKAHFKKEHATPRGRAGRSTDGANNSNNNVNYDGSSANARGRPAAGSAPGSSASAGASSRGRPSDSRQPGLRSTAPAPGTTAATPPATTTASTPATPPARTSPSYAAVTAAPGPSTCGTSSSAATTATTTAAVTGGTAAILDGATAGAPAAATTGLKAHPQRKGRLPLKRGAANRKSSPLASREARGSPRRPSGEANGPLRRTSVTSPTTISSARSRYDPRIRRSSGVPLEKSGATRSTRRPPLPSPESADDTPTFGGRGGERRRSPERTPPNIIRAGPRTRTRASASAAKCATEARAQARPSANNASRGPRRALEKKRRSPGAQPASTTRRAGTAVRDLSAALAPRATEGEGAQGTARMPPLQRGTMPPARPAPTPPQSIRGGPVGGQRSPLSPPAMPAVSSAPAALTTSTVTIVSCGSPVMSTGFPAGRRGTLPRSPHLPSVTEVSPCLVGRRMRREEERPLTPPREEERRHPEEVAQGSTEGEGDSGEEDEPWRVRLGRRARRRLSGGSPGGGSPVAAGRGPVPGLPPLQAPASLKSLMRPCTVQVQRTLVRAVSGDEAGVPPQGTSVEGASGVRAGRPGGPGGVGHPSAPVGVPGVMGRRRRGHATGCVGASGETPVGPRSSGGGRHPRGLRRVAGPSTQPYGGRSVPAAVAGLRRRRRVAARDVLVGRAEAVTSIADLEEFAASVAAFFGEEASGRVDGGASGVRDRPVRSREAGERRGEGGVSVGDGGGVRGERGSAPAGPPQSGEGRGGWVREATRLQALYRTNRRKAVREVLQGPVEFCQVPKDRVHAYFERLYRGGEDLDGSGAAEPTDPSVDGGEYAYLMDPFTEREVDRRLRRMTNSAPGPDGITYRDLRGADPGARLLTALFNACYRREAVPASWKTSNTVLVYKKGDRDSLENWRPLALGDTAPKLFAALIADRMTEWAVANNKLCPAQKGFLRDEGCFEHNFVLQEILTDARRTRRQAVVAWLDLSNAFGSVPHAAIRRALVRSGVPGGLVNIWNSMYDGCSTRVRTAEGYTTPVPIRSGVRQGCPLSPIVFDLAIDSVLRAVTAVDAGFDLLGSRHSIVAYADDIALVADTPEGMRRLLAVAEGAASSVGLRFNPAKCATLHLAAGSGDRVLPTTFDIQGQPVHRLASGEPYRHLGVPTGSSVDQTPFATIGGLLEDLRAVDQSLLAPWQKLELVATNILPRLDFLLRGATVEKKPLKAADLQVRRMAKSWLNLPQRASAEVVYLPPRVGGCGLLPLADLADILSVSHAFRMLTAGCDAVRSLAWASLRGVVARRIGGPPTNEDVAAFLSGSLEGRLRGGGESSLWSRARNAARRQSERLLLRWRWCEATEELMVECRGPRGDAVKVPPGARNQVVTRLRSAVAAYYFNSLISKPDQGKVFEVSSRAGVSNHFVRGGSFTRFADWRFIHRAKLDVLPLNGARRWGEADRRCRRCGLAAETLPHVLNHCGVHSAAIQLRHDAALHRLWKACRMPGDKRVNRRVEGIDGEPGGLRPDLVVRHEPSKCVVICDVAVPFENRWESFEEARARKVAKYSSLAEALQREGYRVVVTAFVVGSLGSWDPANEAVLRVLHIGSAYASLLRRLVVSDSIRWSRDIYVEHVSGVRQYAAPSRPSAGGVPATPPRAFRRRGPAEQERH

SEQ ID NO: 7871 - protein, 1216 aa, Formica selysi
MSTGYSAGRVTPSRPSPLPTIPEVSPREVVNRMRLETTPPTTSGQEQRRLPGAALPSPSSEDEGDSGGPWRRHVGRRARRRWSGSSSEGDSPAPVGLRRTPGHPPRTSANINTFLQATRPCSVVLERTLVSSIRGAAADTPHSGTSVEGAPGERAEASIAGHPSAQVDVRGVMGRRRGAPVPGGPGANDEALPVSRSGGGEHPRVPRRANRPPGLPSGGQPTPAVVARQHRRQRVAARDALVGRAEAVASIADLEELAAAVANFFGEDAARAVGGDAPRARDRPDRSREARVCRGEGRVPARDGDRRGPAPAGPQQSGEGRGGWVREATRLQALYRANRRKAVREVLQGPTESCQVPKQRVQAYFERLYCGGEHLDEPDAEVERADPLADAEESALLDPFTELEVDRRLRRMTNSAPGPDGVTYRDLRGADPGVRLLTAMFNACYRLEAVPASWKTSNTVLVYKKGDREVLDNWRPLALGDTTPKLFAALVADRLTDWAVHNNKLSPAQKGFLRDEGCFEHNFVLQEILTDARRTRRQAVVAWLDLSNAFGSVPHAVIRRALVRSGVPGGIVRTWQSMYEGCTTRVRAADGFTAPIPVRSGVRQGCPLSPIVFDLAIDSVLRAVTDVDAGFDLLGSRFSILAYADDIALVADTPEGMQRLLAAAEDGASSVGLRFNPAKCATLHIGAGAGSRVLPTTFEIQGQPVHPLANGEPYHHLGIPTGCSVDQTPFATIGGLLEDLRAVDRSLLAPWQKLEVVATNILPRMDFLLRGATVEKRPLKAADLEIRRKAKAWLNLPQRASAEVVYLPPKRGGCGLLPLADLADVLSVAHVFRMLTAGVETVRTLAWASLRGVVARRIGRPPTNEDVAAFLSGSQEGRLRDGGERSLWSTARNAARRQSERLSLRWEWCEATEKLLVGCRHPGGDTVKVPPGARNQVVTRLRSAVAAFYAGTLLRKPDQGKVFEVSSRAGVSNHFVRGGSFTRFADWRFIHRARLDVLPLNGARRWGEADRRCRRCGAAAETLPHVLGHCGVHSAAIQLRHDAVLHRLWKACRMPGEKRVNQRVEGIEGELGELRPDLVIRHERSKCVVICDVTIPFENRWESFDEARARKVAKYSPLAEELQRRGYRVVVTAFVVGALGSWDPRNEAVLRVLRIGNAYASMMRRLMVSDTIRWSRDIYVEHVSGVRQYAAPSRPSADGVLATPPRAIRRRWPTNA

SEQ ID NO: 7872 - protein, 805 aa, Formica exsecta
MTNSAPGPDGVTYRDLRGADPGVRLLTAVFNACYRLEAVPTSWKTSNTVLVYKKGDREVLDNWRPLALGDTAPKLFAALVADRLTDWAVNNNKLSPAQKGFLRDEGCFEHNFVLQEVLTDARRTRRQAVVAWLDLSNAFGSVPHAVIRRALVRSGVPGGIVRTWQSMYEGCTTRVRAADGFTAPIPVRSGVRQGCPLSPIVFDLAIDSVLRAVTDVDAGFDLLGSRFSILAYADDIALVADTPEGMQRLLAAAEDGASSVGLRFNPAKCATLHIGAGAGSRVLPTTFEIQGQPVHPLANGEPYHHLGVPTGCSVDQTPFATIGGLLEDLRAVDRSLLAPWQKLEVVATNILPRMDFLLRGATVEKRPLKAADLEIRRKAKAWLNLPQRASAEVVYLPPKRGGCGLLPLADLADVLSVAHVFRMLTAGDETVRALAWASLRGVVARRIGRPPTNEDVAAFLSGSQEGRLRDGGERSLWSTARNSARRQSERLSLRWEWCEATEKLLVGCRHPGGDTVRVPPGARNQVVTRMRSAVAAFYAGTLLRKPDQGKVFEVSSRASVSNHFVRGGSFTRFADWRFIHRARLDVLPLNGARRWGEADRRCRRCGAAAETLPHVIGHCGVHSAAIQLRHDAVLHRLWKACRMPGEKRVNQRVEGIEGELGELRPDLVIRHERSKCVVICDVTIPFENRWESFDEARARKVAKYSPLAEELQRRGYRVVVTAFVVGALGSWDPRNEAVLRVLRIGNAYASMMRRLMVSDAIRWSRDIYVEHVSGVRQYAAPSRPSADGVLATPPRAIRRRWPTNA

SEQ ID NO: 7873 - protein, 1490 aa, Formica selysi
MTAAILCSPRTSAAAMAHPQGNGGSSTKNGAANRRSPSYVASTGARKSPRRPSSGGETSARRAAGAPPTTTSQAGPVNSRNLRRSTSVPLMKSGASRPVRAPPRRSPAAESPSFGGLGGARRKTPERTPPMTSSGGPYTRSRTRASSVPVEKCATKTGPLARTSARGVPRGPPTSGRTTQGALPAMTSPAGTAVRNLSAALTLQASGGARGLVRTPTPQRGTPPPQVTPATPPSICGVCAGVIDLTTPPSLPAASGSATLTTQTVTTTTCGSPVMSTGYSAGRVTPSRPSPLPTIPEVSPREVVNRMRLETTPPTTSGQEQRRLPGAALPSPSSEDEGDSGGPWRRHVGRRARRRWSGSSSEGDSPAPVGLRRTPGHPPRTSANINTFLQATRPCSVVLERTLVSSIRGAAADTPHSGTSVEGAPGERAEASIAGHPSAQVDVRGVMGRRRGAPVPGGPGANDEAPPVSRSGGGEHPRVPRRANRPPGLPSGGQPTPAVVARQHRRQRVAARDALVGRAEAVASIADLEELAAAVANFFGEDAARAVGGDAPRARDRPDRSREARVCRGEGRVPARDGDRRGPAPAGPQQSGEGRGGWVREATRLQALYRANRRKAVREVLQGPTESCQVPKQRVQAYFERLYCGGEHLDEPDAEVERADPLADAEESALLDPFTELEVDRRLRRMTNSAPGPDGVTYRDLRGADPGVRLLTAMFNACYRLEAVPASWKTSNTVLVYKKGDREVLDNWRPLALGDTTPKLFAALVADRLTDWAVHNNKLSPAQKGFLRDEGCFEHNFVLQEILTDARRTRRQAVVAWLDLSNAFGSVPHAVIRRALVRSGVPGGIVRTWQSMYEGCTTRVRAADGFTAPIPVRSGVRQGCPLSPIVFDLAIDSVLRAVTDVDAGFDLLGSRFSILAYADDIALVADTPEGMQRLLAAAEDGASSVGLRFNPAKCATLHIGAGAGSRVLPTTFEIQGQPVHPLANGEPYHHLGIPTGCSVDQTPFATIGGLLEDLRAVDRSLLAPWQKLEVVATNILPRMDFLLRGATVEKRPLKAADLEIRRKAKAWLNLPQRASAEVVYLPPKRGGCGLLPLADLADVLSVAHVFRMLTAGVETVRTLAWASLRGVVARRIGRPPTNEDVAAFLSGSQEGRLRDGGERSLWSTARNAARRQSERLSLRWEWCEATEKLLVGCRHPGGDTVKVPPGARNQVVTRLRSAVAAFYAGTLLRKPDQGKVFEVSSRAGVSNHFVRGGSFTRFADWRFIHRARLDVLPLNGARRWGEADRRCRRCGAAAETLPHVLGHCGVHSAAIQLRHDAVLHRLWKACRMPGEKRVNQRVEGIEGELGELRPDLVIRHERSKCVVICDVTIPFENRWESFDEARARKVAKYSPLAEELQRRGYRVVVTAFVVGALGSWDPRNEAVLRVLRIGNAYASMMRRLMVSDTIRWSRDIYVEHVSGVRQYAAPSRPSADGVLATPPRAIRRRWPTNA

SEQ ID NO: 7874 - protein, 1697 aa, Formica selysi
MAQSPIEIVLTVPLEERVRCARCWGSGDRNVRSRGDFCDTQHLNRHLRKFHPGDTIAYVCSICNFKGTGAVPYRRVKDHFEKEHVPRTEVACRSTRGAQRTISNSGGLSGVRTRASAAAPSASASAGASSRSRTSSRPPTSHSTVTTSTNTTPATTTSSAGASRTSGAAGESPSYAAVTAAGPATRPPSSSLATTTPSAAILGSAAMTAAILGAARGTSDAAMAHPQGNGGSLTKNGAANRRSPSYVASTGARKSPRRPSSGGESSSRRAAGAPPTTISQAGSTNSRNLRRSTSVPLVKSGATRPVRAPPRRSPAADSPSFGGLGGARRTTPERTPPTTSSGGPYTRSRTRASSVPVEKCAPKTGPLARTSARGVPRGPPTSGRTTQGAMPAMTSTAGTAVRNLSAALTLQASGGARGLARTPTPQRGTPPPQVTPATPPSICGVCAGVIDLTTPPSLPAASGSATLTTATVTTTTCGSPVMSTGYSAGRVTPSRPSPLPTIPEVSPREVVNRMRLETTPPTTSGQEERRQQGAALPSPPSEDEGDSGGPWRRCVGRRARRRWSGSSSEGDSPAPVGLRRTPGHPPRTPANINTFLQATRPCSVVLERTLVRSIRGAVADIPPSGTSVEGAPGERAEASIAGHPSAQVDVRGVMGRRRGAPVPGGPGANDEAPPVSRSGGGEHPRVPRRAIRPPGLPSGGRPTPAVVTRQHRRQRVAARDALVGRAEAVASIADLEELAAAVANFFGEDAARAVGGDAPRARDRPDRSREARACRGEGRVPARDGDRRGPAPAGPQQSGEGRGGWVREATRLQALYRANRRKAVREVLQGPTESCQVPKQRVQAYFERLYCGGEHLDEPDAEVERADPLVDAEESALLDPFTEVEVDRRLRRMTNSAPGPDGVTYRDLRGADPGVRLLTAMFNACYRLEAVPASWKTSNTVLVYKKGDREILDNWRPLALGDTTPKLFAALVADRLTGWAVHNNKLSPAQKGFLRDEGCFEHNFVLQEILTDARRTRRQAVVAWLDLSNAFGSVPHAVIRRALVRSGVPGGIVRTWQSMYEGCTTRVRAADGFTAPIPVRSGVRQGCPLSPIVFDLAIDSVLRAVTDVDAGFDLLGSRFSILAYADDIALVADTPEGMQRLLAAAEDGASSVGLRFNPAKCATLHIGAGAGSRVLPTTFEIQGQPVHPLANGEPYHHLGIPTGCSVDQTPFATIGGLLEDLRAVDRSLLAPWQKLEVVATNILPRMDFLLRGATVEKRPLKAADLEIRRKAKAWLNLPQRASAEVVYLPPKRGGCGLLPLADLADVLSVAHVFRMLTAGDETVRTLAWASLRGVVARRIGRPPTNEDVAAFLSGSQEGRLRDGGERSLWSTARNAARRQSERLSLRWEWCEATEKLLVGCRHPGGDTVKVPPGARNQVVTRLRSAVAAFYAGTLLRKPDQGKVFEVSSRAGVSNHYVRGGSFTRFADWRFIHRARLDVLPLNGARRWGEADRRCRRCGAAAETLPHVIGHCGVHSAAIQLRHDAVLHRLWKACRMPGEKRVNQRVEGIEGELGELRPDLVIRHERSKCVVICDVTIPFENRWESFDEARARKVAKYSPLAEELQRRGYRVVVTAFVVGALGSWDPRNEAVLRVLRIGNAYASMMRRLMVSDTIRWSRDIYVEHVSGVRQYAAPSRPSADGVLATPPRAIRRRWPTNA

SEQ ID NO: 7875 - protein, 1216 aa, Formica selysi
MSTGYSAGRVTPSRPSPLPTIPEVSPREVVNRMRLETTPPTTSGQEERRQQGAALPSPPSEDEGDSGGPWRRCVGRRARRRWSGSSSEGDSPAPVGLRRTPGHPPRTPANINTFLQATRPCSVVLERTLVRSIRGAVADIPPSGTSVEGAPGERAEASIAGHPSAQVDVRGVMGRRRGAPVPGGPGANDEAPPVSRSGGGEHPRVPRRAIRPPGLPSGGRPTPAVVTRQHRRQRVAARDALVGRAEAVASIADLEELAAAVANFFGEDAARAVGGDAPRARDRPDRSREARACRGEGRVPARDGDRRGPAPAGPQQSGEGRGGWVREATRLQALYRANRRKAVREVLQGPTESCQVPKQRVQAYFERLYCGGEHLDEPDAEVERADPLVDAEESALLDPFTEVEVDRRLRRMTNSAPGPDGVTYRDLRGADPGVRLLTAMFNACYRLEAVPASWKTSNTVLVYKKGDREILDNWRPLALGDTTPKLFAALVADRLTGWAVHNNKLSPAQKGFLRDEGCFEHNFVLQEILTDARRTRRQAVVAWLDLSNAFGSVPHAVIRRALVRSGVPGGIVRTWQSMYEGCTTRVRAADGFTAPIPVRSGVRQGCPLSPIVFDLAIDSVLRAVTDVDAGFDLLGSRFSILAYADDIALVADTPEGMQRLLAAAEDGASSVGLRFNPAKCATLHIGAGAGSRVLPTTFEIQGQPVHPLANGEPYHHLGIPTGCSVDQTPFATIGGLLEDLRAVDRSLLAPWQKLEVVATNILPRMDFLLRGATVEKRPLKAADLEIRRKAKAWLNLPQRASAEVVYLPPKRGGCGLLPLADLADVLSVAHVFRMLTAGDETVRTLAWASLRGVVARRIGRPPTNEDVAAFLSGSQEGRLRDGGERSLWSTARNAARRQSERLSLRWEWCEATEKLLVGCRHPGGDTVKVPPGARNQVVTRLRSAVAAFYAGTLLRKPDQGKVFEVSSRAGVSNHYVRGGSFTRFADWRFIHRARLDVLPLNGARRWGEADRRCRRCGAAAETLPHVIGHCGVHSAAIQLRHDAVLHRLWKACRMPGEKRVNQRVEGIEGELGELRPDLVIRHERSKCVVICDVTIPFENRWESFDEARARKVAKYSPLAEELQRRGYRVVVTAFVVGALGSWDPRNEAVLRVLRIGNAYASMMRRLMVSDTIRWSRDIYVEHVSGVRQYAAPSRPSADGVLATPPRAIRRRWPTNA

SEQ ID NO: 7876 - protein, 1215 aa, unidentified
MSTGYSAGRVTPSRPSPLPTIPEVSPREVVNRMRLETTPTTSGQEERRQPGAALPSPPSEDEGDSGGPWRRHVGRRARRRWSGSSSEGDSPAPVGLRRTPGHPPRTSANINTFLQAMRPCSVVLERTLVRSIRGAVADIPPPGTSVEGAPGERAEASIAGHPSAQVDVRGVMGRRRGAPVPGGPGASDEAPPVSRGGGGEHPRVPRRANLPPGLPSGGQPTPAVVARQHRRQRVAARDALVGRAEAVASIADLEELAAAVANFFGEDAARAVGGGAPRARDRPDRPREARACRGEGRVPARDGDRRGPAPAGPQQSGEGRGGWVREATRLQALYRANRRKAVREVLQGPTESCQVPKQRVQAYFERLYCGGEHLDEPGAEVERADPLADAEESALLDPFTELEVDRRLRRMTNSAPGPDGVTYRDLRGADPGVRLLTAMFNACYRLEAVPASWKTSNTVLVHKKGDREVLDNWRPLALGDTTPKLFAALVADRLADWAVNNNKLSPAQKGFLRDEGCFEHNFVLQEILTDARRTRRQAVVAWLDLSNAFGSVPHAVIRRALVRSGVPGGIVRTWQSMYEGCTTRVRAADGFTAPIPVRSGVRQGCPLSPIVFDLAIDSVLRAVTDVDAGFDLLGSRFSILAYADDIALVADTPEGMQRLLAAAEDGALSVGLRFNPAKCATLHIGAGAGGRVLPTTFEIQGQPVHPLANGEPYHHLGIPTGCSVDQTPFATIGGLLEDLHAVDRSLLAPWQKLEVVATNILPRMDFLLRGATVEKRPLKAADLEIRRKAKAWLNLPQRASAEVVYLPPKRGGCGLLPLADLADVLSVAHVFRMLTAGDETVRSLAWASLRGVVARRIGRPPTNEDVAAFLSGSQEGRLRDGGERSLWSTARNAARRQSERLSLRWEWCEATEKLLVGCRHPGGDTVRVPPGARNQVVTRLRSAVAAFYAGTLLRKPDQGKVFEVSSRAGVSNHFVRGGSFTRFADWRFIHRARLDVLPLNGARRWGEADRRCRRCGAAAETLPHVIGHCGVHSAAIQLRHDAVLHRLWKACRMPGEKRVNQRVEGIEGELGELRPDLVIRHERSKCVVICDVTIPFENRWESFDEARARKVAKYSPLAEELQRRGYRVVVTAFVVGALGSWDPRNEAVLRVLRIGNAYASMMRRLMVSDTIRWSRDIYVEHVSGVRQYAAPSRPSADGVLATPPRAIRRRWPTNA

SEQ ID NO: 7877 - protein, 807 aa, Vollenhovia emeryi
MTNSAPGPDGLTYRDLRGADPGTRLLAALFNICVRLEVVPASWKTSNTVLVHKKGDRDDLDNWRPLALGDTMPKLFAAVLADRLTGWAVDQGKLSPAQKGFLRGEGCYEHNFALQEILTDARRRRRQAVPHATIRRAFVRAGVPRKVIEIWRSMYDDCTTRVNTVDGFTAPIPIRSGVRQGCPLSPITFDLAIDSVLRAATAVGAGYDLGGATWAVMAYADDIALVADTPEGMKRLLAAIEDEAASAGFRFNPAKCATLHIGAGRAGRVLPTRFVLQGQTVPCLAEGEPYRHLGVPTGFSVDQTPYSTIRGLLEDLQKVNRSLLTPWQRLEVVSTFLLPRLDFLLRGAAVGKRPLKEADLQIRRLAKSWLNLPQRASAEVVYLPPKWGGGGLLPLCDLADSLTVAHAFRILTAGDAAVRGLAWSSLRGVVQRRIGRVPEPEDIAAFLSGSMEGRLRGGGEASFWSDVRNAGRRQSERLSVRWRWVRETGEMTVGCRGLRGATVTVPPGARSQVTRMRSAVSLYYRETLVRKPDQGKVFEVSSRHAVSNHFMRGGSFTRFADWRFVHRARLDVLPLNGAIRWGSGDRRCRRCGAELESLPHVLGHCGVHAAAIQLRHDAVLHRLWKACRLPGEVRVNRRVEGVSDGLTGLRPDLVIRHEPSKCVVILDVTVPFENRAIAFEEARARKVIKYSALAEELRSQGYRVEVAAFVVGALGSWDPANEGVLDLLRVSKRYAGMMRRLMVSDTIRWSRDIYVEHVSGVRQYGAPPPPPEDGSLAEPPQAIRRRWPEALRGDDCGASRTLSMYAT

SEQ ID NO: 7878 - protein, 1733 aa, Atta cephalotes
MADPRVHCIDYPLPPKVKCVKCFGVEGAGKVKGEYSDPPHLAKHLKKCHPGDTLNYKCSICGLRGTGKYPLKEVKAHYNESHVSPAVDAAGPGTRGGLGECSGAGSSTAARAAGPAVRLAGTVGGADGRRAATTESRRLALPFGATPSPARAANGASAGHRTSTSKSPSYAAVTAGPSSVRSTTTSTIARSRTVARSAAPNTTRTTEARRSGEAAATRRPPTVSEPRALSVESVRLPVKEIQRAGVPNAAKPARAPSRPPQRTPLAGGPRTSIGAKEKCGEGAHKKLPANSNEPVSSRTRRATSVPVENSEGTARRERVFPHPPRHGIELILSSSSDEEGTPHQSGGVGRLRLRSGKATGPPPTITSREGVVRRSASAPVEKSAVHARLIALDRTSSRATGNPTSQFAGGLNTSGSPPERTPPARPPGMSPTARGGPSGSLGGIPTSTSPATSLPATLTTCTVTTTTCGSPITSTGFTGDVGKQTTPPLSLPRRNVLPTIGEEAMSPCATPPMGGRRASNPLNAPGPTTPEPERGQAERRQEGAARPSTTPIVEGDKQWGGQWTVCVGRRTRRRRLSEGLPSDSESPPVAGPSGSPRVAPLCALIAASASFHETSLSLGVANDSTCRDGTPPHGVLPIGAERRRGTSPRDRVGGDIGRGAGTEVSAGHPNAPVDVRGVMSRGRAAASSVVPPRADRGGGGQQHRGRRRSGTSAGQPSRDRPAPATVARRRRRERVAARDELLGRAKDVATIADLEAFAASVAAFFGEDASTIGAAARARGRSGRSREAGARRWVGVGARPGGEGAGRPGSAPADPGASGEARGEWVREAKRIQALYRANRRRAVREVLQGPADQCQVPKRQVQEYFERLYGGGEILAGSGVEAERPDPSSSHEATAVLGPLAEREVDRRLRRMNNSAPGPDGVSYRDLRGADRGARLLTALYNICLRLGAVPASWRTSNTVLIHKKGDRGMLENWRPLALGDTVPKLFAALLADRLTDWAVTRGKLCSAQKGFLRDEGCYEHNFVLQEVLTHAKRTGRPAVVAWLDLSNAFGSIPHATIRRALIRSAVPRGLIAIWDSMYDGCTTRVRTAEGHTAPILIRSGVRQGCPLSPIIFNLAIDSVVRVAAESSDGYSLHGSTWSALAYADDIALLARTPEGMERMLASVEAEAASVGLRFNPAKCATLHVGAGNGGRVLPTSFQIQGETISPLAQGESYAHLGIPAGFSVDRTPYAAVGDIVSDLRAVDRSLLAPWQKIETLGTFILPRLDFLLRGARVFKGPLTAVDLNIRRHVKSWLNLPQRAGAEGVYMPPRWGGCGLLPLSDLADVLTVAHAYRMLTVRDGAVRGLAWESLRGVVGRRIGNAPSCEDIASFLSGSLDGRMRGGGEASLWSSARNAALRQSGRLSLRWRWAEAAGEMTLECRGPRGAAIKIPPDARGQVVSRLRSAVAEHYAERLLSKPDQGKVFEVSSRSRVSNHFIRGGSFTRFADWRFIHKARLDVLPLNGARRWEANDRRCRRCGEVSETLPHVLCHCGIHSAAIRLRHDAVLHRLWRATRLPGVVRVNRRVEGIGGELEALRPDLVIRHEPSKSVVICDVTVPFENRWTAFEDARTRKIAKYSPLAEELQRRGYRVVVTAFVVGALGSWDPRNEAVLRLLRVGNQYAAMMRRLIVSDTIRWSRDIYVEHVSGIRQYLAPSRPSGDAHATPPRAVRRRWPAEDKDGRDAARRVSYVADVA

SEQ ID NO: 7879 - protein, 1749 aa, Monomorium pharaonis
MAMSGPTEFVFEYPLPPEWNDRARCPRCWAAREAGSHKESVTGDFCDMAHLAKHLKKKHPGDTIIYKCAFCNFRGTSKYPLKDVKIHIEKRHKSPAANAPCPSTRDSDRRSGESCGTGVRTRASGACAGPSGAARGARNTAPRDLRQPGLPFVPTPPPQTSRAATRTSATPPPVATESPSYAAVTAGSTRPRTTPPTTANTRRSTAAKSAAPTAAATTSARTAATTISTRCTVLSNERVSMPINRKTAAQPSTSRAGANYNKTTTRPASAAVSPPIAARSARAPSQPPQRKTPAAGAAGAPTTIRRSGEGAPRKSPLERPIASRTRRAASVPIEKSEPRRNAARPGRVPPHPPAEEISIHSSDGEGTPRNIGGAGATRKMTRKLPDRTPPSTSQGGAMTRTRSRAASVPVENSALESRRAALDRTSSRAMGSAASRSTGVSTRRTPAKQPPVRPPSLLPNTSDRPTGGPSERIPSLSPATSLPTTLTTCTVTTTTCGSPVMSTGLPAGGRQMSPRLPPLPTIVEASPCAAVMMRTPPKQRPPAPPRRESPEERKSAAPPTTPGSEGDEEEAWRVCLGRRAGRRRLPPTPPSDHESPLAACARTPPSASPKASANSRETASHRESLNLSDFNNNEITATSTQTVPPSATEAESCRRTSPDHEEADNRERTAQVGAVHPNAPVNVRGVMGRRRAAVPPSVPPREEGGAPPAPVCRHGGRGRHDGRRRVDVPAGQPPRGRPAPATVARQRRRERVAARDALVGRAEAVATIADLETVAVSVAAFFGEEASERTGRAAPGAQDRPDRSRNAGARRGARGGESLRREGANGAGPAPARPAASGEARGDWVCEAKRIQALYRANRRKAVREVLQGPAESCQVPIRRVQEYFEQLYSGHRENLAGAGVREANHTDPSGVAGEFSYLLDPFTQREVDRRLRRMNNSAPGPDGVSYRDLRGADPGAGLLSAVFNACLRLEAVPASWKTSNTLLIHKKGDQNVLENWRPLALGDTVPKLFAALLADRLTDWSIDHGRLSPAQKGFLRDEGCYEHNFVLQEVLNDARRTRRQAVVAWLDLSNAFGSIPHETIRHALTGAGVPRGLIAIWDSMYDGCTTRVRAADGFTAPIRIRSGVKQGCPLSPIVFNIAIDSVLRATTEFDDGYRLHGHRWSTLAYADDIALLSSTPEGMRRLLNAVEKEAASVGLRFNPAKCATLHIGAGNGGRVLPTSFRIQGQPMRPLLEGESYEHLGVPTGFSVDQTPYATVGDIVSDLQAVDRSLLAPWQKFDVMATFILPRLDFLLRGARVLKRPLAAVDKTIRRYAKSWMNLPQRASAEGVYMPPKWGGCGLLPLSDLADVLSIAHVFRMLTVRDAAVRTLAWESLRGVVHRRIGHVPSCEDIASFLSGSLEGNLRDGGEASLWSRARNAARRQSERLLLRWRWVEETEEMILECRGPRGAAIKIPPGARDQVVGRLRSAVAEHYASTLLAKKDQGKVFEVSSRCRVSNHFIRGGSFTRFADWRFIHKARLDVLPLNGARRWGEGDKRCRRCGEVSETLPHVLCHCGVHSAAIQLRHNAALHRLWRACRLPGEKRVNQRVEGIDGELGELRPDLVIRHEPSKCVVICDVTVPFENRWQAFEDARARKIAKYSPLAEELQRRGYRVVVTAFVVGALGSWDPRNEAVLRLLRVGAPYASMMRRLIVSDTIRWSRDIYVEHVSGIRQYEAPPHVAGGGLATPPQAVRRRWLAGELEQRRVAYPNV

SEQ ID NO: 7880 - protein, 1741 aa, Monomorium pharaonis
MSGPAEFVFEYPLPPEWNNRARCPRCWAAREAGSHKESVTGDFCDMAHLAKHMKKKHAGDTILYKCAYCNFRGTTKYPLKDVKIHLEKHHKSPAAGAPCPSTRDSDRRSGESCGTGVRTRASGACAGPSGAARGVRNTAPRDLRQPGLPFVPTPPPQTSTTATRRSATPTSVAAESPSYAAVTAGNTRPRTTPPTTIGARRSTAAKSAAPIATTSARTAAMTTSTRCTVLSNEKVNMPINKKTAAQPSTSRAGANSNKINTRPASAAVSPPIAARSARAPSQPPQRKTSAAGAGGAPTTTRRSGEGAPRKSPLERPIASRTRRAASVPIEKSEPRRNAARPGRVPPHPPAEEISIHSSDGEGTPRNIGGAGATGKSTRKLPDKTPPSTSQGGAVTRTRSRAASVPVENSALESRRAALDRTSSRAMGSAASRSTGVSTRRTPAKQPPVRPPSLSPNTSDRPTGGPSERIPSLSPATSLPTTLTTCTVTTTTCGSPVMSTGLPAGGRHISPRLPPLPTIAEASPCAAVMMRTPPKQRPSAPPRRESPEERKSAAPPTTPGSEGDEDSAWRVHLGRRAGRRRLPPTPPSDSESPLAVRARTPPSASSKASASSRENASHRESLNLSDFNNNAITATSTQSVPPPTTEAESCRETSPDREEADNRERTAQVGAVHPNAPVNVRGVMGRRRAAAPPSVPPREEGGAPPAPVCRHGGRGRRDGRRRVDVPAGRPPRDHPAPATVARQRRRERVAARDALVGRAEAVATIADLETVAVSVAAFFGEEAAERTGRAAPGAQDRPTRSRNAGARRGARGGESLRREGADSAGPAPARPAASGEARGDWVCEAKRIQALYRANRRKAVREVLQGPAESCQVPIRRVQEYFEQLYSGHRENLAGAGVREANHTDPSDVAGEFSYLLNPFTQREVDRRLRRMNNSAPGPDGVSYKDLRGADPGAGLLSAVFNACLRLEAVPASWKTSNTLLIHKKGDQNVLENWRPLALGDTVPKLFAALLADRLTDWSIDHGRLSPAQKGFLRDEGCYEHNFVLQEVLNDARRTRRQAVVAWLDLSNAFGSIPHETIRHALTGAGVPRGLIAIWDSMYDGCTTRVRAADGFTAPIRIRSGVKQGCPLSPIVFNIAIDSVLRATTEFDDGYRLHGHRWSTLAYADDIALLSSTPEGMRRLLNAVEREAASVGLRFNPAKCATLHIGAGNGGRVLPTSFRIQGQPMRPLLEGESYEHLGVPTGFSVDQTPYATVGDIVSDLQAVDRSLLAPWQKFDVMATFILPRLDFLLRGARVLKRPLTAVDKTIRRYAKSWMNLPQRASAEGVYMPPKWGGCGLLPLSDLADVLSIAHVFRMLTVRDAAVRTLAWESLRGVVHRRIGHVPSCEDIASFLSGSLEGNLRDGGEASLWSRARNAARRQSERLLLRWRWVEETEEMILECRGPRGAAIKIPPGARDQVVGRLRSAVAEHYASTLLAKKDQGKVFEVSSRCRVSNHFIRGGSFTRFADWRFIHKARLDVLPLNGARRWGEGDKRCRRCGEVSETLPHVLCHCGVHSAAIQLRHNAALHRLWRACRLPGEKRVNQRIEGIDGELGELRPDLVVRHEPSKSVVICDVTVPFENRWQAFEDARARKIAKYSPLAEELQRKGYRVVVTAFVVGALGSWDPRNEAVLRLLRVGAPYASMMRRLIVSDTIRWSRDIYVEHVSGIRQYEAPPHVEGGGLATPPRAVRRRWLAGEIEQRRAA

SEQ ID NO: 7881 - protein, 1692 aa, Odontomachus brunneus
MAEDRPEVVVIPFPVPERITCPRCWAGCRRVPAKGDKGTFSDGLHLARHQKTFHPGDTLTYECSICGYRAPHGKKYPQKWVKDHYEKEHSVARGMAPAARRSSPRVPATTTTSAVASPVSAATSSPFTASAVPSASVARAGTSGVRTRTRAAPEPASEGEGRLTRGAATRGTALSTRTPLTATTTRTLRSTRSTAALRPPPPTRRTSTTPSPSAYTAARPGGSAVSPSYAAVTRAPATRTASSRTTAGVPRAAILETPTAPLHTETTPVSRAGAATNCAPRDRAATRESEPAGAFSRVGVLRDFYESPPDSRPPSVPQEWFSPPQDGADPRRVSSAATTAAMSRVTPTGGCSRASQGGSPLIPPCTVGARSSLITHMSPVTPPNIRGVFVAAAGGSPPCLPAYTPVSCAPATLTTATVVTAAAGSPVMSTGLPGARGGYFSPPVSRFTPPAHTSPPTAAIVAGPRFTTAGSPGAPATRPRATGSALCEAEVPSRRALRPRPAQRTTTTTTTTTTIRGGVVDDTTSSSGSEGGGAVGGGTAVDSEEEEWTVAEGRAARRRARRARLSSSDEASGTEARAAPSPPPITVANYPPLLGVAARSTGSERTLPAGPAEDATRRGVAGECVAVHSGAPRDVRGVMGRRGTRASVGEGRPGRMGATAVPASRARGGARPPAIPRSPPAAAGREPVAAPVAPLTARQKTAERRRLVAAADSAGTLADLERLMTQVVGFFGGREQGGGVPRPRGRSVRSREAGDNARGAGRAGDGARREGASAPAERPLFDRESRAETGREAARLQALFRKNRRKAVREVLSGPADTCDVSTQRVSEYFRGVYCGAGSLNGAAPAELPEASGDDEIAAELIRPITEREVDRRLRRMNNSAPGPDGLTYRDLRVSDPTARLLVAVFNACLRLEAVPARWKTSNTVLVYKKGNRDMLENWRPLALGDTIPKLFAAVLADRLTDWAIANRKLSPAQKGFLRDEGCYEHNFVLQEILTDARRDRREVVVAWLDLSNAFGSVPHDTIRRALVRAGVPRSLIAIWGSMYDGCTTRVRTRDGFTAPIPIRSGVRQGCPLSPIVFDLVIDSVLRAVTETGLGVELLGSRWSVMAYADDLVLVSRTPGEMRRLLAVAEGEASSIGLRFNPAKCATLHVGAGRGGRVLSTTFVIQGRTVKSLAEGEAYEHLGIPTGFSVNQTPNAAMLALGEDLRAIDRSLLAPWQKSEAVATFLLPRLDFLLRGARVEKRPLIALDLQIRRLVKGWLNLPQRASAEVVYLPPSRGGCGLLPLADLADVLTIAHVFRLLTADDRAVRDLAWASLRAVVRRRIGTHPTCGDVAAFLSGSLEGRLRVGGESSLWSSARNAARRQSERLAIRWLWCEEREEFVLQCRGPRGRVTKIPPGARAQVIGRLRAAVAEWYTYTWITKPDQGKVFEVSSRARVSNHFMRGGSFTRFADWRFVHRARLDVLPLNGARRWGEGDRRCRRCGEVAETLPHVLCHCGPHSAAVQWRHDSILLRLRKACRLPGSITVNQRVRGLEGELGALRPDLVVRHEPSKSVVICDVTVPFENRWAAFDEARARKVAKYSPLAEALQRRGYRVVVTAFVVGALGSWDPRNEPVLELLRVSKAYGAMMRRLMVSDTIRWSRDIYVEHVSGVRQYEAPPRPVDGSVPEVSPPRAVRRRVTGARADGGGESSRA

SEQ ID NO: 7882 - protein, 1692 aa, Odontomachus brunneus
MAEDRPEVVVIPFPVPERITCPRCWAGCRRAPAKGDKGTFSDGLHLARHQKTFHPGDTLTYECSICGYRAPAGKKYPQKWVKEHFEKEHSVARGMAPAARRSSPRVPATTTTSAVASPVSAATSSPCTASAVPSASVARAGTSGVRTRTRAAPEPASEGEGRLTRGAATRGTALSTRTPHAATTTRTLRSTRSTAALRPPPPTRRTSTTPSPSAYTAARPGGSAVSPSYAAVTRAPATRTSTSRTAAGVPRAAILVETRAPLHTETTPVSRAGAATNCAPRDRAATRESEPAGAFSRVGVLRDFYESPPDSRPPSVPQEWFSPPQDGADPRRVSSAATTAAMSRVTPTGGCSRASQGGSPLIPPCTVGARSSLITHMSPVTPPNIRGVFVAAAGGSPPCPPAYTPVSCAPATLTTATVVTAAAGSPVMSTGLPGARGGYFSPPVSRFTPPAHTSPPTAAIVAGPRFTTAGSPGAPATRPRATGSALCEAEVPSRRALRPRPAQRTTTTTTTTTTTRGGVVDDTTSSSGSEGGGAVGGGTAVDSEEEEWTVAEGRAARRRARRARLSSSDEASGTEARAAPSPPPITVANYPPLLGVAARSTGSGRTLPAGPAEDATRRGVAGECVAVHSGAPRDVRGVMGRRGTRASVGEGRPGRMGATAVPASRARGGARPPAIPRSPPAAAGREPVAAPVAPLTARQKTAERRRLVAAADSAGTLADLERLMTQVVGFFGGREQGGGVPRPRGRSVRSREAGDNARGAGRAGDGARREGASAPAERPLFDRESRAETGREAARLQALFRKNRRKAVREVLSGPADTCDVSTQRVSEYFRGVYCGAGSLNGAAPAELPEASGDDEIAAELIRPMTEREVDRRLRRMNNSAPGPDGLTYRDLRVSDPTAQLLVAVFNACLRLEAVPARWKTSNTVLVYKKGNRDMLENWRPLALGDTIPKLFAAVLADRLTDWAIANRKLSPAQKGFLRDEGCYEHNFVLQEILTDARRDRREVVVAWLDLSNAFGSVPHDTIRRALVRAGVPRSLIAIWGSMYDGCTTRVRTRDGFTAPIPIRSGVRQGCPLSPIVFDLVIDSVLRAVTETGLGVELLGSRWSVMAYADDLVLVSRTPGEMRRLLAVAEGEASSIGLRFNPAKCATLHVGAGRGGRVLSTTFVIQGRTVKSLAEGEAYEHLGIPTGFSVNQTPNAAMLALGEDLRAIDRSLLAPWQKSEAVATFLLPRLDFLLRGARVEKRPLIALDLQIRRLVKGWLNLPQRASAEVVYLPPSRGGCGLLPLADLADVLTIAHVFRLLTADDRAVRDLAWASLRAVVRRRIGTHPTCGDVAAFLSGSLEGRLRVGGESSLWSSARNAARRQSERLAIRWLWCEEREEFVLQCRGPRGRVTKIPPGARAQVIGRLRAAVAEWYTYTWITKPDQGKVFEVSSRARVSNHFMRGGSFTRFADWRFVHRARLDVLPLNGARRWGEGDRRCRRCGEVAETLPHVLCHCGPHSAAVQWRHDSILLRLRKACRLPGSITVNQRVRGLEGELGALRPDLVVRHEPSKSVVICDVTVPFENRWAAFDEARARKVAKYSPLAEALQRRGYRVVVTAFVVGALGSWDPRNEPVLELLRVSKAYGAMMRRLMVSDTIRWSRDIYVEHVSGVRQYEAPPRPVDGSVPEVSPPRAVRRRVTGARADGGDDGSRA

SEQ ID NO: 7883 - protein, 1235 aa, Camponotus floridanus
MRVPRDVHGVPRGEAGHAAPSHLPPITEVSPCLVGRRMRREEERPLTPSRVEERRHPKEVAQGSTEGEGDSGEEDEPWRVRLGRRARRRLSGGSPGGGSPAAAGRDPVPGLPPLQAPANLNSLMRPYTVQVQRTLIRAVSGDGAGVPPQGTSVEGASGVRAGRPGGPGGVSHPSAPEGVPGVMGRRRRGHAAGGVGAGRETPAGPRSSGGGRHLRGLRRAAGPSAQPYGGRSVPAAVAGLRRRRRVAARDVLVGRAEAVTSIADLEEFAASVAAFLGEEASGRVDGGASGVRDRPVRSREAGERRGEGGVLVGDGGGVRGERGSAPAGPLQSGEGRGGWVREATRVQALYRTNRRKAVREVLQRPVEFCQVPKDRVHAYFERLYRGGEDLDGSSAGAEPTDPSVDGGEYAYLMDPFTEREVDRRLRRMTNSAPGPDGITYRDLRGADPGARLLTALFNACYRLEAVPAFWKTSNTVLVYKKGDRDSLENWRPLALGDTAPKLFAALIADRMIEWAVANNKLCPAQKGFLRDEGCFEHNFVLQEVLTDARRTRRQAVVAWLDLSNAFGSVPHAAIRRALVRSGVPGGLVNVWNSMYDGCSTRVRTAEGYTTPVLIRSGVRQGCPLSPIVFDLAIDSVLRAVTAVDVGFDLLGSRHSIVAYADDIALVADTPEGMRRLLAVAEGAASSVGLRFNPAKCATLHLAAGSGDRVLPTTFVIQGQPVHCLASGEPYRHLGVPTGSSVDQTPFVTIGGLLEDLRAVDQSLLAPWQKLELVATNILPRLDFLLRGATVEKKPLKAADLQVRRMAKSWLNLPQRASAEVVYLPPRVGGCGLLPLADLADILSVSHAFRMLTAGCDAVRNLAWASLRGVVARRIGGPPTNEDVAAFLSGSLEGRLRGGGESSLWSRARNAARRQSERLLLRWRWCEATEELIIECRGPRGDVVKVPPGARNQVVTRLRSAVAAYYFNSLISKPDQGKVFEVSSRAGVSNHFVRGGSFTRFADWRFIHRAKLDVLPLNGARRWGEADRRCRRCGLAAETLPHVLNHCGVHSAAIQLRHDAALHRLWKACRMPGDKRVNRRVEGIDGEPGELRPDLVVRHEPSKCVVICDVAVPFENRWESFEEARARKVAKYSSLAEALQREGYRVVVTAFVVGSLGSWDPANEAVLRVLHIGSAYASLLRRLVVSDSIRWSRDIYVEHVSGVRQYAAPSRPSAGGVPATPPRAFRRRGPAEQERH

SEQ ID NO: 7884 - protein, 1708 aa, Cyphomyrmex costatus
MADPREHNFLYPLPTQVQCKHCFGVAGAASRGVFSDTAHLAKHLKKCHAGDFISYACSRCSFKGVSRYPLKSVKAHYEQSHKSPARNAPCTGTRGTLGVRNSGDQSASSAVHRAATRLAETTNTANRRPSAHLRQPTLPFRATPPSTSSVEARSPSLSPSFAAVTAGTSRGTMTSTAARGTAASRAAPNRTTATTAARQSGDAAATRMPPATAAVSGPRVVSVNITRLPDSQLRRIGVRNNTSARAPSHPPQITPPTAGAMRTRCGEGATRKLPARTSPPVSARTRRATSVPIEHREGTARRERVSPHPPPLVNLSSDSEEGTPRNIGGAGRLRRKVTAPPPASTNYAGVTTRSRRSTSAPIENSALQARLSALDRPSSSASGNATSRRAGGQNVTLRSPPLRIPPAQPLSLPPTTRGSPSGGYVSPATSLPTTLTTCTVTTTTCGGSIPSTGFAGGRGRHSTSPSLPLNFLPTIGEEISSPCVAATFSPTGGYQGSPRMSPRPSTSAPERGQQEQRRREGAARPSLSPVVEGDNQWGGVWTVSVGRRARRRRLNAITESPPSSPESPPIASNNIVSPTSAAPLSALIVASMDAHNRTLSLGKTPSPAQRPIGAERRRETSLEDHAGGDNRYGTGNEVGAVHSSAPLYARGVMPRGRCAPSSVVPPRVAREEGDRQRRGRQRVEDARGGPSRGQPAPATVARQRRRERVAARDALVSRAEAVASIADLEEFATSVADFFREDASAPGAAGRARDRPVRPRGAGARRVARGGERAVREGADRPGPATADSGPSPMDGGDWVREAKRIQALYRANRRRAVREVLQGPADQCQVPKRQVQEHFERVYSGGEDLASAGVDAERADPSSSQEEFAELLDPFTEREVDRRLRRMNNSAPGPDGVSYRDLRGADPGAQLLATMFNICLRLEAVPAAWRTSNTVLIYKKGDRDVLENWRPLALGDTVPKLFAALLADRLTDWAVAHGRLSSVQKGFLRDEGCYEHNFVLQEILTHAKRTRRQAVVAWLDLSNAFGSIPHASIRRALVRSAVPRSLIAIWDSMYDGCTTRVRTSEGHTAPISIRSGVRQGCPLSPIIFNLAIDSVVRAAAEADDGYSLHGNTWSALAYADDIALLSETPEGMERLLAAVEAEAASVGLRFNPAKCATLHIGAGNGGRVLPTRFRIQGGEINPLAEGESYAHLGVPTGFSVDQTPYAAVGDIVSDLSAIDRSLLAPWQKVEILGTFILPRLDFLLRGARVVKGPLKAADLNIRRHVKSWLNLPQRASAEGVYMPPRWGGCGLLPLSDLADILTVAHVFRMLTMRDDAVRELAWESLRGVVGRRIGHAPSCEDIASFLSGSLEGRMRGGGEASLWSSARNAALRQSERLSLRWRWVRETEELLLECLGPRGAAVKIPPDARGQVVNRLRSAVAEHYAQRLRSKPDQGKVFEVSSRSRVSNHFMRGGSFTRFADWRFIHKARLDVLPLNGARRWGGEDRRCRRCGEVSETLPHVLCHCGVHSAAIQLRHDAVLHRLWKASRLPGVVRVNQRVDGVDGELAGLRPDLVVRHEPSKSVVICDVTVPFENRWQSFDDARARKIAKYSPLAEELQRQGYRVVVTAFVVGALGSWDPRNEAVLKLLRVGSPYAAMMRRLVVSDTIRWSRDVYVEHVSGIRQYLAPPRASGDGLATPPRAVRRRWNAEERRAQDATRRVSLDMNAA

SEQ ID NO: 7885 - protein, 1095 aa, Pogonomyrmex californicus
MSAGSAAGEWHTPAVRHSPPLSARGTSPCTAVVRRTPPAPTPPSAEGAAARRQRGAATTTPPPATSEADQLGGEWRVQLGRRARRRRSSGGSVGSVSPATSGPRESRVTPPPASATDGNNNERTAHKVPPTSEAAVCCGTSLAEREGDTRDGTGDEVSAVHPCAPVNIRGVMARRRAQASVVAPREEGGASPASAGGRGSGRRGREPRRADVAGGQPSRRQPAPVPAAMRVRRERLAVRDELAARAPAVATRAELEAFATEVAAFFGEVVADRARGAAAGSQDRPAQSHGAGSRRGARGGVGPEGEGASGEGSAPAGPSASGEARGDWVREAKRLQALYRANRRKAVREVLQGPADSCQVPRRQVQEYFERLYRGEEILAGSGVEAERTDPSGSQEEFAYLLDPFTEREVDRRLRRMNNSAPGPDGVTYRDLRGADPGTRLLTAMCNCCLRLEAVPASWKTSSTVLVYKKGDRGMLENWRPLALGDTVPKLFAAILADRLTDWAVANRRLSPAQKGFLRDEGCFEHNFVLQEALTDARRSRRQAVVAWLDLSNAFGSIPHATIRRALAGAAVPKGLINIWGSMYDGCTTRVRTAEGFTAPIPIRSGVRQGCPLSPIIFDLAIDSVLRAATDVDAGYHMFDSKFSVLAYADDIALLTETPESMRRLLNAVEAEAASVGLRFNPAKCATLHIGTGGCGRVLPTSFSIQGQPVRHLAEGEPYTHLGVPTGFSVDQTPYATIGDLLSDVRAVDRALLAPWQKCDIVGTFILPRLDFLLRGASVEKRPLTAADLAIRRFAKSWLNLPQRASAEGVYMPPRWGGCGLLPLADLADVLSVAHVFRMLTAGDATVRRLAWESLTGVVQRRIGHAPGCEDIAAFLSGSQEGRLRGGGEKSLWSRARNAARRLSERLSLRWRWVPETGEMIVECRGPRGAAVKISPGARNQVVNRLRSAVAEHYAERLLNKPDQGKVFEVSSRVPVSNHFIRGGSFTRFADWRFVHRARLDVLPLNGARRWGDGDKRCRRCGEVSETLPHVLGHCGVHAAAIQLRHNAVLHRLWKACRLPGDKRVNQRIEGIDGELGELRPDLVVRHELSKSVVI

SEQ ID NO: 7886 - protein, 1136 aa, Acromyrmex insinuator
MRRRARRRQLLDTSPSNSESPPTAGPSRSPRIAPLSALIVASTNRHETSLNLNIKNDNNCMDRTPPRTVTPPRNVLPIGAERRRETSPRDRVGGDNGHGAGKVSAEHPNAPINVRGVMSRGRATASSIVPPRANHGEGGRQHHGRRRLDALVGQPSRDHPTPTTVARQRRRERGTARDALLDRAKDVASIADLEAFAASVAAFFGEDASATGAAARARDRSVRSREAGARRGGRGGERPGREGASGPGSAPADPGASGEARGDWVREAKRLQALYRANRRRAVREVLQGPADQCQVPKRQVQEYFERLYSGGEDLAGAGVEVERPDPSSPCEVSAVLGPLAEREVDRRLRRMNNSAPGPDGVSYRDLRGADRGARLLTALYNICLRLEAVPASWKTSNTVLIHKKGDRGMLENWRPLALGDTVPKLFAALLADRLTDWAVTRGKLCSAQKGFLRDEGCYEHNFVLQEVLTHAKRTKRQAVVAWLDLSNAFGSIPHATIRRALIRSAVPRGLIAIWDSMYDGCTTRVRTAEGHTAPIPIRSGVRQGCPLSPIIFNLAIDSVVRAAAEADDGYSLHGNTWSALAYADDIALLAQTPEGMGRMLASVEAEAASVGLRFNPAKCATLHIGAGNGGRVLLTPFQIQGETINPLAQGESYTHLGVPTGFSVDQTPYAAVGDIVSDLRAVDRSHLAPWQKIETLGTFILSRLDFLLRGVRVFKGPLTAVDLNIRRCVKSWLNLLQRASVEGVYMPPRWGGCGLLPLSDLADVFTVVHAYRMLTVRDGVVRGLAWESLRGVVGRRIGHAPGCKDIASFQSGSLDGRMRGGGEASLWSSVRNAALRQSERLSLRWRWVEATEEMTLECRGPKGAAVKIPPGARDQVVGRLRSAVAEHYANRLLSKPDQGKVFEVSSRSEQSFYPLRGGSFTRFADWRFIHKARLDVLPLNGARRWEANDKRCRRCGEVSETLPHVLCHCGIHSAAIQLRHDAVLHRLWKATRLPGVVRVNQRVEGVSDELGALRPDLVVRHEPSKSVVICDVTVPFENRWTAFEDARARKIAKYSPLAEELQRRGYRVVVTAFVVGALGSWDPRNEAVLRLLRVGNQYAAMMRRSLSRIPFERFVGAGSPRREAHRTRRVAVRIV

SEQ ID NO: 7887 - protein, 1210 aa, Harpegnathos saltator
MSGQGHQGRPPAHRREEEEGRAAAPFREGRPYGRARRGPRRGRPLSIRRTRVAGTATTRRVPTVAARGRSPPQGSRGEGRTARVRSSDEEATSAASWAALEPPPLTEANFPPLAGAGAARGGGTSPVRRVEETRARDTGEGSAGDGSGPREVRGVMGRRGAPASVDARPNAIRATAAPGSRAGGGATRLARAPRNPPMAARGPRDARDAAPNVERRTGRQLAVERTRLVDAADSVATLAELEDLAIQVARFFGGGGPGRDAPRARRPPPRRLREADEERRGERDAREGGRQGELAPANVPDFFGEDGRNRTREAVRIQALFRRNRRRAVREVLAGPAEVCDLPTDMVQAHFEELYRGGDDLRGAEPAERADVPGEDGGAAALVEPFAEREVCCRLRRMNNSAPGPDGITYKDLRAADPSARLLVALFNACLRLEAVPAVWKTSNTVMVYKKGDRGNINNWRPLALGHTLPKLFAAVLADRITEWCVVSGKLSPAQKGFLRGEGCFEHNFVLQEILTDARRSRREVVVAWLDLSNAFGSVPHGAIRRALVRAGAPAGLIAVWGSLYDGCTTRVRTADGFTAPIHIRSGVRQGCPLSPIVFDLAIDSVLRAVTAVGLGVELLDLRWSVMAYVDDLVLVSRTPDEMERLLAVAMNEASSVGLRFNPAKCATLHIGAGGAGRVRPTTLRIQGQPVRAMAEGEAYEHLGIPTGFGVNQTPHAAIRVLRDDLASVDRSLLAPWQKTETVATFLLPRLDFLLRGAAVEKGPLKELDLQIRRSCKMWLNLPQRASAEVVYMPPRKRGCGLLPLADLADVLSVAHVFRLLTVDDRAVRDLAWASLRGVVARRIGHPPGCDQIAAFLSGSLEGGLRGGGERSLWSRARNAARHQSDRCTIRWLWSEERRELVLQCRGPRGRITKVSPGARAQVIGRLRAAVAEWYDTTLSRKPDQGKVFEVSSRHRVSNHFMRGGSFTRFADWRFIHRARFDVLPLNGARRWGEGDRRCRRCGAESETLPHMVCHCGPHSAAIQWRHDSILLRLSRACRLPGDVTVNRRVECIDGELGELRPDLVIRHEPSKSVVICDVTVPFENRPIALEEARERKLAKYAPLAEALGRLGYRVVVTAFVVGALGSWDPRNEPVLRLLRIGSTYASMMRRLIVSDTIRWSRDIYVEHVSGVRQYRAPPRRADGSVPDVSPPRTISRRVAGPRADEATGI

SEQ ID NO: 7888 - protein, 1354 aa, Odontomachus brunneus
MSRVTPTGGCSRASQGGSPLIPPCTVGARSSLITHMSPVTPPNIRGVFVAAAGGSPPCPSAYTPVSCAPATLTTATVVTAAAGSPVMSTGLPGARGGYFSPPVSRFTPPAHTSPPTAAIVAGPRFTTAGSPGAPATRPRATGGALCEAEAPSRRALRPRPAQRTTTTTTTTTTTRGGVVDNTTSSSGSEGGGAVGGGTAVDSEEEEWTVAEGRAARRRARRARLSSSDEASGTEARAAPSPPPITVANYPPLLGVAARSTGSGRTLPAGPAEDATRRGVAGECVAVHSGAPRDVRGVMGRRGTRASVGEGRPGRVGATAVPASRARGGARPPAIPRSPPAAAGREPVAAPVAPLTARQKTAERRRLVAAADSAGTLADLERLMTQVVGFFGGREQGGGVPRPRGRSVRSREAGDNARGAGRAGDGARREGASAPAERPLFDRESRAETGREAARLQALFRKNRRKAVREVLSGPADTCDVSTQRVSEYFRGVYCGAGSLNGAAPAELPEASGDDEIAAELIRPITEREVDRRLRRMNNSAPGPDGLTYRDLRVSDPTAQLLVAVFNACLRLEAVPARWKTSNTVLVYKKGNRDMLENWRPLALGDTIPKLFAAVLADRLTDWAIANRKLSPAQKGFLRDEGCYEHNFVLQEILTDARRDRREVVVAWLDLSNAFGSVPHDTIRRALVRAGVPRSLIAIWGSMYDGCTTRVRTRDGFTAPIPIRSGVRQGCPLSPIVFDLVIDSVLRAVTETGLGVELLGSRWSVMAYADDLVLVSRTPGEMRRLLAVAEGEASSIGLRFNPAKCATLHVGAGRGGRVLSTTFVIQGRTVKSLAEGEAYEHLGIPTGFSVNQTPNAAMLALGEDLRAIDRSLLAPWQKSEAVATFLLPRLDFLLRGARVEKRPLIALDLQIRRLVKGWLNLPQRASAEVVYLPPSRGGCGLLPLADLADVLTIAHVFRLLTADDRAVRDLAWASLRAVVRRRIGTHPTCGDVAAFLSGSLEGRLRVGGESSLWSSARNAARRQSERLAIRWLWCEEREEFVLQCRGPRGRVTKIPPGARAQVIGRLRAAVAEWYTYTWITKPDQGKVFEVSSRARVSNHFMRGGSFTRFADWRFVHRARLDVLPLNGARRWGEGDRRCRRCGEVAETLPHVLCHCGPHSAAVQWRHDSILLRLRKACRLPGSITVNQRVRGLEGELGALRPDLVVRHEPSKSVVICDVTVPFENRWAAFDEARARKVAKYSLLAEALQRRGYRVVVTAFVVGALGSWDPRNEPVLELLRVSKAYGAMMRRLMVSDTIRWSRDIYVEHVSGVRQYEAPPRPVDGSVPEVSPPRAVRRRVTGARADGGDESSRALIV

SEQ ID NO: 7889 - protein, 1018 aa, Harpegnathos saltator
MRVRMRFGRLRSAPGSRAGGGATRLARVPRNLPMAAHGPRDARDAAPDVERRTRRQLAVERTRLVDAADSVATLAELEDLAIQVAGFFGGGEPGRGAPCARRPPPRRLREADEERRGERDAREGGRQGELAPANVPDFFGEDGRNRTREAARIQALFRRNRRRAVREVLAGPAEVCDLPTDVVQAHFEELYRGGDDLRGAEPAERADAPGGDGGAAALMEPFTEREVCRRLRRMNNSAPGSDGITYKDLRAADPSARLLVALFNACLRLEAVPAVWKTSNTVLVYKKGDRGNINNWRPLALGDTLPKLFAAVLADRITEWCVVGGKLSPAQKGFLRDELCFEHNFVLQEILTDARRSRREVVVAWLDLSNAFGSVPHGAIRRALIRAGAPAGFIAVWGSLYDGCTTRVRTADGFTAPIQIRSGVCQGCPLSPIVFDLAIDSVLVSRTPDEMERLLAVAVNEASSVGLRFNPAKCATLHIGAGGAGRVRPTTLRIQGQPVRAMAEGEAYEHLGIPTGFGVNQTPHAAIRVLRNDLASVERSLLAPWQKTETVATFLLPRLDFLLRGAAVEKGPLKELDLQIRRSCKMWLNLPQRASAEVVYMPPRKGGCGLLPLADPADVLSIAHVFRLLTTDDRAVRDLAWASLRGVVARRIGHPPGCDQIAVFLSGSLEGGLRGGRERSLWSRARNAARHQSDRCAIRWLWSEERRELVLQCRGPRGRITKIPPGARAQVIGRLRAAVAEWYDTTLSRKPDQGKVFEVSSRHRVSNHFMRGGSFTRFADWRFIHRARLDVLPLNGARRWGESDRRCRRCGAESETLPHMVCHCGPHSAAIQWRHDSILLRLSRACRLPGNVTVNQRVEGIDGELGELRPDLVIRHEPSKSVVICDVTVPFENRPIALEEARERKLAKYAPLAEALGRLGYRVVVTAFVVGALGSWDPRNEPVLRLLRIGSTYASMMRRLIVSDTIRWSRDIYVEHVSGVRQYRAPPRRADGGVPDVSPPRAICRRVAGPRADEAAEI

SEQ ID NO: 7890 - protein, 1754 aa, Solenopsis invicta
MEVTLEYPLPIEWENKPRCPRCWEARLAGAAIPCTGGAFSDAAHLAKHLKAKHPGDYITYKCSLCNFKGGSRYPLKDVKAHYAKVHSANNSSSSRVGASRPGTRGNSDVGEQSDSGARSRVTGATARPRGSNPPAQDPRQPRLSFRSTPPPGPSGATRRSATPPTAAAGSPSYATVTAGELPSRPPAPVEARRHSAAQAMPHTTTTAAAASTSAAAAAAAATSAGPPTTATGKPRVLSVQLVRLPIKIKAARPATTRAKPTPLIRPAPTGATRASVSAANSQSVATRSARAPSHPPQRTSPVAGASASSSTTTRWSGEGAQRSPLDRRTPPARNAGGQSVATRTRRATSVPTEKSDSAARLECVPPHPRTRGAATSIGKAGGTKEKPPDSTPPTNVQGGVATRTRSRASSTPVEKSALEARLAALDRPPPGAKGSAASRSASDTAQQGTSRESPARSPSLPQTTRGSPTGGRSNIHPATSLPATLTTCTVTTTTCGGPVMSTGLPVGKGRSPPRPSLLPTILEASPCVAAVPTTPGEQRTSPQTAPSSPGVGVRRRRGAAIILSSDSEGDEGEPWRTHRGRRAGRRHTPPGLPPNSRSPPVAHARPTPETAKTASANSRANASPRGSFSDTNNNSFEDTVHSSQSVRPPPSTEAASRRGTSLEDRVGGDTGNGAARVSAEHPCAPVCARGVMGRRAQPLPIVPPREEGGAPPNLVGRHGGRERHHGRRRVDAPVAQPSRGYPVPVAVVRQRRRELVADRDALVERAANVATIADLEAYAASVAAWFGEDATEGAGGAAPGVQGRPNRRRNAGARRGARGGVPPGGEGDSRAGQASLGPATSQEEHGGWVREAKRLQALYRTNRRKAVREILQGPADLCQVPRQQVQEYFERLYRGGEDLAGGGVQAEPTDPSDVAGEFEYLADPFTERVVDRRLRRMNNSAPGPDGIAYKDLRARDPGARLLTAVFNACLRLEVVPASWKTSSTLLIHKKDDPNVLENWRPLALGDTVPKLFAALLADRLTDWSVDHGRLSPAQKGFLRDEGGCYEHNFVLQEILTDARRTRRQAVVAWLDLSNAFGSVPHAVIRRALAGAAVPRRLIAIWESMYDGCTTRVRTADGYTAPIPIRSGVKQGCPLSPIVFNIAINSVVHAATEMNVGYALHGQSFSALAYADDIALLSSTPEGMGQLLRAVEREAASVGLRFNPAKCATLHIGAGNGGRVLPTSFRLQGQPIRPLADGEPYTHLGIPTGFSVDQTPYAAVTDIVSDLCAVDQSLLAPWQKFDLMATFILPRLDFLLRGARVQKSPLTAADRVLRRYAKSWLNLPQRASAEGVYMPPRWGGCGLLPLSDLADVLSVAHVFRMLTAGDAAVRTLAWQSLRGVVQRRIGYAPAGDEIANFLSGSLEGRLRGGGEASLWSRARNAAQRQSERLSLRWRWVPETEEMILECRGPRGATVKIPPGARAQVVGRLRSAVAEYYASTLLAKRDQGKVFEVSSRCRVSNHFIRGGSFTRFADWRFIHKARLDVLPLNGARRWGDGDKRCRRCGEVSETLPHVLCHCGVHSAAIQLRHNAVLHRLWKACRMPGEKRVNQRIEGIDGELGELRPDLVIRHEPSKSVVICDVTVPFENRWEAFEDARARKIAKYSPLAEELQRRGYRVVVTAFVVGALGSWDPRNEAVLRLLRIGTPYASLMRRLMVSDTIRWSRDIYVEHVSGTRQYRAPPRPAGGGFATPPRAIRRRWLADEVERHDAIACVNVA

SEQ ID NO: 7891 - protein, 1254 aa, Solenopsis invicta
MSTGLPAGKGRSPSRASLLPTILEASPCVAVVPTTPGEQRTSPQTAPSSPWVGVRRRRGAAIILSSDSEGDESEPWRTHRGRRAWRRHTPPGLPPNSRSPPVAHARPTPETAKTASANSRANASPRGSFSDINNNSPEDTVHSSQSVRPPPSTEAASRRGTSLEDRVGGDSGNGAARVSAEHPCAPVCARGVMGRRAQPLPIVPPREEGGAPPNLVGRHGGRERHHGRRRVDAPVAQPSRGYPVPVAVVRQRRRELVADRDALVERAANVATIADLEAYAASVAAWFGEDATEGAGGAAPGVQGRPNRRRNAGARRGARGGVPPGGEGDSRAGQASLDPATSQEEHGGWVREVKRLQALYRTNRRKAVREILQGPADLCQVPRQQVQEYFERLYRGGEDLAGGGVQAEPTDPSDVAGEFEYLADPFTERVVDRRLRRMNNSAPGPDGIAYKDLRARDPGARLLTAVFNACLRLEAVPASWKTSSTLLIHKKDDPNVLENWRPLALGDTVPKLFAALLADRLTDWSVDHGRLSPAQKGFLRDEGCYEHNFVLQEILTDARRTRRQAVVAWLDLSNAFGSVPHAVIRRALAGAAVPRRLIAIWESMYDGCTTRVRTADGYTAPIPIRSGVKQGCPLSPIVFNIAINSLVHAATEVNVGYALHGQSFSALAYADDIALLSSTPEGMGELLRAVEREAASVGLRFNPAKCATLHIGAGNGGSVLPTSFRLQGQPIRPLADGEPYTHLGIPTGFSVDQTPYAAVTDIVSDLCAVDQSLLAPWQKFDLMATFILPRLDFLLRGARVQKSPLAAADKVLRRYAKSWLNHPQRASAEGVYMPPRWGGCGLLPLSDLADVLSVAHVFRMLTAGDAAVRTLAWRSLRGVVQRRIGYAPAGDDVASFLSGSLEGRLRGGGEASLWSRARNAAQRQSERLSLRWRWVPETEEMILECRGPRGATVKIPPGARAQVVVRLRSAVAEYYASTLLAKRDQGKVFEVSSRCRVSNHFIRGGSFTRFADWRFIHKARLDVLPHNGARRWGDGDKRCRRCGEVSETLPHVLCHCGVHSAAIQLRHNAVLHRLWKACRMPGEKRVNQRIEGIDGELGELRPDLVIRHEPSKSVVICDVTVPFENRWEAFEDARARKIAKYSPLAEELQRRGYRVVVTAFVVVALGSWDPRNEAVLRLLRIGTPYASLMRRLMVSDTIRWSRDIYVEHVSGTRQYRAPPRPAGGGFATPPRAIRRRWLADEVERHDAITCVNVA

SEQ ID NO: 7892 - protein, 1753 aa, Solenopsis invicta
MEVTLEYPLPIEWENKTRCPRCWEARLAGAAIPCTGGAFSDAAHLAKHLKAKHPVDYITYKCSLCNFKGGSRYPLKDVKAHYTKVHSANNSSSSREGASRPGTRGNSDVGEQSDSGARSRATGATARPRGSNPPAQDPRQPRLSFRSTPPPGPSGATRRSATPPTAAARSPSYATVTAGELPSRPPAPVEARRHSAAQAMPHTTTTAAAASTSAAAAAAAATSAGPPTTATGKPRVLSVQLVRLPIKIKAARPATTRAKPTPLIRPAPTGATRASVSAANSQSVATRSARAPSHPPQRTSPVAGASTSSSTTTRWSGEGAQRSPLDRRTPPARNAGGQSVATRTRRATSVPTEKSDSAARLECVPPHPRTRGAATSIGKAGGTKEKPPDSTPPTNVQGGVATRTRSRASSTPVEKSALEARLAALDRPPPGAKGSAASRSASDTAQQGTSRESPARSPSLPQTTRGSPTGGRSNTHPATSLPATLTTCTVTTTTCGGPVMSTGLPAGKGRSPSRASLLPTILEASPCVAVVPTTPGEQRTSPQTAPSSPGVGVRRRRGAAIILSSDSEGDEGEPWRTHRGRRAGRRHTPPGLPPNSRSPPVAHARPTPETAKTASANSRANASPRGSSSDINNNSFEDTVHSSQSVRPPPSTEAASRCGTSLEDRVGGDSGNGAARVSAEHPCAPVCARGVMGRRAQPLPIVPPREEGGAPPNLVGRHGGRERHHGRRRVDAPVAQPSRGYPVPVAVVRQRRRELVADRDALVERAANVATIADLEAYAASVAAWFGEDATEGAGGAAPGVQGRPNRRRNAGARRGARGGVPPGGEGDSRAGQASLDPATSQEEHGGWVREAKRLQALYRTNRRKAVREILQGPADLCQVPRQQVQEYFERLYRGGEDLAGGGVQAEPTDPSDVAGEFEYLADPFTERVVDRRLRRMNNSAPGPDGIAYKDLRARDPGARLLTAVFNACLRLEAVPASWKTSSTLLIHKKDDPNVLENWRPLALGDTVPKLFAALLADRLTDWSVDHGRLSPAQKGFLRDEGCYEHNFVLQEILTDARRTRRQAVVAWLDLSNAFGSVPHAVIRRALAGAAVPRRLIAIWESMYDGCTTRVRTADGYTAPIPIRSGVKQGCPLSPIVFNIAINSLVHAATEVNVGYALHGQSFSALAYADDIALLSSTPEGMGELLRAVEREAASVGLRFNPAKCATLHIGAGNGGRVLPTSFRLQGQPIRPLADGEPYTYLGIPTGFSVDQTPYAAVTDIVSDLCAVDQSLLAPWQKFDLMATFILPRLDFLLRGARVQKSPLAAADRVLRRYAKSWLNLPQRASAEGVYMPPRWGGCGLLPLSDLADVLSVAHVFRMLAAGDAAVRTLAWRSLRGVVQRRIGYAPAGDDVASFLSGSLEGRLRGGGEASLWSRARNAAQRQSERLSLRWRWVPETEEMILECRGPRGATVKIPPGARAQVVGRLRSAVAEYYASTLLAKRDQGKVFEVSSRCRVSNHFIRGGSFTRFADWRFIDKARLDVLPLNGARRWGDGDKRCRRCGEVSETLPHVLCHCGVHSAAIQLRHNAVLHRLWKACRMPGEKRVNQRIEGIDGELGELRPDLVIRHEPSKSVVICDVTVPFENRWEAFEDARARKIAKYSPLAEELQRRGYRVVVTAFVVGALGSWDPRNEAVLRLLRIGTPYASLMRRLMVSDTIRWSRDIYVEHVSGTRQYQAPPRHAGGGFATPPRAIRRRWLADEAERHDAITCVNVA

SEQ ID NO: 7893 - protein, 1062 aa, Solenopsis invicta
MGRRAQPLPIVPPREEGGAPPNLVGRHGGRERHHGRRRVDAPVAQPSRGYPVPVAVVRQRRRELVADRDALVERAANVATIADLEAYAASVAAWFGEDATEGAGGAAPGVQGRPNRRRNAGARRGARGGVPPGGEGDSRAGQASLGPATSQEEHGGWVREAKRLQALYRTNRRKAVREILQGPADLCQVPRQQVQEYFERLYRGGEDLAGGGVQAEPTDPSDVAGEFEYLADPFTERVVDRRLRRMNNSAPGPDGIAYKDLRARDPGARLLTAVFNACLRLEVVPASWKTSSTLLIHKKDDPNVLENWRPLALGDTVPKLFAALLADRLTDWSVDHGRLSPAQKGFLRDEGCYEHNFVLQEILTDARRTRRQAVVAWLDLSNAFGSVPHAVIRRALAGAAVPRRLIAIWESMYDGCTTRVRTADGYTAPIPIRSGVKQGCPLSPIVFNIAINSVVHAATEMNVGYALHGQSFSALAYADDIALLSSTPEGMGQLLRAVEREAASVGLRFNPAKCATLHIGAGNGGRVLPTSFRLQGQPIRPLADGEPYTHLGIPTGFSVDQTPYAAVTDIVSDLCAVDQSLLAPWQKFDLMATFILPRLDFLLRGARVQKSPLTAADKVLRRYAKSWLNLPQRASAEGVYMPPRWGGCGLLPLSDLADVLSVAHVFRMLTAGDAAVRTLAWQSLRGVVQRRIGYAPAGDEIANFLSGSLEGRLRGGGEASLWSRARNAAQRQSERLSLRWRWVPETEEMILECRGPRGATVKIPPGARAQVVGRLRSAVAEYYASTLLAKRDQGKVFEVSSRCRVSNHFIRGGSFTRFADWRFIHKARLDVLPLNGARRWGDGDKRCRRCGEVSETLPHVLCHCGVHSAAIQLRHNAVLHRLWKACRMPGEKRVNQRIEGIDGELGELRPDLVIRHEPSKSVVICDVTVPFENRWEAFEDARARKIAKYSPLAEELQRRGYRVVVTAFVVGALGSWDPRNEAVLRLLRIGTPYASLMRRLMVSDTIRWSRDIYVEHVSGTRQYRAPPRPAGGEFATPPRAIRRRWLADEVERHDAIACVNVA

SEQ ID NO: 7894 - protein, 1062 aa, Solenopsis invicta
MGRRAQPLPIVPPREEGGAPPNLVGRHGGRERHHGRRRVDAPVAQPSRGYPVPVAVVRQRRRELVADRDALVERAANVATIADLEAYAASVAAWFGEDATEGAGGAAPGVQGRPNRRRNAGARRGARGGVPPGGEGDSRAGQASLGPATSQEEHGGWVREAKRLQALYRTNRRKAVREILQGPADLCQVPRQQVQEYFERLYRGGEDLAGGGVQAEPTDPSDVAGEFEYLADPFTERVVDRRLRRMNNSAPGPDGIAYKDLRARDPGARLLTAVFNACLRLEVVPASWKTSSTLLIHKKDDPNVLENWRPLALGDTVPKLFAALLADRLTDWSVDHGRLSPAQKGFLRDEGCYEHNFVLQEILTDARRTRRQAVVAWLDLSNAFGSVPHAVIRRALAGAAVPRRLIAIWESMYDGCTTRVRTADGYTAPIPIRSGVKQGCPLSPIVFNIAINSVVHAATEMNVGYALHGQSFSALAYADDIALLSSTPEGMGQLLRAVEREAASVGLRFNPAKCATLHIGAGNGGRVLPTSFRLQGQPIRPLADGEPYTHLGIPTGFSVDQTPYAAVTDIVSDLCAVDQSLLAPWQKFDLMATFILPRLDFLLRGARVQKSPLTAADKVLRRYAKSWLNLPQRASAEGVYMPPRWGGCGLLPLSDLADVLSVAHVFRMLTAGDAAVRTLAWQSLRGVVQRRIGYAPAGDEIANFLSGSLEGRLRGGGEASLWSRARNAAQRQSERLSLRWRWVPETEEMILECRGPRGATVKIPPGARAQVVGRLRSAVAEYYASTLLAKRDQGKVFEVSSRCRVSNHFIRGGSFTRFADWRFIHKARLDVLPLNGARRWGDGDKRCRRCGEVSETLPHVLCHCGVHSAAIQLRHNAVLHRLWKACRMPGEKRVNQRIEGIDGELGELRPDLVIRHEPSKSVVICDVTVPFENRWEAFEDARARKIAKYSPLAEELQRRGYRVVVTAFVVGALGSWDPRNEAVLRLLRIGTPYASLMRRLMVSDTIRWSRDIYVEHVSGTRQYRAPPRPAGGGFATPPRAIRRRWLADEVERHDAIACVNVA

SEQ ID NO: 7895 - protein, 1062 aa, Solenopsis invicta
MGRRAQPLPIVPPREEGGAPPNLVGRHGGRERHHGRRRVDAPVAQPSRGYPVPVAVVRQRRRELVADRDALVERAANVATIADLEAYAASVAAWFGEDATEGAGGAAPGVQGRPNRRRNAGARRGARGGVPPGGEGDSRAGQASLGPATSQEEHGGWVREAKRLQALYRTNRRKAVREILQGPADLCQVPRQQVQEYFERLYRGGEDLAGGGVQAEPTDPSDVAGEFEYLADPFTERVVDRRLRRMNNSAPGPDGIAYKDLRARDPGARLLTAVFNACLRLEVVPASWKTSSTLLIHKKDDPNVLENWRPLALGDTVPKLFAALLADRLTDWSVDHGRLSPAQKGFLRDEGCYEHNFVLQEILTDARRTRRQAVVAWLDLSNAFGSVPHAVIRRALAGAAVPRRLIAIWESMYDGCTTRVRTADGYTAPIPIRSGVKQGCPLSPIVFNIAINSVVHAATEMNVGYALHGQSFSALAYADDIALLSSTPEGMGQLLRAVEREAASVGLRFNPAKCATLHIGAGNGGRVLPTSFRLQGQPIRPLADGEPYTHLGIPTGFSVDQTPYAAVTDIVSDLCAVDQSLLAPWQKFDLMATFILPRLDFLLRGARVQKSPLTAADRVLRRYAKSWLNLPQRASAEGVYMPPRWGGCGLLPLSDLADVLSVAHVFRMLTAGDAAVRTLAWQSLRGVVQRRIGYAPAGDEIANFLSGSLEGRLRGGGEASLWSRARNAAQRQSERLSLRWRWVPETEEMILECRGPRGATVKIPPGARAQVVGRLRSAVAEYYASTLLAKRDQGKVFEVSSRCRVSNHFIRGGSFTRFADWRFIHKARLDVLPLNGARRWGDGDKRCRRCGEVSETLPHVLCHCGVHSAAIQLRHNAVLHRLWKACRMPGEKRVNQRIEGIDGELGELRPDLVIRHEPSKSVVICDVTVPFENRWEAFEDARARKIAKYSPLAEELQRRGYRVVVTAFVVGALGSWDPRNEAVLRLLRIGTPYASLMRRLMVSDTIRWSRDIYVEHVSGTRQYRAPPRPAGGEFATPPRAIRRRWLADEVERHDAIACVNVA

SEQ ID NO: 7896 - protein, 1776 aa, Ooceraea biroi
MDAPLEVVLAYPIESRVVCPRCWGSGELGVRTRGDFCDPPHLAKHQKAKHPGDTITYKCSLCEFRGSGRYPLKAVKAHYDKEHGGHRDESPATVAGADAGRAQNSGRSRVGSASNAGVRTRAAALPGTSSVGAADSRRLRRNLPAATPSPQHAPLAATTTASTTSGRSPSYAAVTAGPSTRPVRAPSLTAGAGGAAVAATRTTTARRSSTAVRRGAIGTAATAATGATPPIAGIAGGSSDASSAERRRPWRPPVPVPVCSACGVPTRPSGTPPQPNPLRVTRSARVPPHKPSNTSSGGTGGAPSVKRRQKGAARPVHVSPRSPQTIAESQQTIGTSRGGNRSGGSPPAAATTSAAALVGAPSAPVAKSTPERTVASRGTAKRSTRSPPAITIAAAAAGVATRRHARRKASQFGVEPGGVWRRGFRTPTPPSSPEGFSEVQVAGVLGRRSATPTARAPTPAVPAQLSTTTTRSTRAGTRAATSSAAAATSSPATLVTCTVTTSVCGAPVMSTGVPSAALRPVPRLEGLQPEEHRPTTPPVGRQHQSPPTSAALECSGGSPALASSGRRVDALSITPEREEERRSSVARRSMEGDGVEPWVVSLGRGARRRLGTGSLASTPSSTPTRGSPVGLRTSPSPPPNTPASFPPLPSAAVDVSSPVAPPTLEVATINIVDGEARRGSASSGDRAAVAEPAQVSAANSDIAPPAAPVDVRGVMGRRLGGTASVVGARNDGERCLAGRGREPRRGHPRRVEARPGGPLRAAVPAPEPAQGRRRERNLAARDELARLAEAVVAPADLEDLAVRAAEFFGRGVASVAAAGATGATDRPGRSGEAAADFRGGTAAARARDDVGARRGPAPAGPRNPQGEGRGDRTREAARIQALFRRNRRKAVREVVQGPADFCQVQGRTVQEHFERLYGGGERLDGLPAVEPVDHSRPEDVALLMAPFTEGEVDRRLRRMTNSAPGPDGIAYNDLRAADPGARLLTALFNACYRLEAVPPSWKTSNTVLVYKKGDRDSLESWRPLALGDTMPKLFAAVAADRLTDWVIANDKLCRAQKGFLRDEGCYEHNFVLQEILTDARRTRRHAVVAWLDLSNAFVSVPHAAIRSALVRAGVPSGLINIWGSMYDGCTTRVRAVDGFTAPIPIRSGVRQGCPLSPIIFDLVIDSVVRAAAELTDVGYDILGQTFNILAYADDLALIARTPEGMRQLLTAVELEAGRVGLHFNPAKCASLHITTGRIGRVLPTVFEIEGRPMPTLAEGEPYRHLGVPTGFSVDQTPLTTIEGVLKDIWAVDASLLAPWQRVEVLAAFILPRLDFLLRGAAVEKRPLRAVDLHVRRIVKSWLNLPQRASAEVVYLPPSRGGCGLLPLSDLADVLTIAHAFRLLTASDAVVSGLAWGSLRGVVARRIGHAPSDEEIASFLSGSLEGRLRGGGEASLWSRARNAARRQANRAAVRWRWSEVTGEMIVECRGPGERIVRVPGSARAQVIHRLRSAVMEYCAGTLLRKPDQGKVFEVSSRVPVSNHFMRGGSFTRFADWRFVHRARLDVLPLNGARRWGTVDERCRRCGRTAETLPHVIGHCGVHAAAIQLRHDAVLHRLRRACRLPGEVRVNQRVEGVDGELEGLRSDLVVRHEPSKSVVICDVTVAFENRLVAFEEARGRKVARYTPLAEALRAQGYRVVVTALVVGALGSWCPRNDAVLRLLRVGSKYGSMMRRLIVSDTIRWSRDIYVEHVSGVRQYPAPPRPSGDGGPLVSPPQAIGRRYPDGLLAPREPDVNVA

SEQ ID NO: 7897 - protein, 833 aa, Ooceraea biroi
MAPFTEGEVDRRLRRMTNSAPGPDGIAYNDLRAADPGARLLTALFNACYRLEAVPPSWKTSNTVLVYKKGDRDSLESWRPLALGDTMPKLFAAVAADRLTDWVIANDKLCRAQKGFLRDEGCYEHNFVLQEILTDARRTRRHAVVAWLDLSNAFGSVPHAAIRSALVRAGVPSGLINIWGSMYDGCTTRVRAVDGFTAPIPIRSGVRQGCPLSPIIFDLVIDSVVRAAAELADVGYDILGQTFNILAYADDLALIARTPEGMRQLLTAVELEAGRVGLHFNPAKCASLHITTGRIGRVLPTVFEIEGRPMPTLAEGEPYRHLGVPTGFSVDQTPLTTIEGVLKDIWAVDASLLAPWQRVEVLAAFILPRLDFLLRGAAVEKRPLRAVDLHVRRIVKSWLNLPQRASAEVVYLPPSRGGCGLLPLSDLADVLTIAHAFRLLTASDAVVSGLAWGSLRGVVARRIGHAPSDEEIASFLSGSLEGRLRGGGEASLWSRARNAARRQANRAAVRWRWSEVTGEMIVECRGPGERIVRVPGSARAQVIHRLRSAVMEYYAGTLLRKPDQGKVFEVSSRVPVSNHFMRGGSFTRFADWRFVHRARLDVLPLNGARRWGTVDERCRRCGRTAETLPHVIGHCGVHAAAIQLRHDAVLHRLRRACRLPGEVRVNQRVEGVDGELEGLRPDLVVRHEPSKSVVICDVTVAFENRLVAFEEARGRKVARYTPLAEALRAQGYRVVVTALVVGALGSWCPRNDAVLRLLRVGSKYGSMMRRLIVSDTIRWSRDIYVEHVSGVRQYPAPPRPSGDGGPLVSPPLAIRRRYPDGLLAPRELDVNVA

SEQ ID NO: 7898 - protein, 1772 aa, Ooceraea biroi
MDAPLEVVLAYPIESRVVCPRCWGSGELGVRTRGDFCDPPHLAKHQKAKHPGDTITYKCSLCEFRGSGRYPLKAVKAHYDREHGGHRDESPATVAGADAGRAQNSGRSRVGSASNAGVRTRAAALPGTSSVGAADSRRLRRNLPAATPSPQQTPLAATTTASTTSGRSPSYAAVTAGPSTRPVRAPSLTAGAGGAAVAATRTTTARRSSTAVRRGAIGTAATAATGATPPIAGIAGGSSDASSAERRRPWRPPVPVPVCSACGVPTRPSGTPPQPNPLRVTRSARVPPHKPSNTSSGGTGGAPSVKRRQKGAARPVHVSPRSPQTIAESQQTIGAPRGGNRSGGSPPAAATTSAAALVGAPSAPVAKSTPERTVASRGTAKRSTRSPPATTIAAAAAGVATRRHARRKASQFGVEPGGVWRRGFRTPTPPSSPEGFSEVQVAGVLGRRSATPTARAPTPAVPAQLSTTTTRSTRAGTRAATSSAAVATSSPATLVTCTVTTSVCGAPVMSTGVPSAALRPVPRLEGLQPEEHRPTTPPVGRQHQSPPTSAASECSGGSPALASSGRRVDALSITPEREEERRSSVARRSIEGDGVEPWVVSLGRGARRRLGTGSLASTPSSTPTRGSPAGLRTSPSPPPNTPASFPPLPSAAVGVSSPVAPPTLEVATTSIVNGEARRGSASSGDRAAVAEPAQVSAANSDIAPPAAPVDVRGVMGRRLGGTASVVGARNDGERCLAGRGREPRRGHPRRVEARPGGPLRAAVPAPEPAQGRRRERNLAARDELARLAEAVVAPADLEDLAVRAAEFFGRGVASVAAAGATGATDRPGRSGEAAADFRGGTAAARARDDVGARRGPAPAGPRNPQGEGRGDRTREAARIQALFRRNRRKAVREVVQGPADFCQVQGRAVQGHFERLYGGGERLDGLPAVEPVDHSRPEDVALLMAPFTEGEVDRRLRRMTNSAPGPDGIAYNDLRAADPGARLLTALFNACYRLEAVPPSWKTSNTVLVYKKGDRDSLESWRPLALGDTMPKLFAAVAADRLTDWVIANDKLCRAQKGFLRDEGCYEHNFVLQEILTDARRTRRHAVVAWLDLSNAFGSVPHAAIRSALVRAGVPSGLINIWGSMYDGCTTRVRAVDGFTAPIPIRSGVRQGCPLSPIIFDLVIDSVVRAAAELTDVGYDILGQTFNILAYADDLALIARTPEGMRQLLTAVELEAGRVGLHFNPAKCASLHITTGRIGRVLPTVFEIEGRPMPTLAEGEPYRHLGVPTGFSVDQTPLTTIEGVLKDIWAVDASLLAPWQRVEVLAAFILPRLDFLLRGAAVEKRPLRAVDLHVRRIVKSWLNLPQRASAEVVYLPPSRGGCGLLPLSDLADVLTIAHAFRLLTASDAVVSGLAWGSLRGVVARRIGHAPSDEEIASFLSGSLEGRLRGGGEASLWSRARNAARRQANRAAVRWRWSEVTGEMIVECRGPGERIVRVPGSARAQVIHRLRSAVMEYYAGTLLRKPDQGKVFEVSSRVPVSNHFMRGGSFTRFADWRFVHRARLDVLPLNGARRWGTVDERCRRCGRTAETLPHVIGHCGVHAAAIQLRHDAVLHRLRRACRLPGEVRVNQRVEGVDGELEGLRPDLVVRHEPSKSVVICDVTVAFENRLVAFEEARGRKVARYTPLAEALRAQGYRVVVTALVVGALGSWCPRNDAVLRLLRVGSKYGSMMRRLIVSDTIRWSRDIYVEHVSGVRQYPAPPRPSGDGVPWSRRLLQFAGVIPTACWHRANWM

SEQ ID NO: 7899 - protein, 1690 aa, Cardiocondyla obscurior
MEREPSVVVLDYPVANVRCPRCWMSETGVAKSRGEFSDHAHLAKHLKKYHPDLTLDFRCSVCGERSQGKSKYPYKYIKSHHEKEHVAGERGRDDRGDERGAAAGTSESVALNTRTRAAAAAGPSSDTAAGPSISKSVATRRPAQRKETTPPHIAETTRDEAAASATIEVAAVEPPRTYAEAAATRGVMSRRSARLGGPATTNSAAAVAGRSTAATKEKARPQRKGAPTRRRGATRQNSLTSPANEARAGCHITPDDSRPRNREPLVTPPIPAGAVTTTGNRRSMSVPLNASRPTRRPPRGSPTSPTFGHAGRSHGSRATPERTPPTQPRAGARRRRAARASSASATKSEGRPTRIEPREMPRRRKTPATRKPGAAPASQVSGGAEAARRPPPLHHRNAPPCGAHSAASTRGEGGPALGIPSPTPVTSRPCTLTTATVTTTTCGTPVMSTGLPAGGDMWRLSPPPQIIEERPRGAGGRWTRQAERTPEERMKETSEEECGGSGGGLWTTQRKKKSRRKIRWSGSSPEGCSPATARPRATPEHPCRASVDGSPENLKSNENNNNNYKESNTQTLDARCFQPRVVRVQNFERRIVVVAAPHEESGRGATCAMRAEDQGAGHPSDHVDGPGGGARRRVAHATGGPGTDERTPPSLGQSSGGAGRRRWPRQAPASTDLQPESQPAPVAAEMPRGARGRAERNALVGRAGTVDTVADLEELAALVARFFGEDASKAVGGGAPSNRDCSARSREARERRGGGCGREREDVRRGGRGPAPAGSSNSGEGRGGWVREAARLQALYRTNRRRAVREVLQGPAEFCQVQKERVYAYFEGLYRGGEDLAGSGAAVERADPSVGDEDAYLTEPFTVRVVLRRLKRMSNSAPGPDGVTYKDLRAADPGARLLTAMFNACLRLEAVPVAWKTSNTVLMYKKGDRADLNNWRPLALGDTTQKLFAALVADRLTGWAIENDKLSPAQKGFLRDEGCFEHNFVLHEILTDARRARWQAVVAWLDLSSAFGSVPHATIRHALTRSGVPGGLINIWASMYDGCSTRVRTADGFTDPVPIRSGVRQGCPLSPIVFDLAIDSVLRAVTGVKAGYDLSGVRISTLAYADDIALVSDTPEGMQRLLAVAEEKASAAGLRFNPGKCATLHIGAGAGGRVLPTVFSLQGQPVSPMAEGESYGYLGVPTGFGVDQTPYATIGGLLEDIRKVDRAPLAPWQKVETVATNILPRVDFLLRGAAVMKRPLRIADKEIKRIVKAWLNLPQRASAEVVYLPPRWGGCGLLPLADLADVLAVAHAFRMLTAGDAAVRSVAHTSLAGVVARRIGRPPTSEDIAAFLSGSLDYDFRGGGEQSLWSRARNAARRQSERLNLRWRWVGPTAELVVECRGTPRAEAVVKIPPGARDQVVTRLRAAVAAFYSYNLLAKPDQGKVYDVSRRAGVSNHFVRGGSYTRFADWRFIHRARLDVLPLNGARRWGESDRRCRRCGLADETLPHVINHCGVHAAAIQYRHDALLHRLWRACRLPGEKRVNRRVEGIDGELAELRPDLVVRHEPSKSVVICDVTVSFENRWKAFDDARARKLAKYSPLAEALQRGGYRVVVTAFVIGALGSWDPMNEEVLRLLRVGNSYASMMRRLMISEIISWSRDIYVEHVSGVRQYAAPSRLAGVGATATPPTAIRRRWPARPNENQNNVQLVL

SEQ ID NO: 7900 - protein, 1341 aa, Trachythela sp.
MSSQDTQSPFVKCMDCSFITTTQGHLGIHRSKMHHVDVPDHIKSVNIVRLFPEGKSYYCCLCDNIIGSFPNFKRYYSNKHKGISLNISAKCILCDRTFLDNRGAGVHLHRTHHIGKSDSYPLSPTPVMSYVDLEDTANSTSTAANNTTTTPLRRSRRPRVKLLHDVSLSMSYSMPSPVSSSTASNDYNGDIQSGSFCAQPSIAISQSVNPSPPQDLPHLPRTSSPDYSSRSPPPVLTDLDPDEYIISSSPPRPNTNPTSNPLHSLLNPNHQRSPETLVALSGCTDMDGDVASNQSSNPPSTSSFSTPISPSTASQNPFIVPPPLSEMSPNPLPSHSSIDDNHNPHSTSNQPFNPPTTNPSPIPSSPTTASQNPFIIPPPLSEMSFNPLPHPNNDVNQNPQSGAPSSNNVNDPFQNRWSSAFSDNISWEEFSNQCNEFTEDVIKTSNERQPRKKPSGPRRPLRPSARPVNTNRAPLRYNPREAKKIQALYRMSKKRAARKVLNDNSPSYTGSPDDANSFFTRVFGEKHCNAEEVKRGLDDFVPSAPLDESLYSPITPEEASKKLRSLSNSAPGSDKVEYRHLRSVDPKCTILANIFNRCLTESDVPSRWKTSSTILIHKKGDASEASNFRPIALMSCTYKLFMSIIANRLVTYSIDNNLLSDVQKSARPSEGCYEHTYILQSLVLDAKRIGKDLFLSWLDLKNAFGSVPHDVIQITLQHLGVPEGIVDLVKNVYTNATTEVTTPSGTTPPIPLLAGVKQGCPLSPILFNLCIEVILRSVIAKGQSNGHVKHHGQQISVLAYADDLVIIAKDGWLLQQLLDAASSAATSIGLQFRPDKCASISLTYSKKYKSNIQENDFSVQGNVMPALSEHEHYRYLGVPIGMIRDIDNLDKLVDDLCDDLDRVHSSLLAPWQKLDCIRTFIQPCLTFALRSGEPLKSSLIKYRKKLIELVRSILNLPTRASSHIIFASRKVGGLAFQDPLAEVDIQTVVQAIKMLSSSDPFVSSIARSELWSTIRFATRDKNPSPALTRDFLSGSTNGKLDPNHIRYRTHSLWTRARSACRRLKITFSVPDNDAPVISTESSGPRRANVACSFLHNLVQERASQKLLDLPDQGKVARAMVKDAFANGSSWMFTGLNMRFKDWRFVHRARMNVVPTNKNKSKWSDDFSPKCRVCQSTDETLPHILCHCKENMVLIRERHNKIVERLRKATRYGQVRIDQQIPDMNDACRPDIVITDGKHVTVIDVTCPFENGESALATADYTKVMKYQSVKSHFQSLGYKCSVYGFVIGCLGTWHPNNEAVLRSLGMSRKYKSLFRKLCCSDVIRGSSEIYYKHMNNVAQEE

SEQ ID NO: 7901 - protein, 1032 aa, Polypterus senegalus
MESNNMEGDNSACLTIILSEEPFYCLICGDLMDSMHKLLKHYKIKHHETKLCFKCKKCPKTSLNHHVVACHQAKCRRRNKTPATKRYICPTCGNPYSSNRGLSQHIRHRHFESETAITDDVDQGVSDTAWDVEYNNLISSLETSETNIILPFIRQSLLEDNYMNLNLKDIIKDDFDNSAEREKWIEDTTHLLLNDLFEKHKDAKVVKVIQNRPSTKKIPKRIIKKYQYKRTQVLYNKDREHLVSEILDGVTRKKCEIPVEKIHEHYNSIWGTHCDTGNNPIFIPYHFVDNVVFLSPFSMVEVENAIKHIKKDSAAGPDNINKCDIISLENGNVTLQKVFNLWLLTGTIPESFKKARTVLLPKSTESHKLSNINNWRPITIGSIITRLFSKLMYSRLKDGVTLSPRQRGFMDTAGCTENIHTLQGLINAHKLHQKSLGMVFIDFEKAFDTVSHGYLFRIMRYMRLDGHIIQLFRNMYTGASTSVECQDGNTPDITIKRGVKQGDALSPLFFDVAIDPLIQKLETEGRGTMLGDTPITALAFADDLVILSNTWGGMKVNLNILKAFCRGSGLKLQPAKCKGFFFTWKNRRMVVKKSNMWKIDGVEIKRISSKIPITYLGIKIEPRKGVFMEDPLEKITKWSNCIGKAPLKPYQKINILNQYAIPRLLYSLFNTTFNLMIIRKLDTLIRKTAKGWLHLPQCTTNGILYSKTANGGLGLLKLEAIVLKTTFKALGRLTLAEDPIILEGCKYNKTVSQLHNLWKLLGGNNSMFPDNYDLANICRNMMSDKVPAKLRDWRQYEYNTWKRLPIQGQGIEVFENDKISNSWLYIPKWMKQGQFIAALQTRANVFPTRETSNRGRQEPSNCRKCNFANETLSHILGQCPKLQKERIKRHHKLCDLLKNEIEKHDWMVHKECNIKLDNGWSLRPDLIITKNKKAIVLDLTVRYEFNYEEALRAKSSKEKKYEVVSQAVKDLFKIESVQTFGIVVGARGKWYDFNNEPLKSIGLPSPRILSFSKLMSRRGLLYSLDMLTAFSR

SEQ ID NO: 7902 - protein, 1070 aa, Pissodes strobi
MKWTTSINETIMRIFYRVTNNEREMIGYRQQLHAAFCAIYPELNVTEQRVADQYRVIMRNNLIPQTRLTTIKREIELELNDNHPLPETQHSEEEEDEQLQINPETQPERDANITQNTENDLIKLQAEFGRALAEYDGTNPLLRSQIPKVNSSRRLAKTLELLNRRILPEHLLAASTLEQIHLLLYCAATAVTRTLGVKQHVKRERNNLVPMGQPPWARRLQNKIESIRKDIGQLTAFVGGVQTSEIRKKVTTIMGRHHRHALHDPENRTPEECLDSLKQKLSVYAGRLKRYKSSNSRKQDNALFVRSEKSFYRKLNSLTSPGEKNYPSKDDITTFWSGQLTTVTTCNNQAGWMDEERQKSQDFERMHHQPFTTEEVSTIIKGLHNWKAPGPDHLHNYWIKKLWATHEQLTILINDLLVEPNKLPKFLTQGSTFLLPKDSQNTHDPSKYRPITCLPTMYKLITACITERIYQHCENNNIIAVQQKGCTKGAMGCKEQLIIDSVICNQAYGNKRNLYAAYVDYKKAFDSIPHEWLINVLKIYKVEERIVTLLENTMAVWRTTMHLQLPTGETIETSTIPIRKGIFQGDSLSPLWFCLAMNPLSSRLNSTAYGFALKKNGRELIRINHLLYMDDLKLLGATRNQLDQMLNILEEFSNDIGMEFGLDKCRINNIVKGKVQPGSFEMQDGQTIEAMEENDTYKYLGMLQATRIDHRTMKEKITSEFTTRARRILKTSLNSKNLFKALNTYACTALTYSFGIVAWSKTDIQNLQRKARTLLTKAQKHHPRSAVERTTLPRHQGGRALTDIGKQMDRQITLLRNFFLEKAGSNYWLTSGQMFPETEGFLLAIQDQVIPTRNYLKYIVSDPSVQSDRCRHDCQATESIQHITGGCQVFAQTEYKARHDNVGKILHQELAVKLNLVATEKVPYYNYAPEPVLENGEYKLYWDRTVLTDQRTVNNRPDLILVDKRLRRTTLIDVAIPNNSNLQTKSNEKIVKYRDLQEQIKRQWEMQCVRTVPIIISSTGLIPKALLENLKQLGLSEHLYKIMQKAVLLGTARVVRKFMGTEDRPPSRTR

SEQ ID NO: 7903 - protein, 1216 aa, Pissodes strobi
MKMERRRSRSLGTMPLPGDRQGMSGAGAGHDSMRDVGGRVLRRRAPVIQTVTARQRSNSPPKAPPAEGAAREIQPVLTQAGLPRRRMKWTTSINETIMRIFYRVTNNEREMIGYRQQLHAAFCAIYPELNVTEQRVADQYRVIMRNNLIPQTRLTTIKREIELELNDNHPLPETQHSEEEEDEQLQINPETQPERDANITQNTENDLIKLQAEFGRALAEYDGTNPLLRSQIPKVNSSRRLAKTLELLNRRILPEHLLAASTLEQIHLLLYCAATAVTRTLGVKQHVKRERNNLVPMGQPPWARRLQNKIESIRKDIGQLTAFVGGVQTSEIRKKVTTIMGRHHRHALHDPENRTPEECLDSLKQKLSVYAGRLKRYKSSNSRKQDNALFVRSEKSFYRKLNSLTSPGEKNYPSKDDITTFWSGQLTTVTTCNNQAGWMDEERQKSQDFERMHHQPFTTEEVSTIIKGLHNWKAPGPDHLHNYWIKKLWATHEQLTKLINDLLVEPNKLPKFLTQGSTFLLPKDSQNTHDPSKYRPITCLPTMYKLITACITERIYQHCENNNIIAVQQKGCTKGAMGCKEQLIIDSVICNQAYGNKRNLYAAYVDYKKAFDSIPHEWLINVLKIYKVDERIVTLLENTMAVWRTTMHLQLPTGETIETSTIPIRKGIFQGDSLSPLWFCLAMNPLSSRLNSTAYGFALKKNRRELIRINHLLYMDDLKLLGATRNQLDQMLNILEEFSNDIGMEFGLDKCRINNIVKGKVQPGSFEMQDGQMIEAMEENDTYKYLGMLQATRIDHRTMKEKITSEFTTRARRILKTSLNSKNLFKALNTYACTALTYSFGIVAWSKTDIQNLQRKARTLLTKAQKHHPRSAVERTTLPRHQGGRALTDIGKQMDRQITLLRNFFLEKAGSSALHQAICEIDDLTPLKLRDREIDTHHVTDQEKHRSWAEKPLHGRHVNEVGQEYVDNYASNYWLTSGQMFPETEGFLLAIQDQVIPTRNYLKYIVSDPSVQSDRCRYDCQATESIQHMTGGCQVFAQTEYKARHDNVGKILHQELAVKLNLVATEKVPYYNYAPEPVLENGEYKLYWDRTVLTDQRTVNNRPDLILVDKRLRRTTLIDVAIPNNSNLQTKSNEKIVKYRDLQEQIKRQWEMQCVRTVPIIISSTGLIPKALLENLKQLGLSEHLYKIMQKAVLLGTARVVRKFMGTEDRPPSRTR

SEQ ID NO: 7904 - protein, 1216 aa, Pissodes strobi
MKMERRRSRSLGTMPLPGDRQGMSGAGAGHDSMRDVGGRVLRRRAPVIQTVTARQRSNSPPKAPPAEGAAREIQPVLTQAGLPRRRMKWTTSINETIMRIFYRVTNNEREMIGYRQQLHAAFCAIYPELNVTEQRVADQYRVIMRNNLIPQTRLTTIKREIELELNDNHPLPETQHSEEEEDEQLQINPETQPERDANITQNTENDLIKLQAEFGRALAEYDGTNPLLRSQVPKVNSSRRLAKTLELLNRRILPEHLLAASTLEQIHLLLYCAATAVTRTLGVKQHVKRERNNLVPMGQPPWARRLQNKIESIRKDIGQLTAFVGGVQTSEIRKKVTTIMGRHHRHALHDPENRTPEECLDSLKQKLSVYAGRLKRYKSSNSRKQDNALFVRSEKSFYRKLNSLTSPGEKNYPSKDDITTFWSGQLTTVTTCNNQAGWMDEERQKSQDFERMHHQPFTTEEVSTIIKGLHNWKAPGPDHLHNYWIKKLWATHEQLTILINDLLVEPNKLPKFLTQGSTFLLPKDSQNTHDPSKYRPITCLPTMYKLITACITERIYQHCENNNIIAVQQKGCTKGAMGCKEQLIIDSVICNQAYGNKRNLYAAYVDYKKAFDSIPHEWLINVLKIYKVDERIVTLLENTMAVWRTTMHLQLPTGETIETSTIPIRKGIFQGDSLSPLWFCLAMNPLSSRLNSTAYGFALKKNRRELIRINHLLYMDDLKLLGATRNQLDQMLNILEEFSNDIGMEFGLDKCRINNIVKGKVQPGSFEMQDGQTIEAMEENDTYKYLGMLQATRIDHRTMKEKITSEFTTRARRILKTSLNSKNLFKALNTYACTALTYSFGIVAWSKTDIQNLQRKARTLLTKAQKHHPRSAVERTTLPRHQGGRALTDIGKQMDRQITLLRNFFLEKARSSALHQAICEIDDLTPLKLRDREIDTHHVTDQEKHRSWAEKPLHGRHVNEVGQEYVDNYASNYWLTSGQMFPETEGFLLAIQDQVIPTRNYLKYIVSDPSVQSDRCRYDCQATESIQHITGGCQVFAQTEYKARHDNVGKILHQELAVKLNLVATEKVPYYNYAPEPVLENGEYKLYWDRTVLTDQRTVNNRPDLILVEKRLRRTTLIDVAIPNNSNLQTKSNEKIVKYRDLQEQIKRQWEMQCVRTVPIIISSTGLIPKALLENLKQLGLSEHLYKIMQKAVLLGTARVVRKFMGTEDRPPSRTR

SEQ ID NO: 7905 - protein, 1216 aa, Pissodes strobi
MKMERRRSRSLGTMPLPGDRQGMSGAGAGHDSMRDVGGRVLRRRAPAIQTVTARQRSNSPPKAPPAEGAAREIQPVLTQAGLPRRRMKWTTSINETIMRIFYRVTNNEREMIGYRQQLHAAFCAIYPELNVTEQRVADQYRVIMRNNLIPQTRLTTIKREIELELNDNHPLPETQHSEEEEDEQLQINPETQPERDANITQNTENDLIKLQAEFGRALAEYDGTNPLLRSQIPKVNSSRRLAKTLELLNRRILPEHLLAASTLEQIHLLLYCAATAVTRTIGVKQHVKRERNNLVPMGQPPWARRLQDKIESIRKDIGQLTAFVGGVQTSEIRKKVTTIMGRHHRHALHDPENRTPEECLDSLKQKLSVYAGRLKRYKSSNSRKQDNALFVRSEKSFYRKLNSLTSPGEKNYPSKDDITTFWSGQLTTVTTCNNQAGWMDEERQKSQDFERMHHQPFTTEEVSTIIKGLHNWKAPGPDHLHNYWIKKLWATHEQLTILINDLLVEPNKLPKFLTQGSTFLLPKDSQNTHDPSKYRPITCLPTMYKLITACITERIYQHCENNNIIAVQQKGCTKGAMGCKEQLIIDSVICNQAYGNKRNLYAAYVDYKKAFDSIPHEWLINVLKIYKVDERIVTLLENTMAVWRTTMHLQLPTGETIETSTIPIRKGIFQGDSLSPLWFCLAMNPLSSRLNSTAYGFALKKNRRELIRINHLLYMDDLKLLGATRNQLDQMLNILEEFSNDIGMEFGLDKCRINNIVKGKVQPGSFEMQDGQTIEAMEENDTYKYLGMLQATRIDHRTMKEKITSEFTTRARRILKTSLNSKNLFKALNTYACTALTYSFGIVAWSKTDIQNLQRKARTLLTKAQKHHPRSAVERTTLPRHQGGRALTDIGKQMDRQITLLRSFFLEKARSSALHQAICEIDDLTPLKLRDREIDTHHVTDQEKHRSWAEKPLHGRHVNEVGQEYVDNYASNYWLTSGQMFPETEGFLLAIQDQVIPTRNYLKYIVSDPSVQSDRCRYDCQATESIQHITGGCQVFAQTEYKARHDNVGKILHQELAVKLNLVATEKVPYYNYAPEPVLENGEYKLYWDRTVLTDQRTVNNRPDLILVDKRLRRTTLIDVAIPNNSNLQTKSNEKIVKYRDLQEQIKRQWEMQCVRTVPIIISSTGLIPKALLENLKQLGLSEHLYKIMQKAVLLGTARVVRKFMGTEDRPPSRTR

SEQ ID NO: 7906 - protein, 925 aa, Pissodes strobi
MGNGESMNGANHCVINRTHSKEPVYKHQGTRFERTSIQIDAESSTSRNSPICPKICRKSVDATKDPITWKEFPQSLILLISGISGISVPVRGIASAVNLYYNNNNNNNNNNNNNNNIEKNYPSKDDITTFWSGQLTTVTTCNNQAGWMDEERQKSQDFERMHHQPFTTEEVSTIIKGLHNWKAPGPDHLHNYWIKKLWATHEQLTILINDLLVEPNKLPKFLTQGSTFLLPKDSQNTHDPSKYRPITCLPTMYKLITACITERIYQHCENNNIIAVQQKGCTKGAMGCKEQLIIDSVICNQAYGNKRNLYAAYVDYKKAFDSIPHEWLINVLKIYKVDERIVTLLENTMAVWRTTMHLQLPTGETIETSTIPIRKGIFQGDSLSPLWFCLAMNPLSSRLNSTAYGFALKKNRRELIRINHLLYMDDLKLLGATRNQLDQMLNILEEFSNDIGMEFGLDKCRINNIVKGKVQPGSFEMQDGQTIEAMEENDTYKYLGMLQATRIDHRTMKEKITSEFTTRARRILKTSLNSKNLFKALNTYACTALTYSFGIVAWSKTDIQNLQRKARTLLTKAQKHHPRSAVERTTLPRHQGGRALTDIGKQMDRQISLLRNFFLEKARSSALHQAICEIDDLTPLKLRDREIDTHHVTDQEKHRSWAEKPLHGRHVNEVGQEYVDNYASNYWLTSGQMFPETEGFLLAIQDQVIPTRNYLKYIVSDPSVQSDRCRYDCQATESIQHITGGCQVFAQTEYKARHDNVGKILHQELAVKLNLVATEKVPYYNYAPEPVLENGEYKLYWDRTVLTDQRTVNNRPDLILVDKRLRRTTLIDVAIPNNSNLQTKSNEKIVKYRDLQEQIKRQWEMQCVRTVPIIISSTGLIPKALLENLKQLGLSEHLYKIMQKAVLLGTARVVRKFMGTEDRPPSRTR

SEQ ID NO: 7907 - protein, 778 aa, Pissodes strobi
MDEERQKSQDFERMHHQPFTTEEVSTIIKGLHNWKAPGPDHLHNYWIKKLWATHEQLTILINDLLVAPNKLPKFLTQGSTFLLPKDSQNTHDPSKYRPITCLPTMYKLITACITERIYQHCENNNIIAVQQKGCTKGAMGCKEQLIIDSVICNQAYGNKRNLYAAYVDYKKAFDSIPHEWLINVLKIYKVDERIVPLLENTMAVWRTTMHLQLPTGETIETSTIPIRKGIFQGDSLSPLWFCLAMNPLSSRLNSTAYGFALKKNRRELIRINHLLYMDDLKLLGATRNQLDQMLNILEEFSNDIGMEFGLDKCHINNIVKGKVQPGSFEMRDGQTIEAMEENDTYKYLGMLQATRIDHRTMKEKITSEFTTRARRILKTSLNSKNLFKALNTYACTALTYSFGIVAWSKTDIQNLQRKARTLLTKAQKHHPRSAVERTTLPRHQGGRALTDIGKQMDRQISLLRNFFLEKARSSALHQAICEIDDLTPLKLRDREIDTHHVTDQEKHRSWAEKPLHGRHVNEVGQEYVDNCASNYWLTSGQMFPETEGFLLAIQDQVIPTRNYLKYIVSDPSVQSDRCRYDCQATESIQHITGGCQVFAQTEYKARHDNVGKILHQELAVKLNLVATEKVPYYNYAPEPVLENGEYKLYWDRTVLTDQRTVNNRPDLILVDKRLRRTTLIDVAIPNNSNLQTKSNEKIVKYRDLQEQIRRQWEMQCVRTVPIIISSTGLIPKALLENLKQLGLSEHLYKIMQKAVLLGTARVVRKFMGTEDRPPSRTR

SEQ ID NO: 7908 - protein, 1216 aa, Pissodes strobi
MKMERRRSRSLGTMPLPGDRQGMSGAGAGHDSMRDVGGRVLRRRAPVIQTVTARQRSNSPPKAPPAEGAAREIQPVLTQAGLPRRRMKWTTSINETIMRIFYRVTNNEREMIGYRQQLHAAFCAIYPELNVTEQRVADQYRVIMRNNLIPQTRLTTIKREIELELNDNHPLPETQHSEEEEDEQLQINPETQPERDANITQNTENDLIKLQAEFGRALAEYDGTNPLLRSQIPKVNSSRRLAKTLELLNRRILPEHLLAASTLEQIHLLLYCAATAVTRTLGVKQHVKRERNNLVPMGQPPWARRLQNKIESIRKDIGQLTAFVGGVQTSEIRKKVTTIMGRHHRHALHDPENRTPEECLDSLKQKLSVYAGRLKRYKSSNSRKQDNALFVRSEKSFYRKLNSLTSPGEKNYPSKDDITTFWSGQLTTVTTCNNQAGWMDEERQKSQDFERMHHQPFTTEEVSTIIKGLHNWKAPGPDHLHNYWIKKLWATHEQLTILINDLLVEPNKLPKFLTQGSTFLLPKDSQNTHDPSKYRPITCLPTMYKLITACITERIYQHCENNNIIAVQQKGCTKGAMGCKEQLIIDSVICNQAYGNKRNLYAAYVDYKKAFDSIPHEWLINVLKIYKVDERIVTLLENTMAVWRTTMHLQLPTGETIETSTIPIRKGIFQGDSLSPLWFCLAMNPLSSRLNSTAYGFALKKNRRELIRINHLLYMDDLKLLGATRNQLDQMLNILEEFSNDIGMEFGLDKCRINNIVKGKVQPGSFEMQDGQTIEAMEENDTYKYLGMLQATRIDHRTMKEKITSEFTTRARRILKTSLNSKNLFKALNTYACTALTYSFGIVAWSKTDIQNLQRKARTLLTKAQKHHPRSAVERTTLPRHQGGRALTDIGKQMDRQITLLRNFFLEKARSSALHQAICEIDDLTPLKLRDREIDTHHGTDQEKHRSWAEKPLHGRHVNEVGQEYVDNYASNYWLTSGQMFPETEGFLLAIQDQVIPTRNYLKYIVSDPSVQSDRCRYDCQATESIQHITGGCQVFAQTEYKARHDNVGKILHQELAVKLNLVATEKVPYYNYAPEPVLENGEYKLYWDRTVLTDQRTVNNRPDLILVDKRLRRTTLIDVAIPNNSNLQTKSNEKIVKYRDLQEQIKRQWEMQCVRTVPIIISSTGLIPKALLENLKQLGLSEHLYKIMQKAVLLGTARVVRKFMGTEDRPPSRTR

SEQ ID NO: 7909 - protein, 1216 aa, Pissodes strobi
MKMERRRSRSLGTMPLPGDRQGMSGAGAGHDSMRDVGGRVLRRRAPVIQTVTARQRSNSPPKAPPAEGAAREIQPVLTQAGLPRRRMKWTTSINETIMRIFYRVTNNEREMIGYRQQLHAAFCAIYPELNVTEQRVADQYRVIMRNNLIPQTRLTTIKREIELELNDNHPLPETQHSEEEEDEQLQINPETQPERDANITQNTENDLIKLQAEFGRALAEYDGTNPLLRSQIPKVNSSRRLAKTLELLNRRILPEHLLAASTLEQIHLLLYCAATAVTRTLGVKQHVKRERNNLVPMGQPPWARRLQNKIESIRKDIGQLTAFVGGVQTSEIRKKVTTIMGRHHRHALHDPENRTPEECLDSLKQKLSVYAGRLKRYKSSNSRKQDNALFVRSEKSFYRKLNSLTSPGEKNYPSKDDITTFWSGQLTTVTTCNNQAGWMDEERQKSQDFERMHHQPFTTEEVSTIIKGLHNWKAPGPDHLHNYWIKKLWATHEQLTILINDLLVEPNKLPKFLTQGSTFLLPKDSQNTHDPSKYRPITCLPTMYKLISACITERIYQHCENNNIIAVQQKGCTKGAMGCKEQLIIDSVICNQAYGNKRNLYAAYVDYKKAFDSIPHEWLINVLKIYKVDERIVTLLENTMAVWRTTMHLQLPTGETIETSTIPIRKGIFQGDSLSPLWFCLAMNPLSSRLNSTAYGFALKKNRRELIRINHLLYMDDLKLLGATRNQLDQMLNILEEFSNDIGMEFGLDKCRINNIVKGKVQPGSFEMQDGQTIEAMEENDTYKYLGMLQATRIDHRTMKEKITSEFTTRARRILKTSLNSKNLFKALNTYACTALTYSFGIVAWSKTDIQNLQRKARTLLTKAQKHHPRSAVERTTLPRHQGGRALTDIGKQMDRQITLLRNFFLEKAGSSALHQAICEIDDLTPLKLRDREIDTHHVTDQEKHRSWAEKPLHGRHVNEVGQEYVDNYASNYWLTSGQMFPETEGFLLAIQDQVIPTRNYLKYIVSDPSVQSDRCRYDCQATESIQHITGGCQVFAQTEYKARHDNVGKILHQELAVKLNLVATEKVPYYNYAPEPVLENGEYKLYWDRTVLTDQRTVNNRPDLILVDKRLRRTTLIDVAIPNNSNLQTKSNEKIVKYRDLQEQIKRQWEMQCVRTVPIIISSTGLIPKALLENLKQLGLSEHLYKIMQKAVLLGTARVVRKFMGTEDRPPSRTR

SEQ ID NO: 7910 - protein, 1216 aa, Pissodes strobi
MKMERRRSRSLGTMPLPGDRQGMSGAGAGHDSMRDVGGRVLRRRAPVIQTVTARQRSNSPPKAPPAEGAAREIQPVLTQVGLPRRRMKWTTSINETIMRIFYRVTNNEREMIGYRQQLHAAFCAIYPELNVTEQRVADQYRVIMRNNLIPQTRLTTIKREIELELNDNHPLPETQHSEEEEDEQLQINPETQPERDANITQNTENDLIKLQVEFGRALAEYDGTNPLLRSQIPKVNSSRRLAKTLELLNRRILPEHLLAASTLEQIHLLLYCAATAVTRTLGVKQHVKRERNNLVPMGQPPWARRLQNKIESIRKDIGQLTAFVGGVQTSEIRKKVTTIMGRHHRHALHDPENRTPEECLDSLKQKLSVYAGRLKRYKSSNSRKQDNALFVRSEKSFYRKLNSLTSPGEKNYPSKDDITTFWSGQLTTVTTCNNQAGWMDEERQKSQDFERMHHQPFTTEEVSTIIKGLHNWKAPGPDHLHNYWIKKLWATHEQLTILINDLLVEPNKLPKFLTQGSTFLLPKDSQNTHDPSKYRPITCLPTMYKLITACITERIYQHCENNNIIAVQQKGCTKGAMGCKEQLIIDSVICNQAYGNKRNLYAAYVDYKKAFDSIPHEWLINVLKIYKVDERIVTLLENTMAVWRTTMHLQLPTGETIESSTIPIRKGIFQGDSLSPLWFCLAMNPLSSRLNSTAYGFALKKNRRELIRINHLLYMDDLKLLGATRNQLDQMLNILEEFSNDIGMEFGLDKCRINNIVKGKVQPGSFEMQDGQTIEAMEENDTYKYLGMLQATRIDHRTMKEKITSEFTTRARRILKTSLNSKNLFKALNTYACTALTYSFGIVAWSKTDIQNLQRKARTLLTKAQKHHPRSAVERTTLPRHQGGRALTDIGKQMDRQITLLRNFFLEKARSSALHQAICEIDDLTPLKLRDREIDTHHVTDQEKHRSWAEKPLHGRHVNEVGQEYVDNYASNYWLTSGQMFPETEGFLLAIQDQVIPTRNYLKYIVSDPSVQSERCRYDCQATESIQHITGGCQVFAQTEYKARHDNVGKILHQELAVKLNLVATEKVPYYNYAPEPVLENGEYKLYWDRTVLTDQRTVNNRPDLILVDKRLRRTTLIDVAIPNNSNLQTKSNEKIVKYRDLQEQIKRQWEMQCVRTVPIIISSTGLIPKALLENLKQLGLSEHLYKIMQKAVLLGTARVVRKFMGTEDRPPSRTR

SEQ ID NO: 7911 - protein, 1216 aa, Pissodes strobi
MKMERRRSRSLGTMPLPGDRQGMSGAGAGHDSMRDVGGRVLRRRAPVIQTVTARQRSNSPPKAPPAEGAAREIQPVLTQAGLPRRRMKWTTSINETIMRIFYRVTNNEREMIGYRQQLHAAFCAIYPELNVTEQRVADQYRVIMRNNLIPQTRLTTIKREIELELNDNHPLPETQHSEEEEDEQLQINPETQPERDANIAQNTENDLIKLQAEFGRALAEYDGTNPLLRSQIPRVNSSRRLAKTLELLNRRILPEHLLAASTLEQIHLLLYCAATAVTRTLGVKQHVKRERNNLVPMGQPPWARRLQNKIESIRKDIGQLTAFVGGVQTSEIRKKVTTIMGRHHRHALHDPENRTPEECLDSLKQKLSVYAGRLKRYKSSNSRKQDNALFVRSEKSFYRKLNSLTSPGEKNYPSKDDITTFWSGQLTTVTTCNNQAGWMDEERQKSQDFERMHHQPFTTEEVSTIIKGLHNWKAPGPDHLHNYWIKKLWATHEQLTILINDLLVEPNKLPKFLTQGSTFLLPKDSQNTHDPSKYRPITCLPTMYKLITACITERIYQHCENNNIIAVQQKGCTKGAMGCKEQLIIDSVICNQAYGNKRNLYAAYVDYKKAFDSIPHEWLINVLKIYKVDERIVTLLENTMAVWRTTMHLQLPTGETIETSTIPIRKGIFQGDSLSPLWFCLAMSPLSSRLNSTAYGFALKKNRRELIRINHLLYMDDLKLLGATRNQLDQMLNILEEFSNDIGMEFGLDKCRINNIVKGKVQPGSFEMQDGQTIEAMEENDTYKYLGMLQATRIDHRTMKEKITSEFTTRARRILKTSLNSKNLFKALNTYACTALTYSFGIVAWSKTDIQNLQRKARTLLTKAQKHHPRSAVERTTLPRHQGGRALTDIGKQMDRQISLLRNFFLEKAGSSALHQAICEIDDLTPLKLRDREIDTHHVTDQEKHRSWAEKPLHGRHVNEVGQEYVDNYASNYWLTSGQMFPETEGFLLAIQDQVISTRNYLKYIVSDPSVQSDRCRYDCQATESIQHITGGCQMFAQTEYKARHDNVGKILHQELAVKLNLVATEKVPYYNYAPEPVLENGEYKLYWDRTVLTDQRTVNNRPDLILVDKRLRRTTLIDVAIPNNSNLQTKSNEKIVKYRDLQEQIKRQWEMQCVKTVPIIISSTGLIPKALLENLKQLGLSEHLYKIMQKAVLLGTARVVRKFMGTEDRPPSRTR

SEQ ID NO: 7912 - protein, 1216 aa, Pissodes strobi
MKMERRRSRSLGTMPLPGDRQGMSGAGAGHDSMRDVGGRVLRRRAPVIQTVTARQRSNSPPKAPPAEGAAREIQPVLTQAGLPRRRMKWTTSINETIMRIFYRVTNNEREMIGYRQQLYAAFCAIYPELNVTEQRVADQYRVIMRNNLIPQTRLTTIKREIELELNDNHPLPETQHSEEEEDEQLQSNPETQPERDANITQNTENDLIKLQAEFGRALAEYDGTNPLLRSQIPKVNSSRRLAKTLELLNRRILPEHLLAASTLEQIHLLLYCAATAATRTLGVKQHVKRERNNLVPMGQPPWARRLQDKIESIRKDIGQLTAFVGGVQTSEIRKKVTTIMGRHHRHALHDPENRTPEECLDSLKQKLSVYAGRLKRYKSSNSRKQDNALFVRSEKSFYRKLNSLTSPGEKNYPSKDDITTFWSGQLTTVTTCNNQAGWMDEERQKSQVFERMHHQPFTTEEVSTIIKGLHNWKAPGPDHLHNYWIKKLWATHEQLTILINDLLVEPNKLPKFLTQGSTFLLLKDSQNTHDPSKYRPITCLPTMYKLITACITERIYQHCENNNIIAVQQKGCTKGAMGCKEQLIIDSVICNQAYGNKRNLYAAYVDYKKAFDSIPHEWLINVLKIYKVDERIVTLLENTMAVWRTTMHLQLPTGETIETSTIPIRKGIFQGDSLRPLWFCLAMNPLSSRLNSTAYGFALKKNRRELIRINHLLYMDDLKLLGATRNQLDQMLNILEEFSNDIGMEFGLDKCRINNIVKGKVQPGSFEMQDGQTIEAMEENDTYKYSGMLQATRIDHRTMKEKITSEFTTRARRILKTSLNSKNLFKALNTYACTALTYSFGIVAWSKTDIQNLQRKARTLLTKAQKHHPRSAVERTTLPRHQGGRALMDIGKQMDRQITLLRNFFLEKAGSSALHQAICEIDDLTPLKLRDREIDTHHVTDQEKHRSWAEKPLHGRHVNEVGQEYVDNYASNYWLTSGQMFPETEGFLLAIQDQVIPTRNYLKYIVSDPSVQSDRCRYDCQATESIQHITGGCQVFAQTEYKARHDNVGKILHQELAVKLNLVATEKVPYYNYAPEPVLENGEYKLYWDRTVLTDQRTVNNRPDLILVDKRLRRTTLIDVAIPNNSNLQTKSNEKIVKYRDLQEQIKRQWEMQCVRTVPIIISSTGLIPKALLENLKQLGLSEHLYKIMQKAVLLGTARVVRKFMGTEDRPPSRTR

SEQ ID NO: 7913 - protein, 1216 aa, Pissodes strobi
MKMERRRSRSLGTMPLPGDRQGMSGAGAGHDSMRDVGGRVLRRRAPVIQTVTARQRSNSPPKAPPAEGAAREIQPVLTQAGLPRRRMKWTTSINETIMRIFYRVTNNEREMIGYRQQLHAAFCAIYPELNVTEQRVADQYRVIMRNNLIPQTRLTTIKREIELELNDNHPLPETQHSEEEEDEQLQINPETQPERDANITQNTENDLIKLRAEFGRALAEYDGTNPLLRSQIPRVNSSRRLAKTLELLNRRILPEHLLAASTLEQIHLLLYCAATAVTRTLGVKQHVKRERNNLVPMGQPPWTRRLQNKIESIRKDIGQLTAFVGGVQTSEIRKKVTTIMGRHHRHALHDPENRTPEECLDSLKQKLSVYAGRLKRYKSSNSRKQDNALFVRSEKSFYRKLNSLTSLGEKNYPSKDDITTFWSGQLTTVTTCNNQAGWMDEERQKSQDFERMHHQPFTTEEVSTIIKGLHNWKAPGPDHLHNYWIKKLWATHEQLTILINDLLVEPNKLPKFLTQGSTFLLPKDSQNTHDPSKYRPITCLPTMYKLITACITERIYQHCENNNIIAVQQKGCTKGAMGCKEQLIIDSVICNQAYGNKRNLYAAYVDYKKAFDSIPHEWLINVLKIYKVDERIVTLLENTMAVWRTTMHLQLPTGETIETSTIPIRKGIFQGDSLSPLWFCLAMNPLSSRLNSTAYGFALKKNRRELIRINHLLYMDDLKLLGATRNQLDQMLNILEEFSNDIGMEFGLDKCRINNIVKGKVQPGSFEMQDGQTIEAMEENDTYKYLGMLQATRIDHRTMKEKITSEFTTRARRILKTSLNSKNLFKALNTYACTALTYSFGIVAWSKTDIQNLQRKARTLLTKAQKHHPRSAVERTTLPRHQGGRALTDIGKQMDRQISLLRNFFLEKARSSALHQAICEIDDLTPLKLRDREIDTHHVTDQEKHRSWAEKPLHGRHVNEVGQEYVDNYASNYWLTSGQMFPETEGFLLAIQDQVIPTRNYLKYIVSDPSVQSDRCRYDCQATESIQHITGGCQVFAQTEYKARHDNVGKILHQELAVKLNLVATEKVPYYNYAPEPVLENGEYKLYWDRTVLTDQRTVNNRPDLILVDKRLRRTTLIDVAIPNNSNLQTKSNEKIVKYRDLQEQIKRQWEMQCVKTVPIIISSTGLIPKALLENLKQLGLSEHLYKIMQKAVLLGTARVVRKFMGTEDRPPSRTR

SEQ ID NO: 7914 - protein, 1130 aa, Pissodes strobi
MKWTTSINETIMRIFYRVTNNEREMIGYRQQLHAAFCAIYPELNVTEQRVADQYRVIMRNNLIPQTRLTTIKREIELELNDNHPLPETQHSEEEEDEQLQINPETQPERDANITQNTENDLIKLQAEFGRALAEYDGTNPLLRSQIPKVNSSRRLAKTLELLNRRILPEHLLAASTLEQIHLLLYCAATAVTRTLGVKQHVKRERNNLVPMGQPPWARRLQNKIESIRKDIGQLTAFIGGVQTSEIRKKVTTIMGRHHRHALHDPENRTPEECLDSLKQKLSVYAGRLKRYKSSNSRKQDNALFVRSEKSFYRKLNSLTSPGEKNYPSKDDITTFWSGQLTTVTTCNNQAGWMDEERQKSQDFERMHHQPFTTEEVSTIIKGLHNWKAPGPDHLHNYWIKKLWATHEQLTILINDLLVEPNKLPKFLTQGSTFLLPKDSQNTHDPSKYRPITCLPTMYKLITACITERIYQHCENNNIIAVQQKGCTKGAMGCKEQLIIDSVICNQAYGNKRNLYAAYVDYKKAFDSIPHEWLINVLKIYKVDERIVTLLENTMAVWRTTMHLQLPTGETIETSTIPIRKGIFQGDSLSPLWFCLAMNPLSSRLNSTAYGFALKKNRRELIRINHLLYMDDLKLLGATRNQLDQMLNILEEFSNDIGMEFGLDKCRINNIVKGKVQPGSFEMQDGQTIEAMEENDTYKYLGMLQATRIDHRTMKEKITSEFTTRARRILKTSLNSKNLFKALNTYACTALTYSFGIVAWSKTDIQNLQRKARTLLTKAQKHHPRSAVERTTLPRHQGGRALTDIGRQMDRQISLLRNFFLEKARSSALHQAICEIDDLTPLKLRDREIDTHHVTDQEKHRSWAEKPLHGRHVNGVGQEYVDNYASNYWLTSGQMFPETEGFLLAIQDQVIPTRNYLKCIVSDPSVQSDRCRYDCQATESIQHITGGCQVFAQTEYKARHDNVGKILHQELAVKLNLVATEKVPYYNYAPEPVLENGEYKLYWDRTVLTDQRTVNNRPDLILVDKRLRRTTLIDVAIPNNSNLQTKSNEKIVKYRDLQEQIKRQWEMQCVKTVPIIISSTGLIPKALLENLKQLGLSEHLYKIMQKAVLLGTARVVRKFMGTEDRPPSRTR

SEQ ID NO: 7915 - protein, 1216 aa, Pissodes strobi
MKMERRRSRSLGTMPLPGDRQGMSGAGAGHDSMRDVGGRVLRRRAPVIQTVTARQRSNSPPKAPPAEGAAREIQPVLTQAGLPRRRMKWTTSINETIMRIFYRVTNNEREVIGYRQQLHAAFCAIYPELNVTEQRVADQYRVIMRNNLIPQTRLTTIKREIELELNDNHPLPETQHSEEEEDEQLQINPETQPERDANITQNTENDLIKLQAEFGRALAEYDGTNPLLRSQIPRVNSSRRLAKTLELLNRRILPEHLLAASTLEQIHLLLYCAATAVTRTLGVKQHVKRERNNLVPMGQPTWARRLQDKIESIRKDIGQLTAFIGGVQTSEIRKKVTTIMGRHHRHALHDPENRTPEECLDSLKQKLSVYAGRLKRYKSSNSRKQDNALFVRSEKSFYRKLNSLTSPGEKNYPSKDDITTFWSGQLTTVTTCNNQAGWMDEERQKSQDFERMHHQPFTTEEVSTIIKGLHNWKAPGPDHLHNYWIKKLWATHEQLTILINDLLVEPNKLPKFLTQGSTFLLPKDSQNTHDPSKYRPITCLPTMYKLITACITERIYQHCENNNIIAVQQKGCTKGAMGCKEQLIIDSVICNQAYGNKRNLYAAYVDYKKAFDSIPHEWLINVLKIYKVDKRIVTLLENTMAVWRTTMHLQLPTGETIETSTIPIRKGIFQGDSLSPLWFCLAMNPLSSRLNSTAYGFALKKNRRELIRINHLLYMDDLKLLGATRNQLDQMLNILEEFSNDIGMEFGLDKCRINNIVKGKVQPGSFEMQDGQTIEAMEENDTYKYLGMLQATRIDHRTMKEKITSEFTTRARRILKTSLNSKNLFKALNTYACTALTYSFGIVAWSKTDIQNLQRKARTLLTKAQKHHPRSAVERTTLPRHQGGRALTDIGKQMDRQISLLRNFFLEKARSSALHQAICEIDDLTPLKLRDREIDTHHVTDQEKHRSWAEKPLHGRHVNEVGQEYVDNYASNYWLTSGQMFPETEGFLLAIQDQVIPTRNYLKYIVSDPSVQSDRCRYDCQATESIQHITGGCQVFAQTEYKARHDNVGKILHQELAVKLNLVATEKVPYYNYAPEPVLENGEYKLYWDRTVLTDQRTVNNRPDLILVDKRLRRTTLIDVAIPNNSNLQTKSNEKIVKYRDLQEQIKRQWEMQCVKTVPIIISSTGLIPKALLENLKQLGLSEHLYKIMQKAVLLGTARVVRKFMGTEDRPPSRTR

SEQ ID NO: 7916 - protein, 877 aa, Pissodes strobi
MGRHHRHALHDPENRTPEECLDSLKQKLSVYAGRLKRYKSSNSRKQDNALFVRSEKSFYRKLNSLTSPGEKNYPSKDDITTFWSGQLTTVTTCNNQAGWMDEERQKSQDFERMHHQPFTTEEVSTIIKGLHNWKAPGPDHLHNYWIKKLWATHEQLTILINDLLVEPNKLPKFLTQGSTFLLPKDSQNTHDPSKYRPITCLPTMYKLITACITERIYQHCENNNIIAVQQKGCTKGAMGCKEQLIIDSVICNQAYGNKRNLYAAYVDYKKAFDSIPHEWLINVLKIYKVDERIVTLLENTMAVWRTTMHLQLPTGETIETSTIPIRKGIFQGDSLSPLWFCLAMNPLSSRLNSTAYGFALKKNRRELIRINHLLYMDDLKLLGATRNQLDQMLNILEEFSNDIGMEFGLDKCRINNIVKGKVQPGSFEMQDGQTIEAMEENDTYKYLGMLQATRIDHRTMKEKITSEFTTRARRILKTSLNSKNLFKALNTYACTALTYSFGIVAWSKTDIQNLQRKARTLLTKAQKHHPRSAVERTTLPRHQGGRALTDIGKQMDRQISLLRNFFLEKARSSALHQAICEIDDLTPLKLRDREIDTHHVTDQEKHRSWAEKPLHGRHVNEVGQEYVDNYASNYWLTSGQMFPETEGFLLAIQDQVIPTRNYLKYIVSDPSVQSDRCRYDCQATESIQHITGGCQVFAQTEYKARHDNVGKILHQELAVKLNLVATEKVPYYNYAPEPVLENGEYKLYWDRTVLTDQRTVNNRPDLILVDKRLRRTTLIDVAIPNNSNLQTKSNEKIVKYRDLQEQIKRQWEMQCVKTVPIIISSTGLIPKALLENLKQLGLSEHLYKIMQKAVLLGTARVVRKFMGTEDRPPSRTR

SEQ ID NO: 7917 - protein, 1216 aa, Pissodes strobi
MKMERRRSRSLGTMPLPGDRQGMSGAGAGHDSMRDVGGRVLRRRAPVIQTVTARQRSNSPPKAPPAEGAAREIQPVLTQAGLPRRRMKWTTSINETIMRIFYRVTNNEREMIGYRQQLHAAFCAIYPELNVTEQRVADQYRVIMRNNLIPQTRLTTIKREIELELNDNHPLPETQHSEEEEDEQLQINPETQPERDANITQNTENDLIKLQAEFGRALAEYDGTNPLLRSQIPKVNSSRRLAKTLELLNRRILPEHLLAASTLEQIHLLLYCAATAVTRTLGVKQHVKRERNNLVPMGQPPWARRLQNKIEYIRKDIGQLTAFIGGVQTSEIRKKVTTIMGRHHRHALHDPENRTPEECLDSLKQKLSVYAGRLKRYKSSNSRKQDNALFVRSEKSFYRKLNSLTSPGEKNYPSKDDITTFWSGQLTTVTTCNNQAGWMDEERQKSQDFERMHHQPFTTEEVSTIIKGLHNWKAPGPDHLHNYWIKKLWATHEQLTILINDLLVEPNKLPKFLTQGSTFLLPKDSQNTHDPSKYRPITCLPTMYKLITACITERIYQHCENNNIIAVQQKGCTKGAMGCKEQLIIDSVICNQAYGNKRNLYAAYVDYKKAFDSIPHEWLINVLKIYKVDERIVTLLENTMAVWRTTMHLQLPTGETIETSTIPIRKGIFQGDSLSPLWFCLAMNPLSSRLNSTAYGFALKKNRRELIRINHLLYMDDLKLLGATRNQLDQMLNILEEFSNDIGMEFGLDKCRINNIVKGKVQPGSFEMQDGQTIEAMEENDTYKYLGMLQATRIDHRTMKEKITSEFTTRARRILKTSLNSKNLFKALNTYACTALTYSFGIVAWSKTDIQNLQRKARTLLTKAQKHHPRSAVERTTLPRHQGGRALTDIGKQMDRQISLLRNFFLEKARSSALHQAICEIDDLTPLKLRDREIDTHHVTDQEKHRSWAEKPLHGRHVNEVGQEYVDNYASNYWLTSGQMFPETEGFLLAIQDQVIPTRNYLKYIVSDPSVQSDRCRYDCQATESIQHITGGCQVFAQTEYKARHDNVGKILHQELAVKLNLVATEKVPYYNYAPEPVLENGEYKLYWDRTVLTDQRTVNNRPDLILVDKRLRRTTLIDVAIPNNSNLQTKSNEKIVKYRDLQEQIKRQWEMQCVKTVPIIISSTGLIPKALLENLKQLGLSEHLYKIMQKAVLLGTARVVRKFMGTEDRPPSRTR

SEQ ID NO: 7918 - protein, 1130 aa, Pissodes strobi
MKWTTSINETIMRIFYRVTNNEREMIGYRQQLHAAFCAIYPELNVTEQRVADQYRVIMRNNLIPQTRLTTIKREIELELNDNHPLPETQHSEEEEDEQLQINPETQPERDANITQNTENDLIKLQAEFGRALAEYDGTNPLLRSQIPRVNSSRRLAKTLELLNRRILPEHLLAASTLEQIHLLLYCAATAVTRTLGVKQHVKRERNNLVPMGQPPWARRLQNKIESIRKDIGQLTAFIGGVQTSEIRKKVTTIMGRHHRHALHDPENRTPEECLDSLKQKLSVYAGRLKRYKSSNSRKQDNALFVRSEKSFYRKLNSLTSPGEKNYPSKDDITTFWSGQLTTVTTCNNQAGWMDEERQKSQDFERMHHQPFTTEEVSTIIKGLHNWKAPGPDHLHNYWIKKLWATHEQLTILINDLLVEPNKLPKFLTQGSTFLLPKDSQNTHDPSKYRPITCLPTMYKLITACITERIYQHCENNNIIAVQQKGCTKGAMGCKEQLIIDSVICNQAYGNKRNLYAAYVDYKKAFDSIPHEWLINVLKIYKVDERIVTFLENTMAVWRTTMHLQLPTGETIETSTIPIRKGIFQGDSLSPLWFCLAMNPLSSRLNSTAYGFALKKNRRELIRINHLLYMDDLKLLGATRNQLDQMLNILEEFSNDIGMEFGLDKCRINNIVKGKVQPGSFEMQDGQTIEAMEENDTYKYLGMLQATRIDHRTMKEKITSEFTTRARRILKTSLNSKNLFKALNTYACTALTYSFGIVAWSKTDIQNLQRKARTLLTKAQKHHPRSAVERTTLPRHQGGRALTDIGKQMDRQISLLRNFFLEKARSSALHQAICEIDDLTPLKLRDREIDTHHVTDQEKHRSWAEKPLHGRHVNEVGQEYVDNYASNYWLTSGQMFPETEGFLLAIQDQVIPTRNYLKYIVSDPSVQSDRCRYDCQATESIQHITGGCQVFAQTEYKARHDNVGKILHQELAAKLNLVATEKVPYYNYAPEPVLENGEYKLYWDRTVLTDQRTVNNRPDLILVDKRLRRTTLIDVAIPNNSNLQTKSNEKIVKYRDLQEQIKRQWEMQCVKTVPIIISSTGLIPKALLENLKQLGLSEHLYKIMQKAVLLGTARVVRKFMGTEDRPPSRTR

SEQ ID NO: 7919 - protein, 969 aa, Pissodes strobi
MFIITLSLKGKFETNRFINQDSTTAANSNPIGTNCLAQISFKSIIMPGDKKTRKLKLVIIIIIIIIIIIIIIITAFIGGVQTSEIRKKVTTIMGRHHRHALHDPENRTPEECLDSLKQKLSVYAGRLKRYKSSNSRKQDNALFVRSEKSFYRKLNSLTSPGEKNYPSKDDITTFWSGQLTTVTTCNNQAGWMDEERQKSQDFERMHHQPFTTEEVSTIIKGLHNWKAPGPDHLHNYWIKKLWATHEQLTILINDLLVEPNKLPKFLTQGSTFLLPKDSQNTHDPSKYRPITCLPTMYKLITACITERIYQHCENNNIIAVQQKGCTKGAMGCKEQLIIDSVICNQAYGNKRNLYAAYVDYKKAFDSIPHEWLINVLKIYKVDERIVTLLENTMAVWRTTMHLQLPTGETIETSTIPIRKGIFQGDSLSPLWFCLAMNPLSSRLNSTAYGFALKKNRRELIRINHLLYMDDLKLLGATRNQLDQMLNILEEFSNDIGMEFGLDKCRINNIVKGKVQPGSFEMQDGQTIEAMEENDTYKYLGMLQATRIDHRTMKEKITSEFTTRARRILKTSLNSKNLFKALNTYACTALTYSFGIVAWSKTDIQNLQRKARTLLTKAQKHHPRSAVERTTLPRHQGGRALTDIGKQMDRQISLLRNFFLEKARSSALHQAICEIDDLTPLKLRDREIDTHHVTDQEKHRSWAEKPLHGRHVNEVGQEYVDNYASNYWLTSGQMFPETEGFLLAIQDQVIPTRNYLKYIVSDPSVQSDRCRYDCQATESIQHITGGCQVFAQTEYKARHDNVGKILHQELAVKLNLVATEKVPYYNYAPEPVLENGEYKLYWDRTVLTDQRTVNNRPDLILVDKRLRRTTLIDVAIPNNSNLQTKSNEKIVKYRDLQEQIKRQWEMQCVRTVPIIISSTGLIPKALLENLKQLGLSEHLYKIMQKAVLLGTARVVRKFMGTEDRPPSRTR

SEQ ID NO: 7920 - protein, 1216 aa, Pissodes strobi
MKMERRRSRSLGTMPLPGDRQGMSGAGAGHDSMRDVGGRVLRRRAPVIQTVTARQRSNSPPKAPPAEGAAREIQPVLTQAGLPRRRMKWTTSINETIMRIFYRVTNNEREMIGYRQQLHAAFCAIYPELNVTEQRVADQYRVIMRNNLIPQTRLTTIKREIELELNDNHPLPETQHSEEEEDEQLQINPETQPERDANITQNTENDLIKLQAEFGRALAEYDGTNPLLRSQIPKVNSSRRLAKTLELLNRRILPEHLLAASTLEQIHLLLYCAATAVTRTLGVKQHVKRERNNLVPMGQPPWARRLQNKIESIRKDIGQLTAFVGGVQTSEIRKKVTTIMGRHHRHALHDPENRTPEECLDSLKQKLSVYAGRLKRYKSSNSRKQDNALFVRSEKSFYRKLNSLTSPGEKNYPSKDDITTFWSGQLTTVTTCNNQAGWMDEERQKSQDFERMHHQPFTTEEVSTIIKGLHNWKAPGPDHLHNYWIKKLWATHEQLTILINDLLVEPNKLPKFLTQGSTFLLPKDSQNTHDPSKYRPITCLPTMYKLITACITERIYQHCENNNIIAVQQKGCAKGAMGCKEQLIIDSVICNQAYGSKRNLYAAYVDYKKAFDSIPHEWLINVLKIYKVDERIVTLLENTMAVWRTTMHLQLPTGETIETSTIPIRKGIFQGDSLSPLWFCLAMNPLSSRLNSTAYGFALTKNRRELIRINHLLYMDDLKLLGATRNQLDQMLNILEEFSNDIGMEFGLDKCRINNIVKGKVQPGSFEMQDGQTIEAMEENDTYKYLGMLQATRIDHRTMKEKITSEFTTRARRILKTSLNSKNLFKALNTYACTALTYSFGIVAWSKTDIQNLQRKARTLLTKAQKHHPRSAVERTTLPRHQGGRALTDIGKQMDRQISLLRNFFLEKARSSALHQAICEIDDLTPLKLRDREIDTHHVTDQEKHRSWAEKPLHGRHVNEVGQGYVDNYASNYWLTSGQMFPETEGFLLAIQDQVIPTRNYLKYIVSDPSVQSDRCRYDCQATESIQHITGGCQVFAQTEYKARHDNVGKILHQELAVKLNLVATEKVPYYNYAPEPVLENGEYKLYWDRTVLTDQRTVNNRPDLILVDKRLRRTTLIDVAIPNNSNLQTKSNEKIVKYRDLQEQIKRQWEMQCVKTVPIIISSTGLIPKALLENLKQLGLSEHLYKIMQKAVLLGTARVVRKFMGTEDRPPSRTR

SEQ ID NO: 7921 - protein, 1216 aa, Pissodes strobi
MKMERRRSRSLGTMLLPGDRQGMSGAGAGHDSMRDVGGRVLRRRAPVIQTVTARQRSNSPPKAPPAEGAAREIQPMLTQAGLPRRRMKWTTSINETIMRIFYRVTNNEREMIGYRQQLHAAFCAIYPELNVTEQRVADQYRVIMRNNLIPQTRLTTIKREIELELNDNHPLPETQHSEEEEDEQLQINPETQPERDANITQNTENDLIKLQAEFGRALAEYDGTNPLLRSQIPKVNSSRRLAKTLELLNRRILPEHLLAASTLEQIHLLLYCAATAVTRTLGVKQHVKRERNNLVPMGQPPWARRLQNKIESIRKDIGQLTAFVGGVQTSEIRKKVTTIMGRHHRHALHDPENRTPEECLDSLKQKLSVYAGRLKRYKSSNSRKQDNALFVRSEKSFYRKLNSLTSPGEKNYPSKDDITTFWSGQLTTVTTCNNQAGWMDEERQKSQDFERMHHQPFTTEEVSTIIKGLHNWKAPGPDHLHNYWIKKLWATHEQLTILINDLLVEPNKLPKFLTQGSTFLLTKDSQNTHDPSKYRPITCLPTMYKLITACITERIYQHCENNNIIAVQQKGCTKGAMGCKEQLIIDSVICNQAYGNKRNLYAAYVDYKKAFDSIPHEWLINVLKIYKVDERIVTLLENTMAVWRTTMHLQLPTGETIETSTIPIRKGIFQGDSLSPLWFCLAMNPLSSRLNSTAYGFALKKNRRELIRINHLLYMDDLKLLGATRNQLDQMLNILEEFSNDIGMEFGLDKCRINNIVKGKVQPGSFEMQDGQTIEAMEENDTYKYLGMLQATRIDHRTMKEKITSEFTTRARRILKTSLNSKNLFKALNTYACTALTYSFGIVAWSKTDIQNLQRKARTLLTKAQKHHPRSAVERTTLPRHQGGRALTDIGKQMDRQISLLRNFFLEKARSSALHQAICEIDDLTPLKLRDREIDTHHVTDQEKHRSWAEKPLHGRHVNEVGQEYVDNYASNYWLTSGQMFPETEGFLLAIQDQVIPTRNYLKYIVSDPSVQSDRCRYDCQATESIQHITGGCQVFAQTEYKARHDNVGKILHQELAVKLNLVATEKVPYYNYAPEPVLENGEYKLYWDRTVLTDQRTVNNKPDLILVDKRLRRTTLIDVAIPNNSNLQTKSNEKIVKYRDLQEQIKRQWEMQCVKTVPIIISSTGLIPKALLENLKQLGLSEHLYKIMQKAVLLGTARVVRKFMGTEDRPPSRTR

SEQ ID NO: 7922 - protein, 1216 aa, Pissodes strobi
MKMERRRSRSLGTMPLPGDRQGMSGAGAGHDSMRDVGGRVLRRRAPVIQTVTARQRSNSPPKAPPAEGAAREIQPVLTQAGLPRRRMKWTTSINETIMRIFYRVTNNEREMIGYRQQLHAAFCAIYPELNVTEQRVADQYRVIMRNNLIPQTRLTTIKREIELELNDNHPLPETQHSEEEEDEQLQINPETQPERDANITQNTENDLIKLQAEFGRALAEYDGTNPLLRSQIPRVNSSRRLAKTLELLNRRILPEHLLAASTLEQIHLLLYCAATAVTRTLGVKQHVKRERNNLVPMGQPPWARRLQNKIESIRKDIGQLTAFIGGVQTSEIRKKVTTIMGRHHRHALHDPENRTPEECLDSLKQKLSVYAGRLKRYKSSNSRKQDNALFVRSEKSFYRKLNSLTSPGEKNYPSKDDITTFWSGQLTTVTTCNNQAGWMDEERQKSQDFERMHHQPFTTEEVSTIIKGLHNWKAPGPDHLHNYWIKKLWATHEQLTILINDLLVEPNKLPKFLTQGSTFLLPKDSQNTHDPSKYRPITCLPTMYKLITACITERIYQHCENNNIIAVQQKGCTKGAMGCKEQLIIDSVICNQAYGNKRNLYAAYVDYKKAFDSIPHEWLINVLKIYKVDERIVTLLENTMAVWRTTMHLQLPTGETIETSTIPIRKGIFQGDSLSPLWFCLAMNPLSSRLNSTAYGFALKKNRRELIRINHLLYMDDLKLLGATRNQLDQMLNILEEFSNDIGMEFGLDKCRINNIVKGKVQPGSFEMQDGQTIEAMEENDTYKYLGMLQATRIDHRTMKEKITSEFTTRARRILKTSLNSKNLFKALNTYACTALTYSFGIVAWSKTDIQNLQRKARTLLTKAQKHHPRSAVERTTLPRHQGGRALTDIGKQMDRQISLLRNFFLEKAGSSALHQAICEIDDLTPLKLRDREIDTHHVTDQEKHRSWAEKPLHGRHVNEVGQEYVDNYASNYWLTSGQMFPETEGFLLAIQDQVIPTRNYLKYIVSNPSVQSDRCRYDCQATESIQHITGGCQVFAQTEYKARHDNVGKILHQELAVKLNLVATEKVPYYNYAPEPVLENGEYKLYWDRTVLTDQRTVNNRPDLILVDKRLRRTTLIDVAIPNNSNLQTKSNEKIVKYRDLQEQIKRQWEMQCVKTVPIIISSTGLIPKALLENLKQLGLSEHLYKIMQKAVLLGTARVVRKFMGTEDRPPSRTR

SEQ ID NO: 7923 - protein, 1216 aa, Pissodes strobi
MKMERRRSRSLGTMPLPGDRQGMSGAGAGHDSMRDVGGRVLRRRAPVIQTVTARQRSNSPPKAPPAEGAAREIQPVLTQAGLPRRRMKWTTSINETIMRIFYRVTNNEREMIGYRQQLHAAFCAIYPELNVTEQRVADQYRVIMRNNLIPQTRLTTIKREIELELNDNHPLPETQHSEEEEDEQLQINPETQPERDANITQNTENDLIKLQAEFGRALAEYDGTNPLLRSQIPKVNSSRRLAKTLELLNRRILPEHLLAASTLEQIHLLLYCAATAVTRTLGVKQHVKRERNNLVPMGQPPWARRLQNKIESIRKDIGQLTAFIGGVQTSEIRKKVTTIMGRHHRHALHDPENRTPEECLDSLKQKLSVYAGRLKRYKSSNSRKQDNALFVRSEKSFYRKLNSLTSPGEKNYPSKDDITTFWSGQLTTVTTCNNQAGWMDEERQKSQDFERMHHQPFTTEEVSTIIKGLHNWKAPGPDHLHNYWIKKLWATHEQLTILINDLLVEPNKLPKFLTQGSTFLLPKDSQNTHDPSKYRPITCLPTMYKLITACITERIYQHCENNNIIAVQQKGCTKGAMGCKEQLIIDSVICNQAYGNKRNLYAAYVDYKKAFDSIPHEWLINVLKIYKVDERIVTLLENTMAVWRTTMHLQLPTGETIETSTIPIRKGIFQGDSLSPLWFCLAMNPLSSRLNSTAYGFALKKNRRELIRINHLLYMDDLKLLGATRNQLDQMLNILEEFSNDIGMEFGLDKCRINNIVKGKVQPGSFEMQDGQTIEAMEENDTYKYLGMLQATRIDHRTMKEKITAEFTTRARRILKTSLNSKNLFKALNTYACTALTYSFGIVAWSKTDIQNLQRKARTLLTKAQKHHPRSAVERTTLPRHQGGRALTDIGKQMDRQISLLRNFFLEKAGSSALHQAICEIDDLTPLKLRDREIDTHHVTDQEKHRSWAEKPLHGRHVNEVGQEYVDNYASNYWLTSGQMFPETEGFLLAIQDQVIPTRNYLKYIVSDPSVQSDRCRYDCQATESIQHITGGCQVFAQTEYKARHDNVGKILHQELAVKLNLVATEKVPYYNYAPEPVLENGEYKLYWDRTVLTDQRTVNNRPDLILVDKRLRRTTLIDVAIPNNSNLQTKSNEKIVKYRDLQEQIKRQWEMQCVKTVPIIISSTGLIPKALLENLKQLGLSEHLYKIMQKAVLLGTARVVRKFMGTEDRPPSRTR

SEQ ID NO: 7924 - protein, 1073 aa, Pissodes strobi
MRNNLIPQTRLTTIKREIELELNDNHPLPETQHSEEEEDEQLQINPETQPERDANTTQNTENDLIKLQAEFGRALAEYDGTNPLLRSQIPKVNSSRRLAKTLELLNRRILPEHLLAASTLEQIHLLLYCAATAVTRTLGVKQHVKRERNNLVPMGQPPWARRLQNKIESIRKDIGQLTAFIGGVQTSEIRKKVTTIMGRHHRHALHDPENRTPEECLDSLKQKLSVYAGRLKRYKSSNSRKQDNALFVRSEKSFYRKLNSLTSPGEKNYPSKDDITTFWSGQLTTVTTCNNQAGWMDEERQKSQDFERMHHQPFTTEEVSTIIKGLHNWKAPGPDHLHNYWIKKLWATHEQLTILINDLLVEPNKLPKFLTQGSTFLLPKDSQNTHDPSKYRPITCLPTMYKLITACITERIYQHCENNNIIAVQQKGCTKGAMGCKEQLIIDSVICNQAYGDKRNLYAAYVDYKKAFDSIPHEWLINVLKIYKVDERIVTLLENTMAVWRTTMHLQLPTGETIETSTIPIRKGIFQGDSLSPLWFCLAMNPLSSRLNSTAYGFALKKNRRELIRINHLLYMDDLKLLGATRNQLDQMLNILEEFSNDIGMEFGLDKCRINNIVKGKVQPGSFEMQDGQTIEAMEENDTYKYLGMLQATRIDHRTMKEKITSEFTTRARRILKTSLNSKNLFKALNTYACTALTYSFGIVAWSKTDIQNLQRKARTLLTKAQKHHPRSAVERTTLPRHQGGRALTDIGKQMDRQISLLRNFFLEKARSSALHQAICEIDDLTPLKLRDREIDTHHVTDQEKHRSWAEKPLHGRHVNEVGQEYVDNYASNYWLTSGQMFPETEGFLLAIQDQVIPTRNYLKYIVSDPSVQSDRCRYDCQATESIQHITGGCQVFAQTEYKARHDNVGKILHQELAVKLNLVATEKVPYYNYAPEPVLENGEYKLYWDRTVLTDQRTVNNRPDLILVDKRLRRTTLIDVAIPNNSNLQTKSNEKIVKYRDLQEQIKRQWEMQCVKTVPIIISSTGLIPKALLENLKQLGLSEHLYKIMQKAVLLGTARVVRKFMGTEDRPPSRTR

SEQ ID NO: 7925 - protein, 1216 aa, Pissodes strobi
MKMERRRSRSLGTMPLPGDRQGMSGAGAGHDSMRDVGGRVLRRRAPVIQTVTARQRSNSPPKAPPAEGAAREIQPVLTQAGLPRRRMKWTTSINETIMRIFYRVTNNEREMIGYRQQLHAAFCAIYPELNVTEQRVADQYRVIMRNNLIPQTRLTTIKREIELELNDNHPLPETQHSEEEEDEQLQINPETQPERDANITQNTENDLIKLQAEFGRALAEYDGTNPLLRSQIPKVNSSRRLAKTLELLNRRILPEHLLAASTLEQIHLLLYCAATAVTRTLGVKQHVKRERNNLVPMGQPPWARRLQNKIESIRKDIGQLTAFVGGVQTSEIRKKVTTIMGRHHRHALHDPENRTPEECLDSLKQKLSVYAGRLKRYKSSNSRKQDNALFVRSEKSFYRKLNSLTSPGEKNYPSKDDITTFWSGQLTTVTTCNNQAGWMDEERQKSQDFERMHHQPFTTEEVSTIIKGLHNWKAPGPDHLHNYWIKKLWATHEQLTILINDLLVEPNKLPKFLTQGSTFLLPKDSQNTHDPSKYRPITCLPTMYKLITACITERIYQHCENNNIIAVQQKGCAKGAMGCKEQLIIDSVICNQAYGSKRNLYAAYVDYKKAFDSIPHEWLINVLKIYKVDERIVTLLENTMAVWRTTMHLQLPTGETIETSTIPIRKGIFQGDSLSPLWFCLAMNPLSSRLNSTAYGFALKKNRRELIRINHLLYMDDLKLLGATRNQLDQMLNILEEFSNDIGMEFGLDKCRINNIVKGKVQPGSFEMQDGQTIEAMEENDTYKYLGMLQATRIDHRTMKEKITSEFTTRARRILKTSLNSKNLFKALNTYACTALTYSFGIVAWSKTDIQNLQRKARTLLTKAQKHHPRSAVERTTLPRHQGGRALTDIGKQMDRQISLLRNFFLEKARSSALHQAICEIDDLTPLKLRDREIDTHHVTDQEKHRSWAEKPLHGRHVNEVGQGYVDNYASNYWLTSGQMFPETEGFLLAIQDQVIPTRNYLKYIVSDPSVQSDRCRYDCQATESIQHITGGCQVFAQTEYKARHDNVGKILHQELAVKLNLVATEKVPYYNYAPEPVLENGEYKLYWDRTVLTDQRTVNNRPDLILVDKRLRRTTLIDVAIPNNSNLQTKSNEKIVKYRDLQEQIKRQWEMQCVKTVPIIISSTGLIPKALLENLKQLGLSEHLYKIMQKAVLLGTARVVRKFMGTEDRPPSRTR

SEQ ID NO: 7926 - protein, 1216 aa, Pissodes strobi
MKMERRRSRSLGTMPLPGDRQGMSGAGAGHDSMRDVGGRVLRRRAPVIQTVTARQRSNSPPKAPPAEGAAREIQPVLTQAGLPRRRMKWTTSINETIMRIFYRVTNNEREMIGYRQQLHAAFCAIYPELNVTEQRVADQYRVIMRNNLIPQTRLTTIKREIELELNDNHPLPETQHSEEEEDEQLQINPETQPERDANITQNTENDLIKLQAEFGRALAEYDGTNPLLRSQIPRVNSSRRLAKTLELLNRRILPEHLLAASTLEQIHLLLYCAATAVTRTLGVKQHVKRERNNLVPMGQPPWARRLQNKIESIRKDIGQLTAFVGGVQTSEIRKKVTTIMGRHHRHALHDPENRTPEECLDSLKQKLSVYAGRLKRYKSSNSRKQDNALFVRSEKSFYRKLNSLTSPGEKNYPSKDDITTFWSGQLTTVTTCNNQAGWMDEERQKSQDFERMHHQPFTTEEVSTIIKGLHNWKAPGPDHLHNYWIKKLWATHEQLTILINDLLVEPNKLPKFLTQGSTFLLPKDSQNTHDPSKYRPITCLPTMYKLITACITERIYQHCENNNIIAVQQKGCTKGAMGCKEQLIIDSVICNQAYGNKRNLYAAYVDYKKAFDSIPHEWLINVLKIYKVDERIVTLLENTMAVWRTTMHLQLPTGETIETSTIPIRKGIFQGDSLSPLWFCLAMNPLSSRLNSTAYGFALKKNRRELIRINHLLYMDDLKLLGAIRNQLDQMLNILEEFSNDIGMEFGLDKCRINNIVKGKVQPGPFEMQDGQTIEAMEENDTYKYLGMLQATRIDHRTMKEKITSEFTTRARRILKTSLNSKNLFKALNTYACTALTYSFGIVAWSKTDIQNLQRKARTLLTKAQKHHPRSAVERTTLPRHQGGRALTDIGKQMDRQISLLRNFFLEKARSSALHQAICEIDDLTPLKLRDREIDTHHVTDQEKHRSWAEKPLHGRHVNEVGQEYVDNYASNYWLTSGQMFPETEGFLLAIQDQVIPTRNYLKYIVSDPSVQSDRCRYDCQATESIQHITGGCQVFAQTEYKARHDNVGKILHQELAVKLNLVATEKVPYYNYAPEPVLENGEYKLYWDRTVLTDQRTVNNRPDLILVDKRLRRTTLIDVAIPNNSNLQTKSNEKIVKYRDLQEQIKRQWEMQCVKTVPIIISSTGLIPKALLENLKQLGLSEHLYKIMQKAVLLGTARVVRKFMGTEDRPPSRTR

SEQ ID NO: 7927 - protein, 1216 aa, Pissodes strobi
MKMERRRSRSLGTMPLPGDRQGMSGAGAGHDSMRDVGGRVLRRRAPVIQTVTARQRSNSPPKAPPAEGAAREIQPVLTQAGLPRRRMKWTTSINETIMRIFYRVTNNEREMIGYRQQLHAAFCAIYPELNVTEQRVADQYRVIMRNNLIPQTRLTTIKREIELELNDNHPLPETQHSEEEEDEQLQINPETQPERDANITQNTENDLIKLQAEFGRALAEYDGTNPLLRSQIPKVNSSRRLAKTLELLNRRILPEHLLAASTLEQIHLLLYCAATAVTRTLGVKQHVKRERNNLVPMGQPPWARRLQNKIESIRKDIGQLTAFVGGVQTSEIRKKVTTIMGRHHRHALHDPENRTPEECLDSLKQKLSVYAGRLKRYKSSNSRKQDNALFVRSEKSFYRKLNSLTSPGEKNYPSKDDITTFWSGQLTTVTTCNNQAGWMDEERQKSQDFERMHHQPFTTEEVSTIIKGLHNWKAPGPDHLHNYWIKKLWATHEQLTILINDLLVEPNKLPKFLTQGSTFLLPKDSQNTHDPSKYRPITCLPTMYKLITACITERIYQHCENNNIIAVQQKGCTKGAMGCKEQLIIDSVICNQAYGNKINLYAAYVDYKKAFDSIPHEWLINVLKIYKVDERIVTLLENTMAVWRTTMHLQLPTGETIETSTIPIRKGIFQGDSLSPLWFCLAMNPLSSRLNSTAYGFALKKNRRELIRINHLLYMDDLKLLGATRNQLDQMLNILEEFSNDIGMEFGLDKCRINNIVKGKVQPGSFEMQDGQTIEAMEENDTYKYLGMLQATRIDHRTMKEKITSEFTTRARRILKTSLNSKNLFKALNTYACTALTYSFGIVAWSKTDIQNLQRKARTLLTKAQKHHPRSAVERTTLPRHQGGRALTDIGKQMDRQITLLRNFFLEKAGSSALHQAICEIDDLTPLKLRDREIDTHHVTDQEKHRSWAEKPLHGRHVNEVGQEYVDNYASNYWLTSGQMFPETEGFLLAIQDQVIPTRNYLKYIVSNPSVQSDRCRYDCQATESIQHMTGGCQVFAQTEYKARHDNVGKILHQELAVKLNLVATEKVPYYNYAPEPVLENGEYKLYWDRTVLTDQRTVNNRPDLILVDKRLRRTTLIDVAIPNNSNLQTKSNEKIVKYRDLQEQIKRQWEMQCVRTVPIIISSTGLIPKALLENLKQLGLSEHLYKIMQKAVLLGTARVVRKFMGTEDRPPSRTR

SEQ ID NO: 7928 - protein, 1216 aa, Pissodes strobi
MKMERRRSRSLGTMPLPGDRQGMSGAGAGHDSMRDVGGRVLRRRAPVIQTVTARQRSNSPPKAPPAEGAAREIQPVLTQAGLPRRRMKWTTSINETIMRIFYRVTNNEREMIGYRQQLHAAFCAIYPELNVTEQRVADQYRVIMRNNLIPQTRLTTIKREIELELNDNHPLPETQHSEEEEDEQLQINPETQPERDANITQNTENDLIKLQAEFDRALAEYDGTNPLLRSQIPKVNSSRRLAKTLELLNRRILPEHLLAASTLEQIHLLLYCAATAVTRTLGVKQHVKRERNNLVPMGQPPWARWLQNKIESIRKDIGQLTAFVGGVQTSEIRKKVTTIMGRHHRHALHDPENRTPEECLDSLKQKLSVYAGRLKRYKSSNSRKQDNALFVRSEKSFYRKLNSLTSPGEKNYPSKDDITTFWSGQLTTVTTCNNQAGWMDEERQKSQDFERMHHQPFTTEEVSTIIKGLHNWKAPGPDHLHNYWIKKLWATHEQLTILINDLLVESNKLPKFLTQGSTFLLPKDSQNTHDPSKYRPITCLPTMYKLITACITERIYQHCENNNIIAVQQKGCTKGAMGCKEQLIIDSVICNQAYGNKRNLYAAYVDYKKAFDSIPHEWLINVLKIYKVDERIVTLLENTMAVWRTTMHLQLPTGETIETSTIPIRKGIFQGDSLSPLWFCLAMNPLSSRLNSTAYGFALKKNRRELIRINHLLYMDDLKLLGATRNQLDQMLNILEEFSNDIGMEFGLDKCRINNIVKGKVQPGSFEMQDGQTIEAMEENDTYKYLGMLQATRIDHRTMKEKITSEFTTRARRILKTSLNSKNLFKALNTYACTALTYSFGIVAWSKTDIQNLQRKARTLLTKAQKHHPRSAVERTTLPRHQGGRALTDIGKQMDRQITLLRNFFLEKARSSALHQAICEIDDLTPLKLRDREIDTHHVTDQEKHRSWAEKPLHGRHVNEVGQEYVDNYASNYWLTSGQMFPETEGFLLAIQDQVIPTRNYLKYIVSDPSVQSDRCRYDCQATESIQHITGGCQVFAQTEYKARHDNVGKILHQELAVKLNLVATEKVPYYNYAPEPVLENGEYKLYWDRTVLTDQRTVNNRPDLILVDKRLRRTTLIDVAIPNNSNLQTKSNEKIVKYRDLQEQIKRQWEMQCVRTVPIIISSTGLIPKALLENLKQLGLSEHLYKIMQKAVLLGTARVVRKFMGTEDRPPSRTR

SEQ ID NO: 7929 - protein, 1214 aa, Daphnia obtusa
MHSKHGTKVAPLYTCNSCDHETDDVVVARRHERGCGAFDEGIAVDGTTIVGNEVTLMYPGGPCRCPLCRWYTTVAFQSIEHHLFRVHGLTTVRRWQCRKCEANGDGYFIKTHYKTHLTETPKPYSPTVPLLPLPPNISNRELFRIINLELSTTSCHTPTVASRRNTPNNTEGEGTSPVPSSSSSSSSALSSSSASNTSKDLSTSNSSLSTPNRISEHSDAQNPPPSLDSSNSSFNSPSSSNSSNNNNSSYESPASSPSQLDRLVAPGDAVCPREAFRGVWGARIVACNTVECLDSTLTKCSAEWLKLSATPEDSASSQKRPPPPKKPPNTNRKRNQNRQQQRIRRSKHTENDQKSKIQRLFSLYPRRAVRKILEEESTGYSGTKETATAFLEKTYCQPAPSQEQVESARAQFDSCDWMQTTDDDFRLLSAPPSISEIKLKLGKAANTAPGRDGLEYRHLRSLDGNGELLATIYRAVWSLGIPACWKTSRTVPIFKKGDPSDYGNFRPISLLPTMYKIFSGIISSRIMATATRLRWISPEQKGFLPGVRGIQEHTHILHTVIEQAKRSKKELVIAWLDLTNAFGSIPHTVLNSLFESLPIPDELRSILMDIYSDNIMDFAVGQDSVQIHPTAGVRQGDPLSSVVFNLAAEPIIRTAKSNNNGFAVYQSRVSTTSYADDIAVAGSSVREIQGTLNATENTATSLGLKFNPSKCTSLTLINGKSSVDNPLKLGDSHIRALAEDEQESYLGTPLGSRLTFRPTTSLLGNLIKIGDSGLAPWQKLEVYRSVLLPSLSHHLASGRVEKRSLYDLDVACRDFLRKVACVPMSANTAFFYSDRRVGGLGVLPLTDEADIWTLARALQLLDSKDHSVSEVAMAQLEETIKLGYGRNEVPHPLPVNEYLAGSMEKGLGAIRHGGASMNLWTRARKASGCLKRIRIDVSGEEYSKVIADDISTISIKAVRGLRTAMRQRWTNRLLSAQQGKVATGLALDMAKENASLLSCRTPLSFQEWHFLHKARLGILPVRGGPGSKSTVKTCRLGCMKLETTDHVVCGCQVNSALSINRHNSILELIAEETEKLGHTVSVNLAVDNSGLRPDLVVTSTNPPIIIDVTVPLSSADGLEKAKARKIEKYKHLGEVLPLVVGSLGSWLPSNDEIGLALGFSGRQWLSLKKKMKLLAIQGTTQIIAKHLAYQTITSDPETEEEEAEADASPPSSSN

SEQ ID NO: 7930 - protein, 1264 aa, Daphnia pulicaria
MAGAVVDFFEFKACDGTIYLPWPVPDTIKCSLCKIGKYSSRSRVQDSVRHMFAKHDARVAPMYTCNSCDHETSDVVIARRHEKGCGALDESITVEGTTIMGNEVTLMYPGGPCRCPLCKWRTTGEGTVAFQSIEHHLFRVHGLTTVRRWQCRKCEANGDGYFIKTHYKTHLTETPKPYSPTVPLLPLPPNISNREFFRIINLELSTTSCHTPTVASRRNTPNNTEGEGTSPVPSSSSPASPVSSSSSSSASNTSKDLSTQRSSPSTPNIISENSESLDSSISSFNSPSSSKSSNNNDSSYESPASSPSQLGRLVAPGDAVCPLEAFRSVWGVRIEACNTVQCLDSTLTKCSAEWLKLSATPEDSNSSQKRPPPPKKPPDAHRKRSQNRQQQRIRRSKQTQNDQKSKIQRLFSLYPRRAVRKILEEESTGYSGTKETATAFLKKTYCQPAPSQEQVESARAQFDHCDWKQTTDDDIRLLSAPPSLSEIKLKLCKAANTAPGRDGLEYRHLRSLDGNGELLATIYRAVWSLGIPACWKTSRTVPIFKKGDPSDYGNFRPISLLPTMYKIFSGIISSRIMATATRLGWISPEQKGFLPGVRGIQEHTHILHTVIEQAKQSKRKLVIAWLDLTNAFGSIPHPILNSLFESLPIPDELRRILTDIYSNNIMDFAVGQDSVQIHPTAGVRQGDPLSSVVFNLAAEPIIRTVKSNNNGFAVYQSRVSTSSYADDIAIAGSSVSKIQGTLNATENTATSLGLRFNPKKCTSLTLINGKSSVDNPLKLGDSQIRALAEDEQENYLGTPLGSRLTFRPTTSLLGNLIKIGDSGLAPWQKLEVYRSVLLPSLSHHLASGRVEKRSLYDLDVACRDFLRKVACVPMSANTAFFYSDRRVGGLGVLPLTDEADIWTLARALQLLDSKDKNVSEVAMAQLEETIKLGYGRNEVPFPLPINEYLAGSMEKGLGAIRHGGASMNLWTRARKASGCLKRIRIDVSGEEYSKVIADDISTISIKAVRGLRTAMRQRWTSRLLSAQQGKTATGLALDMAKENAGLLSCRTPLSFQEWHFLHKARLGILPVRGGPGSKSTVKTCRLGCTKLETTDHVVCGCQVNSALSINRHNSILGLIAEETEKLGHTVSVNLAVDNSGLRPDLVVTSTNPPIIIDVTVPLSSADGLEKAQARKIEKYKHLGVVLPLVVGSLGSWLPSNDEICLALGFSGRKWQSLKKKMKLLAIQGTTQIIAKHLAYQTEASDPEPEEEEAEEGASPPSSSN

SEQ ID NO: 7931 - protein, 1218 aa, Daphnia obtusa
MHSKHGTKVAPLYTCNSCDHETDDVVVARRHERGCGAFDEGIAVDGTTIVGNEVTLMYPGGPCRCPLCRWYTTGEGTVAFQSIEHHLFRVHGLTTVRRWQCRKCEANGDGYFIKTHYKTHLTETPKPYSPTVPLLPLPPNISNRELFRIINLELSTTSCHTPTVASRRNTPNNTEGEGTSPVPSSSSSSSSALSSSSASNTSKDLSTSNSSLSTPNRISEHSDAQNPPPSLDSSNSSFNSPSSSNSSNNNNSSYESPASSPSQLDRLVAPGDAVCPREAFRGVWGARIVACNTVECLDSTLTKCSAEWLKLSATPEDSASSQKRPPPPKKPPNTNRKRNQNRQQQRIRRSKHTENDQKSKIQRLFSLYPRRAVRKILEEESTGYSGTKETATAFLEKTYCQPAPSQEQVESARAQFDSCDWMQTTDDDFRLLSAPPSISEIKLKLGKAANTAPGRDGLEYRHLRSLDGNGELLATIYRAVWSLGIPACWKTSRTVPIFKKGDPSDYGNFRPISLLPTMYKIFSGIISSRIMATATRLRWISPEQKGFLPGVRGIQEHTHILHTVIEQAKRSKKELVIAWLDLTNAFGSIPHTVLNSLFESLPIPDELRSILMDIYSDNIMDFAVGQDSVQIHPTAGVRQGDPLSSVVFNLAAEPIIRTAKSNNNGFAVYQSRVSTTSYADDIAVAGSSVREIQGTLNATENTATSLGLKFNPSKCTSLTLINGKSSVDNPLKLGDSHIRALAEDEQESYLGTPLGSRLTFRPTTSLLGNLIKIGDSGLAPWQKLEVYRSVLLPSLSHHLASGRVEKRSLYDLDVACRDFLRKVACVPMSANTAFFYSDRRVGGLGVLPLTDEADIWTLARALQLLDSKDHSVSEVAMAQLEETIKLGYGRNEVPHPLPVNEYLAGSMEKGLGAIRHGGASMNLWTRARKASGCLKRIRIDVFGEEYSKVIADDISTISIKAVRGLRTAMRQRWTNRLLSAQQGKVATGLALDMAKENASLLSCRTPLSFQEWHFLHKARLGILPVRGGPGSKSTVKTCRLGCMKLETTDHVVCGCQVNSALSINRHNSILELIAEETEKLGHTVSVNLAVDNSGLRPDLVVTSTNPPIIIDVTVPLSSADGLEKAKARKIEKYKHLGEVLPLVVGSLGSWLPSNDEIGLALGFSGRQWLSLKKKMKLLAIQGTTQIIAKHLAYQTITSDPETEEEEAEADASPPSSSN

SEQ ID NO: 7932 - protein, 797 aa, Daphnia obtusa
MQTTDDDFRLLSAPPSISEIKLKLGKAANTAPGRDGLEYRHLRSLDGNGELLATIYRAVWSLGIPACWKTSRTVPIFKKGDPSDYGNFRPISLLPTMYKIFSGIISSRIMATATRLRWISPEQKGFLPGVRGIQEHTHTLHTVIEQAKRSKKELVIAWLDLTNAFGSIPHPVLNSLFESLPIPDELRSILMDIYSDNIMDFAVGQDSVQIHPTAGVRQGDPLSSVVFNLAAEPIIRTAKSNNNGFAVYQSRVSTTSYADDIAVAGSSVREIQGTLNATENTATSLGLKFNPSKCTSLTLINGKSSVDNPLKLGDSHIRALAEDEQESYLGTPLGSRLTFRPTTSLLGNLIKIGDSGLAPWQKLEVYRSVLLPSLSHHLASGRVEKRSLYDLDVACRDFLRKVACVPMSANTAFFYSDRRVGGLGVLPLTDEADIWTLARALQLLDSKDQSVSEVAMAQLEETIKLGYGRNEVPHPLPVNEYLAGSMEKGLGAIRHGGASMNLWTRARKASGCLKRIRIDVSGEEYSKVIADDISTISIKAVRGLRTAMRQRWTNRLLSAQQGKVATGLALDMAKENASLLSCRTPLSFQEWHFLHKARLGILPVRGGPGSKSTVKTCRLGCMKLETTDHVVCGCQVNSALSINRHNSILELIAEETEKLGHTVSVNLAVDNSGLRPDLVVTSTNPPIIIDVTVPLSSADGLEKAKARKIEKYKHLGEVLPLVVGSLGSWLPSNDEIGLALGFSGRQWLSLKKKMKLLAIQGTTQIIAKHLAYQTITSDPETEEEEAEADASPPSSSN

SEQ ID NO: 7933 - protein, 1096 aa, Pterostichus madidus
MANVVGERCECGAVLKDRAGLRKHKSRYCRGTAFVPICPDCGVGYKSLQSLNQHRRQAHATNYNADMEVEATTNRRGYRAWSSLEVEAMAKLEASFTGKPMQINNYLASKVGRSIESVKGKRRFKAYKDLVLKLKADGIPVESDAGSDSESSDSNSEGVFYDSIDLGNSSVLDAVEESKTVVSSPPSVSIINTASTSRQLRSNRRRESPSSIAIPTSIPEECSSLENREENPVLDFLSSLSSEVGIQKYIQIYRMLLDGRHEQALSDLLVLIYTQAKGIGRIRAGKPSVPPTSRGPDKSEKFKSKPAKPRNPHNADRASSFKRTQDAYKNDRKKLVSSLLRGTPLDTPEVTPGVDQVYKEYLKIFGAQSPPDDEPVGRVNYGSDTSFSPITQLIIKEALDSQSSSAAGPDKVSLKQLRSVDILALTLLFNGMLCFSSVPIELKECRTTLIPKSGDLADIKNWRPITISSLILRLFNKILAKRLSAFNLNLAQKGFRKIDGCMANTLTLQSIIKDHRRRASPYAVITLDLKKAFDTVSSHSIPRALQRVGVDQRTIQLIENQYNNCTTTIKCGHAATKPIPMCRGVKQGDPLSPIIFNIIMDELLTSIDQNYGIQVGNINIATVAYADDLLVLGPDSVCVDHTLDTICRFLDKRGLALNASKCTSLVLRRVPSKKKLYCVTTPTIFLHGTPVRQIIPGDQFKYLGRNYNFDGVELLNSNKLTAILENLVRCPLRPQQKMSLLTTNILPMALHDLQYPGIKSATLASCDAAVRKTVKTICHLPMSTSNALLYARRNDGGLGITCLADQIPLILLRRITRLTASGDPFSLAALESEQGRLIRQRIARLTKHTTTAEVATTRKLALERSYSGNGLHQANNHSACNRWISQPPLYWSGRDYVRAIQLRSNMLPTRGAPHNPKEKRRCRAGCDRSESISHILQGCSVCHYSRIKRHNRVVKTIKRVALKRGFSVEVEKRISCSDGEIKKPDIIMVKDNQVIISDVGISWEGPQPLGTAYKRKVTWYSNIEFIDSIRSCYGADKAITVAPYILGARGTFCHLNKTLVSLLHISSGDIGITITDTLKGGWSIHSDFYHRTWRKY

SEQ ID NO: 7934 - protein, 1159 aa, Eupelmus urozonus
MPYGPSRVTSPLGRHFVGPEIKKKASDTHGRAASRAVPANLGGQTNSAKEGSGKEIFVCRFPGCGLPWPTKIGRGQHEKKRHPDWVDQENLERKQHTREHWSGEERLLLAKKEAEITFRGGAKFMNMELQKYTSRNLESLKGRRRQADHKKMVRDFVEKLQKSGSPRARRSLVRASKEAAATSRTSKKTMSTRVGPTRIAPARASPPPSVIPPTEAPQCRTRYARAAKAVRTNAPEEPAQDSEKDKHTEPSDDDLFEDAIAGRDSELPLDELQVYFRSLPPPENDEFGARRLYTICQMTTWRSREEVRQELDLYLRELLPQQRPNNEPRRQTPVVSEPKNRVARRRAEFKKIKDLWRRDKSKCIKRILNEDTSQGEGLPRELMEPFWTATFTRDSGSAPELPPSQTVFDSIWLPIAPNEIKGCFPPYNTAVGPDGLSVGDLKKVPLFVLARIFNLMMWCGEQPERLCASRTILIPKKKDAKAPGDYRPITVSSVLVRTFHKVLVERLKVIPLDPRRREFREADGCAENVTLLDMCLKYHHERHKKIYLALLDMAKAFDSVSHAAIKEVLKTKGLPPGFIKYFMRLYEVSYTTLAHGDWQSGRIYPKCGVKQGDPLSPPVFNFIMDEMLRRLPVEVGVSVDGLHVNAMTFADDLTLLASTDAGLQMLINQATEFLGRCGLRANPDKCVTMAIKTIPKEKKTAVDHTCKFRIGNAVIPALRRTDVWTYLGISFTAEGRVFSNVKPKLNKQLELLTKAPLKPQQRLWALRVIVIPGLLYQGALGRTTIGYLRSLDSVIRASVRRWVHLPGDCPNGYFHAAIEDGGLGIQPLRWKAAMDRLARLEKLQSSSYITGLEAGRYLVREVSRVENRLKDQDNRIMRNAEMLRDFWRQRLLKSFDGRPLENSCLVRGQHCWVGEPTRFLRGADYVNCIRARINALPTAARVSRGRLKDRQCRAGCQDVETMNHVLQFCHRTHDTRIQRHDAVVKYVEKKLVQRGYEVSLEPEYVVGDRKLKPDLVATKDGRATVLDAQVLGDQRNMSLAHKDKIEEYGTTALKEKIKEATRSAIVRTSSITLNWRGLWGSDSASELQAWGIIASQDLKIISTRVLVGALVGFRRFNERTGVTTRIGKRKETPGQGGQTTTRNVKRWRRQGGEGRAGIG

SEQ ID NO: 7935 - protein, 1032 aa, Eupelmus urozonus
MNVELMKFTNRTLESLKGRRRQADHKKMVKDFIEKRRRSGTPRVQPAGERVTRAAAEATRPPNAKPMPAKPRKPGPATAVASSEEVSSPKSMRLRRRCRQTTKAVAPAADTSEDSSPESEKGMSADMSDEEIFEDAMPGRDSELPLDVFQVYFRDLLPPEKDEFGAQRLHTICQMTIWRSREEVRQELDLFLRELLPQTRPKNGPKTRRPEVPVPAGRVARRRAEFKKIQDLWRRNKSKCVKRILNEDTSQGEGLPRELMEPFWTATFTRGSESAPELPPSQTVHDSIWRPITPTEIRGSFPPYNTSVGPDGLKVGDLKKVPLYILARIFNLMMWCGEQPERLCASRTILIPKKKDAKAPGEFRPITVSSVLVRTFHKVLAERLKIIPLDPRQRGFREADGCAENVTLLDMCLKYHHERHKKIYLALLDMAKAFDSVSHQAIKVILKTKGLPQGFIDYFMRHYKTSFTTLAHGDWQSGKIYPKCGVKQGDPLSPPIFNFIMDEMLRRLPDEVGVNVDGLHVNALAFADDLTLVATTDSGLQLLIDQATDFLGTCGLRANPNKCVTMAIRTIPKEKKTAVDHTCTFKIGTAVIPALKRTDVWSYLGISFTAEGRQFIDVKPKLTKQLELLTKAPLKPQQRLWALRTVVIPGLLYQGALGRTTVGYLRSLDCKIREFVRRWLHLPGDCPNGYFHAAIEDGGLGIQPIRWKAALDRHARLTKLQKSSYITGLESGRYLTKQVSLIENRLKDHDNRIIKDAGMLRDFWKGILLKSFDGRPFENSRKVAGQHRWVGEPTRFLRGADFVNCTRARINALPTAARVSRGRLKDRQCRAGCPDVETLNHVLQFCHRTHDARIQRHDAVVKYVEKKLVSRGYAVSLEPEYVIGDRKLKPDLVAVKNGCATVLDAQVLGDQRNMALAHKDKKEKYGTPALKAKIRDATGSVTVRSSSITLNWRGLWGPESADELQAWGVIAREDLKIVSTRVLVGALIGFRRFNERTSVTSGRGNRRQGQTATTRNVRRWMRGGGEGRTGVG

SEQ ID NO: 7936 - protein, 966 aa, Anastatus disparis
MNQELKKFSVRSLEAIKGQRRRADYKDLVMKYVTELSQTGSGQAESESDQPNAVDSVETVPEEHQEGEPLEEEVFQDAEPVRVLVEAPDIFQSYFRDTTSFNKEDDLTRRITTICEMTMWRTKEEVRLELGLFLKDLFPPKRSNTRPKTNSISVPKNRTAKRRAEYKKIQDMWRKDKSKCVKRILNEDTCQSKSLPRELMEPYWTATFTQTTNVAPQLPPPQNIYEDIWLPIAPHEIKGCYPPRNTAPGPDGLTVKDLKKVPQEVLARIFSLMMWCGKQPEHLCASRTILIPKKKEAKAPGEYRPITISSVLVRTFHKVLAERLKVVPLDPRQRGFREADGCAENVMLLDMTIKYHHDRHRKMFLALLDMAKAFDSVSFRAIREVLNTKGVPKAFIDYFLQHYTDSYTVLNHAGWESGNIHPTCGVKQGDPLSPLVFNFLMDEMLKRIPSEIGVDVDGLFVNALAFADDLCFISQTDAGLQTLIDVSMDFLGQCGLRANPSKCMTVSIKTIPKQKKTAVDPSCRFKIGSAIIPSLSRTDEWTYLGIEFTAEGRKFRDIKPKLTKQLELITKAPLKPQQRLWALRVIIIPGLLYQGALGRTTLGYLRSLDAMIRASVRRWIHLPGDCPNGYFHSAIEDGGLGIQPVRYKAMLDRLARLIKLAKSSYITGLQSGRYLLYETSKVENRLKDDENRIMNNNDMLKEYWRKRLYKSFDGQPLNTSNQVIGQHRWVGEPTRFFSGADYVNCVKARIAALPTAARVARGRLKEKQCRAGCNNVETLNHILQFCHRTHGTRIKRHDAVTKYIQKNLEKDGFVVSSEKEFVVEDQKYKPDLVATKDGRTMVLDAQILGDQRNMELAHGDKKRKYGGVALKSKIRSETGSGLVSVSSITLNWRGLWSPDSVRELQALGVLKRKDIGLISTRVLIGAVAGWRMFNERTNMVTSGGRGREEITTRKVNRWRKKRTEAS

SEQ ID NO: 7937 - protein, 1033 aa, Eupelmus annulatus
MNVELLKYTNRTLESLKGRRRQADHKKMVKDFIEKRRGSGTPRAQASLARVTRAAAEATRPPQAKPTPAKSRKPGPAASAASSERASPPTRMPLRRRCRQPPEAAASRADMSQDSPPESEKDMSAEMSDEEVFEDAMPGRDSGLPLDEFQVYFRDLLPPEKDEFGAQRLHTICQMTIWRSREEVRQELDLYLRELLPQLGPKNVPKTRRPEVPVPAGRVARRRAEFKKIQDLWHRNKSKCVKRILNEDTSQSEGLPRELMEPFWTATFTRGSESAPELPPSQTVYDSIWRPITPIEIRGCFPPFNTSVGPDGLKVGDLKKVPLYILARVFNLMMWCGEQPERLCASRTILIPKKKVAKAPGDYRPITVSSVLVRTFHKVIAQRLKIVPLDPRQRGFREADGCAENVTLLDMCLKYHHERHKKIYLALLDMAKAFDSVSHEAIKEVLKTKGLPPGFIDYFMRHYKSSFTTLAHGDWQSGKIYPKCGVKQGDPLSPPIFNFIMDEMLRRLPDEVGVNVDGLHVNALAFADDLTLVATTDSGLQLLIDQATEFLGECGLRANPNKCVTMAIRTIPKEKKTAVDHTCTFKIGTAVIPALKRTDVWSYLGISFTAEGRQFIDVKPKLTKQLELLTKAPLKPQQRLWALRTVVIPGLLYQGALGRTTVGYLRSLDCKIREFVRRWLHLPGDCPNGYFHAAIEDGGLGIQPIRWKAALDRHARLIQLQKSSYIKGLESGRYLTKQVSHIENRLKDHENRIMKDAGMLRDFWRANLLKSFDGRPFEISRRVAGQHRWVGEPTRFLRGADFVNCTRARINALPTAARVSRGRLKDRQCRAGCPDVETLNHVLQFCHRTHDARIQRHDAVVKYVEKKLVNKGYAVSLEPEYVIGDRKFKPDLIAIKDGCTTVLDAQVLGDQRNMALAHKDKKEKYGTPDLKAKIRNDTGSTTVRSSSITLNWRGLWGPESAEELQTWGVIAREDLKIVSTRVLIGALIGFRRFNERTSVTSGRRNRRQVQGGTTTRNIRRWMRGGGEGRTGVG

SEQ ID NO: 7938 - protein, 1726 aa, Caenorhabditis sp.
MASDYYSEEDETDVFEGISQEDETLNSDAEYEDIEENANNNGDCQMNKGTKPTIDSNCQVTEYETCQMIKSKHVNEEILSQEAEPADELAYEDEDLPIKVKIGRKSMHEKAEPLEIAERTSKSIRIFVPYPTDKLLSCPVCLTAKSRMGGGAEENKYITRHLSTHHNLVCKITFQCGICLEKPPLTSAGNARWVNTHLKDAHDWQSDLKTPTTTRKRMMDTLNSAAPSLVKKHKGLSKKFPLIKQMDKSPEASPIHRPTTRSMTKNSTSKSEKEPVAKQSALKSVKEETSTPARKLAPLFTKRPAKEQEKEDTPAITNTTNQEEVIKPTDDEPMEVINSTKVTPIAKRFNSYCLVHHTGEDAWLDSDTVHKYIDWSMESADNCVQIDPLIFSVINQAKEPEEAAEELDRYLTKDRINIMTMCDNIHWTMLIITNADYYYYDPYGKTIPPKLANIMKLLKKESKEFESEPPRQNDSHNCGVFVSLVAKSFISNQTEWFSLIDVHEFREKMVSELRKRGYVLFNEKLAPSRNEKDAKSKQAPTHCDSLNPNHSIEKPTNEEDMEVDTVESEPISCSPKNTRKKPVMVRVMVHPDHLGNLATEEVKAKLKKLGMICVAQSPRTHLKSRSIKHNASIISNNTNHKSHSDCKPDNSYKTALMKKLEKKDQPKANPIAFDDEAGWIQVKPKKESDDIPNRILPPKLTDIKLKKYNCHQKPKKQDVEYARVPTKPKKDHIPKSVDQLMDNVRTWYKNKMSEYVASGKNFKSLEWISQQLMVLINKAEAGDSYTVEKVLKREPPIETAKGEMSTQTENQARFSKDTRKDTHKNEEPIKELYFKNRGKAFNRIIGTEYKQCAIQPDKLESYFRSTMPNKITSECAIDDITSGLPQLNIPQDLMSEFSAKEILKYLDKTKDTKPGTDGVKYSHLKHFDSKGDLLALLYNECLHHKKIPAKWKESETILIYKAGDEGIAENWRPISLLSCAYKVYSGLLNNRIKRVAGLISKCQRGFQERNGCNESIGILRTAIEVTTSLNRNIAISWLDLKNAFGSVPHQLISKSLESFGFPQEMIDVINDIYDGSTMVVKSKHGLTKPIPITSGVKQGDVISPTLFNICLEPIIRRHLSRARGHKSLSTNVKILCFADDMAVICNDREQLQYELDSLDQDCRSVNLVFKPPKCASLLINRGEVDTKERILINHQSIRSLSKNATYKYLGVPTGAEGRCTEVQRLSEVTQQMDKLNQSDLAPYQKLDALKCFVLPQLTHMYANSTPKLSDLREFSTMTMRAAKAYHNIPISGSPREYVEVPISSGGLGLASPTNTCLLQFLSSTFSKLWSEDKYVNTVYNNFLTRLTQKHTGKRVVTVQDKVDYLNNKKGLASPKAFNIFTRLREVPKVLSVIKGSPFYLMEYVKDMDDIAIRLKATEISDEVYVTKNDPKKLTKIMKKELDKALTYNFINQKDVKSRVFQVVQQHPQSNSFVRKGKNISIGAHKFVHAARLNQLVCNANNFDKTKPKSCRRCNYENESQLHILQQCNYSLPYGITRRHDQVVDRVVKEIEKGKKKDWEMKIDQATMVHRDRPDISIRSCDGRTVLLADVTIVYENGIKAMQKAWDHKIHKYQHLVEYYKGMNIKSKVLPIVIGSLGTYWKPTTESLRELGLQPGAIRNFIPEACSGVLETTKNIYWRHIFGESYNLLTERDKRRNNEEVQRRRDYWRKKNGPRTEGSHESRQSNN

SEQ ID NO: 7939 - protein, 1697 aa, Caenorhabditis sp.
MASDDHSDDEDDVYEDSQEDTTLTTDVETCEYEEEENADSNGYCQIVKGTNSQNLTNCQVLRSDIHCQITKPVNQEQETEAESAEELNYEEDDDDKPSNRSRAGRRSTFEKSVKLEIAERTSKSIRIFVPYPTENLLACPLCNNAKSKMGGGAEANKYITRHLASHHNLISKITFQCGLCLEKPPPTSAGNARWVNTHLKDKHDWKSDLKTPTTTRKRMIDTLNSAAPSLVKKQKTNTVKRFPVLKNLETSPIPSPIHRPTTRSMTKNSGYKADKELVSKPSALKTVNEETPVRKLAPMFKKRMEQTNKIAPAVTKEKADTKVITLEDEEETDNNTTNITPTAKRFNSYCLIHHSGTEAWLDSETIYKYIEWNIESATNCSQIDPLVFSIVDAIKDPTEAAEELKRYITKDHINIMAMCISTSGNKKKPDHWTLILITNQEYKYYDPLGSGIPEKLNKIMEALGKRHIPFDTTPPRQKDTFNCGVYVSLVAKAFVANNTKWFELTDVYEFRENMIAELRRRGYTLFNESFPDHSSNKKAAKQEAPDSIVNECDSMEEEDASTHKSSPVTNIDEPLAEQEAMEIDDDPTLVNESPKSVKKKPVMIRVMVHPDYIENLGNNEVKAALKRIGIICINKPTQINGKMRIPVHKHNSSNVTKSQSNTTISYRDVVAKDIKKSSIKEVTKPVNKISGCNNNNQLKKDEDDGWTKIKAKSKTSNIPDRILPPKLTDIQLKRYNPHQKRKKQDEKINRKPTQPTKNVAPKSVDQLMSDTREWFKSKMNYYQDNGRKFPYFEWLSHQLMAIINKAEAGDAGKVAQMMKREPPLNTIPGEMATQTENITRIDRRKKTDIKKNEEHIKDLYFKNRGKAFNRIVRSENKQCEIPSDKLETYFKSTMPDKTVSDYDLQELTETLPSLDVKDEIVNDFNAEEVRKYLETTKDTKPGTDGVVYSHLKHFDRDGELLASLYNECLHHQQIPRKWKQSETILLYKAGDESKAENWRPISLIDCVYKVYSGLLNNRIKQTAGLLSKCQRGFQERNGCNESIGILRTAIDASTSLNRNISVAWLDLQNAFGSVPHQLIQWSLKSFGFPSKLINIIGDFYAGSTMVVKSKNGLTNPIPITAGVKQGDCISPTLFNICLEPIIRRHLDRARGHKLLSTNVKLLCFADDMAIICNDKAQLQEELNSLDKDCRRLNLIFKPPKCASLIITRGEVEPNEKIYINNQSIRCLSQNTTYKYLGVPTGATGRCTETQRLVEVTQQMDKVNQSELAPFQKLDALKCFILPQLTHMFANSTPKLTDLRVFTGMVIKAAKTFHNIPISGSPREYVEVRVSAGGLGLASPTNTCLIQFLSSTLSKLWSDDRYVRTVYNNFLTRLTEKHTGKRNVTTQDKVDFLNNKKGLASQKSFNIFSRLREIPKVLSLIKGSPLHTMEYVSDGDDIAIRIKATEKSDDVYITKNEPKKLTKIIKNVIDRALTLNFINSKDVKSRVFQVVQQHPQSNAFVRKGRNISIAAHKFVHTARLNLLVCNGNNYDKTKSRRCRRCHYDVESQMHILQNCKFNMAYGITRRHDEVLDRVVHEIEKGSKNGYEIRIDRETGIHRDRPDIALRSPDGKSVLLADVTIAYENGLKGMQQAWDNKVQKYQHLIQYYKRMNIKAKILPLVFGSLGTYWKPTTESLRELGIPTGAIRNMIPAVCSGILE

SEQ ID NO: 7940 - protein, 937 aa, Triatoma infestans
MPRHLISDAHEWINEIPSVPIYYLAKPRYGYTHDSIKGVRKRADYAQLVATALSEGMTGEQAGAERHVGDIGGGDGVDWKAALRGALRVDLDALASSRRGPRLGEAITDAVARVLEGRDPSESIVRWWRSLAGESVGGSAPRAGGVARGVGVAPTRRRARRREYAEIQTLWREDRKAAVNRVMGGGSDLGAHSLAQMTGYWTSVFGTASEPWTGEVGAPDEGWAVEEIFAPVTAGEIKDSRPRSGTGAGPDGILPDIWNAVPVVAKRLLFNCLMLWGAMPGELLEAQTTLIPKVSQPLTPGDYRPITVASVMVRHFHKLLARRLGDAYAFLPAQRGFVPGLDGVGDSVVRLNAILGKAKRSRRALVVVSLDVAKAFDSVSHEAVLAILRRRGSPPELTEYVASCLSRSTLRLKWRGARSGVIRMARGVRQGDPLSPLLFNMVMDYVLTRLPERVGFPLGAPGVRVGALAYADDLLLFASSEIGARAQIVAAESGLADCGLRVNPRKSWSLCLNPSGRQKLVKVDSEVGFRAAGERMFSVGIADTFDYLGTRFGPFGVSEVALGLDEKLNRVHRAPLKPQQKLEVVRDFVLPGTYHELVLGQVRKPELSRWDVKVRAHIRRWLRLPHDVANSYLHAPTKCGGLAIPELTRLVPAWRRLRRERIVSRWGDAEAEELGGVVEEVGGGITPSEVRAGQAEDLHRRVDGRDLEESARVAASHSWKRAGANLLSGREFVQFVRLHAGCLPSRMRRARGRREVSGPLWCRAGCPKAETVAHIVQACHVSKGGRILRHHAVVRLLAAAFEVRRYGVYQEVSMALAGARVRPDLVVTKRECAWILDVQVVSPQGTLAAINNRKRAKYDTEEVRGAVRELTGKREIGVVAVTISWRGIWCARSVRDLRSLGISVRVCEWVTERVLRGSHMNWTRWNGLRGDRAGLTG

SEQ ID NO: 7941 - protein, 988 aa, Triatoma infestans
MESELTHTCEVCERAFSTVTGLGLHRRRAHPAEFNRGINVDRCRRRWSPEELQILAENEAKLVREGVRQGLALRLVGLSHGRTVDSIKGVRKRADYAQLVATALSEGMTGEQAGAERHVGDIGGGDGVDWKAALRGALRVDLDALASSRRGPRLGEAITDAVARVLEGRDPSESIVRWWRSLAGESVGGSAPRAGGVARGVGVAPTRRRARRREYAEIQTLWREDRKAAVNRVMGGGSDLGAHSLAQMTGYWTSVFGTASEPWTGEVGAPDEGWAVEEIFAPVTAGEIKDSRPRSGTGAGPDGILPDIWNAVPVVAKRLLFNCLMLWGAMPGELLEAQTTLIPKVSQPLTPGDYRPITVASVMVRHFHKLLARRLGDAYAFLPAQRGFVPGLDGVGDSVVRLNAILGKAKRSRRALVVVSLDVAKAFDSVSHEAVLAILRRRGSPPELTEYVASCLSRSTLRLKWRGARSGVIRMARGVRQGDPLSPLLFNMVMDYVLTRLPERVGFPLGAPGVRVGALAYADDLLLFASSEIGARAQIVAAESGLADCGLRVNPRKSWSLCLNPSGRQKLVKVDSEVGFRAAGERMFSVGIADTFDYLGTRFGPFGVSEVALGLDEKLNRVHRAPLKPQQKLEVVRDFVLPGTYHELVLGQVRKPELSRWDVKVRAHIRRWLRLPQDVANSYLHAPTKCGGLAIPELTRLVPAWRRLRRERIVSRWGDAEAEELGGVVEEVGGGITPSEVRAGQAEDLHRRVDGRDLEESARVAASHSWKRAGANLLSGREFVQFVRLHAGCLPSRMRRARGRREVSGPLWCRAGCPKAETVAHIVQACHVSKGGRILRHHAVVRLLAAAFEVRRYGVYQEVSMALAGARVRPDLVVTKRECAWILDVQVVSPQGTLAAINNRKRAKYDTEEVRGAVRELTGKREIGVVAVTISWRGIWCARSVRDLRSLGISVRVCEWVTERVLRGSHMNWTRWNGLRGDRAGLTG

SEQ ID NO: 7942 - protein, 988 aa, Triatoma infestans
MESELTHTCEVCERAFSTVTGLGLHRRRAHPAEFNRGINVDRCRRRWSPEELQILAENEAKLVREGVRQGLALRLVGLSHGRTVDSIKGVRKRADYAQLVATALSEGMTGEQAGAERHVGDIGGGDGVDWKAALRGALRVDLDALASSRRGPRLGEAITDAVARVLEGRDPSESIVRWWRSLAGESVGGSAPRAGGVARGVGVAPTRRRARRREYAEIQTLWREDRKAAVNRVMGGGSDLGAHSLAQMTGYWTSVFGTASEPWTGEVGAPDEGWAVEEIFAPVTAGEIKDSRPRSGTGAGPDGILPDIWNAVPVVAKRLLFNCLMLWGAMPGELLEAQTTLIPKVSQPLTPGDYRPITVASVMVRHFHKLLARRLGDAYAFLPAQRGFVPGLDGVGDSVVRLNAILGKAKRSRRALVVVSLDVAKAFDSVSHEAVLAILRRRGSPPELTEYVASCLSRSTLRLKWRGARSGVIRMARGVRQGDPLSPLLFNMVMDYVLTRLPERVGFPLGAPGVRVGALAYADDLLLFASSEIGARAQIVAAESGLADCGLRVNPRKSWSLCLNPSGRQKLVKVDSEVGFRAAGERMFSVGIADTFDYLGTRFGPFGVSEVALGLDEKLNRVHRAPLKPQQKLEVVRDFVLPGTYHELVLGQVRKPELSRWDVKVRAHIRRWLRLPHDVANSYLHAPTKCGGLAIPELTRLVPAWRRLRRERIVSRWGDAEAEELGGVVEEVGGGITPSEVRAGQAEDLHRRVDGRDLEESARVAASHSWKRAGANLLSGREFVQFVRLHAGCLPSRMRRARGRREVSGPLWCRAGCPKAETVAHIVQACHVSKGGRILRHHAVVRLLAAAFEVRRYGVYQEVSMALAGARVRPDLVVTKRECAWILDVQVVSPQGTLAAINNRKRAKYDTEEVRGAVRELTGKREIGVVAVTISWRGIWCARSVRDLRSLGISVRVCEWVTERVLRGSHMNWTRWNGLRGDRAGLTG

SEQ ID NO: 7943 - protein, 881 aa, Triatoma infestans
MTGEQAGAERHVGDIGGGDGVDWKAALRGALRVDLDALASSRRGPRLGEAITDAVARVLEGRDPSESIVRWWRSLAGESVGGSAPRAGGVARGVGVAPTRRRARRREYAEIQTLWREDRKAAVNRVMGGGSDLGAHSLAQMTGYWTSVFGTASEPWTGEVGAPDEGWAVEEIFAPVTAGEIKDSRPRSGTGAGPDGILPDIWNAVPVVAKRLLFNCLMLWGAMPGELLEAQTTLIPKVSQPLTPGDYRPITVASVMVRHFHKLLARRLGDAYAFLPAQRGFVPGLDGVGDSVVRLNAILGKAKRSRRALVVVSLDVAKAFDSVSHEAVLAILRRRGSPPELTEYVASCLSRSTLRLKWRGARSGVIRMARGVRQGDPLSPLLFNMVMDYVLTRLPERVGFPLGAPGVRVGALAYADDLLLFASSEIGARAQIVAAESGLADCGLRVNPRKSWSLCLNPSGRQKLVKVDSEVGFRAAGERMFSVGIADTFDYLGTRFGPFGVSEVALGLDEKLNRVHRAPLKPQQKLEVVRDFVLPGTYHELVLGQVRKPELSRWDVKVRAHIRRWLRLPHDVANSYLHAPTKCGGLAIPELTRLVPAWRRLRRERIVSRWGDAEAEELGGVVEEVGGGITPSEVRAGQAEDLHRRVDGRDLEESARVAASHSWKRAGANLLSGREFVQFVRLHAGCLPSRMRRARGRREVSGPLWCRAGCPKAETVAHIVQACHVSKGGRILRHHAVVRLLAAAFEVRRYGVYQEVSMALAGARVRPDLVVTKRECAWILDVQVVSPQGTLAAINNRKRAKYDTEEVRGAVRELTGKREIGVVAVTISWRGIWCARSVRDLRSLGISVRVCEWVTERVLRGSHMNWTRWNGLRGDRAGLTG

SEQ ID NO: 7944 - protein, 1007 aa, Magicicada septendecula
MNRLCKHADGTDRQIVLMKVVCLPETNAAVEDTTITTDTGNPHLHGHANHCEIDEEDRNRKKSTKHQEKWLQALRDAASWQDFEDTVYNITDEIRQLTEYKPTPERTQRHGHGRNQNRINQRTGDNGFDPIEAGRIQKLYRINKKKAISKILNGSATTYCQVGKTEVTAYFKDVFTEKADTDIAAAPAHVTECLNQMRAVGINEANIENTIEAEEINQKLNKMKNTAPGKDGVKYSQLKRADPGCLVLQTIYNRCFKEEKTPKAWDSSRTVLIHKKGDHRDLNNWRPLTLGNTIAKLYASIISSRVCTWTAKNNIISPKQKGFMDTEGCYENNFIVQSVIDDSRRNGKEAVLAWLDLTNAFGSIPHKYIHSVLQNIRLPEKLSNIIHNIYRNATTTITTPEGETEDINMKSGVKQGCPLSPIIFNIAIEPLLRTIQSMQHDCGYKLHNNIQSVLAYADDIVLIAKNADAMQNMLEKVGETASWMGLTFNPKKCSTLHMDCKKRREIRNTTFTVQGGRPEPLKEGEDYQYLGIPTGYKVNQTPEEGINNLLQDVEKLHNSLLAPWQKIEALNMFLLTKLDYVLRASRITMKPLHKADKKIKGYVKKWLHLPQRASPEILFMPAYQGGANLIPLADAAKISKIVHAFKLLTSPDPSIKNTAWECLKSVVKRKLGSTPTKEDMAAYLSGSTDDNLDRDGGDISTIWSQARNACRILNKTRMSVRFQWSTAREELKIIIGMPSHTTEHIIVPGSERWAIMRMLKGGIRNYYKVTLFRKPDQGKVLKSTTRAAVSNHFILTGKYTRFCDYRFITRARLGTVPLNATKRYGNGDKRCRKCGYPKETLPHVVNHCKIHSTGWKLRHDNIVERLSNAITLKDTETLIKNRKVEGTTSNLRPDIVLRSDDRKNICIVDVSVPFEGSEEALELARRHKIDKYSSLKTELEAKGYRVYLDGFIIGSLGAWHKNNDRVVQRLGISWKYGRIMGKLMVSDTIRWSRDIYVEHVTGVRQYK

SEQ ID NO: 7945 - protein, 1225 aa, Magicicada septendecim
MESGTNTPLEVTIQYPFDDLIQCDYCKDGPSSQPSGGRRRLFGLYQYQNHSDFKKHLKKIHCNNVILKFKCRICDRVENDLKKQKRHYRSHGNTEDVDTIHNELEESSDSAAQQDIPVEEAPVNTGTQENHPIIPAEDGPSCITIERTTSNETEVPTSIPEEEHVSERRSANCQINENHPTTTAEDAQYMRTEETRDTTDITTQCVNTDVPIRELCMNIPAQEDRPITPAEEGPPIVIVGLPETSAAVEDTTITTDTGNPHLHGNANQCEIDEEDRNRKKSTKHQEKWLQALRDAASWQDFEDTVYNITDEIRQLTEYKPTPERTQRHGHGRNQNRINQRTGDNGFDPIEAGRIQKLYRINKKKAISKILNGSATTYCQVGKTEVTAYFKDVFTEKADTDIAAAPAHVTECLNQMRAVGINEANIENTIEAEEINQKLNKMKNTAPGKDGVKYSQLKRADPGCLVLQTIYNRCFKEEKTPKAWDSSRTVLIHKKGDHRDLNNWRPLTLGNTIAKLYASIISSRVCTWTAKNNIISPKQKGFMDTEGCYENNFIVQSVIDDSRRNGKEAVLAWLDLTNAFGSIPHKYIHSVLQNIRLPEKLSNIIHNIYRNATTTITTPEGETEDINMKSGVKQGCPLSPIIFNIAIEPLLRTIQSMQHDCGYKLHNNIQSVLAYADDIVLIAKNADAMQNMLEKVGETASWMGLTFNPKKCSTLHMDCKKRREIRNTTFTVQGGRPEPLKEGEDYQYLGIPTGYKVNQTPEEGINNLLQDVEKLHNSLLAPWQKIEALNMFLLTKLDYVLRASRITMKPLHKADKKIKGYVKKWLHLPQRASPEILFMPAYQGGANLIPLADAAKISKIVHAFKLLTSPDRSIKNTAWECLKSVVKRKLGSTPTKEDMAAYLSGSTDDNLDRDGGDISTIWSQARNACRILNKTRMSVRFQWSTAREELKIIIGMPSHTTEHIIVPGSERWAIMRMLKGGIRNYYKVTLFRKPDQGKVLKSTTRAAVSNHFILTGKYTRFCDYRFITRARLGTVPLNATKRYGNGDKRCRKCGYPKETLPHVVNHCKIHSTGWKLRHDNIVERLSNAITLKDTETLIKNRKVEGTTSNLRPDIVLRSDDRKNICIVDVSVPFEGSEEALELARRHKIDKYSSLKTELEAKGYRVYLDGFIIGSLGAWHKNNDRVVQRLGISWKYGRIMGKLMVSDTIRWSRDIYVEHVTGVRQYK

SEQ ID NO: 7946 - protein, 1154 aa, Diadegma semiclausum
MADNLSEASEADDHGPVSSVTDYSVSQRTNNNDEPASPRTMSRWTIKVPLGVTTPCEPCHRRGLNMNFLHLKDLVKHADKQHRQVKLTLKCNRCGKEFPGPRNWYGHKTHCKGPENAHFLAFPCDHCDLAFATLIGKSQHERHAHPTVRNEKRVEQLTRDGLPGRKTYVWSDEETERLRALSARYQGVRHINKELLPFFPGKSQKQISDKRRWLETHVARQEENDDDEEMVAEVDAQVDESSSEEEWVEAVEEQPQAERATDDRWANRMSEAIEAEFDSEDGELTTWVNGVRTAWVERETNRDQFEADIEQQIMAFTRMLCPQEEPEGAEANDPAQRGNEVYETDRRRPRPRRHKRMPNSASRRRFAYARCQELFDKCPQKLAEMAVQGSLSFAEDRPKPPAAADIRRLYNDLWGRTGAEEIPLAGAEDAHDQIDTLQPILAEEISARIKKLKGSSAAGLDKVKKAHLQKKGLPDVLAFLFNILLLEGYYPKTWKRNRTTLIPKDGKDLTDAKNWRPITVGSMIARIFSAILDQKIRAFIEQTPRQKGFTSEDGCCLNILLLNEALTEMKAGRGGVISILDVSKAFDTVPHSILKPAMEAKGIPKELSTYIAKMYQGSTTTIKGCDGPVDIMLKRGVKQGDPLSPLLFNLAIEGLINKIQEGPGGLEIGETKISVLAFADDLVLLATNTKEAQNQLIQVQRGLSNMGMSLAAAKCATFEIISKAKTWCVKDAALELDGVRIPWVKPDESLKYLGVKMGPWKGLIKGTEVAVIVEAARNVRQLKLKPIQKMDLLQIHILPKFIHSLSNNRASSGTLKLLDNGLRQEVKEILHLAQSTPKALFYTSKTSGGLGLTSFERTIQMAKIRLNLKVAASQDPALREIAQKGNIASEARKAASSLGLIRPTNTEELKTMKRKLAEKVVAQWEGLTTQHGVCDFKNDKLGNTWLRHPGFLSGSRYLDALRLRTNTFGTRDVLSRTNARIDARCRRCGTYRETLGHVLGMCIHTKAARIKRHDEIKDLVAKKAAEKCMVIVEPTINEFGELKKPDIVIKKGTELIVADVTVRYERGTRLAEAAKEKEEKYGTTAELVKIKTGCLTSCLMPLVVGCRGAIPRRTKVALEKLGLSKGDIITVSMIALRSSIEMANKFVDYETIEE

SEQ ID NO: 7947 - protein, 988 aa, Actinia equina
MGRKNPNETLETPTITFTHNTEAIKQLIIIIIIIIIIIIIIIELERLRENRKLTKKGKRNRALLLEECKAISSAELVNYMEKKKSELRKLKSRYIRGKKQHEARSLNSQFTQDARQVYAKFTEIVNGKEDHPTYQRIKNIDPNNNTNTFENIEEASRFWRNLWETRGTGNENAEWLQDMKQAITNRVPPIVEREWNLEVSQAVKTLSKKRNFSAPGPDRLVNFWWKRASSLHEGVTCAFKSITKDREAYPLWFSEGRTRLIPKPGDFSSENQRPITCLNNIYKWFTSCLQIPLDKHLNDYDLMDGEQRGAKSGCSGTTDNLMIDKMVTQDCHRGKRNLSMAWVDVRKAYDSVDHSWLIEMMEVHRVPCWIGNVIKHLSASWNTMIVATTKQGNETSTIIRFHKGLPQGDALCPRLFTLCLNPVSWLLNASEGYKLSKPLSTKVTHLLYVDDLKVFAASELKLNRVLRSTCTAMQDMGLQWNSKKCSVIYVRRGKQVEDAKDLKLDETSVVKKLEWGASYEFLGIKESILQDEKQVLTEAAKEYLSRLSVIWTSPLSDYNRVLATNQFALPVLTYPMWTQHWPLAELRIIDRETRKIISGNGGRHPLSSTAVLYLPREKGGRGLRSIEQEYKLIKIKAAVKLYESPDPMMRAVQQFEERAADKGFSSLISDAKKFAQELRTTLNLNAPEPSCSPLEEPEIQIKGMHIKKHLKKAVNEKLVGKVEDQHWQGSLLKARWQDDQLSHEGCFAWLNKWVSAPTHCVAGIMELYEQLTPTRVYSAYKTGTTDKNNVTCRMCGEGSECLAHVLAGCPSLAQSKYLDRHNAALKVFFFEMLRDLKLADSTPPWFSDVKPKPLYKSTDAEAYWDVPVYADHMYVRSNRVDARFIDHNNKKVLMVEMSCPWVNNREKKDKEKTKKYGALRLELTKQHPGYTILQVNLILDVLGGWSKEMEPEMKNIFGARYKDVLLRMQKAVLSCTVNIARTFKLITS

SEQ ID NO: 7948 - protein, 1002 aa, Actinia equina
MANCALYSTIAAFLLSKGWKKTIVQGASKKPNSDRKKKEFQDRASVLRKKISIAKAELERLRENRKLTKKGKRNRALLLEECKAISSAELVNYMEKKKSELRKLKSRYIRGKKQHEARSLNSQFTQDARQVYAKFTEIVNGKEDHPTYQRIKNIDPNNNTNTFENIEEASRFWRNLWETRGTGNENAEWLQDMKQAITNRVPPIVEREWNLEVSQVVKTLSKKRNFSAPGPDRLVNFWWKRASSLHEGVTCAFKSITKDREAYPLWFSEGRTRLIPKPGDFSSENQRPITCLNNIYKWFTSCLQIPLDKHLNDYDLMEGEQRGAKSGCSGTTDNLMIDKMVTQDCHRGKRNLSMAWVDVRKAYDSVDHSWLIEMMEVHRVPCWIGNVIKHLSASWNTKIVATTKQGNETSTIIRFHKGLPQGDALCPRLFTLCLNPVSWLLNASEGYKLSKPLSTKVTHLLYVDDLKVFAASELKLNRVLRSTCTAMQDMGLQWNSKKCSVIYVRRGKQVEDAKDLKLDDTSVVKKLEWGASYEFLGIKESILQDEKQVLTEAAKEYLSRLSVIWTSPLSDYNRVLATNQFALPVLTYPMWTQHWPLAELRIIDRETRKIISGNGGRHPLSSTAVLYLPREKGGRGLRSIEQEYKLIKIKAAVKLYESPDPMMRAVQQFEERAADKGFSSLISDAKKFAQELRTTLNLNTPEPSCSPLEEPEIQIKGMHIKKHLKKAVNEKLVGKVEDQHWQGSLLKARWQDDQLSHEGCFAWLNKWVSAPTHCVAGIMELYEQLTPTRVYSAYKTGTTDKNNVTCRMCGEGSECLAHVLAGCPSLAQSKYLDRHNAALKVFFFEMLRDLKLADSTPPWFSDVKPKPLYKSTDAEAYWDVPVYADHMYVRSNRVDARFIDHNNKKVLMVEMSCPWVNNREKKDKEKTKKYGALRLELTKQHPGYTILQVNLILDALGGWSKEMEPEMKNIFGARYKDVLLRMQKAVLSCTVNIARTFKLITS

SEQ ID NO: 7949 - protein, 965 aa, Owenia fusiformis
MTTIVYDQCSEAFGVSDSRKKKHQAGPSRRQREIAAIRCDLRALQQRWKQSSQQEKDAIRLLQNPLRRKLLQLRQAENLRKKQHEKRRSRKAFFNNPFKFTTKLLGTPKSGVLECSREEVEESVRQSHSDLDREFPLGDPPIEIITPNPTIPFNTSDIKFEEVQAIVKKARAKSAPGPTGLTYKIYKCCPKLLRRLWRLIRDIWRKKKDLPNTWSFAEGCFVPKEANSKGLEQFREISLLDIEGKIFWAVVAKRLTSFLIGNKYVDPSIQKGGIPDHSACLEHTAAISQLIKEAKGKKRTMSVVWLDLAKAYPSVPHQLLLESLVHYHVPNNIVNFVMAHMNVLQMRFTVGDFTTTWQRLEKGIMAGCTISVVLFVAAMNMILQAGESRCRGPLAEDGTKHPVCRAFMDDITVMTHSIAGTRWALEALEEMTNWARMRFKPAKSRSLSLQAGKPTQLRFFIQGEVIPTIQDQPIRCLGKTFDKSLGDVTNTANVVQDLNKWMKVIDGSQLQGRFKAWCFQFGVIPRLQWPFQLYDIPMTAIEAMERLCSRHLRKWMGVPQSFSTANLYGKTSKLSLPLSSVEEEYKATKVRAITTLRMSKDKKVNTVGEGITCGRKWKPEDSIREAEERLRHKDIVGVVCKGRLGLGHYGPQAITPKEKRSQIVQEVRRSTEEDRHIKAVGQAKQGRWTNWEAALQRPLTWKELWTQDQGRLSFLLRAFTDLLPTPANLRVWGKEDSDKCALCKGDCCNLRHILSSCPQSLSEGRFTWRHNKVLQEISKYIDQQRGIANRGSITQRQKQIEFIREGKPKAAKTPKPKPSILAKATDWQLQVDLYQKLVFPQNVAVTTLRPDMVMTSSSTKTIIIIELTVPWEDRLEVSHEIKATKYQDLKDEAETRGWHASVFPIEVGCRGFPATSVRNLLSKIGLQPKELKSALKSISSAAEDSSRWLWIRRRDKWNPKATQST

SEQ ID NO: 7950 - protein, 1228 aa, Eurybia lycisca
MEQSLNSVRQGPLPGERRGTSGAGAGRDSMRTASGRQLNRRVTTNKNTTAENTTQNTDTQTDITTNEPTRSVLQDMRPATTLAGRNRQRMKWTDDVNRELLRCYYTVTDLENNLTGYRQLLHQKFIETYPELSFLSEQRLSDQIRIIHRNNRINNIEREKIKREIASQRQDNITLSNHTQNRLTNEVMPLNDVGADVVHNTSREQINLTSIVSPTVQPNSFSSQQNIETQSTVQISQVNLHDNLQSSLLSTIHTQISNTFTDTPEVTQIEEDVLTIENIFTEYLIKYRGTDPTVRPNIPKLNISYSSIKTIHRLNHLIELQLSNSNQPDLEEIQDLIYCAAISATTVHNKKSNTSLIQNITEHKPAWERRIETKVTTLRKEIGRITQYINGNLTVKNTNAMNTKYQTLDEALEDKDKKTQKLQALSKRLRRYKKSNQRRKDNKQFNTNQKIFYKNLQDKDPQVKATPDMQKIQEFWENIWSTEVTHNREAEFLSEDSEETQSVDLMPACIIEKEDIEQAIKKTLNWKTPGPDKIQNYWLKYFTATHTYIANAFNILIKEPHNTPKFLTLGNTYLKPKDTDFTNPAKYRPITCLPTLYKLLTSIIAQKINIHLTHNNIIAEEQKGCRKGSRGCKEQLVIDTEIHNQAKQKHRNLYFGYIDYQKAYDSVPHSWLLHVLKLYKIDKTLIGFLEHTMQNWTTILNVRATSENLKSDPLKIARGIFQGDSLSPLWFCLAINPLSKILNKTGHGYVIDKQTKTKISHLLYMDDIKLYAANRHQLDSLLNTTENFSAHIKMNFGIDKCKINSIIRGQYHETHSYSLLYQNADIEKMDITDTYKYLGYQQNIKIDHTKIKTELTKNYTNRLHRILKTELAGRNTIRAINAYAVPVLTYSFGIIKWTETDLDKLNRITRTVCNKYHAHHIHSASERFYLKRKFGGRGLIDLKNLHNRQVHDIRNYMLSKTHISPLHKALTNISTTGTPLKLNTQTFNINDTPSNTQIIENWKKKTLHGKYPNQLQQEHIDNEASQMWLCKGNIYKETEGFMIAIQDQIIKTKNYQKYIIKDPAVVSDKCRLCHTNQETIDHITGACNFLAIKHYLDRHNNVAKQVHQQLAKKFKLISQTEPYYKYSPKNVLENKAVKLYWDREIVTDKTTHSNRPDITLTIKESKVTYLIDISIPNADNIKKKYTEKIQKYIQLGDEIRDMWQQNLVKIIPIIISATGLSKITTHIH

SEQ ID NO: 7951 - protein, 1190 aa, Apodemia duryi
MRPATTLAGLNRQRMKWTNDVNRQLLRCYYIATNIENNLIGYRQTLYKQFIDIYPELNFLSEQRVSDQVRVIHRNNRINSVERNNIKRVVATQLAMRDSRSDTQDGTETNRNSQSNNVITSIANSTDLNDETITVNYGTSSTPESQSLNVQVLDSDPPTMTSQSQITTSYTNLLNEQQTRTDLEEFARDRSEVDDIFQENIIKYKGTDPVMRPNIPKLKISRSSILTVTRLNNLIDLELKKICEPQLDTIQDIIYCAALTATCLHNKIISRTHNTLNNNKPAWQRRLETKIATLRKDIGRITQFMKGNLSVKNINRMKIRYQTKDQALEDKDRKIQKLQALSKRLRRYLKSKQRKKDNMLFNNNQKMFYKTLQDKPPKAENVPSMPEIEKFWKNMWSTEIRHNDEAEWMDSEENSAITPMPQLIINKHDIETVLMKALNWKSPGPDKLQNYWLKYFTATHTYIAESFNKLLKEPHNIPSFFTLGNTYLIPKDSDTTNPAKYRPITCLPTLYKLLTSIIANKIDKHLVHNNIIAEEQKGCRKESKGCKEQLIMDTEIHYQAKQKHRNLFFAYIDYKKAYDSVPHSWLLYILNAYKIDKTVIDFLEHTMKKWRTVLNIKCGTQNLRSSPIKIARGIFQGDSLSPMWFCMAINPLSRILNKTSYGFVMEKQTKTKITHLLYMDDIKLYAANRHQLESLLKATDQFSSQIKMNFGIDKSRINSIIHGQHNKTEPYTLTYQNADIEQMDITDTYKYLGYHQHTNLDHNKIKEELTKKYTNRLHRILKSELTGRNTVKAINAYAVPVLSYSFGIIKWSDTDLDGLNRITRTTCNKYHIHHIHSAIERFYIKRKEGGRGFIDLKNLHNKQLIDLRGYMLSKAENSALHKALTYMTTSGTPLRLNSTTFDSNDPPTRQQIFENWIKKALHGKYPNILQQEYIDQEASQAWLCKGNVYKETEGFMFAIQDQIIKTKNYQKYIIKDTTITSDKCRLCNVSQETIEHIIGGCSFLAYKHYLERHNNVAKQVHQQLAKKYNLIDNIEPYYKYRPKSVLENSVAKLYWDRDINTDKTAPSNRPDITLTVKDRKLTFLIDISIPNSENIRKKYFNKIQKYMPLADEIHDMWQQNQVKIIPIIISSTGIIPRSLHTSIKELGLHKNLYIPLQKSIIIDTCSIVRRFLNSTTQTPPLLNNEPNYLA

SEQ ID NO: 7952 - protein, 1012 aa, Emesis heteroclita
MDTSVRESSSNSSTVDDIFKENIIKYKGTNPTLRPSVPKLKISRSSILTVNLLNNLIDSELKNMYEPNLDAIQDILYCAALTASSIHNKKTLKPQYTSNNSKPAWQRRLETKISTLRKDIGRIMQFIKGNLSVKNFKKIKIKYLNKDQAVEDKDRKVQKLQALSKRLRRYIKSNQRKKDNILFNNNQKMFYKTLQDYVPPSEKSICMSEIEKFWKEIWSTETEHNYQAEWIETANEQAITPMPQLIVSKHDIEIVIKKTLNWKTPGPDKLHNYWLKYFTNSHAYIADSFNKLLKEPHDIPTFLTLGNTYLIPKDSDTSNPAKYRPITCLPTLYKLFTSIIANKIDVHLSNNNIIAEEQKGCRKESKGCKEQVIIDTEIHYQAKLKHRNLFFAYIDYQKAYDSVPHSWLLYVLNLYKIDKTVIAFLGEIMKKWNTVLNIKSDMQNFRSKPIKIARGIFQGDSLSPLWFCMAINPLSKILNKTGYGFVMEKQNRTKITHLLYMDDIKLYAANRHQIESLLNATDQFSSQIKMNFGIDKCKINSIIRGQHNKTESYTLPYQNLNIQQMDVTDTYKYLGYQQHTNLEQGKIKEELTKKYTSRLHRILKSGLSGQNIVKAINTYAVPILSYSFGIIKWSDTDLDGLNRITRTTCYKYHTHHIHSAVERFYIKRKLGGRGFIDLKNLHNKQLIDLRTYMFNKAENSLLHKALKIMTTSGTPLKLNRSTFYIKDLVNPQQIFENWTKKALHGKHPNVLQQEYIDLEGSQAWLCKGNVYKETEGFMFAIQDQVIKTRNYRKYIIKDPTVTSDKCRLCNTSQETIDHITGGCSFLASKHYLERHNNVAKQIHQQLAKKYQLVDSLEPYYKYKPKNVLENSLAKLYWDREISTDKATLSNRPDITLTIKDLKLTYLIDISVPNSDNIRKKYFDKVQKYISLADEVRDMWQQSQVKIIPIIISSTGIIPKSLHTSIKELDLHRNLYTSLQKSVVLDTCSIVRRFVTSTTQTTSVFNNESSHLV

SEQ ID NO: 7953 - protein, 896 aa, Apodemia duryi
MRPNIPKLKITRTSILTVQMLNDIIDSELSNIGEPDLDTIQDIIYCAALTATTLHNNNISKHNNTPNNKKPEWQRRIETKIATLRKDIGRLTQYIKGNLSAKNVKKLKIKNENEAIEDKDRKTQKLQALSKRLRRYMKSNQRRKDNILFNTNRKLFYKTLRDNHFNTENVPSLSEFEKFWNDIWSTEVKHSNQAEWIHNDVEKTLDIDPMPELIIKKDDIENAIRKTLNWKTPGPDKIQNYWLKYFTVTHNFIANSFNKLLKEPHNIPSFLTVGNTYLIPKDSDTLNPAKYRPITCLPTLYKLFTSVIAHKINIHLVDNNIIAEEQNRCRKQSKGCKEQLIIETEIHYQAKQKNRNLFYAYIDYQKAYDSVPHSWLLYVLNLYKIDKNIIEFLGYTMTKWKTVLNVRRGSENLKSNPIKITRGIFQGDSLSPLWFCMALNPLSKILNRTGYGFIIDKQNKTKLTHLLYMDDIKLYAANRHQLESLLKITEHFSSSIKMNFGIDKCKISSIIHGQYNETQPYTLANQDVNIDQMDINDTYKYLGYHQQANLDHGRIKKELTEKYRDRLHRILKTELSGQNTIQAINTYAVPILTYSFGIIKWSETDLDGLNRITRIICNKHHIHHIHSATERLYIQRKLGGRGLIDLKNLHYRQVMDLRNYMLSKVNNSPLHKALTNITTSGTPLKLNSATFHINEIATNQQIIENWTKKPLHGKYPNQLKQEYIDQEASQAWLCKGSVYKETEGFMFSIQDQVIKTKNYQKYIIKDPTITSDRCRLCNTNQETIDHITGGCSFLAYKHYLERHNNVAKQIHQQLANKYKLIDKLQPYWKYKPRSVLENRLAKLYWDRDITTDKTTNSNRPDITLIIKEQKLTYLIDISIPNSDNIKKNSQRKSKSI

SEQ ID NO: 7954 - protein, 1190 aa, Apodemia mejicanus
MRPATTLAGLNRQRMKWTNDVNRQLLRCYYIATNIENNLIGYRQTLYKQFIDIYPELNFLSEQRVSDQVRVIHRNNRINSVERNNIKRDVATQLAMRDSRSDTQDGTETNRNSQSNNVITSIANSTDLNDETITVNYGTSSTPESQSLNVQVLDSDPLTMTAQSQITTSYTNLLNEQQTRTDLEEFARDRSEVDDIFQENITKYKGTDPVMRPNIPKLKISRSSILTVTRLNNLIDLELKKICEPQLDTIQDIIYCAALTATCLHNKIISRTHNTLNNNKPAWQRRLETKIATLRKDIGRITQFMKGNLSAKNINRMKIRYQTKDQALEDKDRKIQKLQALSKRLRRYLKSKQRKKDNMLFNNNQKMFYKTLQDKPPKAENVPSMPEIEKFWKNIWSTEIRHNDEAEWMDSEENSAITPMPQLIINKHDIETVLMKALNWKSPGPDKLQNYWLKYFTATHTYIAESFNKLLKEPHNIPSFFTLGNTYLIPKDSDTTNPAKYRPITCLPTLYKLLTSIIANKIDKHLVHNNIIAEEQKGCRKESKGCKEQLIMDTEIHYQAKQKHRNLFFAYIDYEKAYDSVPHSWLLYILNAYKIDKTVVDFLEHTMKKWRTVLNVKCGTQNLRSSPIKIARGIFQGDSLSPMWFCMAINPLSRILNKTSYGFVMEKQTKTKITHLLYMDDIKLYAANRHQLESLLKATDQFSSQIKMNFGIDKSRINSIIHGQHNKIEPYTLTYQNADIEQMDITDTYKYLGYHQHTNLDHNKIKEELTKKYTNRLHRILKSELTGRNTVKAINAYAVPVLSYSFGIIKWSDTDLDGLNRITRTTCNKYHIHHIHSAIERFYIKRKEGGRGFIDLKNLHNKQLIDLRGYMLSKAENSALHKALTNMTTSGTPLRLNSTTFDINDPPTRQQIFENWTKKALHGKYPNILQQEYIDQEASQAWLCKGNVYKETEGFMFAIQDQIIKTKNYQKYIIKDTTITSDKCRLCNVSQETIEHIIGGCSFLAYKHYLERHNNVAKQVHQQLAKKYNLIDNIEPYYKYRPKSVLENSVAKLYWDRDINTDKTAPSNRPDITLTVKDRKLTFLIDISIPNSENIRKKYVNKIQKYMPLADEIHDMWQQNQVKIIPIIISSTGIIPRSLHTSIKELGLHKNLYIPLQKSIIIDTCSIVRRFLNSTTQTPPLLNNEPNYLA

SEQ ID NO: 7955 - protein, 1015 aa, Acronicta aceris
MQTETTIATENIQIENIFNENIIKYKGTDPTVRPNISKLKITHQSKLTVNTLNRLIHIELSHNENPNIEDIQDLIYCAALSATILHNNKKVIDKSHKSNNRNSKPAWERRIESKIANLRKDIGRLSQYIKNNLSAKKQNRIEKTYKNKEEVMEDIDLKTQKLQALSKRLRRYKKSNQRHNNIIFNTNQKLFYRNFDKESSIKEPPNITEVETFWEDIWSKPVEHNSQAEWIKVEEEEIVSINPMTEIVIDKKDVELAIGKTLNWKTPGPDKIHNYWLKYFTTAHEHIATAFNTLIRNPNSTPLFFTQGNTYLKPKGPDTTNPAKYRPITCLPTLYKLLTSIISQKVNTHLIHNIIIAEEQKGCRKGSRGCKEQLVIDSEIHNQARQTHRNLYYAYIDYQKAYDSVPHSWLLQILKIYKIDNTLIQFLQQTMQKWTTTLHINTESEKLISRQIKISRGIFQGDSLSPLWFCMALNPLSRILNNTRQGYQLHKENNTKITHLLYMDDIKLYAASRQQLDSLLKATEDFSTDIKMNFGTDKCKINSIIRGKHHITDPYILTQQNLLIDKMELTDTYKYLGYCQSTRIDHGKIKEELTRKYTERLNRILKTELSARNTVKAINAYAVPILTYSFGIIKWTVTDLDALNRLTRTTCYKQHIHHIHSATERFNLKRKLGGRGLIDIKNLHNRQLHNIRTYMLSKAKDSPIHSALTKIPTSGTPLKLNCSNFNPLENHSSDEQKIATWKQKSLHGKYPNLIQQEHIDKEASTAWLRKGNIYKETEGFIIAIQDQIIKTKNYQKYIMKDTNVISDRCRLCNTQQETIDHITGGCPFLANKQYTDRHNNVAKQIHLQIAKKYKLIDKLEPYYKYKPKNVLNNEIAKLYWDRDIITDKTTQNNRPDITLILKEQQITYLIDISIPNSENLRKKYTEKTQKYILLADEIRQMWRQSTVKIIPIILSSTGLIPKSLHTSLKELDLHKSTYIPLQKSVIIDTCSIVRRFLTSTTQTPSSVGNEPTHLV

SEQ ID NO: 7956 - protein, 1268 aa, Acronicta aceris
MENTIREIRIGPLPGDRQGTSGAGAGRGSMRTASGRRLNRRVTTTQDATADDIHTNTPTDNTPLETESSVLREMLPATTLAGRNRQRMKWTDDVNRQLLRCYYTVTNCETNLTGYRPSLYAKFTEIYPDLSILSEQRLADQIRVIHRNNRITATERENIRREIRETLNINDGPIVPQTPSRTCNTPQLRSADLTVTHSNSEVIEQTNLNTQHTPLSFTHTEYQQTQTSGTQSSQPDSTLLERFSQSPTRTLHMQTETTIATENIQIENIFNENIIKYKGTDPTARPNISKLKITHQSKLTVNTLNRLIHIELSHNENPNIEDIQDLIYCAALSATILHSNKKVIDKSHKSNNRNSKPAWERRIESKIANLRKDIGRLTQYIKNNLSAKKQNRIEKTYKNKEEVMEDIDLKTQKLQALSKRLRRYKKSNQRHKDNIIFNTNQKLFYRNFDKESSIREPPNIAEVETFWEDIWSKPVEHNSQAEWIKVEEEEIVSINPMTEIVIDKKDVELAIGKTLNWKTPGPDKIHNYWLKYFTTAHEHIATAFNTLIRNPNSIPLFFTQGNTYLKPKGPDTTNPAKYRPITCLPTLYKLLTSIISQKVNTHLIHNNIIAEEQKGCRKGSRGCKEQLVIDSEIHNQARQTHRNLYYAYIDYQKAYDSVPHSWLLQILKIYKIDNTLIQFLQQTMQKWTTTLHINTESEKLISRQIKISRGIFQGDSLSPLWFCMALNPLSRILNNTRQGYQLHKEDNTKITHLLYMDDIKLYAASRQQLDSLLKATEDFSTDIKMNFGTDKCKINSIIRGKHHITDPYILTQQNALIDKMELTDTYKYLGYCQSTRIDHGKIKEELTRKYTERLNRILKTELSARNTVKAINAYAVPILTYSFGIIKWTVTDLDALNRLTRTTCYKQHIHHIHSATERFNLKRKLGGRGLIDIKNLHNRQLHNIRTYMLSKAKDSPIHSALTKIPTSGTPLKLNCSNFNPLENHSSDEQKIATWKQKSLHGKYPNLIQQEHIDKEASTAWLRKGNIYKETEGFIIAIQDQIIKTKNYQKYIMKDNNVISDRCRLCNTQQETIDHITGGCPFLANKQYTDRHNNVAKQIHLQIAKKYKLIDKVEPYYKYKPKNVLNNEIAKLYWDRDIITDKTTQNNRPDITLILKEQQITYLIDISIPNSENLRKKYTEKIQKYIPLADEIRQMWRQSTVKIIPIILSSTGLIPKSLHTSLKELDLHKSTYIPLQKSVIIDTCSIVRRFLTSTTQTPSSVGNEPTHLV

SEQ ID NO: 7957 - protein, 1304 aa, Craniophora ligustri
MNTRSKSKRPQVLGAPSSSTGHDGSQSDTRRRGAKNPRVTIDSRQTTQATHTDTDTLSERTSNTPSPFHSIESPTSSLHLYQISMPSSPSTHSSSAENIHTNTPTGNTTIETERSALREMLPATTLAGRNRQRMKWTDDINRNLLRCYYTVTNCETNLTGYRPSLHAKFIEMFPDLNILSEQRLADQIRVIHRNNRITATERENIKREIASNNVPVISEITSHTRSTRRLRSSDLTNSNHNTEEEIGQSNDNSQHTTLTNEQQTPTDSQSSQSYLWLQERCSQSPIQTPNTQTDTDTDNRQIESIFNECLLKYKGTDPTARPNIPKLKITHQSKVTVNLLNQLINIELSRIIDPNIEYIQDLIYSAALAATSLHNKTKLKVGRVDTINNRKGKPAWEWRIETKIANLRKDIGRLTQYIKDNLSNKKQNKIKNTYKNKEEVIEDIDIKTQKLQALSKRLRRYKKSNQRHKDNILFNTNQKLFYRNFDKVYSIKEPPNIAEVETFWADIWSRPVEHDNQAEWIKAEEEIGLLNPMTEINIDKKDIEQAIGKTLNWKTPGPDKIHNYWLKYFTATHKHIADSFNALIRDPNSIPMFFTQGNTYLKPKDTDTTNPAKYRPITCLPTLYKLLTSIISQKINTHLTHNNIIAEEQKGCRKGSMGCKEQLVIDSEIHNQARQTHRNLYYAYIDYQKAYDSVPHSWLLEVLKIYKVDETLIQFLKQTMKKWTTTLHLNTESETLTSKPIKILRGIFQGDSLSPLWFCMSLNPLSRILNKTGQGYLLHREDNTKITHLLYMDDIKLYAANRQQLDSLLKNTEKFSNDIKMNFGTDKCKINSIIRGQHHTTDPYILTQQNTLIDKMESSDTYKYLGYCQSTRIDHGKIKQELTTKYTQRLNKILKTELSARNTIKAINTYAVPILTYSFGIIKWSVTELDKLNRLTRTTCYKQHIHHIHSAVERFNLKRKLGGRGLIDIKNLHNRQLHNIRTYMLNKAIDSPIHATLTKISTSGTPLKLNINFNPLENHSSDEQKIATWKQKSLHGKYPNLLQQEHIDGEASNAWLSKGNIYKETEGFMVAIQDQIIKTKNYQKYIMKDTNIISDRCRLCNTQQETIDHITGGCPFLANRQYTDRHNNVAKQIHLQIARKYKLIDKIEPYYKYKPKNVLNNEIAKLYWDRDIITDRTTQNNRPDITLILRKEKKITYLIDISVPNSENIRKKYTEKIQKYIPLADEIRQMWQQNAVKIVPVILSSTGLIPKSLHTSLKELDLHKLTYISLQKSIIIDTCSIVRRFLTSTTQTPSSVGNEPTHLV

SEQ ID NO: 7958 - protein, 1282 aa, Craniophora ligustri
MNTRSKSKRPQVLGAPSSSTGHDGSQSDTRRRGAKNPRVTIDPRQTTQATHTDTDTLSERTSNTPSPFHSIESPTSSLHSYQISMPSSPSTHSSSAENIHTNTPTGNTTIESERSALQEMLPATTLAGRNRQRMKWTDDINRNLLRCYYTVTNCETNLTGYRPSLHAKFIEMFPDLNILSEQRLADQIRVIHRNNRITATERENIKREIASNNVPVISEITSHTRSTRRLRSSDLTNSNHNTEEEIGQSNDNPQDTTLTNEQQTPTDSQSSQSYPWLQERCSQSPIQTPNTQTDTDTDNRQIESIFNECLLKYKGTDPTARPNIPKLKITHQSKVTVNLLNQLINIELSRIIDPNIEYIQDLIYSAALAATSLHNKTKLKVGRVDTINNRKGKPAWEWRIETKIANLRKDIGRLTQYIKDNLSNKKQNKIKNTYKNKDEVIEDIDIKTQKLQALSKRLRRYKKSNQRHKDNILFNTNQKLFYRNFDKVYSIKEPPNIAEVETFWADIWSRPVEHDNQAEWIKAEEEIGPLNPMTEINIDKKDIEQAIGKTLNWKTPGPDKIHNYWLKYFTATHKHIADSFNALIRDPNSIPMFFTQGNTYLKPKDTDTTNPAKYRPITCLPTLYKLLTSIISQKINTHLTHNNIIAEEQKGCRKGSMGCKEQLVIDSEIHNQARQTHRNLYYAYIDYQKAYDSVPHSWLLEVLKIYKVDETLIQFLKQTMKKWTTTLHLNTESETLTSKPIKILRGIFQGDSLSPLWFCMSLNPLSRILNNTGQGYLLHREDNTKITHLLYMDDIKLYAANRQQLDSLLKNTEKFSNDIKMNFGTDKCKINSIIRGQHHTTDPYILTQQNTLIDKMESSDTYKYLGYCQSTRIDHGKIKQELTTKYTQRLNKILKTELSARNTIKAINTYAVPILTYSFGIIKWSVTELDKLNRLTRTTCYKQHIHHIHSAVERFNLKRKLGGRGLIDIKNLHNRQLHNIRTYMMNKAIDSPIHATLTKISTSGTPLKLNINFNPLENHSSDEQKIATRKQKSLHGKYPNLLQQEHIDGEASNAWLSKGNIYKETEGFMVAIQDQIIKTKNYQKYIMKDTNIISDRCRFCNTQQETIDHITGGCPFLANRQYTDRHNNVAKQIHLQIARKYKLIDKIEPYYKYKPKNVLNNEIAKLYWDRDIITDRTTQNNRPDITLILKEKKITYLIDISVPNSENIRKKYTEKIQKYIPLADEIRQMWQQNAVKIVPVILSSTGLIPKSLHTSLKELDLHKLTYISLQKSIIIDTCSIVR

SEQ ID NO: 7959 - protein, 1219 aa, Craniophora ligustri
MPSSPSTHSSSAENIHTNTPTGNTTIETERSALREMLPATTLAGRNRQRMKWTDDINRNLLRCYYTVTNCETNLTGYRPSLHAKFIEMFPDLNILSEQRLADQIRVIHRNNRITATERENIKREIASNNVPVISEITSHTRSTRRLRSSDLTNSNHNTEEEIGQSNDNPQHTTLTNEQQTPTDSQSSQSYPWLQERCSQSPILTPNTQTDTDTDNRQIESIFNECLLKYKGTDPTARPNIPKLKITHQSKVTVNLLNQLINIELSRIIDPNIEYIQDLIYSAALAATSLHNKTKLKVGRVDTINNRKGKPAWDWRIETKIANLRKDIGRLTQYIKDNLSNKKQNKIKNTYKNKEEVIEDINIKTQKLQALSKRLRRYKKSNQRHKDNILFNTNQKLFYRNFDKVYSIKEPPNIAEVETFWADIWSRPVEHDNQAEWIKAEEEIGPLNPMTEINIDKKDIEQAIGKTLNWKTPGPDKIHNYWLKYFTATHKHIADSFNALIRDPNSIPMFFTQGNTYLKPKDTDTTNPAKYRPITCLPTLYKLLTSIISQKINTHLTHNNIIAEEQKGCRKGSMGCKEQLVIDSEIHNQARQTHRNLYYAYIDYQKAYDSVPHSWLLEVLKIYKVDETLIQFLKQTMKKWTTTLHLNTESETLTSKPIKILRGIFQGDSLSPLWFCMSLNPLSRILNNTGQGYLLHREDNTKITHLLYMDDIKLYAANRQQLDSLLKNTEKFSNDIKMNFGTDKCKINSIIRGQHHTTDPYILTQQNTLIDKMESSDTYKYLGYCQSTRIDHGKIKQELTTKYTQRLNKILKTELSARNTIKAINTYAVPILTYSFGIIKWSVTELDKLNRLTRTTCYKQHIHHIHSAVERFNLKRKLGGRGLIDIKNLHNRQLHNIRTYMLNKAIDSPIHATLTKISTSGTPLKLNINFNPLENHSSDEQKIATWKQKPLHGKYPNLLQQEHIDGEASNAWLSKGNIYKETEGFMVAIQDQIIKTKNYQKYIMKDTNIISDRCRLCNTQQETIDHITGGCPFLANRQYTDRHNNVAKQIHLQIARKYKLIDKIEPYYKYKPKNVLNNEIAKLYWDRDIITDRTTQNNRPDITLMIKEKKITYLIDISVPNSENIRKKYTEKIQKYIPLADEIRQMWQQNAVKIVPVILSSTGLIPKSLHTSLKELDLHKLTYISLQKSIIIDTCSIVRRFLTSTTQTPSSVGNEPTHLV

SEQ ID NO: 7960 - protein, 1304 aa, Craniophora ligustri
MNTRSKSKRPQVLGAPSSSTGHDGSQSDTRRRGAKNPRVTIDSRQTTQATHTDTDTLSERTSNTPSPFHSIESPTSSLHLYQISMPSSPSTHSSSAENIHTNTPTGNTTIETERSALREMLPATTLAGRNRQRMKWTDDINRNLLRCYYTVTNCETNLTGYRPSLHAKFIEMFPDLNILSEQRLADQIRVIHRNNRITATERENIKREIASNNVPVISEITSHTRSTRRLRSSDLTNSNHNTEEEIGQSNDNSQHTTLTNEQQTPTDSQSSQSYLWLQERCSQSPIQTPNTQTDTDTDNRQIESIFNECLLKYKGTDPTARPNIPKLKITHQSKVTVNLLNQLINIELSRIIDPNIEYIQDLIYSAALAATSLHNKTKLKVGRVDTINNRKGKPAWEWRIETKIANLRKDIGRLTQYIKDNLSNKKQNKIKNTYKNKEEVIEDIDIKTQKLQALSKRLRRYKKSNQRHKDNILFNTNQKLFYRNFDKVYSIKEPPNIAEVETFWADIWSRPVEHDNQAEWIKAEEEIGLLNPMTEINIDKKDIEQAIGKTLNWKTPGPDKIHNYWLKYFTATHKHIADSFNALIRDPNSIPMFFTQGNTYLKPKDTDTTNPAKYRPITCLPTLYKLLTSIISQKINTHLTHNNIIAEEQKGCRKGSMGCKEQLVIDSEIHNQARQTHRNLYYAYIDYQKAYDSVPHSWLLEVLKIYKVDETLIQFLKQTMKKWTTTLHLNTESETLTSKPIKILRGIFQGDSLSPLWFCMSLNPLSRILNKTGQGYLLHREDNTKITHLLYMDDIKLYAANRQQLDSLLKNTEKFSNDIKMNFGTDKCKINSIIRGQHHTTDPYILTQQNTLIDKMESSDTYKYLGYCQSTRIDHGKIKQELTTKYTQRLNKILKTELSARNTIKAINTYAVPILTYSFGIIKWSVTELDKLNRLTRTTCYKQHIHHIHSAVERFNLKRKLGGRGLIDIKNLHNRQLHNIRTYMLNKAIDSPIHATLTKISTSGTPLKLNINFNPLENHSSDEQKIATWKQKSLHGKYPNLLQQEHIDGEASNAWLSKGNIYKETEGFMVAIQDQIIKTKNYQKYIMKDTNIISDRCRLCNTQQETIDHITGGCPFLANRQYTDRHNNVAKQIHLQIARKYKLIDKIEPYYKYKPKNVLNNEIAKLYWDRDIITDRTTQNNRPDITLILRKEKKITYLIDISVPNSENIRKKYTEKIQKYIPLADEIRQMWQQNAVKIVPVILSSTGLIPKSLHTSLKELDLHKLTYISLQKSFIIDTCSIVRRFLTSTTQTPSSVGNEPTHLV

SEQ ID NO: 7961 - protein, 1260 aa, Emesis brimo
MERVTHQNMEQSLNSIRQGPLPGERRGTSGAGAGRGSMRTASGRALSRRVTTNQNATAESIAQNTTLNIQQQTDNNTQPTGSVLQDMCPATTLAGRNRQRMKWTDEVNRQLLRCYYIVTNLETNLTGYRPLLHSKFTEIYPDLSFVTEQRLSDQVRIIHRNNRITALERENIKREVASQQHHNERQVTAVSNRCISVSATQHNSENTEIENTSSQTSIPMITTESIDFYTQVIDPQTSCTQTKTPSQVEDNYTHNSHKREPHTTASKRLGAHIIDNTFKEFMIKFAGTDPTSRPTIPKLIFNENSIATINQLNQLIDMELSASNQPDLEKIHDIIYCAARTATTLHGTNHSSNKSKSKSNYKPPWERRIEYKINILRQEIGRITQYIKGNLSLKKTNKMKMKYHNENEALDDKDKKTQKLQALSKRLRRYKKSNQRRKDNLLFNKNQKLFYKKLEGCDHYIQTKPNMKEIQTFWENIWSTEVKHNNEAEWINDGFEETQYVVPMPELVIDMEDIALAVKKTHNWRTPGPDMLQNYWLKYFHATHPYITHSFNKLIREPNNVPAFLTQGNTFLKPKETNTSDPAKYRPITCLPTLYKLLTAVIAKKIDAHLTSNNIITEEQKGCRKGSRGCKEQLIIDTEIHYQAKQKHRNLFYAYVDYQKAFDSVPHSWLIHVLKLYKVDLVLIKFLEQTMKKWSTVLNINCGTNILKSNRINICRGIFQGDALSPIWFCMAINPLSRILNKTRYGYILHAQTKTKITHLLYMDDIKLYAANKHQLDSLLKTTEQFSTHIKMNFGLNKCKINSIIHGKYCETQPYSLTYQNAHIDKMNYAETYKYLGYEQSTYIDHSKIKNDLTKTYITRLKKILKSELSGRNTVKAINSYAVPVLTYSFGIIKWTDTDLEKINRITRTTCYKYNTHHIHSAIERFYLKRKMGGRGLIDVKNMHDRQLQDLRNYMLDKINCSPLHKALTKIKTSGTPLRLNNQVFEVNESIAESQIIENWKSKALHGKYPNQLQQDYIDSNASQAWLITGNIYKETEGFMFAIQDQIIKTRNYQKFIIKDPQITSDKCRLCNISPETIDHITGGCGFLANKYYLDRHNNVAKQIHQQLAKKFKLIEKIEPFYKYNPKSVLENNFAKLYWDREIITDKTTNNNRPDITLTIKEQNKTFLIDISIPNTENIRKKYSEKIQKYIPLADEIRDMWHQDIVKIIPIIISTTGLIPKSLHSAINELDLHTNNYIFLQKTVIIDTCSIVRRFLTSNT

SEQ ID NO: 7962 - protein, 982 aa, Apodemia zela
MHTLNQFIHKELENTQPTIEHIHDIIYCAAMTATLIHNDTNNAQKKLNNTEGESKKKQDIKPAWERRLETKIKILRKDIGRLNQFIKENLSSKNQRIMNRTYNNKQEAVEALDNKIQKLQALSKRLKRYKKSNQRHRDNIIFNNNQKLFYRKFNNESTIKNPPSLMDVQTFWENIWSKTIEHNKEAEWIEEEFVESQKLDLMPEIQINRKDVELAIKRTLNWKTPGPDKIHNYWLKYFTSTHEYIATVFNNLILDPRNMPLYLTQGCTYLKPKDIDTKNPAKYRPITCLPTLYKLLTSIISHKINTHLIHNNIIAEEQKGCRKDSRGCKEQLVIDTEIHNQVKQTHRNLHFAYIDYQKAFDSVPHSWLIQILKVYKINEKLVEFLHHIMQQWTTILTINTESGTIRSKPIKIARGIFQGDSLSPLWFCLSLNPLSRLLNRTKEGYIIHKETNTKITHLMYMDDIKLYAATKQQIKNLLEVTEKFSADIKMKFGIDKCKINSIIRGKHHETDPYILQTQQNLLIAKMEITDTYKYLGYSQSIGIDNSKIKEELIKKYTDRINKILKTELSGRNTVKAINTYAVPILTYSFGVIKWTATDLDRLNRLTRSTCNKYNIHHIHSAIERFNLNRKLGGRGFIDIKNLHSKQIHNIRIYMNSKVNDSPIHKALTLISTAGTPLKLNDDSIAIEEIVTDEQKINNWKQKSLHGKYPNQLQQEHIDKEASNAWLCKGNLYKETEGFMVAIQDQIINTKNYQKYIIKDPLIVSDKCRLCHASQETIEHITGGCPFLANKQYTERHNNVAKQIHSLLALKYKLVDKAEPYYKYIPKNVLDNSHSKLYWDRDIITDKTTTNNRPDITLTIKAEKTTYLIDISIPNSENIRKKYTDKIQKYIPLADEIRQMWHQHTVKIVPIILSGTGLIPKSLHTSLKELGLHKNTYIQLQKSVIIDTCSIVRRFLTSTTQTPATLHDPLGLARDRFAQPASR

SEQ ID NO: 7963 - protein, 881 aa, Emesis temesa
MNKIYSDKQKAAENLDYKIQKLQALSKRLKRYKKSNQRQRDNKIFNNNQKLFYRKLNNEITVNDPPGITDIQTFWENIWSKPIEHNKEAQWIKEEFEESQNLELMPDILIDKADVEFAVKKTINWKTPGPDKIHNYWLKYFTSAHDHIANAFNILILDPQSMPAYLTQGCTYLKPKDTDHKNPAKYRPITCLPTLYKLLTSIVSRKINSHLIHNSIIAEEQKGCKKGSRGCKEQLVIDTEIHNQVKQTHRNLHFAYIDYQKAFDSVPHSWLIQILKLYKISDKLVEFLHHVMQHWKTILTLSTESGTIRSNPIKIARGIFQGDSLSPLWFCLALNPLSRLLNKTQQGYVIHKETNTKITHLMYMDDIKLYAATKKQINILLVITEKFSADIKMKFGIEKCKINSIIRGKHYETDPYILQTQQNLLIARMEITDTYKYLGYSQSIGIDHSKIKEELSKKYTDRINTILRTELSGKNTITAINTYAVPVLTYSFGIIKWTDTDLDRLNRLTRTTCNKHNIHHIHSAIERFNLKRKLGGRGLIDIKNLHNNQIQHFVLYMQNKANYSPIHKAITLITTSGTPLQLNNSNRLIEGVVTDEQKINNWKHKSLHGKYPNQLQQEYIDKEASNAWLCGGNLYKETEGFMVAIQDQIINTKNYQKYIIKDPTIVSDKCRLCNIHQETIDHITGGCPFLANKQYTERHNNVAKQIHSLLALKYKLIDKAMPYYKYIPQNVLDDGCVKLYWDRDIITDKSIKNNRPDMTLTIKETKTTYLIDIAIPNSDNIRKKYIEKIQKYIPLADEIRQMWHQHTVKIVPIILSSTGLIPKSLHASLKVLGLYKNTYIPLIKSVILDTCSIVLRFLTSITQPLHGKLTHLAYPVIHSHN

SEQ ID NO: 7964 - protein, 1262 aa, Apodemia duryi
MESLNNDKSTGPLPGDRQGTSGAGAGRDSIRTVSGRRLNRRITTNQHATAETTNTLTLDTRHETARSVLQTMRPATTLAGRQRQRMKWNSEINQQLLRCYYTVTNCESNLTGYRPELYKQFISIYPDLRSNVSEQRLADQIRVIHRNNRVTPMDREIIKREIQQILNNNSTLTTDANQSTITDIHLNNIPTNAEILQDTCVNVTEEEQLNQLVNHLETSMQIAYTQTNLTFTTCTPTPHTPPQITNTEIELDANDFQKCQNLFNELLIKYKGMDPTTRPNLSKLKINRKSKITVNTLNQLIQNELENIQPTIEHINDILYCAAMTATSLHNDNKTTERNDKGSRQKQDLKPAWERRLETKTKILRKDIGRLSQFIKGNLSIRNQRIMNRTYNNKQEATEALDNKIQKLQALSKRLKRYKKSNQRHRDNIIFNNNQKLFYRKFNEELIIKDPPSIIDVQKFWENIWSKPIEHNKEAEWIKTEFEEFEKLHLMPAIIIEKKDVEIAVKRTLNWKTPGPDKIHNYWLKYFTSAHKYIAEAFNNVINDPQSVPRYLTQGCTYLKPKDLDYKNPAKYRPITCLPTLYKILTSIISHKINLHLTHNNIIAEEQKGCRKGSRGCKEQLVIDTEIHNQVKQKHRNLHFAYIDYQKAYDSVPHSWLIQILKLYKINDKLIEFLHCIMQHWKTILTISTESGTIRSNPIKITRGIFQGDALSPLWFCLSINPLSRLLNKTGQGYVIHREPNCKITHLMYMDDIKLYAATKQQIHNLLKVTENFSADIKMKFGIDKCKINSIIRGKHSETDPYILQTQQNLLIDKMEITDTYKYLGYSQSTGIDHSKIKEQLSNKYLDRINKILKTELSGRNTVKALNTYAVPILTYSFGIIKWTNTDLERLNRLTRTTCNKYNIHHIHSAIERFNLNRKLGGRGFIDIKNLHNKQIQNIRTYMYSKTNDSCIHNALTLISTTGTPLKLNEHISVTEEIVTDEQKINNWKQKSLHGKYINQLQHEHIDKEASSAWLCKGNLYKETEGFMVAIQDQIINTKNYQKYIIKDPSIVSDKCRLCNTSQETIDHITGGCPFLANKQYTERHNNVAKQIHSLLALKYKLVDKAEPYYKYIPKNVLDDGHTKLYWDRDIITDKTTNNNRPDITLTIKAEKTTYLIDISIPNSENIRKKYTDKIQKYIPLSDEIRQMWHQHTVKIVPIILSCTGLIPKSLHTSLKELGLHKNTYISLQKSVIIDTCSIVRRFLTSTTQTPATLHDEPTHLA

SEQ ID NO: 7965 - protein, 1264 aa, Spilosoma lubricipeda
MEQNINSNSIGPLPGGRQGTSGAGAGRGSMRTASGRRLNRRVTTNQSTTAETQTTLTPDTLQESARSVLQDMLPATTLAGRNRQRMKWTNEVNQQLLRCYYTVTHCETNLTGYRPALYTKFIEIYPDLHILSEQRLADQVRVIHRNNRISVSEREIIKAEIQQNLRCNTISTDSANSPSINQRNIIDNTQYDSPETNTHNINICTSTEYIERTQSIDSQITNTPLTSTYTLSPTPFAHTQSLDTQTEQHDTTERMQQIEQLFNENFLKYKGSDPTLRPNLVKLKISRKSKMTVNILNSLIDNKFRNNANPTIEEVHDLIYCAALTATSIHNSNKNTRPIDTEVTPRTKDNSKPAWERRIENNIAVLRQEIGRLNQFIAGNLSRKKQVKMGTIYKNKEEAIETMDKKTQRLQALSKRLRRYKKSNQRHRDNITFNTNQKLFYRNFNKEAVVNNVPDITEIQTFWENIWSIPIQHNNEAEWIKAELDKTQNLDPMIEVIVNKTDVELAIKKTLNWKTPGPDKIHNYWLKYFTSTHQHIANAFNTIIQEPNTLPRFLTHGNTYLKPKDSDTQNPAKYRPITCLPTLYKLLTSIISHKINTHLTHNKIIAEEQKGCRKGSRGCKEQLVIDTEIHNQVKQSHRNLYFAYIDYQKAYDSVPHSWLVQILKIYKINPSLIEFLEQTMQKWSTVLNIKTEAGTIKSNTIKIARGIYQGDSLSPLWFCMAINPLSRILNNTEQGYMLHKDSYTKLTHLLYMDDIKLYSGNRQQMNRLLKVTESFSTDIKMNFGIDKCKINSIVKGKHHETDPHILRTQQNSIIDKMEINDTYKYLGYAQSIGLDHSKIKEELTKKYIDRLNKILKTELSARNTVKAINAYAVPVLTYSFGIIKWTSTDLDKLNRLTRTTCNKYNIHHIHSATERFNLERKLGGRGLVDVKHLHNRQVHNIRTYMYNKSYDSSIHKALTLISTSGTPLKLNDNSYIIDPPITNEQKINSWKQKTLHGKHPNHLQQEHIDLEASNAWLSKGNIYKETEGFMLAIQDQIIKTRNYQKYIIKDSSIVSDKCRLCNSTQETIEHITGGCPFLANKQYTERHNNVAKQIHSQLAIKYNLLDKTEPYYKYKPKSVLNNEIVKMYWDRDIITDKTTTNNRPDITLTLKDRKVTYLIDIAIPNSENVRRKYTEKIQKYIPLADEIRQMWHQHTVKIIPIIISSTGLIPKSLHTSLTELDLNKYSYIDLQKSVIIDTCSIVRRFLTSTTQTPTTLHNEPTHLA

SEQ ID NO: 7966 - protein, 1043 aa, Apodemia mejicanus
MQITYTQTNLTFTTCTPTPHTPPQITNTEIELNANDFQKCQNLFNELLIKYKGMDPTTRPNLSKLKINRKSKITVNTLNQLIQNELENIQPTIEHINDILYCAAMTATSLHNDNKTTERNDKGSRQKQDLKPAWEKRLETKIKILRKDIGRLSQFIKGNLSIRNQRIMNRTYNNKQEATEALDNKIQKLQALSKRLKRYKKSNQRHRDNIIFNNNQKLFYRKFNEELIIKDPPSIIDVQKFWENIWSNPIEHNKEAEWIKTEFEEFEKLHLMPAIIIEKKDVEIAIKRTLNWKTPGPDKIHNYWLKYFTSAHKYIAEAFNNVISDPQSVPRYLTQGCTYLKPKDLDYKNPAKYRPITCLPTLYKILTSIISHKINLHLTHNNIIAEEQKGCRKGSRGCKEQLVIDTEIHNQVKQKHRNLHFAYIDYQKAYDSVPHSWLIQILKLYKINDKLIEFLHCIMQHWKTILTISTESGTIRSNPIKITRGIFQGDALSPLWFCLSINPLSRLLNKTGQGYVIHRETNCKITHLMYMDDIKLYAATKQQIHNLLKVTENFSADIKMKFGIDKCKINSIIRGKHSETDPYILQTQQNLLIDKMEITDTYKYLGYSQSTGIDHSKIKEQLSNKYLDRINKILKTELSGRNTVKALNTYAVPILTYSFGIIKWTNTDLERLNRLTRTTCNKYNIHHIHSAIERFNLNRKLGGRGFIDIKNLHNKQIQNIRTYMHSKTNDSCIHNALTLISTTGTPLKLNEHISVTEEIVTDEQKINNWKQKSLHGKYINQLQHEHIDKEASSAWLCRGNLYKETEGFMVAIQDQIINTKNYQKYIIKDPSVVSDKCRLCNTSQETIDHITGGCPFLANKQYTERHNNVAKQIHSLLALKYKLVDKVEPYYKYIPKNVLDDGHTKLYWDRDIITDKTTNNNRPDITLTIKAEKTTYLIDISIPNSENIRKKYTDKIQKYIPLSDEIRQMWHQHTVKIVPIILSCTGLIPKSLHTSLKELGLHKNTYISLQKSVIIDTCSIVRRFLTSTTQTPATLHDEPTHLA

SEQ ID NO: 7967 - protein, 1264 aa, Spilosoma lubricipeda
MEQNINSNSIGPLPGGRQGTSGAGAGRGSMRTASGRRLNRRVTTNQSTTAETQTTLTPDTLQESARSVLQDMLPATTLAGRNRQRMKWTDEVNQQLLRCYYTVTHCETNLTGYRPALYTKFIEIYPDLHILSEQRLADQVRVIHRNNRISVSEREIIKIEIEQNLRSNTISTDSANSPSINQRNIIDNTQYDSPETNTHNINICISTEYIEHTQSIDSQIADTPLTSTYTLSPTPFAHTQSLDTQTEQHDTTERMQQIEQLFNENFIKYKGSDPTLRPNLVKLKISRKSKMTVNILNSLIDNKFRNNANPTIEEVHDLIYCAALTATLIHNSNKNSRPINTEVTPRTKDNSKPAWERRIENNIAVLRQEIGRLNQFIAGNLSRKKQLKMGTMYKNKEEAIETMDKKTQRLQALSKRLRRYKKSNQRHRDNITFNTNQKLFYRNFNKEAVVNNVPDITEIQTFWENIWSIPIQHNNEAEWIKAELDKTQNLDPMIEVIVNKIDVELAVKKTLNWKTPGPDKIHNYWLKYFTSTHQHIANAFNTIIQEPNTLPTFLTHGNTYLKPKDSDTQNPAKYRPITCLPTLYKLLTSIISHKINTHLTHNKIIAEEQKGCRKGSRGCKEQLVIDTEIHNQVKQSHRNLYFAYIDYQKAYDSVPHSWLVQILKIYKINPSLIEFLEQTMQKWSTVLNIKTEAGTIKSNTIKIARGIYQGDSLSPLWFCMAINPLSRILNNTEQGYMLHKDSNTKLTHLLYMDDIKLYSGNRQQMNRLLKVTESFSTDIKMKFGIDKCKINSIVKGKHHETDPHILHTQQNSIIDKMEINDTYKYLGYAQSIGLDHSKIKEELTKKYIDRLNKILKTELSARNTVKAINAYAVPVLTYSFGIIKWTSTDLDKLNRLTRTTCNKYNIHHIHSATERFNLERKLGGRGLVDVKHLHNRQVHNIRTYMYNKSNDSSIHKALILISTSGTPLKLNDNSYIIDPPITNEQKINSWKQKTLHGKHPNHLQHEHIDLEASNAWLSKGNIYKETEGFMLAIQDQIIKTRNYQKYIIKDSSIVSDKCRLCNSTQETIEHITGGCPFLANKQYTERHNNVAKQIHSQLAIKYNLLDKTEPYYKYKPKSVLNNEIVKMYWDRDIITDKTTTNNRPDITLTLKDRKVTYLIDIAIPNSENVRRKYTEKIQKYIPLADEIRQMWHQHTVKIIPIIISSTGLIPKSLHTSLTELDLNKYSYIDLQKSVIIDTCSIVRRFLTSTTQTPTTLHNEPTHLA

SEQ ID NO: 7968 - protein, 1264 aa, Spilosoma lubricipeda
MEQNINSNSIGPLPGGRQGTSGAGAGRGSMRTASGRRLNRRVTTNQSTTAETQTTLTPDTLQESARSVLQDMLPATTLAGRNRQRMKWTDEVNQQLLRCYYTVTHCETNLTGYRPALYTKFIEIYPDLHMLSEQRLADQVRVIHRNNRISVSEREIIKIEIEQNLRSNTISTDSANSPSINQRNIIDNTQYDSPETNTHNINICTSTEYIERTQSIDSQIANTPLTSTYTLSPTPFAHTQSLDTQTEQHDTTERMQQIEQLFNENFIKYKGSDPTLRPNLVKLKISRKSKMTVNILNSLIDNKFRNNANPTIEEVHDLIYCAALTATLIHNSNKNSRPINTEVTPRTKDNSKPAWERRIENNIAVLRQEIGRLNQFITGNLSRKKQVKMGTKYKNKEEAIETMDKKTQRLQALSKRLRRYKKSNQRHRDNITFNTNQKLFYRNFNKEAVVNNVPDITEIQTFWENIWSIPIQHNNEAEWIKAELDKTQNVDPMIEVIVDKTDVELAIKKTLNWKTPGPDKIHNYWLKYFTSTHQHIANAFNTIIQEPNTLPTFLTHGNTYLKPKDSDTQNPAKYRPITCLPTLYKLLTSIIAHKINTHLTHNKIIAEEQKGCRKGSRGCKEQLVIDTEIHNQVKQSHRNLYFAYIDYQKAYDSVPHSWLVQILKIYKINPSLIEFLEQTMQKWSTVLNIKTEAGTIKSNTIKIARGIYQGDSLSPLWFCMAINPLSRILNNTEQGYMLHKDSNTKLTHLLYMDDIKLYSGNRQQMNRLLKVTESFSTDIKMKFGIDKCKINSIVKGKHHETDPHILHTQQNSIIDKMEINDTYKYLGYAQSIGLDHSKIKEELTKKYIDRLNKILKTELSARNTVKAINAYAVPVLTYSFGIIKWTSTDLDKLNRLTRTTCNKYNIHHIHSATERFNLERKLGGRGLVDVKHLHNRQVHNIRTYMYNKSNDSSIHKALTLISTSGTPLKLNDNSYIIDPPITNEQKINSWKQKTLHGKHPNHLQQEHIDLEASNAWLSKGNIYKETEGFMLAIQDQIIKTRNYQKYIIKDSSIVSDKCRLCNSTQETIEHITGGCPFLANKQYTERHNNVAKQIHSQLAIKYNLLDKTEPYYKYKPKSVLNNEIVKMYWDRDIITDKTTTNNRPDITLTLKDRKVTYLIDIAIPNSENVRRKYTEKIQKYIPLADEIRQMWHQHTVKIIPIIISSTGLIPKSLHTSLTELDLNKYSYIDLQKSVIIDTCSIVRRFLTSTTQTPTTLHNEPTHLA

SEQ ID NO: 7969 - protein, 1262 aa, Bombyx mori
MENQEINIRIGPLPGGRQGTSGAGAGRGSMRTASGRRLNRRVTTNQATTAETQITLTPDTQQESARSVLQDMLPATTLAGRNRQRMKWTDEVNKQLLRCYYTVTNCESNLTGYRLALYTKFIDIYPDLHIISEQRLADQVRVIHRNNRISAAERQIIKTEVEQNLHSLTSVSTNPTNSHPINQENIIHSTQHGSHDTNNRNTFNSTEYIVHTPSTDSQITDLLLTPSYTLSHTPSAHKQASDTQTDQPDTTESIQQIEQIFNENFIKYKGIDPTLRPTLSKLKISHKSISTVKILNILIDNKLTNITNPTIEEVHDLIYSAAMTATTIHTNKNKQMTYTEIVPRTISDSKPAWEIRIENNIALLRQEIGRLNQFIAGNLSTKKQVKMGILYKNKEEAIEIMDKKTQRLQALSKRLRRYRKSNQRHRDNMMFNTNQKVFYRNFNREAVVKNLPDITEIQTFWENIWSKPIEHNNEAEWIKTELNKTQHVDPMLEVTIDRIDIELAIKRTLNWKTPGPDKIHNYWLKYFTSTHIHIAKAFNKIIQEPNTLPMFLTHGNTYLKPKDTDTDNPAKYRPITCLPTLYKLLTSIISHKINAHLTHNKIIAEEQKGCRKGSRGCKEQLVIDTEIHTQVKQSHRNLYFAYIDYQKAYDSVPHSWLVQILKIYKIHPMLIKFLQQTMQKWSTVLNIKTEAGTIKSNSIKIARGIYQGDSLSPLWFCMAINPLSQILNNTEQGYMIHKDTKTKLTHLLYMDDIKLYSGNRQQMNRLLEATENFSSDIKMNFGTDKCKINSIIKGKHHETDPYILYTQQNSIIDKMDINDTYKYLGYAQSIGLDHSKIKQELTNKYTERLNIILKTELSGRNTVKAINTYAVPVLTYSFGIIKWTTTDLEKVNRVTRTTCNKHNIHHIHSATERFNLKRKLGGRGLVDVKHLHNRQVHNIRTYMYNKSNDSPIHKALTLISTSGTPLKLNDNSYTIDPPITDEQKIISWKQKTLHGKHPNQLQQEHIDSEASNAWLSKGNIYKETEGFMLAIQDQVIKTRNYQKYIIKDPSVVSDRCRLCNSNQETIEHITGGCPFLANKQYTERHNNVAKQIHSQLALKYNLLDETEPYYKYKPTSVLNNESVKLYWDRDIITDKTTTNNRPDITLTLKDRKITYLIDIAIPNSENIRKKYTEKIQKYIPLADEIRQMWHQHTVKIIPVIISSTGLIPKSLHTSLSELDLNKYSYIALQKSVIIDTCSIVRRFLTSTTQTPTTLHNEPTHLA

SEQ ID NO: 7970 - protein, 1265 aa, Apodemia chisosensis
MESRNNDKDIGPLPGDRQGTSGAGAGRDSIRTVSGRRLNRRITTNQDATAETTNTPTSDTPHETAISVLQTMRPATTLAGRQRQRMKWNDEINQRLLRCYYTVTDCESNLTGYRPALYQQFISIYPDLCNNISEQRLADQIRVIHRNNRISPADREIIKIEVQQILNDNSTLPMDTNHSTIVDINSHNIQTNAEIQGLYLSSSEEDQRNQVVNSQMTSTRTTYTQTNLTFSTCTPTPCTPIQTSNTETELDTDDLQKCQYLFNEFLTRYKGMDPTTRPNLSKLKINRKSKVTVDTLNQLIYRELENTQPTIGQIHDIIYCAAMTATAIHNDTKNIERRLNDKEKDDRQKQDLKPAWERRLETKIKILRKEIGRLNQFIKENLSIRNQRIMNRVYNNKQEATETLDNKIQTLQALSKRLKRYKKSNQRHQDNIIFNNNQKLFYRKFNDVLTIKDPPNITDVQTFWENVWSKPIEHNKEADWIKAEFEKFEKLELMPEIIIGRKDVEIAIKRTLNWKTPGPDKIHNYWLKYFTSTHEYIANAFNNVINDPHSMPKYLTQGCTYLKPKDTDYKNPAKYRPITCLPTLYKLLTSIISYRINSHLTYNNIIAEEQKGCRKGSRGCKEQLVIDTEIHNQVKQTHRNLHFAYIDYQKAFDSVPHSWLIQILKVYKVNDKLIEFLHCIMQHWTTILTMSTESGNIRSNPIKIARGIFQGDALSPLWFCLALNPLSRLLNNTEQGYVIHRETNTKITHLMYMDDIKLYAATKQQINNLLKVTENFSADIKMKFGIDKCKINSIVRGKHSETDPYILQTQQNLLIDRMETTDTYKYLGYSQSIGIDHSRIKEQLSKKYSDRINKILKTELSGRNTVKAINTYAVPILTYSFGIIKWTHTDLENLNRLTRTTCNKHNIHHIHSAIERFNLKRKLGGRGLTDIKNLHYRQVQNIYVYMHSKTNDSPIHKALTLISTSGTPLKLNKDNIFTEEVVTDEKKINNWKQKSLHGKYPNQLQQEHVDKEASNAWLCKGNLYKETEGFMVAIQDQIINTKNYQKYIIKDPTVISDKCRLCNTSQETIDHITGGCPFLANKQYTERHNNVAKQIHALLAFKYKLIDKIEPYYKYIPKNVINSKDIKLYWDRDIITDKTTTNNRPDITLTIKEEKTTYLIDIAIPNSENIRKKYIDKIQKYIPLADEIRQMWHQHTVKIIPIIVSSTGLIPKSLHTSLKELGLHKNTYIQLQKSVIIDTCSIVRRFLTSTTQTPTTLHNEPTHLA

SEQ ID NO: 7971 - protein, 1262 aa, Spilosoma lubricipeda
MEQNINSNSIGPLPGGRQGTSGAGAGRGSMRTASGRRLNRRVTTNQSTTAETQTTLTPDTLQESARSVLQDMLPATTLAGRNRQRMKWTNEVNQQLLRCYYTVTHCETNLTGYRPALYTKFIEIYPDLHILSEQRLADQVRVIHRNNRISVSEREIIKVEIEQNLRCNTISTDSANSLSINQRNIIDNTQHDSPETNTHNINICTSTEYIERTQTIDSQITNTPLTSTYTPTPFALTQSLDTQTEQHDTTERMQQIEQLFNENFLKYKGSDPTLRPNLLKLKISRKSKITVNILNSLIDNKFRNNPNPTIEEVHDLIYCAALTTTSIHNSNKNRRPIDTEVTPRTKDKSKPAWERRIENNIAVLRQEIGRLNQFIAGNLSRKKQVKIGTMYKNKEEAIETMDKKTQRLQALSKRLRRYKKSNQRHRDNITFNTNQKLFYRNFNKEAVVNNVPDITEIQTFWENIWSIPIQHNNEAEWIKAELDKTQNLDPMIEVIVNKTDVELAIKKTLNWKTPGPDKIHNYWLKYFTSTHQHIANAFNTIIQEPNTLPRFLTHGNTYLKPKDSDTQNPAKYRPITCLPTLYKLLTSIISHKINTHLTHNKIIAEEQKGCRKGSRGCKEQLVIDTEIHNQVKQSHRNLCFAYIDYQKAYDSVPHSWLVQILKIYKVNPSLIEFLEQTMQKWSTVLNIKTEAGTIKSNTIKIARGIYQGDSLSPLWFCMAINPLSRILNNTEQGYMLHKDSNTKLTHLLYMDDIKLYSGNRQQMNRLLKVTESFSTDIKMNFGIDKCKINSIVKGKHHETDPHILHTQQNSIIDKMEINDTYKYLGYAQSIGLDHSKIKEELTKKYIDRLNKILKTELSARNTVKAINAYAVPVLTYSFGIIKWTSTDLDKLNRLTRTTCNKYNIHHIHSATERFNLERKLGGRGLVDVKHLHNRQVHNIRTYMYNKSNDSSIHKALTLISTSGTPLKLNDNSYIIDPPITNEQKINSWKQKTLHGKHPNHLQQEHIDLEASNAWLSKGNIYKETEGFMLAIQDQIIKTRNYQKYIIKDSSIVSDKCRLCNSTQETIEHITGGCPFLANKQYTERHNNVAKQIHSQLAIKYNLLDKTEPYYKYKPKSVLNNEIVKMYWDRDIITDKTTTNNRPDITLTLKDRKVTYLIDIAIPNSENVRRKYTEKIQKYIPLADEIRQMWHQHTVKIIPIIISSTGLIPKSLHTSLTELDLNKYSYIDLQKSVIIDTCSIVRRFLTSTTQTPTTLHNEPTHLA

SEQ ID NO: 7972 - protein, 940 aa, Bombyx mori
MTATTIHTNKNKQTTYTEIAPRTTSNSKPAWEIRIENNIAFLRQEIGRLNQFIAGNLSTKKQVKMGILYKNKEEAIEIMDKKTQRLQALSKRLRRYRKSNQRHRDNMMFNTNQKVFYRNFNREAVVKNLPDITEIQTFWENIWSKPIEHNNEAEWIKTELNKTQHVDPMLEVTIDRIHIELAIKRTLNWKTPGPDKIHNYWLKYFTSTHRHIAKAFNKIIQEPNTLPMFLTHGNTYLKPKDTDTDNPAKYRPITCLPTLYKLLTSIISHKINAHLTHNKIIAEEQKGCRKGSRGCKEQLVIDTEIHTQVKQSHRNLYFAYIDYQKAYDSVPHSWLVQILKIYKIHPMLIKFLQQTMKKWSTVLNIKTEAGTIKSNSIKIARGIYQGDSLSPLWFCMAINPLSQILNNTEQGYMIHKDTKTKLTHLLYMEDIKLYSGNRQQMNRLLEATENFSSDIKMNFGTDKCKINSIIKGKHHETDPYILSTQQNSIIDKMDINDTYKYLGYAQSIGLDHSKIKQELTNKYTERLNIILKTELSGRNTVKAINTYAVPVLTYSFGIIKWTTTDLDKVNRVTRTTCNKHNIHHIHSATERFNLKRKLGGRGLVDVKHLHNRQVHNIRTYMYNKSNDSPIHKALTLISISGTPLKLNDNSYTIDPPITDEQKIISWKPKTLHGKHPNQLQQEHIDSEASNTWLFKGNIYKETEGFMLAIQDQVIKTKNYQKYIIKDPSVVSDRCRLCNSNQETIEHITGGCPFLANKQYTERHNNVAKQIHSQLALKYNLLDETEPYYKYKPTSVLNNESVKLYWDRDIITDKTTTNNRPDITLTLKDRKITYLIDIAIPNSENIRKKYTEKIQKYIPLADEIRKMWHQHTVKIIPIIISSTGLIPKSLHTSLSELDLNKYSYIALQKSVIIDTCSIVRRFLTSTTQTPTTLHNEPTHLA

SEQ ID NO: 7973 - protein, 1257 aa, Spilosoma lubricipeda
MEHNINSNSIGPLPGGRQGTSGAGAGRGSMRTASGRRLNRRVTTNQSTTAETQTTLTPDTLQESARSVLQDMLPATTLAGRNRQRMKWTNEVNQQLLRCYYTVTHCETNLTGYRPALYTKFIEIYPDLHILSEQRLADQVRVIHRNNRISVSEREIIKVEIEQNLRCNTISTDSANSPSINQRNIIDNTQYDSSETNTHNINITSTEYIERTQTIDSQITNTPLTSTYTLSPTPFAHTQSLDTQTEQHDTTERMQQIEQLFNENFLKYKGSDPTLRPNLLKLKISRKSKMTVNILNSLIDNKFRNNANPTIEEVHDLIYCAALTATSIHNSNKNSRPIDTEVTPRTKDNSKPAWERRIENNIAVLRQEIGRLNQFIAGNLSRKKQVKMGTMYKNKEEAIETMDKKTQRLQALSKRLRRYKKSNQRHRDNITFNTNQKLFYRNFNKEAVVNNVPDITEIQTFWENIWSTPIQHNNEAEWIKAELDKTQNLDPMIEVIVNKTDVELAIKKTLYWKTPGPDKIHNYWLKYFTSTHQHIANAFNTFIQEPNTLPRFLTHGNTYLKPKDSDTQNPAKYRPITCLPTLYKLLTSIISHKINTHLTHNKIIAEEQKGCRRGSRGCKEQLVIDTEIHNQVKQSHRNLYFAYIDYQKAYDSVPHSWLVQILKIYKINPSLIEFLEQTMQKWSTVLNIKTEAGTIKSNTIKIARGIYQGDSLSPLWFCMAINPLSRILNNTEQGYILHKDSNTKLTHLLYMDDIKLYSGNRQQMNRLLKVTESFSTDIKMNFGIDKCKINSIVKGKHHETDPHILHTQQNSIIDKMEINDTYKYLGYAQSIGLDHSKIKEELTKKYIDRLNKILKTELSARNTVKAINVYAVPVLTYSFGIIKWTSTDLDKLNRLTRTTCNKYNIHHIHSATERFNLERKLGGRGLVDVKHLHNRQVHNIRTYMYNKSNDSSIHKALTLITTSGTPLKLNDNSYIVDPPITNEQKINSWKQKTLHGKHPNHLQQEHIDLEASNAWLSKGNIYKETEGFMLAIQDQIIKTRNYQKYIIKDSSIVSDKCRLCNSTQETIEHITGGCPFLANKQYTERHNNVAKQIHSQLAIKYNLLDKTEPYYKYKPKSVLNNEIVKMYWDRDIITDKTTTNNRPDITLTLKDRKVTYLIDIAIPNSENVRRKYTEKIQKYIPLADEIRQMWHQHTVKIIPIIISSTGLIPKSLHTSLTELDLHKYSYIDLQKSVIIDTCSIVRRFLTSTTQTPTTLHN

SEQ ID NO: 7974 - protein, 1264 aa, Spilosoma lubricipeda
MEQNINSNSIGPLPGGRQGTSGAGAGRGSMRTASGRRLNRRVTTNQSTTAETQTTLTPDTLQESARSVLQDMLPATTLAGRNRQRMKWTDEVNQQLLRCYYTVTHCETNLTGYRPALYTKFIEIYPDLHILSEQRLADQVRVIHRNNRISVSEREIIKIEIEQNLRSNTISTDSANSPSINQRNIIDNTQYDSPETNTHNINICTSTEYIERTQSIDSQIANTPLSSTYTLSPTPFAHTQSLDTQTEQHDTTERMQQIEQLFNENFIKYKGSDPTLRPNLVKLKISRKSKMTVNILNSLIDNKFRNNANPTIEEVHDLIYCAALTVTLIHNSNKNSRPINTEVTPRTKDNSKPAWERRIENNIAVLRQEIGRLNQFIAGNLSRKKQVKMGTMYKNKEEAIETMDKKTQRLQALSKRLRRYKKSNQRHRDNITFNTNQKLFYRNFNKEAVVNNVPDITEIQTFWENIWSIPIQHNIEAEWMKAELDKTQNLDPMIEVIVNKIDVELAIKKTLNWKTPGPDKIHNYWLKYFTSTHQHIANAFNTIIQEPNTLPTFLTHGNTYLKPKDSDTQNPAKYRPITCLPTLYKLLTSIISHKINTHLTHNKIIAEEQKGCRKGSRGCKEQLVIDTEIHNQVKQSHRNLYFAYIDYQKAYDSVPHSWLVQILKIYKINPSLIEFLEQTMQKWSTVLNIKTEAGTIKSNTIKIARGIYQGDSLSPLWFCMAINPLSRILNNTEQGYMLHKDSNTKLTHLLYMDDIKLYSGNRQQMNRLLKVTESFSTDIKMKFGIDKCKINSIVKGKHHETDPHILHTQQNSIIDKMEINDTYKYLGYAQSIGLDHSKIKEELTKKYIDRLNKILKTELSARNTVKAINAYAVPVLTYSFGIIKWTSTDLDKLNRLTRTTCNKYNIHHIHSATERFNLERKLGGRGLVDVKHLHNRQVHNIRTYMYNKSNDSSIHKALTLISTSGTPLKLNDNSYIIDPPITNEQKINSWKQKTLHGKHPNHLQQEHIDLEASNAWLSKGNIYKETEGFMLAIQDQIIKTRNYQKYIIKDSSIVSDKCRLCNSTQETIEHITGGCPFLANKQYTERHNNVAKQIHSQLAIKYNLLDKTEPYYKYKPKSVLNNEIVKIYWDRDIITDKTTTNNRPDITLTLKDRKITYLIDIAIPNSENVRRKYTEKIQKYIPLADEIRQMWHQHTVKIIPIIISSTGLIPKSLHTSLTELDLNKYSYIDLQKSVIIDTCSIVRRFLTSTTQTPTTLHNEPTHLA

SEQ ID NO: 7975 - protein, 1264 aa, Spilosoma lubricipeda
MEQNINSNSIGPLPGGRQGTSGAGAGRGSMRTASGRRLNRRVTTNQSTTAETQTTLTPDTLQESARSVLQDMLPATTLAGRNRQRMKWTDEVNQQLLRCYYTVTHCETNLTGYRPALYTKFIEIYPDLHILSEQRLADQVRVIHRNNRISVSEREIIKIEIEQNLRSNTISTDSANSPSINQRNIIDNTQYDSPETNTHNINICTSTEYIERTQSIDSQIADTPLTSTYTLSPTPFAHTQSLDTQTEQHDTTERMQQIEQLFNENFIKYKGSDPTLRPNLVKLKISRKSKMTVNILNSLIDNKFRNNANPTIEEVHDLIYCAALTATLIHNSNKNSRPINTEVTPRTKDNSKPAWERRIENNIAILRQEIGRLNQFIADNLSRKKQLKMGTMYKNKEEAIETMDKKTQRLQALSKRLRRYKKSNQRHRDNITFNTNQKLFYRNFNKEAVVNNVPDITEIQTFWENIWSIPIQHNNEAEWIKAELDKTQNLDPMIDVIVNKIDVELAIKKTLNWKTPGPDKIHNYWLKYFTSTHQHIANAFNTIIQEPNTLPTFLTHGNTYLKPKDSDTQNPAKYRPITCLPTLYKLLTSIISHKINTHLTHNKIIAEEQKGCRKGSRGCKEQLVIDTEIHNQVKQSHRNLYFAYIDYQKAYDSVPHSWLVQILKIYKINPSLIEFLEQTMQKWSTVLNIKTEAGTIKSNTIKIARGIYQGDSLSPLWFCMAINPLSRILNNTQQGYMLHKDSNTKLTHLLYMDDIKLYSGNRQQMNRLLKVTESFSTDIKMKFGIDKCKINSIVKGKHHETDPHILHTQQNSIIDKMEINDTYKYLGYAQSIGLDHSKIKEELTKKYIDRLNKILKTELSARNTVKAINAYAVPVLTYSFGIIKWTSTDLDKLNRLTRTTCNKYNIHHIHSATERFNLERKLGGRGLVDVKHLHNRQVHNIRTYIYNKSNDSSIHKALTLISTSGTPLKLNDNSYIIEPPITNEQKINSWKQKTLHGKHPNHLQQEHIDLEASNAWLSKGNIYKETEGFMLAIQDQIIKTRNYQKYIIKDSSIVSDKCRLCNSTQETIEHITGGCPFLANKQYTERHNNVAKQIHSQLAIKYNLLDKTEPYYKYKPKSVLNNEIVKMYWDRDIITDKTTTNNRPDITLTLKDRKVTYLIDIAIPNSENVRRKYTEKIQKYIPLADEIRQMWHQHTVKIIPIIISSTGLIPKSLHTSLTELDLNKYSYIDLQKSVIIDTCSIVRRFLTSTTQTPTTLHNEPTHLA

SEQ ID NO: 7976 - protein, 1264 aa, Emesis brimo
MENCNNDSIRIGPLPGDRQGTSGAGAGRSSIRTVSGRRLNRRITTNQDVTAETTNTPTPDTPHETARSVLQTIRPTTTLAGKQRQRMKWNDEINQNLLRCYYTVTDCETNLIGYRPTLYEQFVNIYPDIRYNVTEQRLADQIRVIHRNNRISLLDREIIKREIQQKLNDNNTLTTNTNCFTAIDTNLHNNQINTSVQDPTGEYQLNQPINSLITSTQSAQTETNLPVLTCPPSSCIQTQTLDTETDILEIHDLQKCKNLFNESLSKYKGMDPTTRPDLLKLKITHKSKITINILNQLIREELENTQPTIENIHDIIYCAAITAILIHNNINTYKRRNLNNIEGQSKEKIYLKPAWERRLETKIEILRKDVGRLNQFIKGNLSSRNQRIMNRIHSDKQKAAETLDYKIQKLQALSKRLKRYKKSNQRQRDNKIFNNNQKSFYRKLNNEIIINDPPNIIDIQKFWENIWSKPIEHNREAKWIKEELEKSQNLELMPDIIIDKTDVEFAVKKTINWKTPGPDKIHNYWLKYFTSAHDHIANAFNILIHDPQSMPEYLTQGCTYLKPKDTDHKNPAKYRPITCLPTLYKLLTSIISHKINSHLIHNNIIAEEQKGCKKGSRGCKEQLLIDTEIHNQVKKTHRNLHFAYIDYQKAFDSVPHSWLIQILKLYKISDKLVEFLHHAMQHWKTILTISTESETIRSNPIKIARGIFQGDSLSPLWFCLSLNPLSRLLNKTQEGYIIHKETNTKITHLMYMDDIKLYAASKKQINIFLGITEKFSADIKMKFGIDKCKINSIIRGKHYKTDPYILQTQQNILIARMEITDTYKYLGYSQSIGIDHSKIKEELSKKYTDRINTILRTELSGRNTIIAINTYAVPILTYSFGIIKWTVTDLDRLNRLTRTICNKHNIHHIHSAIERFNLNRKLGGRGLIDIKNLHNNQIQNFLSYMQNKANHSPIHKALTLITTSGTPLQLNNNNRLTEEVVTDEQKINNWKHKSLHGKHPNQLQQEHIDKEASNAWLYRGTLYKETEGFMVAIQDQIINTKNYQKYIIKDPAIVSDKCRLCNTYQETIDHITGGCPFLANKQYTERHNNVAKQIHSLLSLKYKLVDKAMPYYKYTPKNVLDNGCVKLYWDRDIITDKTTKNNRPDITLTIKETKTTYLIDIAIPNSDNIRKKYIDKIQKYIPLADEIRQMWHQHTVKIVPIIISSTGLIPKSLHASLKELGLHKNTYIPIQKSVIIDTCSIVRRFLTSTTQTPTALHDEPTHLA

SEQ ID NO: 7977 - protein, 1257 aa, Emesis brimo
MESCFNDIRIGPLPGDRQGTSGAGAGRGSIRDVSGRRLNRRVTTNEDATAEAINTPTPDTQHETARSVLQDMRPTTTLAGKKRQRMKWNHMINQQLLRCYYTVTDCETNLTGYRPALYEKFISIYPDLRNIVSEQRLADQVRVIHRNNRISLKDRNLIKTEIQQSFNDNNNLPTDISHSPITHINFHNSQITSETQESYLSPREEDQPNQDTQITKIQTNRTFYMCSPTPLTPIQTLDSEIETLNSEDVQKCRHIFNELLIKYRGMDPTVRPILSKLKITRKSKITVNTLNQLVYKELENAHPTIEQINDIIYCAAMTATSIHNNTNSTERNDKERENGRKKGLKPAWERRLETKITILRKDIGRLNQFIKENLSTRNQRIMNRIYNNKQEATETLDIKIQKLQALSKRLKRYKKSNQRHRDNIIFNNNQKLFYKKFNDEPAIKDPPNIIDIQTFWENIWSKSIEHNKDADWIKSELKESEKYESMPEILIDRTDIETAIKRTLNWKTPGPDKIQNYWLKYFTSTHEHIANAFNNLILDPGSMPRYLTLGCTYLKPKDKDHKNPAKYRPITCLSTLYKLLTSVISQKINAHVMHNNIIAEEQKGCRKGSRGCKEQLIIDTEIHNQVKQTHRNLYFAYIDYQKAFDSVPHSWLVQILEIYKVDDKLVKFLHHIMQHWTTILTISTESGTVKSDPIKIARGIFQGDALSPLWFCLSLNPLSRLLNRTEQGYVIHRETNTKITHLLYMDDIKIYAANKQQIKNLLEVTEKFSANIKMKFGIEKCKVNSIIRGKHCNTDPYILQTQQTLLINRMEITDTYKYLGYSQSIGIDHTKIKEELSEKYLHRLNRILKTQLSGRNIIKAINTYAVPVLTYSFGIIKWTNTDLERLNRLTRTTCNKHNIHHIHSAVERFNLKRNLGGRGLTDIKNLHNKQIQNIHLYMHNKTKDSPIHKALTLISTSGTSLKLNDNNRLLEKIITDEQKINNWKQKSLHGKYPNYLYQEHVDKEASNAWLYRGNLYKETEGFMVAIQDQIINTKNYQKYIIKDPTIISDKCRLCNNSQETIDHITGGCPFLANKQYTERHNNVAKQIHALLALKYKLTDKLESYYKYVPKNVIDNKYIKLYWDRDIITDKTTRNNRPDIVLTIKEEKTTYLIDIAIPNSENIRKKFIDKLQKYIPLADEIRQMWHQHTVKIIPIIISCTGLIPKSLHASLKELGLHKNTYIPLQKSVIIDTCSIVRRFLTSTTQAPTTLHDEPTHLD

SEQ ID NO: 7978 - protein, 974 aa, Spilosoma lubricipeda
MTVNILNSLIDNKFRNNANPTIEEVHDLIYCAALTATLIHNSNKNSRPINTKVTPRTKDNSKPAWERRIENNIAVLRQEIGRLNQFIAGNLSRKKQIKMGTMYKNKEEAIETMDKKTQRLQALSKRLRRYKKSNQRHRDNITFNTNQKLFYRNFNKEAVVNNVPDITEIQTFWENIWSIPIQHNNEAEWIKAELDKTQNLDPMIEVIVDKTDVELAIKKTLNWKTPGPDKIHNYWLKYFTSTHQHIANAFNTIIQEPNTLPTFLTHGNTYLKPKDSDTQNPAKYRPITCLPTLYKLLTSIIAHKINTHLTHNKIIAEEQKGCRKGSRGCKEQLVIDTEIHNQVKQSHRNLYFAYIDYQKAYDSVPHSWLVQILKIYKINPSIIEFLEQTMQKWSTVLNIKTEAGTIKSNTIKIARGIYQGDSLSPLWFCMAINPLSRILNNTEQGYMLHKDSNTKLTHLLYMDDIKLYSGNRQQMNRLLKVTESFSTDIKMKFGIDKCKINSIVKGKHHETDPHILHTQQNSIIDKMEINDTYKYLGYAQSIGLDHSKIKEELTKKYIDRLNKILKTELSARNTVKAINAYAVPVLTYSFGIIKWTSTDLDKLNRLTRTTCNKYNIHHIHSATERFNLERKLGGRGLVDVKHLYNRQVHNIRTYMYNKSNDSSIHKALTLISTSGTPLKLNDNSYIIDPPITNEQKINSWKQKTLHGKHPNHLQQEHIDLEASNAWLSKGNIYKETEGFMLAIQDQIIKTRNYQKYIIKDSSIVSDKCRLCNSTQETIEHITGGCPFLANKQYTERHNNVAKQIHSQLAIKYNLLDKTEPYYKYKPKSVLNNEIVKMYWDRDIITDKTTTNNRPDITLTLKDRKVTYLIDIAIPNSENVRRKYTEKIQKYIPLADEIRQMWHQHTVKIIPIIISSTGLIPKSLHTSLTELDLNKYSYIDLQKSVIIDTCSIVRRFLTSTTQTPTTLHNEPTHLA

SEQ ID NO: 7979 - protein, 1264 aa, Bombyx mori
MENQEISIRIGPLPGGRQGTSGAGAGRGSMRTASGRRLNRRVTTNQATTAETQITLTPDTQQESARSVLQDMLPATTLAGRNRQRMKWTDEVNKQLLRCYYTVTNCESNLTGYRLALYTKFIDIYPDLHIISEQRLADQVRVIHRNNRISAAEREIIKTEVEQNLHSLTSVSTNPTNSPPINQENIIHSTQHGSHDTNNRNAFNNNSTEYIVHTPSTDSQITDLLLTPSYTLSHTPSAHKQASDTQTDQPDTTESIQQIEQIFNENFIKYKGIDPTLRPTLSKLKISHKSISTVKILNILIDNKLTNITNPTIEEVHDLIYSAAMTATTIHTNKNKQMTYTEIAPRTTSNSKPAWEIRIENNIAFLRQEIGRLNQFIAGNLSTKKQVKMGILYKNKEEAIEIMDKKTQRLQALSKRLRRYRKSNQRHRDNMMFNTNQKVFYRNFNREAVVKNLPDITEIQTFWENIWSKPIEHNNEAEWIKTELNKTQHVDPMLEVTIDRIDIEIAIKRTLNWKTPGPDKIHNYWLKYFTSTHRHIAKAFNKIIQEPNTLPMFLTHGNTYLKPKDTDTDNPAKYRPITCLPTLYKLLTSTISHKINAHLTHNKIIAEEQKGCRKGSRGCKEQLVIDTEIHTQVKQSHRNLYFAYIDYQKAYDSVPHSWLVQILKIYKIHPMLIKFLQQTMKKWSTVLNIKTEAGTIKSNSIKIARGIYQGDSLSPLWFCMAINPLSQILNNTEQGYMIHKDTKTKLTHLLYMDDIKLYSGNRQQMNRLLEATENFSSDIKMNFGTDKCKINSIIKGKHHETDPYILYTQQNSIIDKMDINDTYKYLGYAQSIGLDHSKIKQELTNKYTERLNIILKTELSGRNTVKAINTYAVPVLTYSFGIIKWTTTDLDKVNRVTRTTCNKHNIHHIHSATERFNLKRKLGGRGLVDVKHLHNRQVHNIRTYMYNKSNDSPIHKALTLISTSGTPLKLNDNSYTIDPPTTDEQKIISWKQKTLHGKHPNQLQQEHIDSEASNTWLSKGNIYKETEGFMLAIQDQVIKTRNYQKYIIKDPSVVSDRCRLCNSNQETIEHITGGCPFLANKQYTERHNNVAKQIHSQLALKYNLLDETEPYYKYKPTSVLNNESVKLYWDRDIITDKTTTNNRPDITLTLKDRKITYLIDIAIPNSENIRKKYTEKIQKYIPLADEIRQMWHQHTVKIIPIIISSTGLIPKSLHTSLSELDLNKYSYIALQKSVIIDTCSIVRRFLTSTTQTPTTLHNEPTHLA

SEQ ID NO: 7980 - protein, 1264 aa, Spilosoma lubricipeda
MEQNINSNSIGPLPGGRQGTSGAGAGRGSMRTASGRRLNRRVTTNQSTTAETQTTLTPDTLQESARSVLQDMLPATTLAGRNRQRMKWTNEVNQQLLRCYYTVTHCETNLTGYRPALYTKFIEIYPDLHILSEQRLADQVRVIHRNNRISVSEREIIKIEIEQNLRSNTISTDSANSPSINQRNIIDNTQYDSPETNTHNINICTSTEYIERTQSIDSQIADTPLTSTYTLSPTPFAHTQSLDTQTEQHDTTERMQQIEQLFNENFIKYKGSDPTLRPNLVKLKISRKSKMTVNILNSLIDNKFRNNANPTIEEVHDLIYCAALTATLIHNSNKNSRPINTEVTPRTKDNSKPAWERRIENNIAVLRQEIGRLNQFIAGNLSRKKQLKMGTMYKNKEEAIETMDKKTQRLQALSKRLRRYKKSNQRHRDNITFNTNQKLFYRNFNKEAVVNNVPDITEIQTFWENIWSIPIQHNNEAEWIKAELDKTQNLDPMIEVIVNKIDVELAIKKTLNWKTPGPDKIHNYWLKYFTSTHQHIANAFNTIIQKPNTLPTFLTHGNTYLKPKDSDTQNPAKYRPITCLPTLYKLLTSIISHKINTHLTHNKIIAEEQKGCRKGSRGCKEQLVIDTEIHNQVKQSHRNLYFAYIDYQKAYDSVPHSWLVQILKIYKINPSLIEFLEQTMQKWSTVLNIKTEAGTIKSNTIKIARGIYQGDSLSPLWFCMAINPLSRILNNTQQGYMLHKDSNTKLTHLLYMDDIKLYSGNRQQMNRLLKVTESFSTDIKMKFGIDKCKINSIVKGKHHETDPHILHTQQNSIIDKMEINDTYKYLGYAQSIGLDHSKIKEELTKKYIDRLNKILKTELSARNTVKAINAYAVPVLTYSFGIIKWTSTDLDKLNRLTRTACNKYNIHHIHSATERFNLERKLGGRGLVDVKHLHNRQVHNIRTYMYNKSNDSSIHKALTLISTSGTPLKLNDNSYIIEPPITNEQKINSWKQKTLHGKHPNHLQQEHIDLEASNTWLSKGNIYKETEGYMLAIQDQIIKTRNYQKYIIKDSSIVSDKCRLCNSTQETIEHITGGCPFLANKQYTERHNNVAKQIHSQLAIKYNLLDKTEPYYKYKPKSVLNNEIVKMYWDRDIITDKTTTNNRPDITLTLKDRKVTYLIDIAIPNSENVRRKYTEKIQKYIPLADEIRQMWHQHTVKIIPIIISSTGLIPKSLHTSLTELDLNKYLYIDLQKSVIIDTCSIVRRFLTSTTQTPTTLHNEPTHLA

SEQ ID NO: 7981 - protein, 1256 aa, Apodemia zela
MESRNNDKCIGPLPGDRQGTSGADAGRDSIRTVSGRRLNRRITTNQDATAETTNTPTPDTPHETARSVLQDMRPATTLAGRQRQRMKWNDEINQQLLRCYYSITDCESNLTGYRPALYQQFISIYPDLCNNVSEQRLADQIRVIHRNNRISPTDREIIKREIQQTLNDNCTLPTNTNHSTIIDINVQNIQTHAAVQDLYLSSSEEDQRNQVVNPLMISTQTTYTQTNLTFSTCGPTQCTPILTLNDEMEQDADGLQKCQYLFNELIIKYKGMDPTTRPNISKLKINRKSKITVNTLNQLIYKELDNTQPTIEYIHDIIYCAAMTATSIHNDTKNTERRPNDKEKDSRHKQNLKPAWERRLETKIKILRKEIGRLNQFIKENLSIRNQRIMNRIYNNKQEATETLDNKIQKLQALSKRLKRYKKSNQRHQDNITFNNNQKLFYRKFNDEFTLKDPPSIIDVQTFWENIWSKPIEHNKEAEWIKVEFEKFEKLDLMPEIIMDRKDVEIAIKRTLNWKTPGPDKIHNYWLKYFTSTHEYIANAFNNIILDPHSMPKYLTQGCTYLKPKDLDYKNPANYRPITCLPILYKLLTSIISHKINSHLTHNNIIAEEQKGCRKGSRGCKEQLVIDTEIHNQVKQTHRNLHFAYIDYQKAFDSVPHSWLIQILKVYKVNDKLIEFLRCIMQHWTTTLNISAESGTIRSDPIKIARGIFQGDALSPLWFCLSLNPLSRLLNKTEHGYVIHRETNTKITHLMYMDDIKLYAATKQQINNLLKVTEDFSADIKMKFGIDKCKINSIVRGKHSETDPYILQTQQNLLIDKMEITDTYKYLGYSQSIGIDHSSIKEQLSKKYSHRLNKILKTELSGRNTVKAINTYAVPILTYSFGIIKWTNTDLERLNRLTRTTCNKHNIHHIHSAIERFHLKRKLGGRSLIDIKNLHNKQIQNIYEYMHSKTNDSSIHKALTLISTSGTPLKLNNDHRLTEDVVTDEQKIINWKQKTLHGKYPNQLQQEHVDKEASNAWLCQGNLYKETEGFMVAIQDQIINTKNYQKYIIKDPTVTSDKCRLCNTSQETVDHITGGCPFLANKQYTQRHNNVAKQIHRLLVLKYKLIDKAEPYYKYLPKSVIDSKDIKLYWDRDIITDKTTANNRPDITLTIKEKKITYLIDISIPNSENIRKKYIDKIQKYIPLADEIRQMWHQHTVKIIPIILSSTGLIPKSLHTSLKELGLHKNTYIPLQKSVIIDTCSIVRRFLTSTTQTPTT

SEQ ID NO: 7982 - protein, 876 aa, Bombyx mori
MGILYKNKEEAIEIMDKKTQRLQALSKRLRRYKKSNQRHRDNMMFNTNQKVFYRNFNREAVVKNLPDITEIQTFWENIWSKPIEHNNEAEWIKTELNKTQHVDPMLEVTIDRIDIELAIKRTLNWKTPGPDKIHNYWLKYFTSTHRHIAKAFNKIIQEPNTLPMFLTHGNTYLKPKDTDTDNPAKYRPITCLPTLYKLLTSIISHKINAHLTHNKIIAEEQKGCRKGSRGCKEQLVIDTEIHTQVKQSHRNLYFAYIDYQKAYDSVPHSWLVQILKIYKIHPMLIKFLQQTMQKWSTVLNIKTEAGTIKSNSIKIARGIYQGDSLSPLWFCMAINPLSQILNNTEQGYMIHKDTKTKLTHLLYMDDIKLYSGNRQQMNRLLKATENFSSDIKMNFGTDKCKINSIIKGKHHETYPYILYTQQNSIIDKMDINDTYKYLGYAQSIGLDHSKIKQELTNKYTERLNIILKTELSGRNTVKAINTYAVPVLTYSFGIIKWTTTDLDKVNRVTRTTCNKHNIHHIHSATERFNLKRKLGGRGLVDVKHLHNRQVHNIRTYMYNKSNDSPIHKALTLISTSGTPLKLNDNSYTIDPPITDEQKIISWKQKTLHGKHPNQLQQEHIDSEASNAWLSKGNIYKETEGFMLAIQDQVIKTRNYQKYIIKDPSVVSDRCRLCNSNQETIEHITGGCPFLANKQYTERHNNVAKQIHSQLALKYNLLDETEPYYKYKPTSVLNNESVKLYWDRDIITDKTTTNNRPDITLTLKDRKITYLIDIAIPNSENIRKKYTEKIQKYIPLADEIRQMWHQHTVKIIPVIISSTGLIPKSLHTSLSELDLNKYSYIALQKSVIIDTCSIVRRFLTSTTQTPTTLHNEPTHLA

SEQ ID NO: 7983 - protein, 1264 aa, Spilosoma lubricipeda
MEQNINSNSIGPLPGGRQGTSGAGAGRGSMRTASGRRLNRRVTTNQSTTAETQTTLTPDTLQESARSVLQDMLPATTLAGRNRQRMKWTNEVNQQLLRCYYTVTHCETNLTGYRPALYTKFIEIYPDLHILSEQRLADQVRVIHRNNRISVSEREIIKVEIEQNLRCNTISTDSANSPSINQRNIIDNTQYDSPETNTHNINICTSTEYVERTQTIDSQITNTPLTSTYTLSPTLFAHTQSLDTQTEQHDTTERMQQIEQLFNENFLKYKGSDPTLRPNLVKLKISRKSKMTVNILNSLIDNKFRNNANPTIEEVHDLIYCAALTATSIHNSNKNSRPIDTEVTPRTKDNSKPAWERRIENNIAVLRQEIGRLNQFIAGNLSRKKQIKMGTMYKNKEEAIETMDKKTQRLQALSKRLRRYKKSNQRHRDNITFNTNQKLFYRNFNKEAVVNNVPDITEIQTYWENIWSIPIQHNNEAEWIKAELDKTQNVDPMIEVIFNKTDVELAVKKTLNWKTPGPDKIHNYWLKYFTSTHQHIANAFNTIIQEPNTLPRFLTHGNTYLKPKDSNTQNPAKYRPITCLPTLYKLLTSIISHKINTHLTHNKIIAEEQKGCRKGSRGCKEQLVIDTEIHNQVKQSHRNLYFAYIDYQKAYDSIPHSWLVQILKIYKINPILIEFLEQTMQKWSTVLNIKTEAGTIKSNTIKIARGIYQGDSLSPLWFCMAINPLSRILNNTEQGYILHKDSNTKLTHLLYMDDIKLYSGNRQQMNRLLKVTESFSTDIKMNFGIDKCKINSIVKGKHHETDPHILHTQQNSIIDKMEINDTYKYLGYAQSIGLDHSKIKEELTKKYIDRLNKILKTELSARNTVKAINAYAVPVLTYSFGIIKWTSTDLDKLNRLTRTTCNKYNIHHIHSATERFNLERKLGGRGLVDVKHLHNKQVHNIRTYMYNKSNDSSIHKALTLISTSGTPLKLNDNSYIVDPPITNEQKINSWKQKTLHGKHPNHLQQEHIDLEASNAWLSKGNIYKETEGFMLAIQDQIIKTRNYQKYIIKDSSIVSDKCRLCNSTQETIEHITGGCPFLANKQYTERHNNVAKQIHSQLAIKYNLLDKTEPYYKYKPKSVLNNEIVKMYWDRDIITDKTTTNNRPDITLTLKDRKVTYLIDIAIPNSENVRRKYTEKIQKYIPLADEIRQMWHQHTVKIIPIIISSTGLIPKSLHTSLTELDLNKYSYIDLQKSVIIDTCSIVRRFLTSTTQTPTTLHNEPTHLA

SEQ ID NO: 7984 - protein, 1247 aa, Spilosoma lubricipeda
MKITIKYINNNIAKLNLLYRKISICFQCFVCKNIYFTLVLHVYGSFSICCVLPSANKYHEETNNNNNNNKWTDEVNQQLLRCYYTVTHCETNLTGYRPALYTKFIEIYPDLHMLSEQRLADQVRVIHRNNRISVSEREIIKIEIEQNLRSNTISTDSANSPSINQRNIIDNTQYDSPETNTHNINICTSTEYIERTQSIDSQIANTPLTSTYTLSPTPFAHTQSLDTQTEQHDTTERMQQIEQLFNENFIKYKGSDPTLRPNLVKLKISRKSKMTVNILNSLIDNKFRNNANPTIEEVHDLIYCAALTATLIHNSNKNSRPINTEVTPRTKDNSKPAWERRIENNIAVLRQEIGRLNQFIAGNLSRKKQVKMGTMYKNKEEAIETMDKKTQRLQALSKRLRRYKKSNQRHRDNITFNTNQKLFYRNFNKEAVVNNVPDITEIQTFWENIWSIPIQHNNEAEWIKAELDKTQNLDPMIEVIVDKTDVELAIKKTLNWKTPGPDKIHNYWLKYFTSTHQHIANAFNTIIQEPNTLPTFLTHGNTYLKPKDSDTQNPAKYRPITCLPTLYKLLTSIIAHKINTHLTHNKIIAEEQKGCRKGSRGCKEQLVIDTEIHNQVKQSHRNLYFAYIDYQKAYDSVPHSWLVQILKIYKINPSLIEFLEQTMQKWSTVLNIKTEAGTIKSNTIKIARGIYQGDSLSPLWFCMAINPLSRILNNTEQGYMIHKDSNTKLTHLLYMDDIKLYSGNRQQTNRLLKVTESFSTDIKMKFGIDKCKINSIVKGKHHETDPHILHTQQNSIIDKMEINDTYKYLGYAQSIGLDHSKIKEELTKKYIDRLNKILKTELSARNTVKAINAYAVPVLTYSFGIIKWTSTDLDKLNRLTRTTCNKYNIHHIHSATERFNLERKLGGRGLVDVKHLHNRQVHNIRTYMYNKSNDSSIHKALTLISTSGTPLKLNDNSYIIDPPITNEQKINSWKQKTLHGKHPNHLQQEHIDLEASNAWLSKGNIYKETEGFMLAIQDQIIKTRNYQKYIIKDSSIVSDKCRLCNSTQETIEHITGGCPFLANKQYTERHNNVAKQIHSQLAIKYNLLDKTEPYYKYKPKSVLNNEIVKMYWDRDIITDKTTTNNRPDITLTLKDRKVTYLIDIAIPNSENVRRKYTEKIQKYIPLADEIRQMWHQHTVKIIPIIISSTGLIPKSLHTSLTELDLNKYSYIDLQKSVIIDTCSIVRRFLTSTTQTPTTLHNEPTHLA

SEQ ID NO: 7985 - protein, 1161 aa, Actias luna
MENTRKNIHIGSLPGDRQGTSGAGAGRGSMRTVSGRRLNRRVATNQATTAETQTTLTPDTLQEPARSVLRDMLPATTLAGRNRQRMKWTDEVNKQLLRCYYTVTHCETNLTGYRSALYTKFTELYPDLHMISEQRLADQVRVIHRNNRILATEREIIKTEVEQNLGSLSTTSTNPTDSPPINQPNTIHSTQHGSSDTNNRNTFNPIEDIEHIPSINSQLTDPLPTLSHNLSLTLCIHTQSTNTQTDHPDTSESIQQIEQVFNENITKYKGTDPTLRPLLSKLKISRKSKITVNTLNSLIDNKLTNITNPAIEEIHDLIYSAAMTATTMHNNKTRHMTDTEAGPRTRGNSKPAWEIRIENNIAFLRQEIGRLNQFIVGNLSRKKQVKMGILYKNKEEVIEIMDKKTQRLQALSKRLRRYKKSNQRHRDNIMFNTNQKLFYRNFNKETVVKNLPDITEIQAFWENIWSKPIEHNNEAKWIKVEQSETQHVEPMLEVTVDKIDIELAIKKTLNWKTPGPDKIQNYWLKYFTSTHKHIANAFNKILQEPNTLPMFLTHGNTYLKSKDSDTDNPAKYRPITCLPTLYKLLTSIISDKINTHLTHNKIIAEEQKGCRKGSRGCKEQLVIDTEIHNQVKQSHRNLYFAYIDYQKAYDSVPHSWLIQILKIYKINPILIEFLQQTMLKWSTILNIKTEAGTIKSNSIKIARGIYQGDSLSPLWFCMAINPLSRILNNTQQGYMLHKDTNTKLTHLLYMDDIKLYSGNRQQMNRLLEATENFSTDIKMNFGTDKCKINSIIKGKHHETDPYILYTQQNSIIDSMEINDTYKYLGYAQSIGLDHSKIKEELTKKYTNRLNVILKTELSGQNTVKAINTYAVPVLTYSFGIIKWTTTDLDKLNRITRTTCNKHNIHHIHSATERFNLKRKLGGRGLVDVKQLHNRQVHNIRTYMYNKSNDSPIHKALTRISTSGTPLKLNDNSYSIDPPISDEQKINSWKQKTLHGKHPNQLQQEHIDSEASNTWLSKGNIYKETEGFMLAIQDQIIKTRNYQKYIIKDSSIVTDRCRLCNSCQETIEHITGGCPFLANKQYTERHNNVAKQIHSQLALKYKLLDKAEPYYKYKPKSVLNNESVKLYWDRDIITDKTTTNNRPDITVTLKDRKITYLIDIAI

SEQ ID NO: 7986 - protein, 863 aa, Eilema depressum
MDNKTQKLQALSKRLRRYRKSNQRKNDNKTFHSNQKLFYRNFNKQSSISNPPNIAEVQAFWENIWSEAIEHNQEAEWIKKEIEETQHLDPMTEVKIEKEDIEIAIRKTHNWKTPGPDMIQNYWLKYFTSTHEHIANTFNTIIQEPYSMPTFLSQGLTYLKPKDSDTTNPAKYRPITCLATLYKLLTSVISHKINTHLIQNNIIAEEQKGCRKGSKGCKEQLVIDTEIHKQVKQMERNLYFTYIDYQKAYDSVPHSWLIHVLKIYKIDTKLIDFLQHVMHKWTTVLNISTESGPVISHPIKIARGIFQGDSLSPLWFCMSLNPLSRILNRTGHGYTIHRESNTKITHLLYMDDIKLYSSNRKQMNHLLETTENFSIDIKMSFGLDKCKINSIIKGKHHTTDPYILHTQQNSLIDRMDITDTYKYLGYSQGIGLDNTKIKEELTRKYTGRMKTILKTELSGRNIVKAINTYAVPVLTYSFGIIKWTPTDLDNLNRLTRTTCNKHLIHHIHSATERFNLKRKLGGRGFIDIKNLHNKQIHNIRTYMLSRVNNSPIHKALTCITTSGTPLKLNDRNINTTHEHITDEQKMTSWKQKSLHGRYPNQLQQEHIDREASNAWLYTGNIYKETEGFMVAIQDQVIKTKNYQKYIIKDPKIVSDRCRLCNTNQETIDHITGGCAFLANKQYTDRHNNVAKQIHSLLAQKYKLVDKIEPYYKYKPEDVLNNETTKLYWDRAIITDKTITNNRPDITLTLKAEKITYLIDISIPNSDNIKKKYTEKIQKYIPLADEIRQMWHQHTVKIIPIILSSTGLIPKSLHTSLIELGLHKKLYISLQRSVVIDTCSIVRRFLSTTTQTPTTIQNDPTHLA

SEQ ID NO: 7987 - protein, 1228 aa, Graphium androcles
MESLDTDICIGSLPGDRQGTSGAGAGRDSIRTVSGRRLNRRITVDKNVTAETTTVTPTQNTQQETSRSALQEMRPATTLGGKLRQRMKWSDEINQQLLRCYYTVTQCETNLTGYRPELYSKFITLYPDLHDIVSQQRLADQIRVIHRNNRISPKDRELIKTEIQQVINDPNPISHHIDNLSMTDTHHNILQINTNVQESNLTEITDREILSQIEELQVLNTHTSGTFTVSPTASGLLPIPHSQTQDLETETGSLEIDNLQECKQLFNEHLTKYKGTDLLTRPSLPKLKITHKSKATVNTLNQLINYELLNITEPTIEQIHDIIYCAALTATTIHSTPKNFKNRNNTEGEILRITNSKPPWERRLETKIATLRKDIGRLNQLIKGNLSSKNQRNMSRLYKSKEEAIDTLDIKTQKMQALSKRLKRYKKSNQRHKDNTIFNNNEKAFYRNFNKESTVKVPPSISEVQTFWENIWSKQVEHNREAQWIKEELEAQHQLDAMPEITIHTIDIETAIKRTLNWKTPGPDKVHNYWLKYFTSTHEHIAYVFNALMQDPYIMPDFLILGNTYLKAKDEDTMNPAKYRPITCLPTLYKLLTSIISHKINLHLIKNNIIAEEQKGCRKGSRGCKEQLVIDTEIHNQAKQRHRNLHFAYIDYQKAYDSVPHTWLLQVLNIYKINQKLIKFLHHAMQRWKTVLNINTESGTIKSNPIKVARGIFQGDSLSPLWFCLSLNPLSRILNNTKQGYVLHKETNTMITHLLYMDDIKLYAASKQQIKNLLETTEKFSTDIKMNFGIDKCKINSITKGKHNKTDPYVLQNNLQIDIMEKTDTYKYLGYAQSTGLDHSKIKQQLTKTYTDRVHRILKTELSGRNTIKAINTYAVPVLTYSFGIIKWTATDLDRLNRLTRTTCNKYNIHHIHSSTERFNLKRKLGGRGLIDIKNLHNNQVYNLHSYMYSKVDDSPIHKALTLMSTSGTSLKLNNNSTVVNTTISDDIKINSWKQKALHGKYPNQLQQEYIDKEASTAWLTRGNLYKETEGFMVAIQDQIINTRNYQKYIIKDPTVISDKCRLCNTNQETIDHITGGCPFLATKQYTERHNNVAKQIHRLLALKYKLIDKAEPYYKYKPVSVLNNEQAKLYWDRDIITDKTTRNNRPDITLTLKEEKITYLIDISIPNSENIRKKYIEKIQKYIPLADEIRQMWHQETVKIIPIIISSTGLIPHFLHASHKEINLNKR

SEQ ID NO: 7988 - protein, 1258 aa, Abrostola tripartita
MENTIRDIRIGPLPGGRQGTSGAGAGRGSMRTASGRRLNRRVTATQDVTAEHNFTDTPTNNTLHETGRSVLQEMLPATTLAGRNRQRMKWTDDVNRQLLRCYYTVTNCETNLTGYRPLLHAKFIEVFPELSSLTEQRLADQIRVIYRNNRIPVAERENIKRSIKLTSSTENRPTDSLINTRTSPINTPIVNTQESDSVVTDELSPYITHETLFTQTQSQTIDPQTYSLLQERSAQSPTPVINDQTDIFTEMDDLEIKNTFNELIIRYKGTDCTVRPSIPKLKITYKSKITVNLLNSLIKDELLKSTEPNIEDIQDIIYCAAMTVANIYSKKKLDHQVSRNRTEIKPSWERRIENSISSLRKDIGRLAQYLKGNLSSKKQNKINIKYKSKEEVIEDMDLKTQRLQALSKRLRRYRKSNQRHRDNRMFNTNQKLFYRNFDKEASIRDAPNITEVEKFWEELWSKPVEYNKEAEWIKAEEEELVPLSPMAEVIIDKQDIEHAISKTLNWKTPGPDSLHNYWLKYFTNTHDYIAKAFNTLIREPNTLPMFLTLGNTYLKPKDSDTSNPAKYRPITCLPTLYKLLTSIISQKINTHLTHNNIIAEEQKGCRKGSRGCKEQLVIDTEIHNQVRQTHRNLYYAYIDYQKAYDSVPHSWLLQILKLYKVDDTLIGFLQQAMQHWTTMLNINTESGTLKSKPIKIARGIFQGDSLSPLWFCMALNPLSRLLNNNASQGYQIIRENNIKITHLLYMDDIKLYAANRQQLDSLLETTERFSNDIKMSFGTDKCKINSIIRGQHHTTDPYLLTQQNSLIDKMDLTDTYKYLGYCQSTRIDHSKIKEELTKKYTDRLCKILKTELSARNTIKAINAYAVPVLTYSFGIIKWTGTDLDKLNRITRTTSYKHHIHHIHSATERFHLNRKLGGRGLIDIKNLHSKQVHNMRTYIHNKAKDSKIHKAITSISTSGTALKLNNNDYNPLENLVSDEQKIVNWKQKSLHGKYPNLIQQEHVDKEASNAWLSKGNIYKETEGFMVAIQDQIIKTKNYQKYIMKDATVISDRCRLCNSQQETIDHITGGCPFLANRQYTDRHNNVAKQIHLYLAKKYKLIDTIEPYYKYKPKNVLNNEKAKLYWDRDIITDKTTQNNRPDITLTIKDKKITYLIDISVPNSENLRKKYTEKIQKYIPLADEIRQMWQQNTVKIIPIILSSTGIIPKTLHTSLKELDLHKSSYISLQKSVIIDTCSIVRRFLTSTTQAPTSIGNEPTHLA

SEQ ID NO: 7989 - protein, 1173 aa, Abrostola tripartita
MENTIRDIRIGPLPGGRQGTSGAGAGRGSMRTASGRRLNRRVTATQDATAEDTFTDTPTNNTLHETGRSVLQEMLPATTLAGRNRQRMKWTDDVNRQLLRCYYTVTNCETNLTGYRPLLHAKFIEVFPDLSSLTEQRLADQIRVIYRNNRIPVAERENIKRLIELTSSTENRPTDILINTCTSPINTPIVNTQESDSVATDELSPYITHETLFTQTQSQTIDPQTYSLLQQRSAQSPTPVINDQTEIFTEMDDLEIKNTFNEFIIRYKGTDCTVRPSIPKLKITYKSKITVNLLNSLIKDELLKSTEPNIEDIQDIIYCAAMTVANIYSKKKLDHQVSRNRTEIKPSWERRIENSISSLRKDIGRLAQYLKGNLSSKKQNKINIKYKSKEEVIEDMDLKTQRLQALSKRLRRYRKSNQRHRDNRVFNTNQKLFYRNFDKEASIRDAPNITEVEKFWEELWSKPVEYNKEAEWIKAEEEELVPLSPMAEIIIDKQDIEHAISKTLNWKTPGPDSLHNYWLKYFTNTHDYIVKAFNTLIREPNTLPMFLTLGNTYLKPKDSDTSNPAKYRPITCLPTLYKLLTSIISQKINTHLTHNNIIAEEQKGCRKGSRGCKEQLVIDTEIHNQVRQTHRNLYYAYIDYQKAYDSVPHSWLLQILKLYKVDDTLIGFLQQAMQHWTTMLNINTESGTLKSKPIKIARGIFQGDSLSPLWFCMALNPLSRLLNNNASQGYQIIRENNIKITHLLYMDDIKLYAANRQQLDSLLETTERFSNDIKMSFGTDKCKINSIIRGQHHTTDPYLLTQQNSLIDKMDLTDTYKYLGYCQSTRIDHSKIKEELSKKYTDRLCKILKTELSARNTIKAINAYAVPVLTYSFGIIKWTGTDLDKLNRITRTTSYKHHIHHIHSATERFHLNRKLGGRGLIDIKNLHSKQVHNMRTYILNKAIDSKIHKGITSISTSGTALKLNKIDYNPLENLVSDEQKIVNWKQKSLHGKYPNLIQQEHVDKEASNAWLSKGNIYKETEGFMVAIQDQIIKTKNYQKYIMKDATVISDRCRLCNSQQETIDHITGGCPFLANRQYTDRHNNVAKQIHLYLAKKYKLIDTIEPYYKYKPKNVLNNEKAKLYWDRDIITDKTTQNNRPDITLTIKDKKITYLVDISVPNSENLRKKYTEKIQK

SEQ ID NO: 7990 - protein, 1258 aa, Abrostola tripartita
MENTIRDIRIGPLPGGRQGTSGAGAGRGSMRTASGRRLNRRVTATQDATAEDTFTDTPTNNTLHETGRSVLQEMLPATTLAGRNRQRMKWTDDVNRQLLRCYYTVTNCETNLTGYRPLLHAKFIEVFPDLSSLTEQRLADQIRVIYRNNRIPVAERENIKRLIELTSSTENRPTDILINTCTSPINTPIVNTQESDSVATDELSPYITHETLFTQTQSQTIDPQTYSLLQQRSAQSPTPVINDQTEIFTEMDDLEIKNTFNELIIRYKGTDCTVRPSIPKLKITYKSKITVNLLNSLIKDELLKSTEPNIEDIQDIIYCAAMTVANIYSKKKLDHQVSRNRTEIKPSWERRIEYSISSLRKDIGRLAQYLKGNLSSKKQNKINIKYKSKEEVIEDMDLKTQRLQALSKRLRRYRKSNQRHRDNRVFNTNQKLFYRNFDKEASIRDAPNITEVEKFWEELWSKPVEYNKEAEWIKAEEEELVPLSPMAEIIIDKQDIEHAISKTLNWKTPGPDSLHNYWLKYFTNTHDYIAKAFNTLIREPNTLPMFLTLGNTYLKPKDSDTSNPAKYRPITCLPTLYKLLTSIISQKINTHLTHNNIIAEEQKGCRKGSRGCKEQLVIDTEIHNQVRQTHRNLYYAYIDYQKAYDSVPHSWLLQILKLYKVDDTLIGFLQQAMQHWTTMLNINTESGTLKSKPIKIARGIFQGDSLSPLWFCMALNPLSRLLNNNASQGYQIIRENNIKITHLLYMDDIKLYAANRQQLDSLLETTERFSNDIKMSFGTDKCKINSIIRGQHHTTDPYLLTQQNSLIDKMDLTDTYKYLGYCQSTRIDHSKIKEELSKKYTDRLCKILKTELSARNTIKAINAYAVPVLTYSFGIIKWTGTDLDKLNRITRTTSYKHHIHHIHSATERFHLNRKLGGRGLIDIKNLHSKKVHNMRTYILNKAIDSKIHKGITSISTSGTALKLNKIDYNPLENLVSDEQKIVNWKQKSLHGKYPNLIQQEHVDKEASNAWLSKGNIYKETEGFMVAIQDQIIKTKNYQKYIMKDATVISDRCRLCNSQQETIDHITGGCPFLANRQYTDRHNNVAKQIHLYLAKKYKLIDTIEPYYKYKPKNVLNNEKAKLYWDRDIITDKTTQNNRPDITLTIKDKKITYLIDISVPNSENLRKKYTEKIQKYIPLADEIRQMWQQNTVKIIPIILSSTGIIPKTLHTSLKELDLHKSSYISLQKSVIIDTCSIVRRFLTSTTQAPTSIGNESTHLA

SEQ ID NO: 7991 - protein, 1258 aa, Abrostola tripartita
MENTIRDIRIGPLPGDRQGTSGDGAGRGSMRTASGCRLNRRVTATQDATAEDTFTDTPTNNTLHETGRSVLQEMLPATTLAGRNRQRMKWTDDVNRQLLRCYYTVTNCETNLTGYRPLLHAKFIEVFPDLSSLTEQRLADQIRVIYRNNRIPVAERENIKRLIELTSSTENRPTDILINTRTSPINTPIVNTQESDSVATDELSPYITHETLFTQTQSQTIDPQTYSLLQERSAQSPTPVINDQTEIFTEMDDLEIKNTFNELIIRYKGTDCTVRPSIPKLKITYKSKITVNLLNSLIKGELLKSTEPNIEDIQDIIYCAAMTVANIYSKKKLDHQVSRNRTEIKPSWERRIENSISSLRKDIGRLAQYLKGNLSSKKQNKINIKYKSKEEVIEDMDLKTQRLQALSKRLRRYRKSNQRHRDNRVFNTNQKLFYRNFDKEASIRDAPNITEVEKFWEELWSKPVEYNKEAEWIKAEEEELVPLSPMAEIIIDKQDIEHAISKTLNWKTPGPDSLHNYWLKYFTNTHDYIAKAFNTLIREPNTLPMFLTLGNTYLKPKDSDTSNPAKYRPITCLPTLYKLLTSIISQKINTHLTHNNIIAEEQKGCRKGSRGCKEQLVIDTEIHNQVRQTHRNLYYAYIDYQKAYDSVPHSWLLQILKLYKVDDTLIGFLQQAMQHWTTMLNINTESGTLKSKPIKIARGIFQGDSLSPLWFCMALNPLSRLLNNNASQGYQIIRENNIKITHLLYMDDIKLYAANRQQLDSLLETTERFSNDIKMSFGTDKCKINSIIRGQHHTTDPYLLTQQNSLIDKMDLTDTYKYLGYCQSTRIDHSKIKEELSKKYTDRLCKILKTELSARNTIKAINAYAVPVLTYSFGIIKWTGTDLDKLNRITRTTSYKHHIHHIHSATERFHLNRKLGGRGLIDIKNLHSKQVHNMRTYILNKAKDSKIHKGITSISTPGTALKLNNNDYNPLENLVSDEQKIVNWKQKSLHGKYPNLIQQEHVDKEASNAWLSKGNIYKETEGFMVAIQDQIIKTKNYQKYIMKDATVISDRCRLCNSQQETIDHITGGCPFLANRQYTDRHNNVAKQIHLYLAKKYKLIDTIEPYYKYKPKNVLNNEKAKLYWDRDIITDKTTQNNRPDITLTIKDKKITYLIDISVPNSENLRKKYTEKIQKYIPLADEIRQMWQQNTVKIKPIILSSTGIIPKTLHTSLKELDLHKSSYISLQKSVIIDTCSIVRRFLTSTTQAPTSIGNESTHLA

SEQ ID NO: 7992 - protein, 773 aa, Euproctis similis
MPEVEIDKLDIERAVNRTLNWKTPGPDKIQNYWLKYFPSSHQHIANAFNKLFKDPNNIPIFLTQGNTYLKPKNCETTDPAKYRPITCLPTLYKLLTSIISQKINTHLSHNKIISEEQKGCRKGSRGCKEQLVIDTEIHNQVRQTHRNLYYAYIDYQKAYDSVPHSWLIQIMKIYKIHHSLVGLLHQLMLQWTTKLSINTETGTITSKPIKIARGIFQGDSLKPLWFCMSLNPLSRILNNAGHGYCIHKENSTKINHLLYMHDIKLYAANRQQLNSLLKSTESFSNDIKMNFGTDKCKINSILKGKHNSTDPYLLTQQSSLIDTMNIYDTYKYLGFCQSTGIDHTNIKEELTNKYVVRLNRILKTELSARNTIKAINAYAVPILTYSFGIIKWTATDLDRLNRLTRTTCFKHHIHHIHAATERFNLKRKSGGRGFTDIKRLHNKQVHNIRTYFLDKALDSPIHKALTQIKTSGTPLKLNNNDFNAIENLTSDTQIIDQWKNKPLHGKYPNLTQQHHIDQEASYAWLYKGNIYKETEGFMVAIQDQTIKTRTYQKRIMKDPSIISDMCRLCNSQAESIDHVTGGCAFLANKQYTERHNNVAKQIHALLAKKYNLIDKIEPYYKYKPKSVLNSETTKLYWDRDIITDKTTQNNRPDITLTIKDQKVTYLIDISIPNSENINKKYTEKIQKYIPLADEIRQMWQQNVVKIVPIIISSTGLIPKSLHASIEQLNLHKATYISLQKSVIIDTCSIVRRFLTSTTQTPTSIGNDVTHLVQ

SEQ ID NO: 7993 - protein, 1162 aa, Euproctis similis
MKWTDDINRELLRCYYTVTNCETNLTGYRSTLHAKFINKYPDLNMLTEQRLADQIRVIHRNNRIPLPDREKIKREITLENSRQNPQNMPNTPNFNPVSNTLLNSSYQSIPTISTEQTVSLSQETISSFSLHPQESNQIQTSQIQNLEDRIGTEIDEIKLEEAFKDIMIKYKRTDPISRPNIPKLKISRIAKQTVRILDKHVGIELSKSDRADLEEIQEVIYCAALTATSFHNKINIESQNKNIPKNNKPPWERRLENKIAVLRKEIGRLTQYVKGNLSVKNNNRITIIYKFNNKEDAINDIDLKTQKLQALSKRLKRYKKSNQRHKDNIVFNTNQKLFYRNFNKETKITETPSITDLEQFWENIWSKPVEHNNEAEWINDEKDQFKDINPMPEVEIDKLDIERAVNRTLNWKTPGPDKIQNYWLKYFPSSHQHIANAFNKLFKDPNNIPIFLTQGNTYLKPKDCETTDPAKYRPITCLPTLYKLLTSIISQKINTHLSHNKIISEEQKGCRKGSRGCKEQLVIDTEIHNQVRQTHRNLYYAYIDYQKAYDSVPHSWLIQIMKIYKIHHSLVGLLHQLMLQWTTKLSINTETGTITSKPIKIARGIFQGDSLSPLWFCMSLNPLSRILNNAGHGYCIHKENSTKINHLLYMDDIKLYAANRQQLNSLLKSTESFSNDIKMNFGTDKCKINSILKGKHNSTDPYLLTQQSSLIDTMNIYDTYKYLGFCQSTGIDHTNIKEELTNKYVVRLNRILKTELSARNTIKAINAYAVPILTYSFGIIKWTATDLDRVNRLTRTTCFKHHIHHIHAATERFNLKRKSGGRGFTDIKRLHNKQVHNIRTYFLDKALDSPIHKALTQIKASGTPLKLNNNDFNAIENLSSDTQIIDQCKNKPLHGKYPNLTQQHHIDQEASYAWLYKGNIYKETEGFMVAIQDQTIKTRTYQKRIMKDPSIISDMCRLCNSQAESIDHVTGGCAFLANKQYTERHNNVAKQIHALLAKKYNLIDKIEPYYKYKPKSVLNSETTKLYWDRDIITDKTTQNNRPDITLTNKDQKVTYLIDISIPNSENINKKYTEKIQKYIPLADEIRQMWQQNVVKIVPIIISSTGLIPKSLHASIEQLNLHKATYISLQKSVIIDTCSIVRRFLTSTTQTPTSVGNDVTHLV

SEQ ID NO: 7994 - protein, 1249 aa, Euproctis similis
MERNRNRVRIGSLPGDRQGTSGADAGRGSMRTVSGRRLNRRVAIAQDVTADNTNTDTPSNNTTQNTGRSVLQELLPATTLSGKTRQRMKWTDDINRELLRCYYTVTNCETNLTGYRSTLHAKFINKYPDLNMLTEQRLADQIRVIHRNNRIPLPDREKIKSEITLENSRQNPQNMPNTPNFNPVSNTLPNSSYQSIPTISTEKIVSLSQETISSFSLHPQESNQIQTSQIQNLEDRIGTEIDEIKLEEAFKDIMIKYKRTDPISRPNIPKLKNSRIAKQTVRILDKHVGIELSKSEQADLEEIQEVIYCAALTATSFHNKINIESQNKNIPKNNKPPWERRLENKIAVLRKEIGRLTQYVKGNLSVKNNNRITIIYKFNNKEDAINDIDLKTQKLQALSKRLKRYKKSNQRHKDNIVFNTNQKLFYRNFNKETKITETPSITDLEQFWENIWSKPVEHNNEAEWINDEKDQFKDINPMPEVEIDKLDIERAVNRTLNWKTPGPDKIQNYWLKYFPSSHQHIANAFNRLFKDPNNIPIFLTQGNTYLKPKDCETTDPAKYRPITCLPTLYKLLTSIISQKINTHLSHNKIISEEQKGCRKGSRGCKEQLVIDTEIHNQVRQTHRNLYYAYIDYQKAYDSVPHSWLIQIMKIYKIHHSLVGLLHQLMLQWTTKLSINTETGTITSKPIKIARGIFQGDSLSPLWFCMSLNPLSRILNNAGHGYCIHKENSTKINHLLYMDDIKLYAANRQQLNSLLKSTESFSNDIKMNFGTDKCKINSILKGKHNSTGPYLLTQQSSLIDTMNIYDTYKYLGFCQSTGIDHTNIKEELTNKYVVRLNRILKTELSARNTIKAINAYAVPILTYSFGIIKWTATDLDRLNRLTRTTCFKHHIHHIHAATERFNLKRKSGGRGFTDIKRLHNKQVHNIRTYFLDKALDSPIHKALTQIKTSGTPLKLNNNDFNAIENLTSDTQIIDQWKNKPLHGKYPNLTQQHHIDQEASYAWLCKGNIYKETEGFMVAIQDQTIKTRTYQKRIMKDPSIISDMCRLCNSQAESIDHVTGGCAFLANKQYTERHNNVAKQIHALLAKKYNLIDKIEPYYKYKPKSVLNSETTKLYWDRDIITDKTTQNNRPDITLTIKDQKVTYLIDISIPNSENINKKYTEKIQKYIPLADEIRQMWQQNVVKIVPIIISSTGLIPKSLHASIEQLNLHKATYISLQKSVIIDTCSIVRRFLTSTTQTPTSVGNDVTHLV

SEQ ID NO: 7995 - protein, 1259 aa, Abrostola tripartita
MENTIRDIRIGPLPGGRQGTSGAGAGRGSMRTASGRRLNRRVTATQDATAEDTFTDTPTNNTLHETGRSVLQEMLPATTLAGRNRQRMKWTDDVNRQLLRCYYTVTNCETNLTGYRPLLHAKFIEVFPDLSSLTEQRLADQIRVIYRNNRIPVAERENIKRLIELTSSTENRPTDILINTCTSPINTPIVNTQESDSVATDELSPYITHETLFTQTQSQTIDPQTYSLLQQRSAQSPTPVINDQTEIFTEMDDLEIKNTFNELIIRYKGTDCTVRPSIPKLKITYKSKITVNLLNSLIKDELLKSTEPNIEDIQDIIYCAAMTVANIYSKKKLDHQVSRNRTEIKPSWERRIENSISSLRKDIGRLAQYLKGNLSSKKQNKINIKYKSKEEVIEDMDLKTQRLQALSKRLRRYRKSNQRHRDNRVFNTNQKLFYRNLDKEASIRDAPNITEVEKFWEELWSKPVEYNKEAEWIKAEEEELVPLSPMAEIIIDKQDIEHAISKTLNWKTPGPDSLHNYWLKYFTNTHDYIAKAFNTLIREPNTLPMFLTLGNTYLKPKDSDTSNPAKYRPITCLPTLYKLLTSIISQKINTHLTHNNIIAEEQKGCRKGSRGCKEQLVIDTEIHNQVRQTHRNLYYAYIDYQKAYDSVPHSWLLQILKLYKVDDTLIGFLQQAMQHWTTMLNINTESGTLKSKPIKIARGIFQGDSLSPLWFCMALNPLSRLLNNNASQGYQIIRENNIKITHLLYMDDIKLYAANRQQLDSLLETTERFSNDIKMSFGTDKCKINSIIRGQHHTTDPYLLTQQNSLIDKMDLTDTYKYLGYCQSTRIDHSKIKEELSKKYTDRLCKILKTELSARNTIKAINAYAVPVLTYSFGIIKWTGTDLDKLNRITRTTSYKHHIHHIHSATERFHLNRKLGGRGLIDIKNLHSKQVHNMRTYILNKAIDSKIHKGIISIIIYSGTALKLNKIDYNPLENLVSDEQKIVNWKQKSLHGKYPNLIQQEHVDKEASNAWLSKGNIYKETEGFMVAIQDQIIKTKNYQKYIMKDATVISDRCRLCNSQQETIDHITGGCPFLANRQYTDRHNNVAKQIHLYLEKKYKLIDTIEPYYKYKPKNVLNNEKAKLYWDRDIITDKTTQNNRPDITLTIKDKKITYLIDISVPNSENLRKKYTEKIQKYIPLADEIRQMWQQNTVKIIPIILSSTGIIPKTLHTSLKELDLHKSSYISLQKSVIIDTCSIVRRFLTSTTQAPTSIENESTHLA

SEQ ID NO: 7996 - protein, 1186 aa, Spilosoma lubricipeda
MLPATTLAGKTRQRMKWTDEVNRQLLRCYYTVTKCETDLTGYRSFLHAQFIEIYPELHILSEQRLVDQIRVIQRNNRIKATEREMIKKEIGQSLENSNSIPTQLSSTANTHDTTQHTVEHSDNIHTQNSSFIETNEMIDDSQTQLTISSITNDETIPINIQTAFFDTQTSHTEIVQNDTGNLLQLIKPVFSENVIKYKGTDPTLRPSLPKLKITEKSKAAVNVLNQLIGEELMNNTDPTIEDIQDFIYCAAITATSIYNPSRQGEGGKRSYTKPAWERRLENKITQLRKEIGRLSQFIKENMSRKNQMKLNRIYTTKTEAIEDIDKKTQKLQALSKRLRRYKISNQRRRDNVTFNTNQKLFYRKLNTEVTVEDPPNIEEVETFWKNIWSEPVVHNSESKWIEDEIDRMKNIEPMTEITIDKLDIQIAIKRTLNWKTPGPDKIHNYWIKYFTSTHNHIAIAFGKLIKEPSTMPTFFTQGNTYLKPKDVDTLNPAKYRPITCLPTLYKLLTSIIAHKINRHLTRHNIIAEEQKGCRKGSQGCKEQLVIDSEIHNQVKQSHRNLYYSYIDYQKAYDSVPHSWLLQILKIYKIDESLTEFLHQTMKRWTTVLNLSTVLGEIKSNPIQIGRGIFQGDSLSPLWFCMSLNPLSTVLNKTEQGYTLHKESNTKITHLLYMDDIKLYAGNKQQMNRLLKATELFSTDIKMNFGTDKCKVNSIIKGKHSETDAYILQTQQNALIEKMDKDDTYKYLGYSQSTGLDHGKIKEELITKYTGRLNKILRTRLSGRNTVKAVNTYAVPVLTYSFGIIRWTNTDLDRLNRLTRTTFYKHHVHHIHSAVERFNLKRQLGGRGLIDIKDLHDRQVQNIRTYMHNKAVDSSIHKALTSITTSGTPLKLNNTDNTTIHEHITDDQKITRWKQKSLHGKHPNQLQQDHIDKEASNAWLCKGNLFKETEGFMVAIQDQIIKTKNYQKYIMKDPAAVSDRCRLCNTNQETIDHITGGCPFLANKQYTERHNNVAKQIHGLLAAKYKLIEKVEPYYKYKPNPILNNDTVKLYWDRDIITDKTTPNNRPDITLTLKNERITYLIDISIPNTDNVKKKYTEKIQKYIPLADEIRQMWHQHRVKIIPIIISSTGLIPKSLHTSLKEIGIYRNSYISLQRSVIIDTCSIVRRFLTCTTQTPTIVTNEPTHLA

SEQ ID NO: 7997 - protein, 1257 aa, Spilosoma lubricipeda
MEKKVRNIGKGPLPGDRQGTSGADAGRDSMRTVSGRGLNRRVTTEQSTTAGKNNTTTTNTPHNTARSVLQDMLPATTLAGKTRQRMKWTDEVNRQLLRCYYTVTKCETDLTGYRSFLHTQFIEIYPELHILSEQRLVDQIRVIQRNNRIKATEREMIKKEIGQSLENSNSIPTQLSSTANTHDTTQHTVEHSDNIHTQNSSFIETNEMIDDSQTQLTISSITNDETIPINIQTAFFDTQTSHTEIVQNDTGNLLQLIKPVFSENVIKYKGTDPTLRPSLPKLKITEKSKAAVNVLNQLIGEELMNNTDPTIEDIQDFIYCAAITATSIYNPSRQGEGGKRSYTKPAWERRLENKITQLRKEIGRLSQFIKENMSRKNQMKLNRIYTTKTEAIEDIDKKTQKSQALSKRLRRYKISNQRRRDNVTFNTNQKLFYRKLNTEVTVEDPPNIEEVETFWKNIWSEPVVHNSESKWIEDEIDRMKNIEPMTEITIDKLDIQIAIKRTLNWKTPGPDKIHNYWIKYFTSTHNHIAIAFGKLIKEPSTMPTFFTQGNTYLKPKDVDTLNPAKYRPITCLPTLYKLLTSIIAHKINRHLTRHNIIAEEQKGCRKGSQGCKEQLVIDSEIHNQVKQSHRNLYYSYIDYQKAYDSVPHSWLLQILKIYKIDESLTEFLHQTMKRWTTVLNLSTVLGEIKSNPIQIGRGIFQGDSLSPLWFCMSLNPLSTVLNKTEQGYTLHKESNTKITHLLYMDDIKLYAGNKQQMNRLLKATELFSTDIKMNFGTDKCKVNSIIKGKHSETDAYILQTQQNALIEKMDKDDTYKYLGYSQSTGLDHGKIKEELITKYTGRLNKILRTQLSGRNTVKAVNTYAVPVLTYSFGIIRWTNTDLDRLNRLTRTTFYKHHVHHIHSAVERFNLKRQLGGRGLIDIKDLHDRQVQNIRTYMHNKAVDSSIHKALTSITTSGTPLKLNNTDNTPIHEHITDDQKITRWKQKSLHGKHPNQLQQDHIDKEASNAWLCKGNLFKETEGFMVAIQDQIIKTKNYQKYIMKDPAAVSDRCRLCNTNQETIDHITGGCPFLANKQYTERHNNVAKQIHGLLAAKYKLIEKVEPYYKYKPNPILNNDTVKLYWDRDIITDKTTPNNRPDITLTLKNERITYLIDISIPNTDNVKKKYTEKIQKYIPLADEIRQMWHQHRVKIIPIIISSTGLIPKSLHTSLKEIGIYRNSYISLQRSVIIDTCSIVRRFLTCTTQTPTIVTNEPTHLA

SEQ ID NO: 7998 - protein, 1199 aa, Apodemia duryi
MCPTTTLAGRNRQRMKWTDEVNRQLLRCYYKVTNLESNLTGYRQLLYNKFLEVYPELSFLTEQRLSDQVRIIHRNNRINVLERENIKREIVSEEQNITPEETPIINISNVMSTCDNENAGMSTINNDGTVSALPVEQISICSTGNAEMAETRLPIIETQSTFTQTSKNRLQIPDDGYTLDPHEIVAPESHIENYDIQDIAHTFKEFLIKYAGTDPTKRPSIPKLTFYKNTGATIDKLNQLIDAELSIYNSPNLETIHDVIYCAAITAITLQGMDPTKRKPKNINSNKPSWERRIENKIKVLRRDIGRITQYINGNLSAKNTTKMRSKYRNEDEALDDKDKKIQKLQALSKRIRRYKKAEQRRKHNLLFNMNEKIFYRSLQGTEYQIEKKPNMTEIQQFWKDIWSTEVEHDSLAEWIHENIEDTQHINPMPEIVINTQDIELAVKKTHNWKTPGPDMIQNYWLKYFIAAHSYIAQAFNMLVKEPQSIPIFLTQGKTYLKPKDKNTSNPANYRPITCLPTLYKLLTSVIAQKIEAHLTSNNVIAEEQKGCRKGSRGCKEQLIIDTEIHNQAKQKHRNLFYAYIDYQKAFDSVPHSWLTHVLKLYKIDTILIRFLEHIMKNWTTVLNIKYGTDVLRSDIINISRGIFQGDSLSPLWFCMSINPLSKILNKTGYGYMLDSQTKTKVTHLLYMDDIKLYAANKHQLDSLLKVTEQFSSYIKMNFGINKCRINSIIHGKYHEAHPYSLTHQNAFIDKMDYTDTYKYLGYEQNINIDHSKIKAELIKNYVNRLNTILKTELSGRNTIKAINSYAVPVLTYSFGIIKWTDTDLNNINRLTRTTCNKHHMHHLHSATERFYLTRKLGGRGLIDIKNLHDRQVRDLRKYMLHKINSSPLHKALTKIKTSGTPLKLNDPIFNVNEPSSERQITENWKSKALHGKYPNQLHQDYIDSNASQAWLRKGNIYKETEGFMFAIQDQIINTRNYQKYIIKDPNILTDKCRLCNIFPETIDHITGGCSFLAGKHYLDRHNNVAKQIHQQLAKRYKLIDQTEAYYKYNPKNILENNLAKLYWDREIITDKTIHNNRPDITLTIKEQKLTYLIDISIPNADNMRKKYSEKIQKYIQLADEIRDMWHQDCVKIIPIIISSTGIIPKSIHTSIKELNLQTDSYIALQKTVIINTCSIVRRFLTSATQIPSVINNETSHLV

SEQ ID NO: 7999 - protein, 1234 aa, Apodemia mejicanus
MRTASGRALNRRVTTSQNATAESIAQNNNTNTDLLTNNPVTQPVRSVLQDMCPTTTLAGRNRQRMKWTDEVNRQLLRCYYKVTNLESNLTGYRQLLYNKFLEVYPELSFLTEQRLSDQVRIIHRNNRINVLERENIKREIVSEEQNITPEETPIINILNNNDCTISALPVEQISICSTGNAEMAETTLPIIETQSTFTQTSKNRLQIPDDGYTLDPHEIVAPESHIENYDIQDIAHTFKEFLIKYAGTDPTKRPSIPKLTFSKNTVATIDKLNQLIDAELSIYNSPNLETIHDVIYCAAITAITLQGMDPTKRKPKNINSNKPPWERRIENKIKVLRRDIGRITQYINGNLSAKNTTKMRSKYRNEDEALDDKDKKIQKLQALSKRIRRYKKAEQRRKHNLLFNMNEKIFYRSLQGTEYQIEKKPNMNEIQQFWKSIWSTEVEHDSLAEWVRENIEDTQYINPMPEIVINTQDIELAVKKTHNWKTPGPDMIQNYWLKYFIAAHSYIAQAFNMLVKEPQSIPIFLTQGKTYLKPKDKNTSNPANYRPITCLPTLYKLLTSVIAQKIEAHLTSNNVIAEEQKGCRKGSRGCKEQLIIDTEIHNQAKQKHRNLFYAYIDYQKAFDSVPHSWLTHVLKLYKIDTILIRFLEHIMKNWTTVLNIKFGTDVLRSDVINISRGIFQGDSLSPLWFCMSINPLSKILNKTGYGYMLDSQTKTKVTHLLYMDDIKLYAANKHQLDSLLKVTEQFSSYIKMNFGINKCKINSIIHGKYHEAHPYSLTHQNAFIDKMDYTDTYKYLGYEQNINIDHSKIKAELIKNYVNRLNTILKTELSGRNTIKAINSYAVPVLTYSFGIINWTDTDLNNINRLTRTTCNKHHMHHLQSATERFYLTRKLGGRGLIDIKNLHDRQVRDLRKYMLNKINSSPLHKALTKIKTSGTPLKLNDPIFNVNEPSLERQITENWKSKALHGKYPNQLHQDYIDSNASQAWLRKGNIYKETEGFMFAIQDQIINTRNYQKYIIKDPNILTDKCRLCNIFPETIDHITGGCSFLAGKHYLDRHNNVAKQIHQQLAKRYKLIDQTEAYYKYKPKHILENNLAKLYWDREIITDKTIHNNRPDITLTIKEQKLTYLIDISIPNADNMRKKYSEKIQKYIQLADEIRDMWHQDCVKIIPIIISSTGIIPKSIHTSIKELNLQSDLYIALQKTVIINTCSIVRRFLTSATQIPSVINNETSHLV

SEQ ID NO: 8000 - protein, 1278 aa, Apodemia mormo
MEQSLNSTRQGPLPGERRGTSGAGAGRGSMRTASGRALNRRVTTSQNATAESIAQNNNTNTDLLTNNTVTQPVRSVLQDMCPTTTLAGRNRQRMKWTDEVNRQLLRCYYKVTNLESNLTGYRQLLYNKFLEVYPELSFLTEQRLSDQVRIIHRNNRINVLERENIKREIVSEEQNITPKETPIINISNVMSTCDNENAGMSTINNDCTVSALPVEQISICSTGNAEMAETTLPIIETQSTFTQTSKNRLQIPDDGYTLDPHEIVAPESHIENYDIQDIAHTFKEFLIKYAGTDPTKRPSIPKLTFSKNTVATIDKLNQLIDAELSIYNSPNLETIHDVIYCAAITAITLQGMDPTKRKPKNINSNKPPWERRIENKIKVLRRDIGRITQYINGNLSAKNTTKMRSKYRNEDEALDDKDKKIQKLQALSKRIRRYKKAEQRRKHNLLFNMNEKIFYRSLQGTEYQIEKKPNMTEIQQFWKGIWSTEVEHDNLAEWIHENIEDTQHINPMPEIVINTQDIELAVKKTHNWKTPGPDMIQNYWLKYFIAAHSYIAQAFNMLVKEPQSIPIFLTQGKTYLKPKDKNTSNPANYRPITCLPTLYKLLTSVIAQKIEAHLTSNNVIAEEQKGCRKGSRGCKEQLIIDTEIHNQAKQKHRNLFYAYIDYQKAFDSVPHSWLTHVLKLYKIDTILIRFLEHIMKNWTTVLNIKFGTDVLRSDVINISRGIFQGDSLSPLWFCMSINPLSKILNKTGYGYMLDSQTKTKVTHLLYMDDIKLYAANKHQLDSLLKVTEQFSSYIKMNFGINKCRINSIIHGKYHEAHPYSLTHQNAFIDKMDYTDTYKYLGYEQNINIDHSKIKAELIKNYVNRLNTILKTELSGRNTIKAINSYAVPVLTYSFGIIKWTDTDLNNINRLTRTTCNKHHMHHLHSATERFYLTRKLGGRGLIDIKNLHDRQVRDLRKYMLNKINSSPLHKALTKIKTSGTPLKLNDPIFNVNEPSSERQITENWKSKALHGKYPNQLHQDYIDSNASQAWLRKGNIYKETEGFMFAIQDQIINTRNYQKYIIKDPNILTDKCRLCNIFPETIDHITGGCSFLAGKHYLDRHNNVAKQIHQQLAKRYKLIDQTEAYYKYNPKNILENNLAKLYWDREIITDKTIHNNRPDITLTIKEQKLTYLIDISIPNADNMRKKYSEKIQKYIQLADEIRDMWHQDCVKIIPIIISSTGIIPKSIHTSIKELNLQTDSYIALQKTVIINTCSIVRRFLTSATQIPSVINNETSHLV

SEQ ID NO: 8001 - protein, 1178 aa, Sycophaga agraensis
MNNNNEASEAAAGENRPDPVVAAELIVERRGRRRGGASLRAPSARVRSGSTQRSTPVLEAKNVTLTAQINDPQRCPICPTERGPKYWIGSKELAKHIGVAHLEASVTWLCAGCGRKCKNILSWKCHLPHCKGWQETVEDLAFPCDHCELAFATASGRSQHERHVHPAARNAKRSLVAEKPKEKPGRRPSKWSDDDLVRIGELEREYIGTRYINVEIAKHFPDRTAKQVSDARRRIREGEQQVVATHPEVTANETAVAAVSTAETPPVQPPVLQGNSSSSEDEFVDAVEEQPDCLFERIESPGEREWKEAIRREICSGTMEDRLRSWRVAVQGLVESDGNVDEELMDSLYTQLVAFIAPAIERNPETTKTSKTKRTNRKVGRRRDARKAEMRKFEYARCQQMWEKCPKRVAEIVVENDYSLIRRRDSPCVREVEALYTELWGREGPSQSDQYHRTEGPLKASNILKPITPLDVERRVARIRDDSAAGTDQIVKSDLRKPGIITALSKLFNFVMLTGVYPSAWKLNRTTLLPKAGKDPANVRNWRPITISSMVSRIFSGLLDERIRAVIRQHERQKGFTAENGCFANVHALEAAIAKSKEGGGVISVLDISKAYDTVPHAVIPLSLERKGIPPVVTKLVAEMYRDCTTVIGAKDGKVEIKLQRGVKQGDPLSPLIFNLVIEPLIERLNETVGVKIEGNNLSVLAFADDITCIAKDAGEAQTQLQTVTDFLGALQMCISVEKSSAFELVPFRKTWYSRRPRVQIGGESIPYLGPDEVTKYLGATVSSWRGLIRGREVPALRELVRRVRKLPLKAEQKVELLRRHIFPRFTYSLIVSMPSRAALKEFDGEIRRTIKEILHLPQSLSSDFMYTPQSMGGLGLTQVEVMVPIAHLRARIKAMNSADPVNTAVVHESDQHLSASAEALGLPWPLTLRQLNDKKYELRDSYARNWAKLRWQGQGAHEFADDAVCNKWLRGGLLTSSRVVDAIKLRTNTYPTRALMSMIYEQRNPNCRKCHVRRETLGHILGECRTTKNKRISRHDEIKDLIAARLSQHNQVMVEPEVWTQGRRFRPDLVVKTAKKEVFVLDVSVRYEHRDYLSQAHDEKNTKYQPVLVQLMSDLQCKKGKVLPIIVGSRGAIPKKTRDVLGKIGIKKKDRLTISMIALRSSIEIINAFMDDDFNAS

SEQ ID NO: 8002 - protein, 1178 aa, Sycophaga agraensis
MNNNNEASEAAAGENRPDPVVAAELSVERRGRRRGGASLRAPSATVRSGSTQRSTPVLEVKNVTLTAQINDPQRCPICPTERGPKYWIGSKELAKHIGVAHLEASVTWLCAGCGRKCKNILSWKCHLPHCKGWQETVEDLAFPCDHCELAFATASGRSQHERHVHPAARNAKRSLVAEKPKEKPGRRPSKWSDDDLVRIGELEQEYIGTRYINVEIAKHFPDRTAKQVSDARRRIREGEQRAVATHPEVTANETAVAAVSTAETPPVQPPVLQGNSSSSEDEFVDAVEEQPDCLFERIESPGEREWKEAIRREICSGTMEDRLRSWRVAVQGLVESDGIVDEELMDSLYTQLVAFIAPAIERNPETTKTSKTKRTNRKVGRRRDARKAEMRKFEYARCQQMWEKCPKRVAEIVVENDYSLIRRRDSPCVREVEALYTELWGREGPSQSDQYHRTEGPLKASNILKPITPLDVERRVARIRDDSAAGTDQIVKSDLRKPGIITALSKLFNFVMLTGVYPSAWKLNRTTLLPKAGKDPANVRNWRPITISSMVSRIFSGLLDERIRAVIRQHERQKGFTAENGCFANVHALEAAIAKSKEGGGVISVLDISKAYDTVPHAVIPLSLERKGIPPVVTKLVAEMYRDCTTVIGAKDGKVEIKLQRGVKQGDPLSPLIFNLVIEPLIERLNETVGVKIEGNNLSVLAFADDITCIAKDAGEAQTQLQTVTDFLGALQMCISVEKSSAFELVPFRKTWYSRRPRVQIGGESIPYLGPDEVTKYLGATVSSWRGLIRGREVPALRELVRRVRKLPLKAEQKVELLRRHIFPRFTYSLIVSMPSRAALKEFDGEIRRTIKEILHLPQSLSSDFMYTPQSMGGLGLTQVEVMVPIAHLRARIKAMNSADPVNTAVVHESDQHLSASAEALGLPWPLTLRQLNDKKYELRDSYARNWAKLRWQGQGAHEFADDAVCNKWLRGGLLTSSRVVDAIKLRTNTYPTRALMSMIYEQRNPNCRKCHVRRETLGHILGECRTTKNKRISRHDEIKDLIAARLSQHNQVMVEPEVWTQGRRFRPDLVVKTAKKEVFVLDVSVRYEHRDYLSQAHDEKNTKYQPVLVQLMSDLQCKKGKVLPIIVGSRGAIPKKTRDVLGKIGIKKKDRLTISMIALRSSIEIINAFMDDDFNAS

SEQ ID NO: 8003 - protein, 1181 aa, Sycophaga agraensis
MYRMNNNDEASEAAAGENRPDPVVAAELIVERRGRRRGGASLRAPSARVRSGSTQRNTPVLEAKNVTLTAQINDPQRCPICPTERGPKYWIGSKELAKRIGVAHLEASVTWLCAGCGRKCKNILSWKCHLPHCKGWQETVEDLAFPCDHCELAFATASGRSQHERHVHPAARNAKRSLVAEKPKGKPGRRPSKWSDDDLARIGELEREYIGARYINVEIAKHFPDRTAKQVSDARRRIREGEQQAVATHPEVTANETAVAAISTAETPPVQSPVLQGNSSSSEDEFVDAVEEQPDCLFERIESPGEREWKEAIRREICSGTMEDRLRSWRVAVQGLVESDGNVDEELMDSLYTQLVAFIAPAIERNPETTRTTKTKRTNRKVGRRRDARKAEMRKFEYARCQQMWERCPKRVAEIVVENDYSLIRRRDSPGVREVEALYTELWGRESPSQSDQYHRTEGPLKASNILKPITPLDVKRRVARIRDDSAAGTDQIFKSDLRKPGIVTALSKLFNFVMLTGVYPSAWKLNRTTLLPKAGKDPANVRNWRPITISSMVSRIFSGLLDERIRAVIRQHERQKGFTAENGCFANVHALEAAIAKSKEGGGVISVLDISKAYDTVPHAVIPLSLERKGIPPVVTKLVAEMYRDCTTVIGAKDGKVDIKLQREVKQGDPLSPLIFNLVIEPLIERLNETVGVKIDGNNLSVLAFADDITCIAKDVGEAQTQLQTVTDFLGTLQMCISVEKSSAFELVPFRKTWYSRRPRVQIGGESIPYLGPDEVTKYLGATVSSWRGLIRGREVPALRELVRRVRKLPLKAEQKVELLRRHIFPRFTYSLIVSMPSRAALKEFDGEIRRTIKEILHLPQSLSSDFMYTPQSMGGLGLTQVEVMVPIAHLRARIKAMNSADPVNTAVVHESDQHLSASAEALGLPWPMTLRQLNDKKYELRDSYARNWAKLRWQGQGAHEFADDAVCNKWLRGGLLTSSRVVDAIKLRTNTYPTRALMSMIYEQRNPNCRKCHARRETLGHILGECRMTKNKRISRHDEIKDLIAARLSQHNQVMVEPEVWTQGRRFRPDLVVKTAKKEVFVLDVSVRYEHRDYLSQAHDEKNTKYQPVLVQLMSDLHCRKGKVLPIIVGSRGAIPKKTRDVLGKIGIKKKDRLTIPMIALRSSIEIINAFMDDDFNAS

SEQ ID NO: 8004 - protein, 1038 aa, Callorhinchus milii
MRAAAAAPKSSVSMAEGGPSGSSEAKCPECSRVFSSTRGLGVHRRVAHPDEFHRSKLPQRVKARWDGEEDHLMALHEVRLAASGARFINQELAKLLPHRTVEAIKGRRRRAEYAALLGALKSNPTPRPPPSSPPVPPPCDDLVPIAPKTPLTPPIPDTVSPSVDMNATENHRQGIIDYVRSLPPGNGDPGEETVNQIIKCIGLYSHSIITSLLNKHAEQLIRLAAPGIPKVGGGRPPASNKPIQPNKKPSGAKRAARRKAYARIQNIYRKNRRKCAQMCLDGTWSEETSSSLPTDTYSYWAKIFNKPSCSDDRPVDPQRTIWELVLPIREEEVRTCVRSISVSSPGPDGITVGTLKSLPSRYLSKMFNLWLNYSYLPLPFRANQTTLIPKVKSPTEAGQFRPITVSSTVTRLFHRIIAKRCSQSVPFNSAQRAFCSGDGTAENTTILDSVFQYSTSSLSPLCVASLDAHKAFDSVNHGSIFRAMELRGIPKILSDYIGSTYANCFTTIKGCPGEPIPMTRGVRQGDPISPFLFNLVLDEILDTIPSGIGARLGGQTKIPTVVFADDILLFATTPLGLQTLLNHVTNNLDKIGLAINPSKSNSLSIVIDGKHKRYLVDATQKFTVKNQPLNILTAINYFKYLGINFRHQGRGESVGSILEQGIQNLSRAPLKPQQRINIFNNPQSVDGKGLSSNNLVPEYQNWVSGGSGVLTGRSYIDCVQVHGNLPPTASRRARGRNQADPWCDGECSSRETLAHISQSCFRTHSIRVRRHDQVCKYVAQKLWRRGFRVISELTIPTPAGIRKPDLIVHKDPYTWVLDSQIVADNANLDAAHSNKVTYYDTPEIRSWVNQTFPDSSVTTFSSITLNWRGVRCPKSVLFLGELGLTKRDLGLISLRVISTLIMPIGYLRKARNVCDVGTTEPAGRDDAWKETTMWMFRKQGTVSIVESCSSVVRALALQVRDLSSIPGRGPNLGQVSLLHTEPNNNPSKTKNNNKLVIFNLRLFVGHCCVQLAAAFAHKYTVNSLYSIFCEALWDVLLT

SEQ ID NO: 8005 - protein, 922 aa, Callorhinchus milii
MRGGWAGTFQKRRFVPIAPKTPLTPPIPDTVSPSVDMNATENHRQGIIDYVRSLPPGNGDPGEETVNQIIKCIGLYSHSIITSLLNKHAEQLIRLAAPGIPKVGGGRPPASNKPIQPNKKPSGAKRAARRKAYARIQNIYRKNRRKCAQMCLDGTWSEETSSSLPTDTYSYWAKIFNKPSCSDDRPVDPQRTIWELVLPIREEEVRTCVRSISVSSPGPDGITVGTLKSLPSRYLSKMFNLWLNYSYLPLPFRANQTTLIPKVKSPTEAGQFRPITVSSTVTRLFHRIIAKRCSQSVPFNSAQRAFCSGDGTAENTTILDSVFQYSTSSLSPLCVASLDAHKAFDSVNHGSIFRAMELRGIPKILSDYIGSTYANCFTTIKGCPGEPIPMTRGVRQGDPISPFLFNLVLDEILDTIPSGIGARLGGQTKIPTVVFADDILLFATTPLGLQTLLNHVTNNLDKIGLAINPSKSNSLSIVIDGKHKRYLVDATQKFTVKNQPLNILTAINYFKYLGINFRHQGRGESVGSILEQGIQNLSRAPLKPQQRIYMFNNHLIPKLQYRLVLGRWTSKRLKTMDLQTRAAVRRWLRLPRDTPTSYFHAAVQDGGLGIPCLRTSIPVLTTNRLNHLLQSGSAAVREATNTASFRKRILDGTRAGNFAGETLHCTKSARNIWARLLHEQSVDGKGLSSNNLVPGYQNWVSGGSGVLTGRSYIDCVQIRGNLLPTASRRARGRSEADPWCDGGCSSRETLAHISQSCFRTHSIRVRRHDQVCKYVAQKLGRRGFRVISEPAIPTPAGIRKPDLIVHKNHYTWVLDSQIVADNANLDAAHSNKVTYYNTPAIRSWVNQTFPDSSGTTFSSITLNWRGAWCPKSVLSLGELGLTKRDLELISLRVLEYTHYAYKVFRKSTERLGRGDRGARRTR

SEQ ID NO: 8006 - protein, 987 aa, Metaphire vulgaris
MSTDLSQLSQKGTGLCSVCRTVRRLHLKDGRVHLHGPHSNPCPGSNQPPMGNQSLGTVVNPPLTATQQNSPAAVNTSITAEAPNSNAQACNNATPFSHPVERGPITKHIPKAARPAVGQLLVNIISKIIEAPSVVTNWGELLYFAPGVLKQPTRGGKKHNLSTLFKRRVQEFSESLSSSLNSPPHNSHGPNTRPTKKRDKSKLLAAAVSSKLEDGNIRAAVRILMSDEEPVIPDPQSLREIMLKHPTPPQDRVPAPSQISCPPLQVTEDEVRERIRSFPTGSSGGPDGLRPQLVAELVACPEVGSRLVTAITGLTNLLLKGTCPDQVRPILFGGTLMALRKKSGGLRPIAIGYFWRRLASKCAFNFALPMVSKYLTPLQVGVGCPGGCEAAVHSARRFILNMPEDHALVKLDFTNAFNSMFRDSMLAELGNILPEISAYCDLSYCKPSSLQFGDFSVLSQLGPQQGDPLGPLLFCLPLQPILKSLASTLTLGYLDDLTLGGPTIDVAADLAAIEKGCKNLGLSLNYEKCEVIFKGPKTDTNTAMDRFSQTSQEDAILLGAPLSTSTAFENVMSCRIVELQTALRRLPLIPRQDAIFLLRSSLSHSKLLYLLRCTPCAGHPLLERFDAIMREGLSNILNIQFSDSQWLQATLPIRNGGLGIRRVSMLAPSAFLASAAGTRPLQSSMLVRACPNIDSHESQIMDQWCFMSQLPGPTSGQLDKQSTWDRPLIRKDSDALSQAHPGPYHQARLEAVSACHASDWLHALPISSCGLRMDDETIRIIIGLRLGANICEKHLCPCGAQVLEDGSHGLSCLLGPGRTTRHATLNDLVQRALVRAGVPSIKEPPGLSRSDGRRPDGMTLIPWQAGRSLVWDATVADTVAATYLPSTFLAAGAAAEAAAVRKTAKYQSLTPMHTFLPIALETLGPINQDALCFFNELGRRLAQQSGDTREGSFLFQRLSVTLQRFNALLFEELFQTSNRTRVSHTIS

SEQ ID NO: 8007 - protein, 979 aa, Metaphire vulgaris
MSTDSSQLRQKGTGLCSVCRTVRRLHIKDGRIHLHGPHANPCQGSNKLPLPSESFNAAVDQASAVVQVATTSPALSITAETISSEANSNAIPFDHPAARGPTTKHIPKAARPAIGQLLIDIINRIIAAPSIISHWQELLHFAPIILRQPTRGGKRHNLSSLFKGRVQSFSEELHCSLSSTENGSHHQITKLAKKRDRDKVLAATVSSKLEDGNIRAAVRILMSNEDPITPDAQSWQELILKHPTPPPDRRPAPSQKSCPQLQVTEDEIRERLRSFPAGSSGGPDGLRPQLVAELISCPEVGNRLVASITGLVNLLLAGTCPDLVRPILFGGTLMALRKKSGGLRPIAIGYLWRRLASKCASSFALPRVTKHLTPQQVGVGCPGGCEAAVHSARRFLADMPEDHILVKLDFTNAFNSMFRDSMLTELAQLLPELSAYCELSYCEPSSLKFGSFAVQSQLGPQQGDPLGPLLFCLPLQNILKNLSATFTVGYLDDLTLGGPTNIVAADITAIERGCNNLGLSLNHDKCEAIHRGPLSITNTSLDRFSRVSVQDATLLGAALEVSTAFEELMSSRITELQTALSRLLLIPRQDALFLLRSSLSHSKLLYTLRCTPCAEHPLLESFDATMREGLNSILNIQLSDSQWRQATLPIRDGGLGIRRVSMLAPSAFLASAAGTRPLQSSMLEKACVSTDAHELQVRNQWSSMSQLPTPTSGSLTKQSTWDRPLIQREVAYLLQTHQGQYHQARLRAVSTRHASDWLHALPITSCGLRMDDETIRVVVGLRLGATICEKHLCPCGAMVSEDGAHGLSCHLGPGRVPRHCLLNDLVQRALVRAGIPSIKEPPGLCRTDGKRPDGMTLIPWRTGRSLIWDATVADTVAPTYLPTTALAAGAAAEAAAARKRSKYQALSSTHIFLPLAFETFGPINNDALSFINDLGRLIALQSGDNREGCFLFQRISVTIQRFNAIAFRGTFSSLQPNES

SEQ ID NO: 8008 - protein, 979 aa, Metaphire vulgaris
MSTDSSQLRQKGTGLCSVCRTVRRLHIKDGRIHLHGPHANPCQGSNKLPLPSESFNAAVDQASVVVQEATTSPALSITAETISSEANSNAIPFDHPTGRGPTTKHIPKAARPAIGQLLTDIINRIIAAPSIISHWQELLHFAPIILRQPTRGGKKHNLSSLFKGRVQSFSEELHCSLSSTENGSRHQLTKPAKKRVRDKVLAATVSSKLEDGNIRAAVRILMSNEDPITPDAQSWQELILKHPTPPPDRRPAPSQKSCPQLQVTEDEIRERLRSFPAGSSGGPDGLRPQLVAELVSCPEVGNRLVTSITGLVNLLLAGTCPNQVRPILFGGTLMALRKKSGGLRPIAIGYLWRRLASKCASNFALPRVTKHLAPQQVGVGCPGGCEAAVHSARRFLANMPEDQILVKLDFTNAFNSMFRDSMLTELAQLLPELSAYCELSYCEPSSLKFGSFAVQSQLGPQQGDPLGPLLFCLPLQNILKNLSTTFTVGYLDDLTLGGPTSIVAADISAIERGCKNLGLSLNHDKCEAIHRGPMPITNTSLDRFSRISVQDATLLGSALEVSTAFEVLMSSRIADLQTALSRLLLIPRQDALFLLRSSLSHSKLLYTLRCTPCAEHPLLESFDATMREGLNSILNIQLSDSQWRQATLPIRDGGLGIRRVSMLAPSAFLASAAGTRPLQSSMLEKACVSTDAHELQVKNQWSSMSQLPSPTSGSLTKQSTWDRPLIQREVAHLLQTHQGQYHQARLRAVSTRHASDWLHALPITSCGLRMDDETIRVVVGLRLGATICEKHLCPCGAMVSEDGAHGLSCHLGPGRVPRHCLLNDIVQRALVRAGIPAIKEPPGLCRTDGKRPDGMTLIPWRTGRSLIWDATVADTVAPTYLPITALAAGAAAEAAAARKTSKYQALSSTYIFLPLAFETFGPINNDALSFINDLGRLIALQSGDNREGCFLFQRISVTIQRFNAIAFRGTFPNLQPNES

SEQ ID NO: 8009 - protein, 982 aa, Metaphire vulgaris
MSTDLSQLSQKGTGLCSVCRTVRRLHLKDGRVHLHGPHSNPCPGSNQSPMGNQSLGAVVNPPLTATQQNSPAAVNTSITAGAPNSNAQACNNATPFFHPVERGPITKHIPKAARPAVGQLLVNIISKIIEAPSVVTNWGELLYFAPGVLKQPTRGGKKHNLSTLFKRRVQEFSESLSSSLNSPPHNSHGPNTRPTKKRDKSKLLAAAVSSKLEDGNIRAAVRILMSDEEPVIPDPQALREIMLKHPTPPQDRVPAPSQLSCPPLQVTEDEVRERIRSFPTGSSGGPDGLRPQLVAELVACPEVGSRLVTAITGLTNLLLKGTCPDQVRPILFGGTLMALRKKSGGLRPIAIGYFWRRLASKCASNFALPRVSKYLAPLQVGVGCPGGCEAAVHSARRFILNMPEDHALVKLDFTNAFNSMFRDSMLAELGNILPEISAYCDLSYCKPSSLQFGDFSVLSQLGPQQGDPLGPLLFCLPLQPILKSLASTLTLGYLDDLTLGGPTIDVAADLAAIEKGCKNLGLSLNYEKCEVICKGPKTDTNTAMDRFSQTSQEDAILLGAPLSTSTAFENVMSCRIVELQMALSRLPLIPRQDAIFLLRSSLSHSKLLYLLRCTPCAGHPLLERFDAIMREGLSNILNIQFSDSQWLQATLPIRNGGLGIRRVSMLAPSAFLASAAGTRPLQSSMLVRACPNIDSHESQIMDQWCFMSQLPGPTSGQLDKQTTWDRPLIRKDSDALSQAHPGPYHQARLKAVSACHASDWLHALPISSCGLRMDDETIRIIIGLRLGANICEKHLCPCGAQVLEDGSHGLSCPLGPGRTTRHATLNDLVQRALVRAGVPSIKEPPGLSRSDGRRPDGMTLIPWQAGRSLVWDATVADTVAATYLPSTSLAAGAAAEAAAVRKTAKYQSLTPMHTFLPIALETLGPINQDALCFFNELGRRLAQQSGDTREGSFLFQRLSVTLQRFNAIAFRGTFPDLEPDES

SEQ ID NO: 8010 - protein, 982 aa, Metaphire vulgaris
MSTDLSQLSQKGTGLCSVCRTVRRLHLKDGRVHLHGPHSNPCPGSNQSPMGNQSLGAVVNPPLTATQQNSPAAVNTSITAEAPNSNVQACNNATPFFHPVERGPITKHIPKAARPAVGQLLVNIISKIIEAPSVVTNWGELLYFAPGVLKQPTRGGKKHNLSTLFKRRVQEFSESLSSSLNSPPHNSHGPNTRPTKKRDKSKLLAAAVSSKLEDGNIRAAVRILMSDEEPVIPDPQSLREIMLKHPTPPQDRVPAPSQISCPPLQVTEDEVRERIRSFPTGSSGGPDGLRPQLVAELVACPEVGSRLVTAITGLTNLLLKGTCPDQVRPILFGGTLMALRKKSGGLRPIAIGYFWRRLASKCASNFALPRVSKYLAPLQVGVGCPGGCEAAVHSARRFILNMPEDHALVKLDFTNAFNSMFIDSMLAELGNILPEISAYCDLSYCKPSSLQFGDFSVLSQLDPQQGDPLGPLLFCLPLQPILKSLASTLILGYLDDLTLGGPTIDVAADLAAIEKGCKNLGLSLNYEKCEVICKGPKTDTNTAMDRFSQTSQEDAILQGAPLSTSTAFENVMSCRIVELQMALSRLPLIPRQDAIFLLRSSLSHSKLLYLLRCTPCAGHPLLERFDAIMREGLSNILNIQFSDSQWLQATLPIRDGGLGIRRVSMLAPSAFLASAAGTRPLQSSMLVRACPNIDSHESQIMDQWCFMSQLPGPTYGQLDKQSTWDRPLIRKGSDALSQAHPGPYHQARLKAVSACHASDWLHALPISSCGLRMDDETIRIIIGLRLGANICEKHLCPCGAQVLEDGSHGLSCLLGPGRTTRHATLNDLVQRALVRAGVPSIKEPPGPSRSDGRRLDGMTLIPWQAGRSLVWDATVADTVAATYLPSTSLAAGAAAEAAAVRKTAKYQSLTPMHTFLPIALETLGPINQDALCFFNELGRRLAQQSGDTREGSFLFQRLSVTLQRFNAIAFRGTFPDLEPDES

SEQ ID NO: 8011 - protein, 979 aa, Metaphire vulgaris
MSTDSSQLRQKGTGLCSVCRTVRRLHIKDGRIHLHGPHANPCQGSNKPPLHSESFNAAVDQASAVVQEATTSPALSITAETISSEANSNAIPFDHPTARGPTAKHIPKAARPAIGQLLTDIINRIIAAPSIISHWQELLYFAPIILRQPTRGGKKHNLSSLFKGRVQSFSEELHCSLSSTEIGSRHQLTKPAKKRDRDKVLAATVSSKLEDGNIRAAVRILMSNEDPITPDAQSWQELILKHPTPPPDRRPAPSQKSFPQLQVTEDEIRERLRSFPAGSSGGPDGLRPQLVAELVSCPEVGNRLVTSITGLVNLLLAGTCPNQVRPILFGGTLMALRKKSGGLRPIAIGYLWRRLASKCASNFALPRVTKHLAPQQVGVGCPGGCEAAVHSARRFLANMPEDQILVKLDFTNAFNSMFRDSMLTELAQLLPELSAYCELSYCEPSSLKFGSFAVQSQLGPQQGDPLGPLLFCLPLQNILKNLSATFTVGYLDDLTLGGPTSVVAADITAIERGCKNLGLSLNHDKCEAIHRGPMLITNTSLDRFSRVSVQDATLLGAALEVSSAFEVLMSSRIADLQTALSRLLLIPRQDALFLLRSSLSHSKLLYTLRCTPCAEHPLLESFDATMREGLNSILNIQLSDSQWRQATLPIRDGGLGIRRVSMLAPSAFLASAAGTRPLQSSMLEKACVSTDAHELQVRNQWSSMSQLPSPTSGSLTKQSTWDRPLIQREVAYLLQIHQGQYHQARLRAVSTRHASDWLHALPITSCGLRMDDETIRVVVGLRLGATICEKHLCPCGAMVSEDGAHGLSCHLGPGRVPRHCLLNDIVQRALVRAGIPAIKEPPGLCRTDGKRPDGMSLIPWRTGRSLIWDATVADTVAPTYLPTTALAAGAAAEAAAARKTSKYQALSSTHIFLPLAFETFGPINNDALSFINDLGRLIALQSGDNREGCFLFQRISVTIQRFNAIAFRGTFPNLQPDES

SEQ ID NO: 8012 - protein, 1127 aa, Hirundichthys speculiger
MEDGPTVTDQTVTNRTNNDNEKVLRKCKCGWQKVTSFKGLRIHQGRMKCGRTPDQHDRTASAGQTEETQSQVTNHSAAGPSNAERATSVDAGEEMEAVPESEVHAVPPRVAQPENLRKHPERRRKIKWPKAKNKEDWRSLDEHLKGVLEHSLRGAVERKLTLLSNIIYEECRERFGECPTKRATADRQKGRREKYIDELVSRRRQLRKRWRKAVPDEKEGLKVLWDDIKQKLAKLRRAERLRRRRKRKEKERKDFFKDPFRFARQLLDEKRSGKLSILKEDLERHIKGQYTDEAKDRPLGSPGHVPRPDSPKIPFDTSPPKLSEIKDVLKRARSASVPGPNGLPYKVYKNCPQVTKILWKLMSVAWKKQSIPAGWQEAVGIFIPKEQNSTDISQFRSIALLNVEGKVFFSVLARRMTSFLSNNCFIDTSCQKAGLPGFPGCVEHASVIWEQIQRAKREKSNLHVVWLDLANAYGSVPHKLVEFALKFFHVPVCVSNIIAKYFDNLHMSFSVDDYMTEWQRLEVGIAMGCSISPILFVAAFEVILIGARQMARGLKSPSGGRLPALRGYMDDVTTILETAPCTARLLKRFDELTVWARMKINPAKSRSLSIRKGVRDDRTVFTAGGEKIPLLAEQPIRSLGREYTAELSDRQMGRTAQKQLREGLARIDNSQLPGKLKVWCYHFTLFQRVMWPLKVGEIPSSLASKMDGISNGYIRKWLGLPRCFSDTGLFGKNMLQLPLKSINLGYRQEKTRLVLELRESRDEAVKGAEVTVRTGRKWRAHDEVEQAVSRLQHKEVLGRVQHSRAGLGWGQPVQFWSKATREQRKTMVVEEVSQAEKDNYLIKAVSQSKQGAWTRWEDTIHRVITWADIWRTPQSRLSFLVRAAYDTLPCPRNLAQWFGSDGKCSLCNKRQCRSPTHSVRVQHRADTGALPVAAQSGAEEAGRAVGEMQSRGKQLLGSPSAKHHLHQTRRGRTEDGGRKVSSSADTWKEMGDARVDLDKQLVFPTEITQTTLRPDVVMWSIAAKKVLIIELTVPWEEGISVAHEFKRSKYSDLAEECRSGGWSATIHPVEVGCRGFVGASAIRLLRAAGMTGSSQKKAIKELAEEAEKASFWMWLRRKDNRWGSTPQ

SEQ ID NO: 8013 - protein, 1143 aa, Astyanax mexicanus
MKPKKRQPEGPPRGGMEEGPILTDHMVTNGMDSHNEKFLRKCTCGWQKVTSLRGLHIHQGKMKCGRIANQHDRAAAAGQTAGTGSQVSNHSAAGPSSAEQATSAEVLESREATPESTFQAAPPPLGVAQPASQRKQLGRRNKIKWPKSKSQEEWRSLDDHLSVVLEHSLRGTVEHKLASLSNIIYEECRERFGECAEKRAPAPRQKGRRERGIEELIANRRELRKRWRKAAPEEWEGLKLLWSDLKQRLGKLRRAERIRKRRQRKEKERRDFYRDPFKYACQLLEEKRSGKLSISKEDLEQYIKGQYTDESRDIPLGSPGYVPRPDPPKTAFDIAPPRLSEIKEALRKARSGSAPGPNGIPYKLYKHCPQVTKIVWNLMRVVWKNKSVPAEWQEAVGIFIPKEQNSTTTSQFRSIALLNVEGKIFFTVLARRIAQFLKSNSYIDTSCQKAGLPGFPGCIEHATMIWEQIQRAKREKSDLHVVWLDMANAYGSVPHKLVEFALEFFYIPDCIITIIGKYFSNLRMSFVMDGFATGWQQLEVGIAMGCSISPILFVAAFEVILIGARQVARGLKTPEGGRFPALRGYMDDVTSILQTAPCTARLLKRLEELTMWARMKIKSSKSRSLSIRKGVRDDRTVFSAGGEKIPLLAEQPIRSLGREYTAELSDRQMGTMIQRQLREGLIKINSSQLPGKLKVWCYQFTLFQRVMWPLKVCEVPSSVSSKMDGIANSYMRKWLGLPRCFSDAGLFGKNMLQLPLKSINLGYKQEKTRLVLEVNESRDEVVKGARVAIRTGRKWRAQEEVNQAISRLQHKEVLGRTQVSQAGLGWGESVPFWSKATREQRKIMVVEEVSQVEQDRYLIKAVSQGKQGAWTRWEDTINRVITWTDIWRMPQSRLSFLLRAAYDTLPCPQNLSQWFGSEEKCPLCSKLNVSLQHILSGCSVALSQGRLRWRHNQVLRKLAEQLEESRVRANIFPEVSRPKIPFVKPGEGVQKTAAGRPTCLLSPGKEWEMRVDLGTKLIFPSEITQTTLRPDVVMWSRAAKKVLIIELTVPWEEGMLAAYEYKRLKYSDLAAECREGGWTTSIHPVEVGCRGFVGKSTMQLLRDTGMTGTRLKKAVKELAEEAEKASYWLWLRRKDSNWGSTPQ

SEQ ID NO: 8014 - protein, 1143 aa, Astyanax mexicanus
MKPKKRQPEGPPRGGMEEGPILTDHMVTNGRDSHNEKFLRKCTCGWQKVTSLRGLHIHQGKMKCGRIANQHDRAAAAGQTAGTGSQVSNHSAAGPSSAEQATSAEVLESREATPESTFQAAPPPLGVAQPASQRKQLGRRNKIKWPKSKSQEEWRSLDDHLSVVLEHSLRGTVEHKLASLSNIIYEECRERFGECAEKRAPAPRQKGRRERGIEELIANRRELRKRWRKAAPEEWEGLKLLWSDLKQRLGKLRRAERIRKRRQRKEKERRDFYRDPFKYACQLLEEKRSGKLSISKEDLEQYIKGQYTDESRDIPLGSPGYVPRPDPPKTAFDIAPPRLSEIKEALWKARSGSAPGPNGIPYKLYKHCPQVTKIVWNLMRVVWKNKSVPAEWQEAVGIFIPKEQNSTTTSQFRSIALLNVEGKIFFTVLARRIAQFLKSNSYIDTSCQKAGLPGFPGCIEHATMIWEQIQRAKREKSDLHVVWLDMANAYGSVPHKLVEFALEFFYIPDCIITIIGKYFSNLRMSFVMDGFATGWQQLEVGIAMGCSISPILFVAAFEVILIGARQVARGLKTPEGGRFPALRGYMDDVTSILQTAPCTARLLKRLEELTMWARMKIKSSKSRSLSIRRGVRDDRTVFSAGGEKIPLLAEQPIRSLGREYTAELSDRQMGTMIQRQLREGLIKINSSQLPGKLKVWCYQFTLFQRVMWPLKVCEVPSSVSSKMDGIANSYMRKWLGLPRCFSDAGLFGKNMLQLPLKSINLGYKQEKTRLVLEVNESRDEVVKGARVAIRTGRKWRAQEEVNQAISRLQHKEVLGRTQVSQAGLGWGESVPFWSKATREQRKIMVVEEVSQVEQDRYLIKAVSQGKQGAWTRWEDTINRVITWTDIWRMPQSRLSFLLRAAYDTLPCPQNLSQWFGSEEKCPLCSKLNVSLQHILSGCSVALSQGRLRWRHNQVLRKLAEQLEESRVRANIFPEVSRPKIPFVKPGEGVQKTAAGRPTCLLSPGKEWEMRVDLGTKLIFPSEITQTTLRPDVVMWSRAAKKVLIIELTVPWEEGMLAAYEYKRLKYSDLAAECREGGWTTSIHPVEVGCRGFVGKSTMQLLRDTGMTGTRLKKAVKELAEEAEKASYWLWLRRKDSNWGSTPQ

SEQ ID NO: 8015 - protein, 1002 aa, Sinocyclocheilus maitianheensis
MEATLESEMRTVTSQVTQPGIQCKHPERRIKIKWPKANMQEDWCRLNEYLSGVLQHFLRGTVERKLNLMGNMIYEECRERFGECTTKQTIAPRQKGRRERHIELLISDRRHLRKRWRKAAPEEKEGLKLLWDDLKQRLAKLRRAEQIRRLRKRKEKERKNFFKDPFKYARQLLDEKRSGKLAITKEDLELYIKGQYTDAAKETPLGSPGYVPRPDPPRTPFDTSPPRLGEIREVLKKARSASGPGPNGLPYKVYKNWPQVTKILWKLMQVVWKNQSIPAEWQEAVGIFIPKERNSMTINQFRSIALLNVEGKLFFSVLARRMTSFLSSNHYIDTSCQKAGLSGFPGCIEHTSVIWEQIQRAKREKSELHVVWLDLANAYGSVPHKLVEFVLEFFHIPACVITIIAKYFNNLRMCFSLDGRTTGWQQVEVGIAMGCSISPILFVAAFEVILIGARQMARGLRLLSGGRLPALRGYMDDVTTILQTAPCTARLLKRLDELIQWTRMKIKPSKSRSLSIRKGVRDDRTVFTAGGEKIPLLKEQPVRGLGREYTSELSDRQMGKLLQKQLREVLEKIDSSQLPGKLKVWCNQFTLFQRVMWPLKVSEIPSSLVSRMDTISNTYIRKWLGLPRCFSDTGLYGKNALQLPLKSINLGYKQEKTRLVLELKESRDEAVKSAGVTIRTGRRWRAQQEVDQAINRLQHKEVMGRVQHSRAGLGWGEPVQFWSKATREQRKSMVVEEVSRVEQDRYLIKAVSQGKQGAWTRWEDSTNRVITWADFWRTPQSRLSFLVRAVYDTLPCPRNLSQWFGSEDKCPLCNEANAGLQNILSGCNVALTQGRFRWRHDQVLRKLAEQLERCRVRADSSSDPIWPNILFLRPGEACRRQWREGQHVCSLLERDGRCKKVLIIELTVPWEEGIPAAYEFKRLKYSDLAAECRDGGWTATIHPMEVGCRGFVGKSAIQLLRAAGTTGVSLRRAIKELAEEAEKASYWLWLRRRDRNWGSAPQ

SEQ ID NO: 8016 - protein, 1033 aa, Aleiodes sp.
MPELLQRNVIMTKRQVQDKIRRLSLADAKRRKEETERVEQREQIPINLDQSSSSEGSDDVFFHTMEDQEIPLETSPEIRQNIMNEWNQVEIEDIGDDESPNITANVDQVGSERELNNISINVEELQTEEALRFEEPDRDPSANLSGWEEKMSDHILSRNLDMNNKYEKCAGDLRNLWNSYKDDKEAMEREVNAFIKKEINNLLRNQEEEMTEEAQERVEKKSKKGRKERKEMNKQMNHRNRKKFAYARCQELYNKCPKKLAEFTVKGDLNFAEAKQEHPAKEDIERTYNDLWGQTGPENIQLPGDKTDEVDMCTHILPITLKEIKRRIGATKSDSAAGVDGIKKAHIARKGVGELLEVLFNIILREGFYPESWKINRTTLIPKPGKDLKDAKNWRPITVGSMIARMYSAIIDGKLRTFVVQSERQKGFTSEDGCKQNIVIVQQTIEEMKLTEGGTASILDISKAFDSIPHSVIKPALEKKGIPGHMIKVITDMYVDCKTVIKASNGVVEITLRRGVKQGDPLSPLIFNLAIEPLLDQLSTCSTGIKIGDYQVPVLAFADDLVLLITNDTNAQKQLDTVQNYLESLGMTLAAPKCQSFKIITKRRTWYMDDPKLTVRGSEVPQVKPEEIVTYLGSKVTPWLGLTRGREVQEVVEVLRNVKKLNLKPHQKIELLRTFILPRFVYKLSVNLPSGGVLKMIDSNIRQSVKEILHLPLSTTTGLFHSQLSRGGLGLMKFERVIQVSAIRMGIKARESRDAVMTEVIGKRKMDSYYNKCAQNLRVERPQNTEECDQMSRKLKERNVDDWARLKMQGQGIRTFSRDKIGNKWLSHPTLLSGSRYLTALRLRTNTFGTRVVLGQTTKGTDVTCRRCHGQNETLGHILGICTHTKPARIRRHNEIRDLIANSVGKKHQVQMEPTIQINGELKKPDLIIKTRDAAYVADVTVVYEASNYIKRAAENKIEKYRGIAQMIQEKDNIQTRVLPIVVGCRGAMPKKTVDALKEIGITKAEMLTISLIALRISIEIAHGFIDYDHEML

SEQ ID NO: 8017 - protein, 1147 aa, Euura saliciscinereae
MEYNDTEIASDEEDSGSGSSGTGQRTDDEIGNITVNEENINIKIRVPLNQGVTLCKKCRERGVRQGFFRLKDLATHYQQQHAQITLTFVCKACLKICRSTTSWHAHKGKCKGRRELVQGDFACQECELRFTTKRGLSQHERHEHPLIRNAKRQEAAERPVERRGPVEGVWSAEEVRNLIELEREFEGDRHINKKIQERLPSKTAQQIKDKRFHLRKVDRKRIDQNQDAIQAPPQIEGDVGIGQGLELTQNDDPAPNEPPNNEWKEAVAQYTESIHLPNTGWAKEMGENLKAMWVANKGKPDELTQGIDTWLEQLIPRLVATTPGEAKGKSRGRKENQSKRQPNRANAPRRRDGQYMNHAARKRTRYARCQDLFNNCPKKLAAAAVSGDLSLVSDREEPPPKQAIQNLYDALWGTEGPQQRVPNQPMGRPMGEVFSPITVIEVRNRLKRIRNDSAAGPDAIKKAQLTPEGIVALLTILYNILIAEGIFPNPWRKNRTTLIPKPGKDRADIKNWRPITIGSLMARMFTAIIDQKLRGFVTQVERQKGFTNANGCQQNTLLLAEAIGTMKSETGGVLTVVDVAKAFDTVPHSAIRAGLAQKGVPEPFIHLIEESYRGCTTVIQAEGNEKVEIVLKRGVKQGDPLSPLLFNLAMEDLITKLSSNTQGVGVAGHNLSVMAFADDVVLIGKDKKNATEQLAAVHGYLREMGMSLSISKCQTFQVIPTNKSWYTKNPELKIEDTPLSYIEPDEVFEYLGAKLSPWVGLRKGFEIAKATSIIKNVRQLQLKPWQKLELLQTYILPRFTYELTVNMPAKGTLQLLDGEIRQHVKEILRLPVSTATGFFYTPKKDGGLGLPRFERIIRFAALKGGISMAKSQDPVVTGAMERNEDKFKKLAEGLQLGWPLTIQEHETAKLKAKRAESSLWESKTSQGQGVRDFRGDAIGNRWLKCPGLLQASRFTDAIRMRTNTAGTRVALARSKLIEDTTCRKCKLKPETLGHILGECIHTKPPRIKRHNDIATYIRDKLSRQHTVFEEPTINDQEGLKKPDLIIIKDATVVVLDVTVRYENRTYLADAAKEKIEKYQRTAEIVRTRTSKEKCEVVPIVVGSRGAMPEQTKTSLKRLGLGSSDMLTISLMALRSSIEMLNGFFDYD

SEQ ID NO: 8018 - protein, 1067 aa, Microvelia longipes
MGNAKGLLPKDLNSNFLVEYLGVTDPLLLVAVGHCTSVVFTLMLERWKSLMPVFSKELIGAVSGPLMSCIYMIGKWLSIIPLMDMQLRWLLVFLRRLRNKSERKRAPGNPPMAGRSTHGTSDTIESVVIEPTPSGSGLSHPSEEGSRDPGEPDHSSVQVIFQQGLTSGGPLGSPDPDPDPNPPESSDNDSVEDWKSRLLRAILDISVAPEDPEALDIDSNISSIARRLRMGIAVEVSEIDSLSERLSSLMKADEQPRRVIQRKRGKPRAFNSRKVRRFAKCQNLYRDNPRELARVVEEKDWDSLDQDDTRRSIFSKEEIDSTYGPLWGTEGTCSWQPPSADNLVPPEDIWTPITPDEVTDRIKRIPRTSAGGPDGVRKDGFFRIKGVHGLLAKLYMILLVTGHYPQNWHDNRTVLIPKAGKDPTLVGNNRPITIGSMLARIYSGLLCSRLMSAITFSQRQKGFMSCNGTFENSFLLDEAIRSANKYRKDLVVLVVDIKRAFDTVPHEAIRAALRVAGMSEEVISRVMSMYKSVYTCFKSNNGELKIQIKRGVKQGDPSSPCLFNTVLDPLIRWLSDHSADGYGPLAYADDLVVLCRSRVEAQNFLSKIVDFLSSIGMELSVEKCLSFWLKRTPSGAMALSDPGLLVGEQQVKVCQIREGFHYLGVRFCPSKGLNNRSMLDSLGRARDRISRLNLKPRQKIKLFYEFVIPRSFYRMAIDPPSKTRMKRFDGECRVWVKDVLHLPPSTPKGLIHAANKHGGLGLATLSSQIWLAHLKAAEAVLKSSDPLMMFFCQLNGVLDRVRSQADLWGINWPEGGDPNLALAKSSLRQEILDDWLSHGSTGHGASSFKDDLIGNRWLRNHSLLTESQYLIALRLRGNLHGVRAALRRVDRGIPENCRHCGDGTETLKHVLNVCSHNHGKIISRHDEIRRFVADRLSSTGWTVMEEQSFEVQCSDEVRRLKPDLVAIKEGVIQVVDVAVTYEDDDSLERVAAGKIGKYSVLERSLVRRFQCQSFAVLPVVIGSRGALPAKTRRNLTRLGIVASTDGLTLSLMALRSSIAIASRHTDR

SEQ ID NO: 8019 - protein, 1129 aa, Microvelia longipes
MLFVVPFIEGDYCPVCKGRFFLRAGGIDGLIRHCKDMHPDTPVQWVCCKCDRKFNQYVSACIHHGQCGGPAAEEPQLEFPCGVPDCSRSFDTKIGRSLHLRSAHAEVREEEKLRAKVGKEVDRRRVWTPDELRIYDREMARHYPSRGYAAKVALFLPSKTEVQIRERARNWKPPSQLGTPLASGTEEIEESASTAPCSGCSVYQPNCPGDGSLDPGVSGHSSDQTNVQSTSGIPNPGPGPEPPAGGDNVPREDWKSRLLRAILDISEAPTNPEALDIDRNIVSLARRIRMGIAVDTSEIDSLALRLSCLLKTVRQPNRVVEPRRGRLRIRNGRKVRRYAKCQNMFRDNPREMARIVEENDMEVLDQDDTRRSAFSQEDVLSTYGPLWDTEGRCDWQPPVTDHLVPPEDIWTPITPDEVSARVKRIPRSSAGGPDNVKKEGLSAISGIFSLLAKFYMTLLIMGHYPRNWRENRTVLIPKAGKDPTLVGNNRPITIGSMLARIYSGLICDRLMSGITFNQRQKGFMSVNGTFENSFLLDEAIRSANRYRKDLVVLIVDIKRAFDTVPHRAIRTALEVAGMPEDVVSRVMSMYECMSTCFKTNSGDLNINIRRGVKQGDPSSPCLFNTVLDPLIRWLSDQSEMGYGPLAYADDLVVLCRSPAEARIFLAKIVDFLIAIGMELSVGKCLAFWLRRTPSGAMALSDPGLLVGEQQVKVCNIREGFHYLGVRFCPSKGLDNRSCLDRLGRARERITGLPLKPRQKIKLFYEFVIPRCFYRMAIDPPSKTRLKRFDAECRVWVKSILHLPNSTPRGLIHAQVKHGGLGIATVTSRVWLSHLKAAEAVLHSPDTLVRFFCELNGILERVKSQATRWRIDWPEGGNPDFALSKSLLRQEIMDEWYNLGATGHGAPSFKDDPIGNRWLRDHSLLSESQHLIALRLRGNVCGVRSALRRVDRGIPAECRKCGIDTETLKHVLNVCSHNHNKIVSRHDEVKSLVSARLCSSGWTVMEEQALECQDPSLGNWGRLKPDIVAVRDGEVRVVDVAITYEDGDSLERVAAGKIGKYSVLERFLLGRFQCQSFAVLPVVIGSRGALPGRTRRNLAKLGIGASTDGLTLSLIALRSSIAMVSRHMDG

SEQ ID NO: 8020 - protein, 1147 aa, Cephise aelius
MSDPVFVSPVVVEGTDLVVLLPIPDACAISCPLCMRSGHYKGVRKIENFYRHAKEAHSTMTITYRCCRCGFIAPEGKKYPRKIVTSHCVTCVPAITSGPSGVDGERRNAIRRRLRGHVTPPPVSDSTAAQARVDGAMDEPETSSAQYPPVTPEQGDSTPPPLTERLEGGGESRLARVEGLVTASETAPTVVTHTSVGPQSRSRRTDCSCATEEQRMLMEELDNVCSADLLNGIARRVAQFLGRLANHTRTPRERRPLTPASNLPRRPTSMEPVSDRVVEATRVQQLYRRNRRKAIRQILTGPTKTCEIDIATVEAHFRALAEERSGEEQWPDVFDREAPNMDSNAILCDPLRREEVARKLGNRPNTSPGPDGLSYADLKRADPGAFVMTSLFNAVWRLEAVPDCWKESNTILLHKKGDEADVNNWRPIAMGDTCPKLFASLLADRLKGWAITNGRFSSSQKGFLQYEGCYEHNFVLQEAIRDAKQEGKELVIAWLDLSNAFSSVPHSSIARALEGHGVPAKINKIIASLNDGAGTRVRVGNGVTGRIDVRAGVRQGCPLSPDIFNLTMEVILRELAQTGEGYMVGDRKLTNLAYADDVVVLSDSPGGMARLLDVAERAAHAIGLEFNPVKCATLHITSGQDSGVQQTKFHIRGQALHSMHPNEAYEHLGIPTGYRIKKTPVGTIAGITSNARAIDSSLLAPWQKLDAVGTFILPSIEFIMQGADLEKEYLIETDRVIKKLGKGWMNLPQRASAELVFLPPSQGGGGLLPLADLYELYTVAHAFKMLNAADPIVSDIARDTLRRAVSARLRGPATGVDVARYLSGDSELPRSSSRGSFWSRVRQATYRLTSKLGVRWVWDGETETLRIHLANGSIIAPESRRSAYRLMRLQLVEYYAGKLLAKRDQGKVLEVTRESRHANYFLRSGRNTRFCDWRFIHRARLGVLPLNATKRWQTGVDRRCRRCGRDLETIPHVLNHCNIHSAARQLRHNSIQNRLVKAAKCSGVITVNRTIEGVSADAARLRPDITVRDEVNKSIIIVDVTVPFENRRPAIDAARRDKLAKYAPLANQLRAQGYKVVVDAFIVGSLGAWDRRNERVLHSLNINRYYATMMRRFMVSDTIRWSRDIYVEHVTGHKQYTLPASEVITDI

SEQ ID NO: 8021 - protein, 1073 aa, Ectomis octomaculata
MSDPVALSAVVVEGAKFVVLLPIPDGGSISCPLCVGKGLYKGARKIENFYRHVKDAHPTMSTTYRCSRCGFIAPEGKKYPRKIVSNHCATCVVETRLAPSGTDRERRAGIRRRLGRQTTPQPVPSVPLPAHTNECDPDHADTGPNQLAPNPTESNEVPLPATETILAVVERPAGSEDDGLFSRPGDEPSRSAQVEGTVLPQTGANGSLNQLPRTNRCCPTGEQKVLMDELDAVSDPEMLNELALRVAQFLGRLVHRPHCPRDGSASQLRRPPGTQDVPDRIVEATRIQRFYRKDRKKAVRRILSGPSKTCNIEPDTVAAYYRTLAAERNGLDEWPNVFDLESPNVDSNVQLCSALKRVEVVKKLNSRPNTSPGPDGLTYADIRRADPGAHVMTSLFNAAWRMESVPDCWKDSNTILLHKKGEESAIANWRPIALGDTCPKLFASLVADRLKRWATTNHRFSNSQKGFLQYEGCYEHNFILQEAIRDAKKTKKELVVAWLDLSNAFSSVPHSSIQRALVGHGVPTKLINVIMSLNNCCRTRIRVGNAFTDAIPIRAGVKQGCPLSPDIFNLTLEVILREVKATGEGYIIGDTKVSNLAYADDIVILADSAGGMDRLLGAAEGAARAIGLEFNPGKCATLHISAGEVLETTFQVRGQAVSCMNPNDVYEHLGIPTGYQMRQTPVGAISGIVADAEAIGGSLLAPWQKLDAVGSFVLPRMEFIMQGASMEKEYLIEADRIVKKLAKTWLNLPRRASAELVFLPPSQGGGGLLPLSDLYELYTVAHAYKMLNALDPTVSCIARGALWSTVSERMREPVTGMDVARYLSSELSLPRSSCGGSFWSRVRQATYRLNTKLGMRWVWNQETESLRIHLANGAVITPETKKVAYRLMRLQLIEHYAEKLLAKRDQGKVFEVTRESRHANYFLRSGRNTRFCDWRFVHRARLGVLPLNATKRWQTGVDRRCRRCGRDLETIPHVLNHCGVHSAARQLRHNNIQDRLVKASKCPGVISVNKTVEGVDGEASTLRPDITVRDEACKSITIVDVTVPFENRKTSVDAARRAKLVKYSPLADQLKAQ

SEQ ID NO: 8022 - protein, 1132 aa, Cecropterus evenus
MSGSVSLSPVVVEATSLVVLLPIPNECSIQCPLCVRSGCYKGVRKIENFYRHAKDAHPAMDVVYRCAQCGFVAPAGKKYPRKVVSNHCNTCVPSVRSEPSGGDRERRNGIRRRLREPQTPPPVPSVLPPSVQVVSSPLRGSENLPGLPARSPTSNPLPVETPLIAAEQSVEQAGREPLQAVAPNLTLETEQVPSPSTTTQRGEQSNRRGPTVEQKRVMDELEAIRDPGSLDSLAFRVAQFLRRLSNVAPREIRPETLHPWPVGELPDRMAEATRIQRLYRKNRRKAVRKILTGPMEPCPIDIASIEAHFRALAARRDCRSEWPDVFDREPPNAHSDARLCDPFRREDVIKKLSRRPNTSPGPDGLTYADLRKADPGAYVMTALFNAVWRLETVPDCWKDSITILLHKGGDVADIRNWRPIAMGDTCPKLFSCILAERVKTWAAANGRFSSSQKGFLQYEGCYEHNFVLQEAIRDAKHLKKDLVVAWLDLANAFSTLPQSSVERALEGHKVPAKVRNVIRSLNNNTRTRVRVGGALTEPIHIQSGVKQGCPLSPDIFNLTLEVILREVERTGEGYTIGSRRISNLAYADDVVLLADSVEGMTALLGAAETAARTIGLEFNPAKCSTLHITASQDSGVRPSEFQVQGQVMGSMGPHDMYEHLGIPTGFCIRQTPVGTIKDIVGNARAIGDSLLAPWQKLDAVATFIVPSIEFLLQGANIEKEFLGETDRIIKKLAKGWLNLPQRASAELVFLPPSQGGGGLLPLADLYEMYTVVHAFKMLHAVDPAVCGIARDTLWNTVSERLRRPASGAEVAQYLSGDMNMPRSSTRASFWTRVRQATHRLSSKTGVSWTWSQDTLHIRLANGTVIAPGMKRSAYRLMRLQMIDHYAGQLLAKRDQGKVFEVTRDSKYSNYFLRTGKNIRFCDWRFIHRARLGVLPLNATKRWQTGVDKRCRRCGSDLETIPHVLNHCGVHSAAMQLRHNNIQNRLARAAKGPGVVTVNRTVEGVNGDAAALRPDITVRDETNKSIVIVDIAVPFENRKPAIDAARRTKLEKYKPLADQLRAQGYRVVVDAFLVGTLGAWDRRNEKVLRCLNISKYYAAMMRRFMISDTIRWSRDIYVEHVTGKRQYATTVVE

SEQ ID NO: 8023 - protein, 1129 aa, Autochton zarex
MSGSVPLCPVVVEEANLVVLLPIPDERSIQCPLCVRSGCYKGVRKIENFYRHAKDAHPTMDVVYRCAHCGFVAPEGKKYPRKVVSGHCSTCVPSVRPEPSGGDRERRGAIRRRLRQPVTPPQVRPVTPPPVPDISSPLRGIENLPGLPTRSATPAPSPAETPLIATEQSVAPDGGESAHTVAPTLILETERIPSPAIDTQRGQRANRRGPTEEQRRLMAELETISDPGGLDELAYRVAQFLRRLSPATPRGGRPESLHRRPAREQSDRIAEATRLQRLYRKNRRKAIRQILTGPTESCQIDVATIEAHFRALAARRDGRGEWPDVFDREPPNAGSDARLCDPLRREDVVRKLSRRPNTSPGPDGLTYADLRRADPGAYVLTALFNAVWRLETVPDCWKDSTTILLHKKGDVADIRNWRPIAMGDTCPKLFSCILAERVKSWATINGRFSSSQKGFLQYEGCYEHNFVLQEAIRDAKHHKKDLVVAWLDLTNAFSSVPQSSIERALEGHKVPAKVTNLIKSLNSNTRTRVRVGGALTEPIHIHSGVKQGCPLSPDIFNLTLEVILRVVERTGEGYTIGSRRISNLAYADDVVLLASSVEGMTSLLRVAETAAQAIGLDFNPAKCSTLHITASQDSGVGLTEFRVQGQVVDSMGPNNAYIHLGIPTGFQVRQTPVSTIKGIVDDARAIDKSQLAPWQKLDAVGTFIAPCIEFLLQGANIEKEYLGEADKIIKKLAKGWLNLPQRASAEPVFLPPSQGGGGLLPLADLYEMYTVVHAFKMFNAVDPAVRDIARDALWKTVSERLKRPAGGGEVAQYLSSDLDLPRSSSRASFWTRVRQATYRLSSKLGLSWTWNQESLNIHLANGTTITPETKGSAYRVMRLQMVEHYAGELLAKRDQGKVFEVTRESRYANYFLRTGRNIRFCDWRFIHRARLGVLPLNATKRWQTGVDKRCRRCGSDLETIPHVLNHCGVHSAAMQLRHNNIQDRLVKAVKCPGDVAVNRTVEGVSGDAAALRPDITVRDETSKSIVIVDVAVPFENRKPAMDAARRAKLAKYEPLADQLRARGYRVVVDAFLVGSLGAWDRRNEKVLRKLNVSRYYATMLRRFMISDTIRWSRVRLRKHQRHTYFAISA

SEQ ID NO: 8024 - protein, 1144 aa, Telegonus anausis
MSGSPVVAESGRLIVLLPIPDECGIQCPLCVRSGCYRGVRKIENFNRHAKEAHPAMDVVYRCTRCGFVAPEGKRYPRKIVTAHCATCVPAVRPEPSGRDRERRNAIRTRLRGPAPPQPEPPVMPPTVPDVSPLRVNEISSLTIPQYRSPARCAPRSPTRTTSSPPAAAPLTEADRPVQDERRESAHMVVPTVTLETVRIPPPSTNTQRGDQRRTDRRGPTEEQKRLVEELDAVTEPDVLDGLACRAAHFLGRLSHRQPPQERRTNLPNQPANRGERTDRIEEATRVQRLYRRNRRKAVRQILSGPAISCGVDVAAVDAHFRALATRRDGRDEWPDVFDQEPPSAGSDAQLCDPLRREDVVRRLSRRPNTSPGPDGLTYADLRRADPGAYVMTALFNAVWRLETVPDCWKDSTTILLHKKGDVADIGNWRPIAMGDTCPKLFASILAERVKRWATTNNRFSRSQKGFLQYEGCYEHNFVLQEAIRDAKDHKKDLVVAWLDLTRAFSSVPQSSIERALEGHRVPKKVRNIIKSLNINTRTRVRVGSALTDPINMQAGVKQGCPLSPDIFNLTLEVVLRMAERTGEGYTIGNWNISNLAYADDVALLSGSVDGMTRLLEAVETAAQAIGLEFNPAKCATLHLTASQDGGVQRTNFRVQGQPVRALGPDEVYKHLGIPTGFQMTQTPVGTIKNIIDDAQAIECSLLAPWQKLDAVGTFVIPRIEFLLQGASMEKEYLVEADKVIKKLAKGWLNLPQRASAEPVFLPPSQGGGGLLPLADLYEVYTVANAFKMLHARDPIVGGIARDALWKTVSGRLKRPVSGEDVAGYLSSDLDLPRSTSRASFWTRVRQATSRLSAKLGVRWTWSRDALNIRLANGSAIAPETRGSAYRLMRLQIVEHYAAELLAKRDQGKVFEVTRESRHSNYFLRTGRNIRFCDWRFIHRARLGVLPLNATKRWQTGIDKRCRRCGSDLETIPHVLNHCSVHSAAMQLRHNGIQNRLVKAATGPGAIAVNRTVEGVSGEAAALRPDIVVRNEADKSVVIVDVTVPFENRRSAMDAARQAKALKYEPLADQLRSQGYRVVVDAFVVGSLGAWDRRNERVLRCLNINQHYAKMMRRFMIADTIRWSRDIYVEHVSGRRQYATTVSQN

SEQ ID NO: 8025 - protein, 1136 aa, Codatractus alcaeus
MSDPAAPLPVIVEATDFIVLLPIPETCSIQCPLCVRSGCYKGVRKIENFYRHVKDAHASMGVVYRCSKCNYIAPEGKKYPRKIVSNHCAVCVPTIRSQPSGSDRERRTIIRRRLGRHVTPPPPAPNIVVSPVRNDEGNRPADKEDESPHQCAPSRPEGAETASSHDEYPLTAMENSPHPIQPTTVPETGGRISPSAEILNIQQRRNDRRGPTEEQKSLMEELDAVCDPTLIDGLAKRVAEYLGRLSLSKERRPAPPHRRPTVGETSDRIAEASRIQGLYRKNRKKAVQKILAGPAKTCGINVAAVESHFRTLAARRDGQDEWPDVFARDPPQEHSNVHLCDVFRREDVARKLRNRPNTSPGPDGLTYADLKKADPGAYVMTALFNAVWRLETVPDCWKTSTTILLHKKGDVTDISNWRPIAMGDTCPKLFASILAGRLKRWATDNRRFSNSQKGFLQYEGCYEHNFVLQEAIRDAKCGRKELVVAWLDLTNAFSSVPQSSIKRALEGHGLPHKVLNIITSLNNNTRTRIRVANTHTEYITVERGVKQGCPLSPDLFNLTLELILRELERTGEGYKMGERKISNLAYADDVVLLADSVNGMNRLLEVSESAARAIGLVFNPAKCATLHITATQDSGVQQTEFRIQGQVMRPMGPTEFYEHLGIPTGYQVRQTPIGTIEGIVADAKAIDSSLLAPWQKLDAVGTFVLPCVEFIMQGANVEKEYLVEADKIIKKLAKGWLNLPQRASAELVFLPPSQGGGGLLPLGDLYEAYTVAHAFKMFHAVDPIVSGIARDTLWNTVSGRLRRPASGVDVARFLSSELELPRSSTKASFWTHVRQATRRLSARLGVSWTWNQESGTLGIHLANGMIIAPEVRGSAYRLLRSQLIEHYARQLLAKPDQGKVFEVTRACKHSNYFLRSGRNTRFCDWRFIHRARLGVLPLNATKRWQRGVDKRCRRCGCDQETIPHVLNHCGVHSAAIQMRHNNIQNRLIRAIKGPGVISVNRVVDGVSAEAAALRPDITVRDETNKAVIIVDVTVPFENRQPAMDEARRAKLLKYKPLADQLRAQGYRVVVDAFVVGSLGAWDRRNERVLQRLNVSRYYAAIMRRFMVSDTIRWSRDIYVEHVTGKKQYATTVYSAE

SEQ ID NO: 8026 - protein, 1113 aa, Codatractus cyledis
MSDPAAPLPVIVEATDFIVLLPIPETCSIQCPLCVRSGCYKGVRKIENFYRHVKDAHASMGIVYKCVKCNYTAPEGKKYPRKIVTNHCATCVPAIRPQPSGSDRERRTAIRRRLGGHVTPPPVANMVASPVRNDEGNRSAGQEDTSPHQCAPSHLEGQSHPIQPTTVPEASGRLSPTADIINVQQRRNYRRGPTEEQMSLMEELDAVCDPTLIDGLAKRVAQYLGRLSPSKAISLPPHRRPNVGENSDRLAEATRIQGLYRRNRKKAVQRILAGPAKTCGINVAAVESHFRRLAARRDGLDEWPDVFARDPPQEQSNVHLCDVFRREDVARKLRNRPNTSPGPDGLTYADIKKADPGAYVMTALFNAVWRLEAVPDCWKASTTILLHKKGDVTDISNWRPIAMGDTCPKLFASILADRLKRWATVNRRFSNSQKGFLQYEGCYEHNFVLQEAIRDAKYGRKELVVAWLDLTNAFSSVPQSSIKRALEGHGLPNKVLNIITSLNSNTRTRVRVANTHTEYIRVERGVKQGCPLSPDLFNLTLELILRELERTGEGFKMGERKVSNLAYADDVVLLADSIDGMTRLLEVSESAARAIGLEFNPSKCATLHITASQDGRVQQTEFRMQGQVMRSMGPTEFYEHLGIPTGYQVRQTPVSTIEGIVADARAIDSSLLAPWQKLDAVGTFVLPCVEFIMQGANIEKEYLVEADKTIKKLAKGWLNLPQRASAELVFLPPSQGGGGLLPLGDLYEAYTVAHAFKMFHAIDPTVSGIARDALWKTVSERLRRPASGVDVARFLSSELELPRSSTKASFWTRVRQATRRLSTRLGVSWTWNQESGTLGIHLANGTVIAPEMRGSAYRLMRLQLIEQYAGQLLAKPDQGKVLEVTRDNKNSNYFLRNGRNIRFCDWRFIHRARLGVLPLNATKRWQTGVDKRCRRCGCDLETIPHVLNHCGVHSAAIQMRHNNIQNRLIRAIKGPGAISVNQTVDGVSAEAAALRPDITVRDEANKSVIIVDVTVPFENRQQAMDAARRAKLAKYKPLADQLRAQGYKVVVDAFVVGSLGAWDHRNERVLHQLNVSRYYAAMMRRFMVSDTIRWSRDIYVEHVTGNRQYARTV

SEQ ID NO: 8027 - protein, 1005 aa, Codatractus imalena
MTDPAAPLPVIVEATDFIVLLPIPETCSIQCPLCVRSRCYKGVRKIENFYRHVKDAHASMGIVYRCCKCNYTAPEGKKYPRKIVTNHCATCVPAIRTQPSGSDRERRTAIRRRLGGHVTPPPSVPNMVASPVRNDEGNRLARQEDESPHQCAPSHPESQPHPIQPTTVPETRGRLSPSAEIINIQQRRNYRRGPTEDQKSLMEELDAVCDPTLIDGLAKRVAQYLGRLSPSKERSDPPHRRPNVGENSDRIAEATRIQGLYRRNRKKAVQRVLAGPAKTCGINVAAVESHFRRLAARRDGLDEWPDVFARDPPQEQSNMQFCDVFRREDVARKLKNRPNTSPGPDGLTYADIKKADPGAYVMTALFNAVWRLETVPDCWKTSTTILLHKKGDVTDISNWRPIAMGDTCPKLFASILADRLKRWATVNRRFSNSQKGFLQYEGCYEHNFVLQEAIRHAKYERKELVVAWLDLTNAFSSVPQSSIKRALERHGLPNKVLNVITSLNSNTRTRIRVADTHTEYIRVERGVKQGCPLSPDLFNLTLELILRELERTGEGFKMGERKVSNLAYADDVVLLADSVDGMTRLLEVSESAARAIGLEFNPSKCATLHITASQDSRVQQTEFRMQGQVMRSMGPTEFYEHLGIPTGYQVRQTPVSTIEGIVADARAIDSSLLAPWQKLDAVGTFVLPCVEFIMQGANIEKEYLVEADKTIKKLAKGWLNLPQRASAELVFLPPSQGGGGLLPLGDLYEAYTVAHAFKMFHAIDPTVSGIARDALWKTVSERLRRPASGVDVARFLSSELELPRSSTKASFWTRVRQATRRLSTRLGVSWTWNQESGTLGIHLANGTVIAPEMGGSAYRLMRLQLIEHYAGQLLAKPDQGKVFEVTRDSKHSNYFLRNGRNIRFCDWRFIHRARLEFLPLKATKRWQTGMDKRCRRCGRDLETIPHVLNHCGVLSAAIQMRHNNIQNRLIRAIKGPGAISVNQTGWRKCRGVCTTARYYSAQPGQ

SEQ ID NO: 8028 - protein, 1131 aa, Venada nevada
MSDLAASLPVVVEATNFVVLLPIPETCGIQCPLCVRSGRYKGVRKIENFYRHVKDAHTLMGIIYRCSKCDFTAPEGKKYPRKVVSNHCATCVPAIRSQPSGGDRERRNAIRRRLREPVTTPPPVPDRVAPLARNEESSGHVHHDHVNTNQCAAGHSEERESSPPYASATERATCMAQLVVVPETEGRLSPSANAQNDQHRKTDRHGPTEEQRSLVNELEAIADPNLLDGLAYRVARFLGRLASNKRPPQRRPNPPHRPPDLEAESERIMEATRTQKLYRINRRKAIQKILSGPAKTCEIDAAAVEVHFRELAARRDGRDVWPDVFNREPPNEDSNARLCDLLSREDVVRKLRRRPNTTPGPDGLTYADLRRADPGAYVMTALFNAVLRLEAVPDCWKDSTTILLHKKGDVSRINNWRPIAMGDTCPKLFASILAERLKRWATINKRFSSSQKGFLPYEGCYEHNFVLREAIRDAKRCGKELVVAWLDLTNAFTSVPQSSVGRALEGHGVPDKIKKIILSLNRDSRTRVRVANALTEQINIQAGVKQGCPLSPDIFNLTLEVVLRELKRTGEGYIIGDRKISNLAYADDVVLLSGSADGMTRLFEVAESAARAIGLEFNPAKCATLHIAAGQDSLVQQTEFRLQEQAIRSMGPGEVYEHLGIPTGYQIRQTPVGTIEGIVADAKAINDSLLAPWQKLDAVGTFILPCVEFLMQGADMEKEYLVEADKIIKKLAKSWLNLPQRASAELVFLPPSQGGGGLLPLGDLYEAYTVAHAYKMFHAIDPIVAGISKKTLWETVSGRLRRPASGVDVAQFLSGGLDLPRSSTKATFWTRVRQATHRLAAKSGVSWTWNEESKTLSIRLADGLVVEPEARGSAYRLLRLQLVEHYAGQLLAKRDQGKVFEVSRNSSNSNYFLRTGRNIRFCDWRFIHRARLGVLPLNATKRWQTGVDKRCRRCGGHLETIPHVLNHCGVHSAAMQLRHNNIQNRLVKAAKVPGIITTNRTVEGVGTEVAALRPDITVRDEVNKSIFIVDVAVPFENRRPAMDAARRAKICKYAPLADQLRSQGYKVTVDAFIVGSLGSWDIKNEKVLQHLKVGRYYAAMMRRFMVSDTIRWSRDIYVEHLTGSRQYTATV

SEQ ID NO: 8029 - protein, 1127 aa, Oechydrus chersis
MSASVPDPVVVEASNFVVLLPIPEACDIQCPLCVRSYKGVRKVENFYRHAKDAHPTMAIVYRCANCGFIAPEGKRYPRKIVTAHCNTCVPAIRSDPSGSDRERRNTIRRRLRGPMTPPQVPNLEEPSLDLCLPQRSSEDATAPSHVDTPLTTAERSLEDEGRELARIVAPTVTLETESVPPSSTNTQRGQQQVTNRRGPSEEQRRLMEELDAVAEPDVLDGAASRVAEFLGRLSSNTRALREGRLDPSNRPNNGREQSDRIVEATRVQRLYRRNRRRAVRHILAGPALTCGVDVATVDAHFRALAARKDGRDEWPDVFDREPPSSDSDTRLCDPLKREDVARKLSRRPNTSPGPDGLTYADLKRADPGAYVMTALFNAVWRLETIPDCWKDSTTILLHKKGDASNICNWRPIAMGDTCPKLFASILADRIKRWATINGRFSRSQKGFLQYEGCYEHNFVLQEAIRDAKHRKKDLVVAWLDLTNAFSSVPQSSVERALEGHRVPEKIRNIITSLNKNTRTRVRVGSELTEPINIQAGVKQGCPLSPDIFNLTLEVILREVERTGEGYTIGDRKLSNLAYADDVVLLSGSADGMTRLLGAAESAARAIGLEFNPAKCATLHITASQDSGVQQTGFRVEGQVVRSMGPNEVYDHLGIPTGFQIRQTPVGTIKDIVDDAKAIESSLLAPWQKLDAVGTFVLPCIEFLLQGATLDKEYLVEADKIIKKLAKGWLNLPQRASAEPVFLPPSQGGGGLLPLADLYEVYTVANAYKMLYAVDPIVSGIARDALWSTVSGRLKRPISGEDVARFLSSSLDLPRSSARATFWTGVRQATRRLTTKLGVSWAWCPETGTLRLSLPNDVTIVPKAKSSAYRLMRLQLVEHYAGGLLAKRDQGKVFEVTRDSRHSNYFLRTGRNIRFCDWRFIHRARLGVLPLNATKRWQTGIDKRCRRCGSDLETIPHVLNHCSVHSAAMQLRHNAIQNRLVKATKHPGLVRVNRTVEGVSAEAAALRPDVVVRDETTKSILIVDVAVPFENRRSAMDAARRAKVLKYAPLADQLRAQGYKVMVDAFVVGSLGAWDCRNERVLRSLSVNRRYAGMMRRFMVSDTIRWSRDIYVEHVTGFRQYVETVSAG

SEQ ID NO: 8030 - protein, 1152 aa, Pseudonascus paulliniae
MSDPMLMPPVVVEGGDFVLLLPVPNSCSIQCPLCVRSGLYKGVRKIENFYRHAKDAHAAMGIIYRCSGCGFVAPEGKRYPRKVVTSHCVTCVPSVGSGPSGSDRERRVAIRRRLGGRATPPPVTPVSPPAPSLTASPLRDSGDIHSRPSTTDPDQGLPELSRMDRTPLTAPEVLSTVAERIVRGSESGPGEVSEPVTALESARVPLVARRNDAEGQPQRVAHRSPTDEQRRLMEDLDTVSDAELLNEIAERVAQYLGRLTVAASTLREGISRPPRQSVMVGTPDRIAEATRIQRLYRKNRRKAVQRILSGPARSCNIGVAAVEAHFRALAARRDGLGEWPGVFDQEAPSPDSNDQLCRLLKREDVVDKLRSRPNTSPGPDGLSYAQLRKADPGAYVMTSLFNAVLRVESVPDCWKDSNTVLLHKKGDVASIANWRPIAMGDTCPKLFASMMADRLKSWAVANGRFSGSQKGFLQYEGCYEHNFVLREAIRDAKQRGRELVVAWLDLTNAFSSVPHSSIARALEGHGVPPKIRDLIASLNSGARTRVRVGNACTAPIRIEAGVRQGCPLSPDIFNLTLEVVLRELNRTGEGFSVGDRRVSHLAYADDLVVLADSVSGMTRLLGVAESAARAVGLEFNPAKCATLHIVAGRSDRVQRTTFSVGEQAVRSLGPEETYEHLGIPTGFQIRQTPVGTIAGLIDDAKAIDTSLLAPWQKLDAVGTFVLPCLEFIMQGAEMEKEYLNEADRIIRKLAKGWLNLPQRASAELVFLPPSQGGGGLLPLADLYELYTVAHAYKVLNASDPVVSGIARDALWGTVSKRLRKPASGMDVARFLSGDLDLPRSADRASFWTRVRQATSRMADKLGACWVWDRDGDTLSLHLPKGVIVAPDARRSAYRLMRLQLVEHYAGQLLAKRDQGKVFEVTREDRHSNYFLRTGRNIRFCDWRFIHRARLGVLPLNATKRWQRGVDGRCRRCGRDLETIPHVLNHCGVHSAARQLRHNAIQNRLARAARCPGVVAVNRAVEGASGDAALLRPDIVVRDEAGKSITIIDVTVPFENRKVAVDAARRAKLVKYAPLASQLRTQGYRVVVEAFVVGALGAWDGRNERALRCLRVSRFYSAMMRRFMVADTVRWSRDIYVEHVSGRRQYTAPTPGS

SEQ ID NO: 8031 - protein, 1137 aa, Ridens mephitis
MGDPAALLPVVVEANDFVVLLPIPETCGIQCPLCVRSGCYKGVRKIENFYRHAKDAHTPMGIVYRCSNCNFTAPEGKKYPRKVVSAHCATCVPAIRPQPSGSDRERRNAIRRRLRGQGTTPPSAPISATALVCDEENSRRQDNVNLNQGTSSHPEGSETNLSHDRCPLRATECSARTNQAVTVVETETRLCPSVDDRNGSQRGSGCRYPSEEQKSLVEELDAINDPTLLDELACRVAHFLASNAGLTPNTGRPRERRSNPQHQPPNMEEGSDRIAEARRIQGLYRKNRRKAIQKILAGPAQTCEIDVTVVEAHFRGLAARRDGRDVWPDVFDREPPNEDSNAQLCDLLKREDVVKKLRRRPNTSPGPDGLTYADIRRADPGAYVMTALFNAVWRMETVPDCWKNSTTILLHKKGDVTNIGNWRPIAMGDTCPKLFASILAERVKRWATTNRRFSSSQKGFLQYEGCYEHNFVLQECIKDAKRNCKELVVAWLDLTNAFSSVPQSSVERALKGHGLPSKVTNIIASLNSNTRTRVRVASALTEPIVVHAGVKQGCPLSPDVFNLTLEVVLRELMRTGEGYMIDDRRISNLAYADDVVLLSGSADGMTRLLEVAETAARAIGLQFNPAKCATLHITADKDSRVQQTEFRLQEQVIRSMGPNEIYEHLGIPTGYQIRQTPIGTIEGIIADARTIDGSLLAPWQKLDAVGTFVLPCVEFLMQGADMEKEYLVEADKIIKKLAKGWLNLPQRASAELVFLPPSQGGGGLLPLGDLYEAYTVAHAFKMLHAVDPTVRGIARDSLWKTVSGRLRGLANGGDVARFLSGELSLARSSIGASFWTRVRQATGRLASRAGVSWAWDPETGTLGIHMANGVTIAPEARGSAYKLLRLQLVEHYATQLLAKRDQGKVIEVARNSRHSNYFLRSGRNIRFCDWRFIHRARLGVLPLNATKRWQTGVDKRCRRCGRDPETIPHVLNHCGVHSAAMQHRHNNIQNRLVRAARAPGVITVNRAVEGVSAEAAVLRPDITVRDEANKSILIVDVAVPFENRQPAVNAARQYKIMKYTPLADQLRAQGYKVVVDAFVVGSLGSWDYKNEKILQRLKVGRYYAAMMRRFMVSDTIRWSRDIYVEHVTGSRQYTTPV

SEQ ID NO: 8032 - protein, 942 aa, Urbanus sp.
MGIVYRCAQCGFIAPEGKRYPRKIVTAHCATCVPAVRTEPSGGDRERRNAIRRRLRGPVPSPPEPPVATPPVITSPLRDSSDHTDPQDPGPNRCAPISAAPIVTPLMDADRPAQNAERESTRIVTPTGTLETERIPSPYTDTRRGQQQRTGHRGPTDEQKRLMEELDAVTEPDVLDELARRAAQYLGRLSAVRVAPRSRRHDLPNHLADRGEQTDRIVEATRIQRLYRKNRRKAVRQILTGPTKSCGVDVATVDAHFRALAARRDGSGQWPDVFGQGPPGAGSDARLCDPLRREDVVRKLTRRPNTSPGPDGLTYADLRKADPGAYVMTALFNAVWRMETVPDCWKDSTTILLHKKGDPADIRNWRPIAMGDTCPKLFASILAERVKGWATANGRFSRSQKGFLQCEGCYEHNFVLQEAIRDAKYCKKDLVVAWLDLTNAFTSVPHSSIERALEEHGVPEKVRNIIKSLNKDTRTRVRVGSALTDPIVIQAGVKQGCPLSPDLFNLTLEIILRLVERTGEGYTIGNRNISNLAYADDVVLLSGSVEGMTRLLEAAETAAQAIGLDFNPAKCATLHITASQDGGVQQTAFRIRGQAVRSMGPNEVYEHLGIPTGFQVHQTPVGTIKRIMDDAKTIDSSLLAPWQKLDSVGTFILPCIEFLLQGGNIEKEYLAEADKTIKKLAKGWLNLPQRASAEPVFLPPSQGGGGLLPLADLYEVYTVAHAFKMLYATDTLVSGIARDTLWETVSGRLRRPASGVDVARFLSDSLDLPRSSSRASFWTRVRQATQRLRTKLGVGWAWSPETGTLGITLPNGTIGPEKRGSTYRVMRLQLVEHYAGVLLAKRDQGKVFEVTRDSRHSNYFLRTGRNIRFCDWRFIHRARLGVLPLNATKRWQTGVDKRCRRCGGDLETIPHVLNHCSVHSAAMQLRHNAVQDRLVKAATVPG

SEQ ID NO: 8033 - protein, 965 aa, Spathilepia clonius
MVAPTVALKTERIPSPTIDTRRCRHRGSNRRGPTDEQRRLVEELDAIEDVERLNTLACRVAQFLGRLSASTPTLRKRRSTSANRPTSINRPLNNGNGEQSDRIAEATRLQRLYNSSRKKAIRHILAGPATSCDVSIAAVEAHFRALAARRDGSGEWPDVFDREPPTAESDARLCESFKRADVARKLGRRPRTSPGPDGLTYADLKKADPGAYVMTALYNAVWRLEAVPDCWGNSTTILLHKKGDATALQNWRPIAMGDTCPKLFACLLAERIKRWATVNRRFSGSQKGFLQYEGCYEHNFVLQEAIRDAKETKRDLVVAWLDLSNAFSTVPQSSIKRALEGHRVPDKVRQIIQSLNENARTRVRVGGALTEPIAIQTGVKQGCPLSPDIFNLTLEVVLREVERTGEGYIIGNRTISNLAYADDVVLLAGSADGMTRLLRVAEAAALAIGLRFNPAKCASLHVTAGRDDGVQLTEFRVEGHVIRPMGPNEAYEHLGIPTGLQVRQTPVGTIKGIVDEARTIDNTLLAPWQKLDAVGTFVLPSIEFILRGASIEKEYLVQADKTIKRLAKSWMNLPQRASAEPVFLPPSQGGGGLLPLADLYEIYTVANAFKMFHAVDPVVSGIARDLLWKTVSGRLKRPANGVDVARFLSSDLDLPRSSSRGSFWSRVRQATYRLSAKLGGVRWAWNQETLNIHLDNGTVIVPEMKGSAYRLMRLRVIEHYAGELLAKRDQGKVFEVTRDSRHSNYFLRTGRNIRFCDWRFIHRARLGVLPLNATKRWQTDVDKRCRRCGCGLETIPHVLNHCGVHSAAMQLRHNNIQNRLVKAVKVPGAVMVNRTVEGTSGEAAALRPDIVVRDETKKSVIIVDVAVPFENRQPAVDAARQAKLMKYAPLADQLRAQGYRVMMDAFVVGSLGAWDRRNEKVLRWLNISKYYAAMMRRFMIGDTIRWSRDIYVEHVTGRRQYTMTV

SEQ ID NO: 8034 - protein, 1140 aa, Urbanus esmeraldus
MSGAIPTSPVVVEAANFVLLLPIPEECGIQCPLCTRCGRYKGVRKVENFYRHAKDAHPAMGIVYRCAQCGFIAPEGKRYPRKIVTAHCAICVPAIRPEPSGGDRERRGAIRRRLRGTVPPSPELPAAPPSGMASPLRDDSDRASPRDLSPNRCARGSPTRPASPPPSVADPLSDAARPVQDEERESAHMVTPSETLETERIPSPSINTQSGQRQGTGRRGPTDEQRRLVEELDAVAEPDALDGLARRVAQYLGRLSANRVVPRDRRPDPPNHLANTGERTDRIVEATRIQRLYRMNRRKAVRQILSGPTKSCRVDVATVDAHFRALAAQRDGRDQWPDVFEQGPPGAGSDARLCDPLRREDVVRKLARRPNTSPGPDGLTYADLRKADPGAYVMTALFNAVWRIETIPDCWKDSTTILLHKKGDPADIRNWRPIAMGDTCPKLFASILAERVKGWATANGRFSRSQKGFLQYEGCYEHNFVLQEAIRDAKHHKKDLVVAWLDLTNAFSLVPHSSIERALEGHRVPEKIRNIVKSLNKGTRTRVRVGNALTEPISIQAGVKQGCPLSPDLFNLTLEVILRVVEQLGEGYTIGDRNISNLAYADDVALLSGSVEGMTRLLEAAENAAQAIGLEFNPAKCATLHITTSQDGGVQRTSFRVQGQPVRALGPDEVYEHLGIPTGFQIRQTPVGTIKGIIDDAQAIEDSLLAPWQKLDAVGTFVLPCVEFLLQGANMSKEYLVEADRVIKRLAKGWLNLPQRASAEPVFLPPAQGGGGLLPLADLYEAYTIAHAYKMLHAMDPLVGGIAKDALWGTVSGRLRRPVSGEDVARYLSSDLELPRSTTGASYWTRVRQATTRLSAKLGVSWTWSQGNLNIRLANGSAIAPETRRSAYRLMRLQMVEHYAAELLAKRDQGKVFEVTRDSRHSNYFLRTGRNIRFCDWRFIHRARLGVLPLNATKRWQTGVDKRCRRCGGDLETIPHVLNHCSVHSAAMQLRHNAVQDRLVKAATRPGDVRVNRTVEGVSGEAAALRPDITVRNEADKSVLIVDVTVPFENRRAAMDAARQAKVHKYAPLADQLRTQGYKVVVEAFVVGSLGAWDRRNERVLRCLNINHRYASMMRIHKERRMASGDGSGLLEGLHHNPPP

SEQ ID NO: 8035 - protein, 754 aa, Urbanus proteus
MTALFNAVWRMETVPDCWKDSTTILLHKKGDPADIRNWRPIAMGDTCPKLFASILAERVKGWATANGRFSRSQKGFLQCEGCYEHNFVLQEAIRDAKHRKKDLVVAWLDLTNAFSLVPHSSIERALEGHRLPEKIRNIIKSLNKGTRTRVRVGNALTEPITIQAGVKQGCPLSPDVFNLTLEVILRVVEQLGEGYTIGNRTISNLAYADDVALLSGSVEGMTRLLEAAENAAQAIGLEFNPAKCATLHITTSQDGGVQRTSFRVQGQPVRALGPDEVYEHLGIPTGFQIRQTPVGTIKGIIDDAQAIENSLLAPWQKLDAVGTFVLPCIEFLLQGGNIEKEYLAEADKTIKRLAKGWLNLPQRASAEPVFLPPAQGGGGLLPLADLYEAYTIAHAYKMLNAVDPLVSGIARDTLWSTVSGRLRRPVSGVDVARYLSSDQNLPRSTIRASYWTRVRQATTRLSVKLGVSWTWTHDKLNIRLANGSAIAPETRGSAYRLMRLQMVEHYAAELLAKRDQGKVFEVTRDSRHSNYFLRTGRNIRFCDWRFIHRARLGVLPLNATKRWQTGVDKRCRRCGGDLETIPHVLNHCSVHSAAMQLRHNAVQDRLVKAATRPGDVRVNRTVEGVCGEAAALRPDITVRNEADKTVLIVDVTVPFENRRAAMDAARQAKVHKYAPLADQLRAQGYRVVVEAFVVGSLGAWDRRNERVLRCLNVNHRYAGMMRRLMVGDTIRWSRDIYVEHVTGKRQYIATTSEN

SEQ ID NO: 8036 - protein, 885 aa, Timema monikensis
MAVVVDPDKAEWIEELQRYTNSLSCSPGVKNFREINWLLAEIKELMVAPPLLESLDLMYERILPLFPRKAEGGKGSDRGKGKVAYRKWKKYRYARTQDLYSKDPGLLSKCLRNGIDHILPNMGEVDRNDVVELYQLLWGTRPTVRLDGWDPVQGPIALLDFMLPIMVDEIKVNVQKTKKSAAPGPDGIKPGALVGKGINTLLAGLFNLVLRWGLLPTKWSDNRTTLIPKEGKDPKMITNYRLITISSVVSRLFWGLMDQRLRKVVKLNPRQKGFIKEQGCFTNVRLLVEITRLMKNNKVEVGIQLDVAKAFDTVHHEAIGPALRRQGIPDEIVRLVERAYANPRTSIKHQEGDVEIHLQRGVKQGDPFSPLMFNMVLDGLIEELESMPGYSVVEKNISCVAFADDLFLFADDAEKGQMLMDRTVEFLESLGMGVSAAKSSAFEIITGRDTWVLGNPRIEIGGVDLHSVKADETMKYLGVGYSLWSRINSRKIIADLEEVLQRVERASLKPYQKLRLVNTYLVPHYMYQMVIAMASGNILIEFDDVVRRSIKKMLHLPKSIADGVIYCSNRNGGLGCQRLEELVPRLALGAGLRLLNAEDPIIAAINGGAVMKAELKRMACNARIAYSYTKADLLRYKERCKRQEIDNWARLTAQGRAVKSKINDKIGNSFLKDPTLLKPCRFITALQLRTYTGGDRSSLHRAIPQEDLLCRKCRASRETLAHILGQCTYTKAPRIRRHNDIRDLIEGRILSAGKGAVVTKEPEVESPNGGKLKPDLVVKSQGRVFVVDVTVRHENGDYLQKVRADKIEKYSPLLPKLTVEFGTQYPGPVLPVVVGTRGAMPLPTIECLRKLELADPALLKTISMIALRSSIEIYHAFLDYDGGLL

SEQ ID NO: 8037 - protein, 1231 aa, Timema shepardi
MGPASPCLLIIAPDDILEASDLVVQGPARQELQGAIVDGLAMDLRIKIMVPFSPKHCEVCSGLPGGRGVYRALTLRDCLNHYNDRHADREVMLMCKKCDKIYKNKHGILCHVVKCPGRKPEGKFKCVRCGENFASKMGLSQHERCRHPIARNEMRLAQAAVARREVPLPGGSGKVFSEEEIKIMVGLELSLRGERRIGARMAEILGNKTTKQVNDKRREASYKRRVATSRCICGDALKCVCNSVRPVDTVESPITRELRRRPARRLNITGEEDEEDEAEEYEEPSTSNAMADGRAASKDKLFECDTTWSSVDDVPLSRLVVRAAGGPTVDEQLVGGQENVTSEGNDFDIVDMGLLEWKDEVRVGVDRLRCDRKWKYAETVNELLVEISRLARTPPLQESLDSLYDKALPMFAPKQAGEENGPRQSRNRNAQRKLKKYRYARTQDLFKKDPGLLAKCLRSNVDYISPRLEEVNRGDIAELYGALWGVSPGVRLVEPEPVRGPMKLADVLCPVTMVEVKDRVRRLKKSSAPGPDGVKPAALVSNSLYNLLAGLYNLVLLWGLVPSKWGDNRTTLILKEGKDPKEATNYRPLTISSVISRVFWGLIDQRLRKVVRLNPRQKGFTLEQGCFNNIRLLVEITRHMKSAGGGVGIQLDIAKAFDTVPHEAIGPALRRHGVPNVIVRLIAVAYANTRTVIRHPKGDVEVLLRRGVKQGDPLSPLLFNMVLDGLIEELEASPGYKVGDVNISCMAFADDLVIFAEDVGKGQTLMDKTIEYLGSLKMRISVPKSSVFGIRVLKDTWGLYNPRIEVQGVDLRCVRADEALRHLGIGFSIWSGIDARVMVENLTEVMGRVEGAPLKPHQKLKLVNTYIVPHYLYQLVVAMPSQNVLKMVDDVVRNSVKRMLHLPSSITNGIIYCSNKNGGLGCQRLAELVPRVALGAGLKLLEADDPLVRRINESMDMVIQLKNMARNIRIAYPYTASDLSRYKERCRRIELNNWAEQLAQGGAVRALENDKVGNAFLKDPTLLRPCRFITALQLRTNTGGNRSSLHRAIPQQDLLCRKCRASKETLAHILGECTYTKAPRIRRHNEIRDLIEDRILREGQDAEVTKEPEVESPNGGKLKPDLVVKCRGRVFVVDVTVRHEDGEYLQRARAEKINKYTPLLPRLSEQFGATCPGAVLPVVVGTRGAMPLPTIESLRKLGIIDPGCLKTMALIALRSSIEMYHAFLDYDGRLF

SEQ ID NO: 8038 - protein, 1189 aa, Timema bartmani
MVPFSPKLCVVCSSLPGERGVYRALTLRDCLNHFGDRHADREVKMVCKTCDKVYAKTNKQGALCHVVKCPGRKPEGAFKCKWCEDSFATRLGLSQHERIRHPSARNDARMAQMTKAKEGVPRPGGPGGFGKVFSEEEIKLMIGLEMELRGERCIAARMAEILGNKTAKQVRDKRREASYKKRVVTSQCICGDPDKCICNSVQPEELIDSPVLRELRRRPVRRLTFSDDELSDTSDDEKLGDSDGMEERGRMSVAPDDKVDDVDSTWNSLDEIPLSQLITRPVVEPVMRQEVEEDLDMGIPVGDGMEDVNLEFIVWENEVRERVKRIRCEKNWKGAEAANGMLERMSRMVEVPPIQESLDELYEEILPLFSPKQTTEDNGPRRGRDRNAQRKMKKYRFARTQDLFKKDPGLLAKCLRTGADYISPRLDEVNREDVAELYDALWGTRPDVRLEEPERVRNPVKMDEILWPVTGDEVKARIRRLKKSSAPGPDGVKPAALIGNSLYFLLAGMYNLILLWGLLPAKWGENRTTLILKEGKEPKDATNYRPITISSVISRVFWGLIDQRLRKVVRLNPRQKGFTIEQGCFNNVRLLVEITRHMKNAGGGVGIQLDVAKAFDTVPHEAIGPALRRHGIPSRMVRLVETAYANTRTMIRHPKGDIEVILKRGVKQGDPLSPLLFNMVLDGLIDALEATPGYSVGNTNVSCMAFADDLFIFADDVAKGQTLMDITVEYLGSLQMRISIPKSSVFGIQALRDTWVLYNPRIEVQGVDLRCVRADETLQYLGVGYSLWSGIDARVMVENLNEVMRRVEAAPLKPNQKLRLVNTYIVPHYLYQMMVAMPSQNILTSADDIIRNAVKRMLHLPGSITNGVIYCSNKNGGLGCQRLAELVPRVALGAGLKLLEADDPVVREINGSMYMADQLRSMARNARIVYPYTDNDLRRYKENCRRRELNNWAEQRAQGRAVRALENDKYGNAFLKDPTLLRPCRFITALQLRTNTGGDRSSLHRAIPQQDLLCRKCRASRETLAHILGECTYTKAPRIRRHNEIRDLIEERILKEGQDVEITKEPEVESPNGGKLKPDLVVKSQGRVLVVDVTVRHEDGEYLQRARAEKIRKYTPLLPKLSEQFGTICPGAVLPVVVGTRGAMPLPTVESLRKLGITDPGCLKTMALIALRSSIEIYHSFLDYDGRLF

SEQ ID NO: 8039 - protein, 1231 aa, Timema californicum
MGPASPCLLIIAPDDILEASDLVVQGPARQELQGAVVDGLAMDLRIKIMVPFSPKHCEVCSGLPGGRGVYRALTLRDCLNHYNDRHADREVMLMCKKCDKIYKNKHGILCHVVKCPGRKPEGKFKCVRCGENFASKMGLSQHERYRHPIARNEMRLAQAAEARGEVPLPSGSGKVFSEEEIKIMVGLELSLRGERRIGARMAEILGNKTTKQVNDKRREASYKRRVATSRCICGDALKCVCNSVRPVDIVESPITRELRRRPARRLNITDEEDEEDEAEEYEEPSTSNAMVDGRAASKDKMFECDTTWSSVDDVPLSRLVVRAAGGPAVDEQLVGGQESVTSEGNDFDIVDMGLLEWKDEVRVGVDRLRCDRKWKFAETVNELLVEISRLARTPPLQEALDSLYDKALPMFAPKQTGEGNGPRQSRNRNAQRKLKKYRYARTQDLFKKDPGLLAKCLRSNVDYISPRLEEVNRGDIAELYGALWGVSPGVRLVEPEPVRGPIKLADVLCPVTMVEVKDRVRRLKKSSAPGPDGVKPAALVSNSLYNLLAGLYNLVLLWGLVPSKWGDNRTTLILKEGKDPKEATNYRPLTISSVISRVFWGLVDQRLRKVVRLNPRQKGFTLEQGCFNNIRLLVEITRHMKSAGGGVGIQLDIAKAFDTVPHEAIGPALRRHGVPNVIVRLIAVAYANTRTVIRHPKGDVEVLLRRGVKQGDPLSPLLFNMVLDGLIEELEASPGYKVGDVNISCMAFADDLVIFAEDVGKGQTLMDKTIEYLGSLKMRISVPKSSVFGIRVLKDTWGLYNPRIEVQGVDLRCVRADEALRYLGIGFSLWSGIDARVMVENLTEVMGRVEGAPLKPHQKLKLVNTYIVPHYLYQLVVAMPSQNVLKMVDDVVRNSVKRMLHLPSSITNGIIYCSNKNGGLGCQRLAELVPRVALGAGLKLLEADDPLVRRINESMDMVVQLKNMAKNIRIVYPYTASDLSRYKERCRRIELNNWAEQKAQGGAVRALENDKVGNAFLKDPTLLRPCRFITALQLRTNTGGNRSSLHRAIPQEDLLCRKCRASRETLAHILGECTYTKAPRIRRHNEIRDLIEDRILREGQDAEVTKEPEVESPNGGKLKPDLVVKSRGRVFVVDVTVRHEDGEYLQRARAEKINKYTPLFPRLSEQFGATCPGAVLPVVVGTRGAMPLPTIESLRKLGIIDPGCLKTMALIALRSSIEMYHAFLDYDGRLF

SEQ ID NO: 8040 - protein, 837 aa, Ophraella communa
MDHLKQKISALSSRIRRYKLRNNRYKENLLFSRNQKSFYRNLKRKPNEVIEKTPPQDLMTKFWKNIWSNSVEYDKTAYWIEQQKSKTIPQMAKVTVNAKDIKTTTGHLKNWSAPGIDGLHNFWWKTFSSTHEILAEQLQDIINNPKLMPEYFTLGTTTMIPKIGDTEDPKNYRPITCLPVIYKILTAIISSKINDHLKTKNILSWEQNGCKQRSRVCKELLVIDSIITRQAKLKKRKLSIAWIDYQKAFDSVPHSWLLDILYIYNIDPNVINLLIHAMRSWRTILKTSSYTTAEIPIRRGIYQGDSLSPLWFCMALNPLSEMLNQSGYGYSLDKNNKLSHLFYMDDLKTYAKNEQQLQGQLELILAFSKAIKMEMGLDKCATLHTDKGKVVKEENITLMDTNIAFPTMGPEDLYKYLGLKQGLTSNDKINKENAKTEFMSRVKTILKTHLNSKNKIMALNTWATPIISYTFGIVHWSTTELQEMDRKVRTTFTLYRMLHPKAAIERIYLPRTKGGRGLTNLQQLYQNETHNLKKYFRSNNSPFYQRLITLDKNLSSLNLAVVETEKENIISKYKSQWQQKALHGRFYNNLNQVECDLNATNTYLTSGYLFPETEGALMAIQDQVVPTRNYKKYILKQHVENSKCRLCGKDEETVEHLISSCSHLAPKDYLSRHNNMGKVVHLAILQEIGLRTDKKPAYQHTPQAVEENESYKVYWDNMVITDKTITNNKPDMIIVNKKEKYAIIIDFAVPLDHNINKAYHEKIEKYVPLADEVKDIWKLKRVEIKPFIISANGIVHNRVVGNLKDIKLPGSLVKPMQKAVILGTTAIIRRTLQNNRS

SEQ ID NO: 8041 - protein, 1101 aa, Ophraella communa
MRWTRQLNIELMSAYYEVTNCEMDKTGYRKKLEEIWNNYHPNQKISAQRLADQVRSVISRKALSEAEIESLKSKVRRKSIRNSIRRSIAQFSVEGPENNMLIQFNQDIQEDKDELEEIEKMFQECHVNYKDIPMESRPKVLKLNLNPEIKAFTHKVNQYLKRIMQSSHSIRDTCHMIYCAAFITCETYAPQQSAGKNLSPDCKPSWEKRLESKISELRKEIGVLHTFLNSNTPSTRVCKLAKKYGKKAKIKSGNPAFVQLLKQHMDHLKQKISALSSRIRRYKLRNNRYKENLLFSRNQKSFYRNLKRKPNEVIEKTPPQDLMTNFWKNIWSNSVEYDKTAYWIEQQKSKTIPQMAKVTVNAKDIKTTTGHLKNWSAPGIDGLHNFWWKTFSSTHEILAEQLQDIINNPKLMPEYFTLGTTTMIPKIGDTEDPKNYRSITCLPVIYKILTAIISSKINDHLKTKNILSWEQNGCKQRSRGCKELLVIDSIITRQAKLKKRKLSIAWIDYQKAFDSVPHSWLLDILYIYNIDPNVINLLKHAMRSWRTILKTSSYTTAEIPIRRGIYQGDSLSPLWFCMALNPLSEMLNQSGYGYSLDKNNKLSHLFYMDDLKTYAKNEQQLQGQLELILAFSKAIKMEMGLDKCATLHTDKGKVVKEENITLMDTNIAFPTMGPEDLYKYLGLKQGLTSNDKINKENAKTEFMSRVKTILKTHLNSKNKIMALNTWATPIISCTFGIVHWSTTELQEMDRKVRTTFTLYRMLHPKAAIERIYLPRTEGGRGLTNLQQLYQNETHNLKKYFRSNNSPFYQRLITLDKNLSPLNLAVVEPEKENIISKYKSQWQQKALHGRFYNNLNQVECDLNATNTYLTSGYLFPETEGALMAIQDQVVPTRNYKKYILKQHVENSKCRLCGKDEETVEHLISSCSHLAPKDYLSRHNNMGKVVHLAILQEIGLRTDKKPAYQHTPQAVEENESYKVYWDNMVITDKTITNNKPDMIIVNKKEKYAIIIDFAVPLDHNINKAYHEKIEKYVPLADEIKDIWKLKRVEIKPFIISANGIVHNRVVGNLNDIKLPGSLVKPMQKAVILATTAIIRRTLQNNRS

SEQ ID NO: 8042 - protein, 1191 aa, Clytia hemisphaerica
MHKCRNHEKSPVRKDPQSDQPGAPKTVLFRTTSEVGEGVPNSGGRGLVQGKELSKRGDRTGKNKTKWTKEERCLVWECFVRSGGKGSYGYIKRLMEFWEERALSKRSQASVLAQIKSIEKGGLLSEYEKGEIERLVRSEGEPAGQDNSVNNVYNETTQDDDLAVDDVDIDFTVFSKSSQCHSVESFVGKESDIGDDFWDHEDDFEPEVQVERLNVFEKGDVVRITNEEENKIIFRIHQILNSNECREIPSLKNIDKCLVMKEVSIVNSLLRNFVAIGIPDITKANRLLYAGSYIVCERLGLLKEKGEKLKSKKPWWQRRLEGSIQQWRKDLGRVNEIKNGKTLKRKTLDELERRYQITERGTRAVTVFLETKVKAASNKIKFFVERNLTNRHNTLYKNNQSYLYKELSGSKKFDKAPKEDEAREFWSNIWSMEGDFNEKAGWLEDVSEKFDRVEGQGDVVITSSDVKKGISRMANWKAPGPDGVRGFWFKKLTALHPFLCESLDFCLVDGNVPDWMVKGRTVLIQKDPSKGTVAGNYRPIACLPLMWKLLTGIFATKIYEHLQSNGLLPEEQKGCRKNSRGTKDQLLIDKAVLKQAKIMKHSLSMAWVDYRKAYDLVPHSWLLKIMDLSKIAGNLRELISNSMGSWNTDLSCAGKSLCNVQIKRGIFQGDSLSPLLFVMAMIPLSFLLNKEKLGYHFKASSEKVNHLFFMDDLKLYAKSERELNELMMIVSEYSRDIGMEFGFDKCAMLVLKKGVKVKSEGIVLPSGEVIKEVERSGYKYLGILQESDVKHSQMKEMIKSEYLRRVKLLARSKLYARNLFPAINAWAVSVVRYTAGILAWRQKELKDLDVKTRKVLTMNNVFHKKGSVCRLYLKRSQGGRGLISVEDCVNIEALSLGKYMLKSEEKLVSAAQIVLEVDEDGESGLEYKDRVKLERIKNLQGKEMHGKWFRENEGAHPSSFRWMSSGYVDSRTEGFVFASQEQAVQTNWLSSRISGGDLDNRCRVCKKFPETVAHVASGCTVLAQKDYKKRHDRMGLRVYWDLCKKYGMKHSVRWYEETPEDVRVSSCGKFEIWWDKSVNTSKRLDHNRPDLIVIDKVNKHWTIIDFSVPNDKNVRAKEDEKVANYSELAKEIRKIHHVKTKIVPIVIGSLGVVSDRIEKNLKYLEISHCFLCLQVTAVLGTTIILRNTLNL

SEQ ID NO: 8043 - protein, 986 aa, Thalassophryne amazonica
MLQKVNLGLTKLVPQGTTLSEINCVNYGAAWYIQSKLVPHYSDRTIKIRKRNSVPRWKKTLQQKISRLRAEISQMSIFLGGQSQKRNLLRKIYRIKRKYNIEDKQLAARLAEHQAIVKALAAQIRNKDKKIKAKQINKQFANNPRLVYRNMVNDTVEVQQPPEREEVERFWRPLFEDSKQHQEAEWIEIIKRKNKDKQQMPAMIITEELIRNKIHEYSNFKAPGIDKVPNFWLKRLTALHHHYAAAFTKILNGKEDTPDWLSTGNTTLLPKTKETQLPNKYRPICCLTTTYKWLTGIIADAVYEHLDTGGYLENGQKGCLRKRLGAKDQLLIDNAILEDCKRRRRNLSMAWIDYKKAFDKIPHSWIMRCLELYNINKEVRSLLKTQMNKWNTTITLNHAEGQIIIPDIKVTRGIFQGDSLSPLLFCLSIDPLSKILKELDIGYDLDGGRGRKHKQVVSHLLFMDDLKIFADSERGLRRLVEAVHTFSKEIGMEFGLDKCSKCTIRGGKKQVTENIQLDEGNVIEDLAEDSTYKYLGIEENTIIEHKKMREKVTQEYLNRLKKICKSELIPKNKITAINQFALPVLSYGFGIVDWPQGELNKLDTKTRKMLTLHKITYRNQCMDRIYLPRREGGLGLVEINQAYRASIISIGQYLKSSQEEVMKKVMQHHIKTMPQQTSIIKLAENFGGDLLRERESNELTPATTLARQAREKYSKREQKHRMNRWKQHKRAGRFQEELEKEYIDKEGSVRWLTNGELGFDGERIIVGAQDQGLLTNGFKKMAGISQNDQCRFCHAAVESVNHLVSACQILMADGHYTSRHNKICKYLHWKVCKELEVEVEGHVWEYEPAPVSSNGKVIVFYDKEIPAGRHIERGAVKPDIVIWNKQEKTAKIIDVTVPNDYGLNRAEREKITKYQDLKNDLRITWSLKEIDIIPVVVGATGLMKKNLKKYLEAIPGHPSAHEVQISAVKGTVTILKRALGYNANND

SEQ ID NO: 8044 - protein, 986 aa, Thalassophryne amazonica
MLQKVNLGLTKLVPQGTTLSEINCVNYGAAWYIQSKLVPHYSDRTIKIRKRNSVPRWKKTLQQKISRLRAEISQMSIFLGGQSHKRNLLRKVYRIKRKYNIEDKQLAARLAEHQAIVKALAAQIRNKDKKIKAKQINKQFANNPRLVYRNMVNDTVEVQQPPEREEVERFWRPLFEDSKQHQEAEWIEIIKRKNKDKQQMPAMIITEELIRNKIHEYSNFKAPGIDKVPNFWLKRLTALHHHYAAAFTKILNGKEDTPDWLSTGNTTLLPKTKETQLPNKYRPICCLTTTYKWLTGIIADAVYEHLDTGGYLENEQKGCLRKRLGAKDQLLIDNAILEDCKRRRRNLSMAWIDYKKAFDKVPHSWIMRCLELYNINKEVRSLLKTQMNKWNTTITLNHAEGQIIIPDIKVTRGIFQGDSLSPLLFCLSIDPLSKILKELDIGYDLDGGRGRKHKQVVSHLLFMDDLKIFADSERGLRRLVEAVHTFSKEIGMEFGLDKCSKCTIRGGKKQVTENIQLDEGNVIEDLAEDSTYKYLGIEENTTIEDKKMREKVTQEYLNHLKKICKSELTPKNKITAINQFALPVLSYGFGIVDWPQGELNKLDTKTRKMLTLHKITYRNQCMDRIYLPRREGGLGLVEINQAYRASIISIGQYLKSSQEEVMKKVMQHHIKTMPQQTSIIKLAENFGGDLLRERESNELTPATTLARQAREKYSKREQKHRMNRWKQHKRAGRFQEELEKEYIDKEGSVRWLTNGELGFDGERIIVGAQDQGLLTNGFKKMAGISQNDQCRFCHAAVESVNHLVSACQILMADGHYTSRHNKICKYLHWKVCKELEVEVEGHVWEYEPAPVSSNGKVIVFYDKEIPAGRHIERSAVKPDIVIWNKQEKTAKIIDVTVPNDYGLNRAEREKITKYQDLKNDLRITWSLKEIDIIPVVVGATGLMKKNLKKYLEAIPGHPSAHEVQISAVKGTVTILKRALGYNASND

SEQ ID NO: 8045 - protein, 1141 aa, Thalassophryne amazonica
MNKSLPPQKTSNSLPPEKTNHSPPPEKPNHLLPPKKPNNSMPPEKPNNSMPPEKPNNSMPPEKTNNSMPPEKTNNSMPPEKTNHSLPPEKMSNSLPTEKTNNSPAHLQNNSQVHTDPEQQELEEELANKIEETRKMDMKERPKLTKLKENKKFKNILQKVNIGLTKLVPRGATLTELNSVNYGAAWYIQSKLAPQDLERNSTTNKKKNIMPRWKKKLQQKISCLRAEISQMATFLGNKNHKKNLLKKINRIKRKYNVEDKLLGGRLAEHQALVKAFAAQIRNKDKKIQAKQINKLFATNPRLVYRKLANDTIEVQQPPERKEIEKFWRPLFEDPKQHQEAEWIEKIQQKNKDKQQMPAIVINEEEIRKKMSEYSNFKAPGIDKIPNFWLKRLTALHQHYAVAFTKILNGEEDTPDWLTTGNTSLIPKTKETQLPNKYRPICCLTTTYKWLTGIIADAIYEHLDNGGYLENEQKGCSKRRLGAKDQLLTDKAILEDCKTRQRNLSMAFIDYKKAFDSVPHSWVLRCLELYNINEKIRTFLKAQMNNWNTTITLSHTEGQITIPDVRVQRGILQGDSLSPLLFCLIMDPLSKILKEQDIGYDLSKDKGKENQKLVNHLLFMDDLKIYANTKNGLTQLVETAHKFSKDIGMEFGLDKCSKCTMTKGKKTKTENIQLDEGSYIADLAADSTYKYLGIEQSNSIEHKKMRTKTTKEYLNRLKKICKTQLTPKNKITAINQFAIPVVTYGFGIVNWPQYELNKLDTKTRKMLTLHKITYRNQCMDRIYLPRREGGMGLTEINQAYRASIISIGQYLKSSEEEIIKTVTQHHEAISERTSITKLAKNFGGELLQERKSNSLTPATKLARQTREQYCKKEGKHRVERWKQHKRAGRFQEELEKEYIDKVGSMQWLKNGKLGFDGERILIGAQDQGLLTNGFKKMAGISQNDKCRFCHTAVESVNHLTSACQILMADGHYTSRHNKICQYLHWKICKELELEVKEHVWEHEPTPVSSNGKITIFYDKEIPAGRHIEGGAIKPDIVIWNKQEKTAKIIDVTVPNDYGLNRAERGKISKYQDLKNDLRTTWSLKDIDIIPVVVGATGLMKKNLKKYLEAIPGHPSAHEVQLSAIKGTITILKRALGYNARSG

SEQ ID NO: 8046 - protein, 1438 aa, Thalassophryne amazonica
MERTMEDHNQPATQVQTVIYNQIPVAGVQTVLELNRRTLSWIIHQISIVLILDSSNNSINGPKETSETTPQLIGPLKRKKKIFHCFTYSRHEKWGRKKKAVFEERIKEADLPTQKKEATTTAKLESIASQIAKYLTTEEIKKIKEEAQKEAIKDYQLLDKGKQLQFKRSQWKREEEWILLWAKEYAKIKYPKNQTKTSKEWQKIFHHHCPSKKDITCKNLTTQKSNFIKQKHFSDNEIKTMQQEVEKMIREGICPLTQPITPPKNDCPQKKFIPEKTNHPLPPEKPNHLLPPEKMNKSLPPKKTSNSLPPEKTNHSPPPEKPNHLLPPKKPNNSMPPEKTNNSMPPEKTNNSMPPEKTNNSLPPEKTNNSLPPEKTNHSLPHEKPNHLLPPGKMNNSLPTEKTNNSPAHLQNNSQVHTDPEQQELEEELANKIEETRKMDMKERPKLTKLKENKKFKNILQKVNIGLTKLVPRGATLTELNSVNYGAAWYIQSKLAPQDLERNSTTNKTKNIMPQQKISCLRAEISQMATFLGNKNHKKNLLKKINRIKRKYNVEDKLLGGRLAEHQALVKAFAAQIRNKDKKIQAKQINKLFATNPRLVYRKLANDTIEVQQPPERKEIEKFWRPLFEDPKQHQEAEWIEKIQQKNKDKQQMPAIVINEEEIRKKMSEYSNFKAPGIDKIPNFWLKRLTALHQHYAVAFTKILNGEEDTPDWLTTGNTSLIPKTKEIQLPNKYRPICCLTTTYKWLTGIIADAIYEHLDNGGYLENEQKGCSKRRLGAKDQLLTDKAILEDCKTRQRNLSMAWIDYKKAFDSVPHSWILRCLELYNINEKIRTFLKAQMNKWNTTITLNHTEGQITIPDVRVQRGILQGDSLSPLLFCLIMDPLSKILKEQDIGYDLSKDKGKENQKLVNHLLFMDDLKIYANTKNGLTQLVETAHKFSKDIGMEFGLDKCSKCTMTKGKKTKTENIQLDEGSYIADLAADSTYKYLGIEQSNSIEHKKMRTKTTKEYLNRLKKICKTQLTPKNKITAINQFAIPVVTYGFGIVNWPQCELNKLDTKTRKMLTLHKITYRNQCMDRIYLPRREGGMGLTEINQAYRASIISIGQYLKSSEEEIIKTVTQHHEAISERTSITKLAKNFGGELLQERKSNSLTPATKLARQTREQYCKKEGKHRVERWKQHKRAGRFQEELEKEYIDKVGSMQWLKNGKLGFDGERILIGAQDQGLLTNGFKKMAGISQNDKCRFCHTAVESVNHLTSACQILMADGHYTSRHNKICQYLHWKICKELEMEVKEHVWEHEPTPVSSNGKITIFYDKEIPAGRHIEGGAIKPDIVIWNKQEKTAKIIDVTVPNDYGLNRAERGKISKYQDLKNDLRTTWSLKDIDIIPVVVGATGLMKKNLKKYLEAIPGHPSAHEVQLSAIKGTITILKRALGYNARSD

SEQ ID NO: 8047 - protein, 929 aa, Thalassophryne amazonica
MEKEITTKNQLPKSRDLPNGHIFGKQEPQKESSKKINRIKRKYNVEDKLLGGRLAEHQALVKAFAAQIRNKDKKIQAKQINKLFATNPRLVYRKLANDTIEVQQPPERKEIEKFWRPLFEDPKQHQEAEWIEKIQQKNKDKQQMPAIVINEEEIRKKMSEYSNFKAPGIDKIPNFWLKRLTALHQHYAVAFTKILNGEEDTPDWLTTGNTSLIPKTKETQLPNKYRPICCLTTTYKWLTGIIADAIYEHLDNGGYLENEQKGCSKRRLGAKDQLLTDKAILEDCKTRQRNLSMAWIDYKKAFDSVPHSWILRCLELYNINEKIRTFLKAQMNNWNTTITLNHTEGQITIPDVRVQRGILQGDSLSPLLFCLIMDPLSKILKEQDIGYDLSKDKGKENQKLVNHLLFMDDLKIYANTKNGLTQLVETAHKFSKDIGMEFGLDKCSKCTMTKGKKTKTENIQLDEGSYIADLAADSTYKYLGIEQSNSIEHKKMRTKTTKEYLNRLKKICKTQLTPKNKITAINQFAIPVVTYGFGIVNWPQYELNKLDTKTRKMLTLHKITYRNQCMDRIYLPRREGGMGLTEINQAYRASIISIGQYLKSSEEEIIKTVTQHHEAISERTSITKLAKNFGGELLQERKSNSLTPATKLARQTREQYCKKEGKHRVERWKQHKRAGRFQEELEKEYIDKVGSMQWLKNGKLGFDGERILIGAQDQGLLTNGFKKMAGISQNDKCRFCHTAVESVNHLTSACQILMADGHYTSRHNKICQYLHWKICKELELEVKEHVWEHEPTPVSSNGKITIFYDKEIPAGRHIEGGAIKPDIVIWNKQEKTAKIIDVTVPNDYGLNRAERGKISKYQDLKNDLRTTWSLKDIDIIPVVVGATGLMKKNLKKYLEAIPGHPSAHEVQLSAIKGTITILKRALGYNARSG

SEQ ID NO: 8048 - protein, 1757 aa, Thalassophryne amazonica
MMMKNQSSQLHQSRSDESTEPEPVASNSSVHRTRTAEADGEDDGRPQPASNSGPNSHLQPDTSGRSSDSSGTETDDSEDWKETTKLQSRFNCRKNTNIVHSGNTDEKQFKGSKYGKASGHMNNSEQQKERQARRKPFSCSDQSKTQKQKGTLNKHVRIQTGQKTFVCSECGKGFGHKSHLNRHMIIHTGQKSFVCSECGKRFGQNSHLNEHMRIHTGQKPFDCSECGQRFRQKSHLSRHMIIHRTLTAEADGEDDGGPQPASNSGPNSHLQPDTSGRSSDSSGTKQKNTQLDNPPDQHSSDPGLQQQQHQWAKRNKRNYTTVNWTIEEKKKIFHCFTYSRHEKWGRKKKAVFEERIKEADLPTQKKEATTTAKLESIASQIAKYLTTEEIKKIKEEAQKEAIKDYQLLDKGKQLQFKRSQWKREEEWILLWAKEYAKIKYPKNQTKTSKEWQKIFHHHCPSKKDITCKNLTTQKSNFIKQKHFSDNEIKTMQQEVEKMIREDICPLTQPITPPKNDCPQKKFIPEKTNHPLPPEKQNHLLPPEKMNKSLPPQKTSNSLPPEKTNHSPPPEKPNHLLPPKKPNNSMPPEKPNNSMPPEKPNNSMPPEKTNNSMPPEKTNNSMPPEKTNNSMHPEKPNNSLPPEKPNHSLPPEKPNHSLPPEKTNNSLPPEKPNHSLPPEKPNHSLPHEKPNHLLPPKKMNNSLPPKKMSNSLPTEKANNSPAHLQNNSQVHTDPEQQELEEELANKIEETRKMDMKERPKLTKLKENKKFKNILQKVNIGLTKLVPRGATLTELNSVNYGAAWYIQSKLAPQDLERNSTTNKKKNIMPRWKKKLQQKISCLRAEISQMATFLGNKNHKKNLLKKINRIKRKYNVEDKLLGGRLAEHQALVKAFAAQIRNKDKKIQAKQINKLFATNPRLVYRKLANDTIEVQQPPERKEIEKFWRPLFEDPKQHQEAEWIEKIQQKNKDKQQMPAIVINEEEIRKKMSEYSNFKAPGIDKIPNFWLKRLTALHQHYAVAFTKILNGEEDTPDWLTTGNTSLIPKTKETQLPNKYRPICCLTTTYKWLTGIIADAIYEHLDNGGYLENEQKGCSKRRLGAKDQLLTDKAILEDCKTRQRNLSMAWIDYKKAFDSVPHSWILRCLELYNINEKIRTFLKAQMNNWNTTITLNHTEGQITIPDVRVQRGILQGDSLSPLLFCLIMDPLSKILKEQDIGYDLSKDKGKENQKLVNHLLFMDDLKIYANTKKGLTQLVETAHKFSKDIGMEFGLDKCSKCTMTKGKKTKTENIQLDEGSYIADLAADSTYKYLGIEQSNSIEHKKMRTKTTKEYLNRLKKICKTQLTPKNKITAINQFAIPVVTYGFGIVNWPQYELNKLDTKTRKMLTLHKITYRNQCMDRIYLPRREGGMGLTEINQAYRASIISIGQYLKSSEEEIIKTVTQHHEAISERTSITKLAKNFGGELLQERKSNSLTPATKLARQTREQYCKKEGKHRVERWKQHKRAGRFQEELEKEYIDKVGSMQWLKNGKLGFDGERILIGAQDQGLLTNGFKKMAGISQNDKCRFCHTAVESVNHLTSACQILMADGHYTSRHNKICQYLHWKICKELELEVKEHVWEHEPTPVSSNGKITIFYDKEIPAGRHIEGGAIKPDIVIWNKQEKTAKIIDVTVPNDYGLNRAERGKISKYQDLKNDLRTTWSLKDIDIIPVVVGATGLMKKNLKKYLEAIPGHPSAHEVQLSAIKGTITILKRALGYNARSG

SEQ ID NO: 8049 - protein, 1222 aa, Thalassophryne amazonica
MNKSLPPQKTSNSLPPEKTNHSPPPEKPNHLLPPKKPNNSMPPEKPNNSMPPEKPNNSMPPEKPNNSMPPEKPNNSMPPEKPNNSMHPEKPNNSLPPEKPNHSLPHEKLNHSLPHEKPNHSLPHEKPNHSLPPEKPNHSLPPEKPNHSLPHEKPNHLLPPEKMNNSLPPEKMSNSLPTEKANNSTAHLQNNSQVHTDPEQQELEEELANKIEETRKMDMKERPKLTKLKENKKFKNILQKVNIGLTKLVPRGATLTELNSVNYGAAWYIQSKLAPQDLERNSTTNKKKNIMPRWKKKLQQKISCLRAEISQMATFLGNKNHKKNLLKKINRIKRKYNVEDKLLGGRLAEHQALVKAFAAQIRNKDKKIQAKQINKLFATNPRLVYRKLANDTIEVQQPPERKEIEKFWRPLFEDPKQHQEAEWIEKIQQKNKDKQQMPAIVINEEEIRKKMSEYSNFKAPSIDKIPNFWLKRLTALHQHYAVAFTKILNGEEDTPDWLTTGNTSLIPKTKETQLPNKYRPICCLTTTYKWLTGIIADAIYEHLDNGGYLENEQKGCSKRRLGAKDQLLTDKAILEDCKTRQRNLSMAWIDYKKAFDSVPHSWILRCLELYNINEKIRTFLKAQMNNWNTTITLNHTEGQITIPDVRVQRGILQGDSLSPLLFCLIMDPLSKILKEQDIGYDLSKDKGKENQKLVNHLLFMDDLKIYANTKNGLTQLVETAHKFSKDIGMEFGLDKCSKCTMTKGKKTKTENIQLDEGSYIADLAADSTYEYLGIEQSNSIEHKKMRTKTTKEYLNRLKKICKTQLTPKNKITAINQFAIPVVTYGFGIVNWPQYELNKLDTKTRKMLTLHKITYRNQCMDRIYLPRREGGMGLTEINQAYRALIISIGQYLKSSEEEIIKTVTQHHKAISERTSITKLAKNFGGELLQERKSNSLTPATKLARQTREQYCKKEGKHRVERWKQHKRAGRFQEELEKEYIDKVGSMQWLKNGKLGFDGERILIGAQDQGLLTNGFKKMAGISQNDKCRFCHTAVESVNHLTSACQILMADGHYTSRHNKICQYLHWKICKELELEVKEHVWEHEPTPVSSNGKITIFYDKEIPAGRHIEGGAIKPDIVIWNKQEKTAKIIDVTVPNDYGLNRAERGKISKYQDLKNDLRTTWSLKDIDIIPVVVGATGLMKKNLKKYLEAIPGHPSAHEVQLSAIKGTITILKRALGYNARSG

SEQ ID NO: 8050 - protein, 1276 aa, Thalassophryne amazonica
MQQEVEKMIREGICPLTQPITPPKNDCPQKKFIPEKTNHPLPPEKPNHLLPPEKMNKSLPPQKTSNSLPPEKTNHSPPPEKPNHLLPPKKPNNSMPPEKPNNSMPPEKPNNSMPPEKTNNSMNPEKTNNSMPPEKTNNSMPPEKTNNSMHPEKPNNSLPPEKLNHSLPHEKLNHSLPHEKTNNSLPPEKPNHSLPPEKPNHSLPHEKPNHLLPPEKMNNSLPPEKMSNSLPTEKANNSPAHLQNNSQVHTDPEQQELEEELANKIEETRKMDMKERPKLTKLKENKKFKNILQKVNIGLTKLVPRGATLTELNSVNYGAAWYIQSKLAPQDLERNSTTNKKKNIMPRWKKKLQQKISCLRAEISQMATFLGNKNHKKNLLKKINRIKRKYNVEDKLLGGRLAEHQALVKAFAAQIRNKDKKIQAKQINKLFATNPRLVYRKLANDTIEVQQPPERKEIEKFWRPLFEDPKQHQEAEWIEKIQQKNKDKQQMPAIVINEEEIRKKMSEYSNFKAPGIDKIPNFWLKRLTALHQHYAVAFTKILNGEEDTPDWLTTGNTSLIPKTKETQLPNKYRPICCLTTTYKWLTGIIADAIYEHLDNGGYLENEQKGCSKRRLGAKDQLLTDKAILEDCKTRQMNLSMAWIDYKKAFDSVPHSWILRCLELYNINEKIRTFLKAQMNNWNTTITLNHTEGQITIPDVRVQRGILQGDSLSPLLFCLIMDPLSKILKEQDIGYDLSKDKGKENQKLLNHLLFMDDLKIYANTKNGLTQLVETAHKFSKDIGMEFGLDKCSKCTMTKGKKTKTENIQLDEGSYIADLAADSTYKYLGIEQSNSIEHKKMRTKTTKEYLNRLKKICKTQLTPKNKITAINQFAIPVVTYGFGIVNWPQYELNKLDTKTRKMLTLHKITYRNQCMDRIYLPRREGGMGLTEINQAYRASIISIGQYLKSSEEEILKTVTQHHEAISERTSITKLAKNFGGELLQERKSNSLTPATKLARQTREQYCKKEGKHRVERWKQHKRAGRFQEELEKEYIDKVGSMQWLKNGKLGFDGERILIGAQDQGLLTNGFKKMAGISQNDKCRFCHTAVESVNHLTSACQILMADGHYTSRHNKICQYLHWKICKELELEVKEHVWEHEPTPVSSNGKIMIFYDKEIPAGRHIEGGAIKPDIVIWNKQEKTAKIIDVTVPNDYGLNRAERGKISKYQDLKNDLRTTWSLKDIDIIPVVVGATGLMKKNLKKYLEAIPGHPSAHEVQLSAIKGTITILKRALGYNARSG

SEQ ID NO: 8051 - protein, 1682 aa, Thalassophryne amazonica
MSKAQQLRDRLKQQLTAAAEEIFELLEGLIADYEEEIHRLKEENKGRKVLEAVFNPQVRLYKADMQPLLVMKEETLPEHQEWNLSVDQEDIKEEEKLCISQQGEKLQQLEEADLTKFGFTAVPVKSENYDEKPELSQLHQSRSDESTEAESVASNSTVHRTLRAEADGENNGGPQPASNSGPNSHLQPDTSGRSSDSSGTKQKNTQLDNPPDQHSSDPGLQQQQHQWAKRNKRNYTTVNWTIEEKKKIFHCFTYSRHEKWGRKKKTVFEERIKEADLPTQKKEATTTAKLESIASQIAKYLTTEEIKKIKEEAQKEAIKDYQLLDKGKQLQFKRSQWKREEEWILLWAKEYAKIKYPKNQTKTSKEWQKIFHHHCPSKKDITCKNLTTQKSNFIKQKHFSDNEIKTMQQEVEKMIREGICPLTQPITPPKNDCPQKKFIPEKTNHPLPPEKPNHLLPPEKMNKSLPPQKTSNSLPPEKTNHSPPPEKPNHLLPPKKPNNSMPPEKPNHLLPPKKPNNSMPPEKPNNSMPPEKPNNSMPPEKPNNSMPPEKPNNSMHPEKPNNSLPPEKPNHSLPPEKPNHSLPHEKPNNSLPPEKPNHSLPPEKPNHSLPHEKPNHLLPPEKMNNSLPPEKMSNSLPTEKANNSPAHLQNNSQVHTDPEQQELEEELANKIEETRKMDMKERPKLTKLKENKKFKNILQKVNIGLTKLVPRGATLTELNSVNYGAAWYIQSKLAPQDLERNSTTNKKKNTMPRWKKKLQQKISCLRAEISQMATFLGNKNHKKNLLKKINRIKRKYNVEDKLLGGRLAEHQALVKAFAAQIRNKDKKIQAKQINKLFATNPRLVYRKLANDTIEVQQPPERKEIEKFWRPLFEDPKQHQEAEWIEKIQQKNKDKQQMPAIVINEEEIRKKMSEYSNFKAPGIDKIPNFWLKRLTALHQHYAVAFTKILNGEEDTPDWLTTGNTSLIPKTKETQLPNKYRPICCLTTTYKWLTGIIADAIYEHLDNGGYLENEQKGCSKRRLGAKDQLLTDKAILEDCKTRQRNLSMAWIDYKKAFDSVPHSWILRCLELYNINEKIRTFLKAQMNNWNTTITLNHTEGQITIPDVRVQRGILQGDSLSPLLFCLIMDPLSKILKEQDIGYDLSKDKEKENQKLVNHLLFMDDLKIYANTKNGLTQLVETAHKFSKDIGMEFGLDKCSKCTMTKGKKTKNENIQLDEGSYIADLAADSTYKYLGIEQSNSIEHKKMRTKTTKEYLNRLKKICKTQLTPKNKITAINQFAIPVVTYGFGIVNWPQYELNKLDTKTRKMLTLHKITYRNQCMDRIYLPRREGGMGLTEINQAYRASIISIGQYLKSSEEEIIKTVTQHHEAISERTSITKLAKNFGGELLQERKSNSLTPATKLARQTREQYCKKEGKHRVERWKQHKRAGRFQEELEKEYIDKVGSMQWLKNGKLGFDGERILIGAQDQGLLTNGFKKMAGISQNDKCRFCHTAVESVNHLTSACQILMADGHYTSRHNKICQYLHWKICKELELEVKEHVWEHEPTPVSSNGKITIFYDKEIPAGRHIEGGAIKPDIVIWNKQEKTAKIIDVTVPNDYGLNRAERGKISKYQDLKNDLRTTWSLKDIDIIPVVVGTTGLMKKNLKKYLEAIPGHPSAHEVQLSAIKGTITILKRALGYNARSG

SEQ ID NO: 8052 - protein, 949 aa, Thalassophryne amazonica
MWLQIWTKGPPEKTHDNSHRTKNQKIKKKISCLRAEISQMATFLGNKNHKKNLLKKINRIKRKYNVEDKLLGGRLAEHQALVKAFAAQIRNKDKKIQAKQINKLFATNPRLVYRKLANDTIEVQQPPERKEIEKFWRPLFEDPKQHQEAEWIEKIQQKNKDKQQMPAIGNEEEIRKKMSEYSNFKAPGIDKIPNFWLKRLTALHQHYAVAFTKILNGEEDTPDWLTTGNTSLIPKTKEIQLPNKYRPICCLTTTYKWLTGILADAIYEHLDNGGYLENEQKGCSKRRLGAKDQLLTDKAILEDCKTRQRNLSMAWIDYKKAFDSVPHSWILRCLELYNINEKIRTFLKAQMNKWNTTITLNHTEGQITIPDVRVQRGILQGDSLSPLLFCLIMDPLSKILKEQDIGYDLSKDKGKENQKLVNHLLFMDDLKIYANTKNGLTQLVETAHKFSKDIGMEFGLDKCSKCTMTKGKKTKTENIQLDEGSYIADLAADSTYKYLGIEQSNSIEHKKMRTKTTKEYLNRLKKICKTQLTPKNKITAINQFAIPVVTYGFGIVNWPQCKLNKLDTKTRKMLTLHKITYRNQCMDRIYLPRREGGMGLTEINQAYRASIISIGQYLKSSEEEIIKTVTQHHEAISERTSITKLAKNFGGELLQERKSNSLTPATKLARQTREQYCKKEGKHRVERRKQHKRAGRFQEELEKEYIDKVGSMQWLKNGKLGFDGERILIGAQDQGLLTNGFKKMAGISQNDKCRFCHTAVESVNHLTSACQILMADGHYTSRHNKICQYLHWKICKELELEVKEHVWEHEPTPVSSNGKITIFYDKEIPAGRHIEGGAIKPDIVIWNKQEKTAKIIDVTVPNDYGLNRAERGKISKYQDLKNDLRTTWSLKDIDIIPVVVGATGLMKKNLKKYLEAIPGHPSAHEVQLSAIKGTITILKRALGYNARSG

SEQ ID NO: 8053 - protein, 1142 aa, Thalassophryne amazonica
MIREGICPLTQPITPPKNDCPQKKFIPEKTNHLLPPEKPNHLLPPEKMNKLLPPKKTSNSLPPEKTNHSLPPEKTNHSLPPEKPNYLLPPEKTNNSMPPEKTNNSMPPEKPNNSLPPEKTNNSLPPEKPNHSLPHEKPNHSLPHEKPNHSLPPEKTNNSLPPEKPNHSLPHEKLNHLLPPEKMNNSPAHLQNNSQVHTDPEQQELEEELANKMEETRKMDMKEHPKLTKLKENKKFKNILQKVNIGLTKLVPRGATLTELNSVNYGAAWYIQSKLAPQDLERNRTTNKKKNTMPRWKKKLQQKISCLRAEISQMATFLGNKNHKKNHLKKINRIKRKYNVEYKLIGGRLAEHQALVKAFTAQIRNKDKKIQAKQINKLFAKNPRLVYRKLAKDTIEVQQPPEREEIEKFWRPLFEDPKQHQEAEWTEKIQQKNKDKQQMPAIVINEEEIRKKMSEYSNFKAPGIDKIPNFWLKRLTALHQHYAVAFTKILNGEEDTPDWITTGNTSLLPKTKETQLPNKYRPICCLTTTYKWLTGIIADAIYEHLDNDGYLENEQKGCSKRRLGAKDQLLTDKAILEDCKTRQRNLSMAWIDYKKAFDSVPHSWIMRCLELYNINEEIRTFLKAQMNKWNTTITLNHTEGQITVPDVRVQRGILQGDRLSPLLFCLIMDPLSKILKEQDIGYDLSKDKGKENQKLVNHLLFMDDLKIYANTKNGLRQLLETVHKFSKDIGMEFGLDKCSKCTMTKGKKTKTENIQLDEGSYIADLAADSTYKYLGIEQSNSIEHKKMRTRTTKEYLNRLKKICKTQLTPKNKITAINQFAIPVVTYGFGIVNWPQYELNKLDTKTRKMLTLHKITYRNQCMDRIYLPRREGSMGLTEINQAYRASIISIGQYLKSSEEEIIKTVTQHHEAITERTSITKLAKNFGGELLQERKSNSLMPATKLARQTREQYSKREGKHRVERWKQHKRAGRFQEELEKEYIDKVGSMQWLKNGKLGFDGERILIGAQDQGLLTNGFKKMAGISQNDKCRFCHTAVESVNHLTAACQILMADGHYTSRHNKICQYLHWKICKELELEVKEHVWEHEPTPVSSNGRVTIFYDKEIPAGRHIGGGVIKPDIVIWNKQEKTAKIIDVTVPNDYGLN

SEQ ID NO: 8054 - protein, 1158 aa, Thalassophryne amazonica
MNKSLPPKKTSNSLPPEKPNHLLPHEKPNHLLPHEKPNHLLPHEKPNHLLPHEKPNHLLPHEKPNHLLPPEKPNHLLPPKKPNNSMPPEKTNNSMPPEKTNNSMPHEKPNHSLPHEKMNNSLPPKKTSNSLPTEKTNNSPAHLQNNSQVHTDPEQQELEEELANKIEETRKMDMKERPKLTKLKENKKFKNILQKVNIGLTKLVPRGATLTELNSVNYEAACYIQSMPRWKKKLQQKISCLRAEISQMATFLGNKNHKKNLLKKINRIKRKYNVEDKLLGGRLAEHQALVKAFAAQIRNKDKKIQAKQINKLFATNPRLVYRKLANDTIEVQQPLERKEIEKFWRPLFEDPKQHQEAEWIEKIQQKNKDKQQMPAIVINEEEIRKKMSEYSNFKAPGIDKIPNFWLKRLTALHQHYAVAFTKILNGEEDTPDWLTTGNTSLIPKTKETQLPNKYRPICCLTTTYKWLTGIIADAIYEHLDNGGYLENEQKGCSKRRLGAKDQLLTDKAILEDCKTRQRNLSMAWIDYKKAFDSVPHSWILRCLELYNINEKIRTFLKAQMNKWNTTITLNHTEGQITIPDVRVQRGILQGDSLSPLLFCLIMDPLSKILKEQDIGYDLSKDKGKENQKLVNHLLFMDDLKIYANTKNGLTQLVETAHKFSKDIGMEFGLDKCSKCTLTKGKKTKTENIQLDEGSYIADLAADSTYKYLGIEQSNSIEHKKMRTKTTKEYLNRLKKICKTQLTPKNKITAINQFAIPVVTYGFGIVNWPQCELNKLDTKTRKMLTLHKITYRNQCMDRIYLPRREGGMGLTEINQAYRASIISIGQYLKSSEEEIIKTVTQHHEAITERTSITKLAKNFGGELLQERKSNSLMPATKLARQTREQYCKKEGKHRVERWKQHKRAGRFQEELEKEYIDKVGSMQWLKNGKLGFDGERILIGAQDQGLLTNGFKKMAGISQNDKCRFCHTAVESVNHLTSACQILMADGHYTSRHNKICQYLHWKICKELELEVKEHVWEHEPTPVSSNGKITIFYDKEIPAGRHIEGGAIKPDIVIWNKQEKTAKIIDVTVPNDYGLNRAERGKISKYQDLKNDLRTTWSLKDIDIIPVVVGATGLMKKNLKKYLEAIPGHPSAHEVQLSAIKGTITILKRALGYNARSG

SEQ ID NO: 8055 - protein, 783 aa, Thalassophryne amazonica
MPAIVINEEEIRKKMSEYSNFKAPGIDKIPNFWLKRLTALHQHYAVAFTKILNGEEDTPDWLTTGNTSLIPKTKETQLPNKYRPICCLTTTYKWLTGIIADAIYEHLDNGGYLENEQKGCSKRRLGAKDQLLTDKAILEDCKTRQRNLSMAWIDYKKAFDSVPHSWILRCLELYNINEKIRTFLKAQMNKWNTTITLNHTEGQITIPDVRVQRGILQGDSLSPLLFCLIMDPLSKILKEQDIGYDLSKDKGKENQKLVNHLLFMDDLKIYANTKNGLTQLVETAHKFSKDIGMEFGLDKCSKCTVTKGKKTKTENIQLDEGSYIADLAADSTYKYLGIEQSNSIEHKKMRTKTTKEYLNRLKKICKTQLTPKNKITAINQFAIPVVTYGFGIVNWPQCELNKLDTKTRKMLTLHKITYRNQCMDRIYLPRREGGMGLTEINQAYRASIISIGQYLKSSEEEIIKTVTQHHEAISERTSITKLAKNFGGELLQERKSNSLMPATKLARQTREQYCKKEGKHRVERWKQHKRAGRFQEELEKEYIDKVGSMQWLKNGKLGFDGERILIGAQDQGLLTNGFKKMAGISQNDKCRFCHTAVESVNHLTSACQILMADGHYTSRHNKICQYLHWKICKELELEVKEHVWEHEPTPVSSNGKITIFYDKEIPAGRHIEGGAIKPDIVIWNKQEKTAKIIDVTVPNDYGLNRAERGKISKYQDLKNDLRTTWSLKDIDIIPVVVGATGLMKKNLKKYLEAIPGHPSAHEVQLSVIKGTITILKRALGYNA

SEQ ID NO: 8056 - protein, 932 aa, Thalassophryne amazonica
MPRWKKKLQQKISCLRAEISQMATFLGNKNHKKNLLKKINRIKRKYNVEDKLLGGRLAEHQALVKAFAAQIRNKDKKIQAKQINKLFATNPRLVYRKLANDTIEVQQPPERKEIEKFWRPLFEDPKQHQEAEWIEKIQQKNKDKQQMPAIVINEEEIRKKMSEYSNFKAPGIDKIPNFWLKRLTALHQHYAVAFTKILNGEEDTPDWLTTGNTSLLPKTKEIQLSNKYRPICCLTTTYKWLTGIIADAIYEHLDNGGYLENEQKGCSKRRLGAKDQLLTDKAILEDCKTRQMNLSMAWIDYKKAFDSVPHSWILRCLELYNINEKIRTFLKAQMNKWNTTITLNHTEGQITIPDVRVQRGILQGDSLSPLLFCLIMDPLSKILKEQDIGYDLSKDKGKENQKLVNHLLFMDDLKIYANTKNGLTQLVETAHKFSKDIGMEFGLDKCSKCTMTKGKKTKTENIQLDEGSYIADLATDSTYKYLGIEQSNSIEHKKMRTKTTKEYLNRLKKICKTQLTPKNKITAINQFAIPVVTYGFGIVNWPQCELNKLDTKTRKMLTLHKITYRNQCMDRIYLPRREGGMGLTEINQAYRASIISIGQYLKSSEEEIIKTVTQHHEAISERTSITKLAKNFGGELLQERKSNSLTPATKLARQTREQYCKKEGKHRVERWKQHKRAGRFQEELEKEYIDKVGSMQWLKNGKLGFDGERILIGAQDQGLLTNGFKKMAGISQNDKCRFCHTAVESVNHLTSACQILMADGHYTSRHNKICQYLHWKICKELELEVKEHVWEHEPTPVSSNGKITIFYDKEIPAGRHIEGGAIKPDIVIWNKQEKTAKIIDVTVPNDYGLNRAERGKISKYQDLKNDLRTTWSLKDIDIIPVVVGATGLMKKNLKKYLEAIPGHPSAHEVQLSAIKGTITILKRALGYNARSG

SEQ ID NO: 8057 - protein, 1002 aa, Thalassophryne amazonica
MDMKERPKLTKLKENKKFKNILQKVNIGLTKLVPRGATLTELNSVNYGAAWYIQSKLAPQDLERNSTTNKKKNTMPRWKKKLQQKINCLRAEISQMATFLGNKNHKKNLLKKINRIKRKYNVEDKLLGGRLAEHQALVKAFAAQIRNKDKKIQAKHKLFATNPRLVYRKLANDTIEVQQPPERKEIEKFWRPLFEDPKQHQEAEWIEKIQQKNKDKQQMPAIVINEEEIRKKMSEYSNFKAPGIDKIPNFWLKRLTALHQHYAVAFTKILNGEEDTPDWLTTGNTSLIPKTKETQLPNKYRPICCLTTTYKWLTGIIADAIYEHLDNGGYLENEQKGCSKRRLGAKDQLLTDKAILEDCKTRQRNLSMAWIDYKKAFDSVPHSWILRCLELYNINEKIRTFLKAQMNKWNTTITLNHTGTTIPDVRVQRGILQGDSLSPLLFCLIMDPLSKILKEQDIGYDLSKDKGKENQKLVNHLLFMDDLKIYANTKNGLTQLVETAHKFSKDIGMEFGLDKCSKCTMTKGKKTKTENIQLDEGSYIADLAADSTYKYLGIEQSNSIEHKKMRTKTTKEYLNRLKKICKTQLTPKNKITAINQFAIPVVTYGFGIVNWPQCELNKLDTKTRKMLTLHKITYRNQCMDRIYLPRREGGMGLTEINQAYRASIISIGQYLKSSEEEIIKTVTQHHETISERTSITKLAKNFGGELLQERKSNSLMPATKLARQTREQYCKKEGKHRVERWKQHKRAGRFQEELEKEYIDKVGSMQWLKNGKLGFDGERILIGAQDQGLLTNGFKKMAGISQNDKCRFCHTAVESVNHLTSACQILMADGHYTSRHNKICQYLHWKICKELELEVKEHVWEHEPTPVSSNGKITIFYDKEIPAGRHIEGGAIKPDIVIWNKQEKTAKIIDVTVPNDYGLNRAERGKISKYQDLKNDLRTTWSLKDIDIIPVVVGATGLMKKNLKKYLEAIPGHPSAHEVQLSAIKGTITILKRALGYNARSG

SEQ ID NO: 8058 - protein, 1164 aa, Thalassophryne amazonica
MPPEKPNNSMPPEKPNNSMPPEKPNNSMPPEKPNHSPPPEKPNHLLPPKKPNNSMPPEKPNNSMPPEKPNNSLPPEKPNHSLPPEKPNHSLPHEKPNHLLPPEKMNNSLPPEKMSNSLPTEKANNSPAHLQNNSQVHTDPEQQVLEEELANKIEETRKMDMKERPKLTKLKENKKFKNILQKVNIGLTKLVPRGATLTELNSVNYGAAWYIQSKLAPQDLERNSTTNKKKNTMPRWKKKLQQKISCLRAEISQMATFLGNKNHKKNLLKKINRIKRKYNVEDKLLGGRLAEHQALVKAFAAQIRNKDKKIQAKQINKLFATNPRLVYRKLANDTIEVQQPPERKEIEKFWRPLFEDPKQHQEAEWIEKIQQKNKDKQQMPAIVINEEEIRKKMSEYSNFKAPGIDKIPNFWLKRLTALHQHYAVAFTKILNGEEDTPDWLTTGNTSLIPKTKETQLPNKYRPICCLTTTYKWLTGIIADAIYEHLDNGGYLENEQKGCSKRRLGAKDQLLTDKAILEDCKTRQRNLSMAWIDYKKAFDSVPHSWILRCLELYNINEKIRTFLKAQMNNWNTTITLNHTEGQITIPDVRVQRGILQGDSLSPLLFCLIMDPLSKILKEQDIGYDLSKDKGKENQKLVNHLLFMDDLKIYANTKNGLTQLVETAHKFSKDIGMEFGLDKCSKCTMTKGKKTKTENIQLDEGSYIADLAADSTYKYLGIEQSNSIEHKKMRTKTTKEYLNRLKKICKTQLTPKNKITAINQFAIPVVTYGFGIVNWPQYELNKLDTKTRKMLTLHKITYRNQCMDRIYLPRREGGMGLTEINQAFRASIISIGQYLKSSEEEIIKTVTQHHEAISERTSITKLAKNFGGELLQERKSNSLTPATKLARQTREQYCKKEGKHRVERWKQHKRAGRFQEELEKEYIDKVGSMQWLKNGKLGFDGERILIGAQDQGLLTNGFKKMAGISQNDKCRFCHTAVESVNHLTSACQILMADGHYTSRHNKICQYLHWKICKELELEVKEHVWEHEPTPVSSNGKITIFYDKEIPAGRHIEGGAIKPDIVIWNKQEKTAKIIDVTVPNDYGLNRAERGKISKYQDLKNDLRTTWSLKDIDIIPVVVGATGLMKKNLKKYLEAIPGHPSAHEVQLSAIKGTITILKRALGYNARSG

SEQ ID NO: 8059 - protein, 1349 aa, Thalassophryne amazonica
MWSKIWSKGQPEKTHDNSYRTKYPKNQTKTSKEWQKIFHHHCPSKKDITCKNLTTQKSNFIKQKHFSDNEIKTMQQEVEKMIREGICPLTQPITPPKNDCPKKKFIPEKTNHPLPPEKPNHLLPPEKMNKSLPPQKTSNSLPPEKTNHLPPPEKPNHLLPPKKPNNSMPPEKPNNSMPPEKPNNSMPPEKPNNSMPPEKPNNSMPPEKPNNSMPPEKPNHSPPPEKPNHLLPPKKPNNSMPPEKPNNSMPPEKPNNSLPPEKPNHSLPPEKPNHSLPHEKPNHLLPPEKMNNSLPPEKMSNSLPTEKANNSPAHLQNNSQVHTDPEQQVLEEELANKIEETRKMDMKERPKLTKLKENKKFKNILQKVNIGLTKLVPRGATLTELNSVNYGAAWYIQSKLAPQDLERNSTTNKKKNTMPRWKKKLQQKISCLRAEISQMATFLGNKNHKKNLLKKINRIKRKYNVEDKLLGGRLAEHQALVKAFAAQIRNKDKKIQAKQINKLFATNPRLVYRKLANDTIEVQQPPERKEIEKFWRPLFEDPKQHQEAEWIEKIQQKNKDKQQMPAIVINEEEIRKKMSEYSNFKAPGIDKIPNFWLKRLTALHQHYAVAFTKILNGEEDTPDWLTTGNTSLIPKTKETQLPNKYRPICCLTTTYKWLTGIIADAIYEHLDNGGYLENEQKGCSKRRLGAKDQLLTDKAILEDCKTRQRNLSMAWIDYKKAFDSVPHSWILRCLELYNINEKIRTFLKAQMNNWNTTITLNHTEGQITIPDVRVQRGILQGDSLSPLLFCLIMDPLSKILKEQDIGYDLSKDKGKENQKLVNHLLFMDDLKIYANTKNGLTQLVETAHKFSKDIGMEFGLDKCSKCTMTKGKKTKTENIQLDEGSYIADLAADSTYKYLGIEQSNSIEHKKMRTKTTKEYLNRLKKICKTQLTPKNKITAINQFAIPVVTYGFGIVNWPQYELNKLDTKTRKMLTLHKITYRNQCMDRIYLPRREGGMGLTEINQAYRASIISIGQYLKSSEEEIIKTVTQHHEAISERTSITKLAKNFGGELLQERKSNSLTPATKLARQTREQYCKKEGKHRVERWKQHKRAGRFQEELEKEYIDKVGSMQWLKNGKLGFDGERILIGAQDQGLLTNGFKKMAGISQNDKCRFCHTAVESVNHLTSACQILMADGHYTSRHNKICQYLHWKICKELELEVKEHVWEHEPTPVSSNGKITIFYDKEIPAGRHIEGGAIKPDIVIWNKQEKTAKIIDVTVPNDYGLNRAERGKISKYQDLKNDLRTTWSLKDIDIIPVVVGATGLMKKNLKKYLEAIPGHPSAHEVQLSAIKGTITILKRALGYNARSG

SEQ ID NO: 8060 - protein, 1285 aa, Thalassophryne amazonica
MQQEVEKMIREGICPLTQPITPPKNDCPKKKFIPEKTNHPLPPEKPNHLLPPEKMNKSLPPQKTSNSLPPEKTNHSPPPEKPNHLLPPKKPNNSMPPEKPNNSMPPEKPNNSMPPEKPNNSMPPEKPNNSMPPEKPNNSMPPEKPNNSMPPEKPNHSPPPEKPNHLLPPKKPNNSMPPEKPNNSMPPEKPNNSLPPEKPNHSLPPEKPNHSLPHEKPNHLLPPEKMNNSLPPEKMSNSLPTEKANNSPAHLQNNSQVHTDPEQQELEEELANKIEETRKMDMKERPKLTKLKENKKFKNILQKVNIGLTKLVPRGATLTELNSVNYGAAWYIQSKLAPQDLERNSTTNKKKNTMPRWKKKLQQKISCLRAEISQMATFLGNKNHKKNLLKKINRIKRKYNVEDKLLGGRLAEHQALVKAFAAQIRNKDKKIQAKQINKLFATNLRLVYRKLANDTIEVQQPPERKEIEKFWRPLFEDPKQHQEAEWIEKIQQKNKDKQQMPAIVINEEEIRKKMSEYSNFKAPGIDKIPNFWLKRLTALHQHYAVAFTKILNGEEDTPDWLTTGNTSLIPKTKETQLPNKYRPICCLTTTYKWLTGIIADAIYEHLDNGGYLENEQKGCSKRRLGAKDQLLTDKAILEDCKTRQRNLSMAWIDYKKAFDSVPHSWILRCLELYNINEKIRTFLKAQMNNWNTTITLNHTEGQITIPDVRVQRGILQGDSLSPLLFCLIMDPLSKILKEQDIGYDLSKDKGKENQKLVNHLLFMDDLKIYANTKNGLTQLVETAHKFSKDIGMEFGLDKCSKCTMTKGKKTKTENIQLDEGSYIADLAADSTYKYLGIEQSNSIEHKKMRTKTTKEYLNRLKKICKTQLTPKNKITAINQFAIPVVTYGFGIVNWPQYELNKLDTKTRKMLTLHKITYRNQCMDRIYLPRREGGMGLTEINQAYRASIISIGQYLKSSEEEIIKTVTQHHEAISERTSITKLAKNFGGELLQERKSNSLTPATKLARQTREQYCKKEGKHRVERWKQHKRAGRFQEELEKEYIDKVGSMQWLKNGKLGFDGERILIGAQDQGLLTNGFKKMAGISQNDKCRFCHTAVESVNHLTSACQILMADGHYTSRHNKICQYLHWKICKELELEVKEHVWEHEPTPVSSNGKITIFYDKEIPAGRHIEGGAIKPDIVIWNKQEKTAKIIDVTVPNDYGLNRAERGKISKYQDLKNDLRTTWSLKDIDIIPVVVGATGLMKKNLKKYLEAIPGHPSAHEVQLSAIKGTITILKRALGYNARSG

SEQ ID NO: 8061 - protein, 1863 aa, Thalassophryne amazonica
MQPSLVVKEEILPEYQEWNLSVDQEDIKEEEKLWITQQGEQFQQLEEADLTRSGFTAVPVKSENDDEKLELSQLHQSQSDESTEAEPVASSSSVHRTLTTEADAEDDGGPQPASNSGPNSHLQPDTSGGSSDSSGSETDDSYDWKQTRELQSSFNCRKNTNIVRSDNNDEKQFKGSKYGKASGHMNNLEQQKERQASGKPFICSDGSKVQKKNTLNKHIRIQTGQKTFVCSECGRRFGRKGHLTTHMIIHNSSPQLHQSRSDESTEAEPVASSSSVHRTLTAEADGEDDGGPQPASNSGPNSHLQPDTSGRSSDSSGTKQKNTQLDNPPDQHSSDPGLQQQQHQWAKRNKRNYTTVNWTIEKKKKIFHCFTYSRHEKWGRKKKAVFEERIKEADLPTQKKEATTTAKLESIASQIAKYLTTEEIKKIKEEAQKEAIKDYQLLDKGKQLQFKRSQWKREEEWILLWAKEYAKIKYPKNQTKTSKEWQKIFHHHCPSKKDITCKNLTTQKSNFIKQKHFSDNEIKTMQQEVEKMIREGICPLTQPITPPKNDCPQKKFIPEKTNHPLPPEKPNHLLPPEKMNKSLPPQKTSNSLPPEKTNHSPPPEKPNHLLPPQKPNNSMPPEKPNNSMPPEKPNNSMPPEKPNNSMPPEKPNNSMPPEKPNNSMHPEKPNHSLPPEKPNHSLPPEKPNHSLPPEKPNHSLPPEKPNHSLPPEKPNHSLPPEKPNHSLPPEKPNHSLPPEKPNHSLPPEKPNNSLPPEKPNHSLPPEKPNHSLPPEKPNHSLPPEKPNHSLPPEKPNHSLPHEKPNHLLPHEKMNNSLPTEKANNSPAHLQNNSQVHTDPEQQELEEELANKIEETRKMDMKERPKLTKLKENKKFKNILQKVNIGLTKLVPRGATLTELNSVNYGAAWYIQSKLAPQDLERNSTTNKKKNIMPRWKKKLQQKISCLRAEISQMATFLGNKNHKKNLLKKINRIKRKYNVEDKLLGGRLAEHQALVKAFAAQIRNKDKKIQAKQINKLFATNPRLVYRKLANDTIEVQQPPERKEIEKFWRPLFEDPKQHQEAEWIKKIQQKNKDKQQMPAIVINEEEIRKKMSEYSNFKAPGIDKIPNFWLKRLTALHQHYAVAFTKILNGEEDTPDWLTTGNTSLIPKTKETQLPNKYRPICCLTTTYKWLTGFIADAIYEHLDNGGYLENEQKGCSKRRLGAKDQLLTDKAILEDCKTRQRNLSMAWIDYKKAFDSVPHSWILRCLELYNINEKIRTFLKAQMNNWNTTITLNHTEGQITIPDVRVQRGILQGDSLSPLLFCLIMDPLSKILKEQDIGYDLSKDKGKENQKLVNHLLFMDDLKIYANTKNGLTQLVETAHKFSKDIGMEFGLDKCSKCTMTKGKKTKNENIQLDEGSYIADLAADSTYKYLGIEQSNSIEHKKMRTKTTKEYLNRLKKICKTQLTPKNKITAINQFAIPVVTYGFGIVNWPQYKLNKLDTKTRKMLTLHKITYRNQCMDRIYLPRREGGMGLTEINQAYRASIISIGQYLKSSEEEIIKTVTQHHEAISERTSITKLAKNFGGELLQERKSNSLTPATKLARQTREQYCKKEGKHRVERWKQHKRAGRFQEELEKEYIDKVGSMQWLKNGKLGFDGERILIGAQDQGLLTNGFKKMAGISQNDKCRFCHTAVESVNHLTSACQILMADGHYTSRHNKICQYLHWKICKELELEVKEHVWEHEPTPVSSNGKITIFYDKEIPAGRHIEGGAIKPDIVIWNKQEKTAKIIDVTVPNDYGLNRAERGKISKYQDLKNDLRTTWSLKDIDIIPVVVGATGLMKKNLKKYLEAIPGHPSAHEVQLSAIKGTITILKRALGYNARSG

SEQ ID NO: 8062 - protein, 1249 aa, Thalassophryne amazonica
MQQEVEKMIREGICPLTQPITPPKNDCPQKSLSPKKTNHPLPPEKPNHLLPPEKMNKSLPPQKRSNSLPPEKTNHSPPPEKPNHLPPPKKPNNSMPPEKPNNSMPPEKPNNSMPPEKPNNSMPPEKPNNSMPPEKPNNSLPPEKPNNSLPPEKPNHSLPPEKPNHSLPPEKPNHSLPHEKPNHLLPPEKMNNSLPPEKMSNSLPTEKANNSPAHLQNNSQVHTDPEQQELEEELANKIEETRKMDMKERPKLTKLKENKKFKNILQKVNIGLTKLVPRGATLTELNSVNYGAAWYIQSKLAPQDLERNSTTNKKKNIMPRWKKKLQQKISCLRAEISQMATFLGNKNHKKNLLKKINRIKRKYNVEDKLLGGRLAEHQALVKAFAAQIRNKDKKIQAKQINKLFATNPRLVYRKLANDTIEVQQPPERKEIEKFWRPLFEDPKQHQEAEWIEKIQQKNKDKQQMPAIVINEEEIRKKMSEYSNFKAPGIDKIPNFWLKRLTALHQHYAVAFTKILNGEEDTPDWLTTGNTSLIPKTKETQLPNKYRPICCLTTTYKWLTGIIADAIYEHLDNGGYLENEQKGCSKRRLGAKDQLLTDKAILEDCKTRQRNLSMAWIDYKKAFDSVPHSWILRCLELYNINEKIRTFLKAQMNNWNTTITLNHTEGQITIPDVRVQRGILQGDSLSPLLFCLIMDPLSKILKEQDIGYDLSKDKGKENQKLVNHLLFMDDLKIYANTKNGLTQLVETAHKFSKDIGMEFGLDKCSKCTMTKGKKTKTENIQLDEGSYIADLAADSTYKYLGIEQSNSIEHKKMRTKTTKEYLNRLKKICKTQLTPKNKITAINQFAIPVVTYGFGIVNWPQYELNKLDTKTRKMLTLHKITYRNQCMDRIYLPRREGGMGLTEINQAYRASIISIGQYLKSSEEEIIKTVTQHHKAISERTSITKLAKNFGGELLQERKSNSLTPATKLARQTREQYCKKEGKHRVERWKQHKRAGRFQEELEKEYIDKVGSMQWLKNGKLGFDGERILIGAQDQGLLTNGLKKMAGISQNDKCRFCHTAVESVNHLTSACQILMADGHYTSRHNKICQYLHWKICKELELEAKEHVWEHEPTPVSSNGKITIFYDKEIPAGRHIEGGAIKPDIVIWNKQEKTAKIIDVTVPNDYGLNRAERGKISKYQDLKNDLRTTWSLKDIDIIPVVVGATGLMKKNLKKYLEAIPGHPSAHEGQLSAIKGMITILKRALGYNARSG

SEQ ID NO: 8063 - protein, 1138 aa, Thalassophryne amazonica
MPPEKPNNSMPPEKPNNSMPPEKPNNSLPPEKPNNSLPPEKPNHSLPPEKPNHSLPHEKPNHSLPHEKPNHSLPHEKPNHLLPPEKMNNSLPSEKTSNSLPTEKTNNSPAHLQNNSQVHTDPEQQELEKELANKIEETRKMDMKERPKLTKLKENKKFKNILQKVNIGLTKLVPRGATLTELNSVNYGAAWYIQSKLAPQDLERNSTTNKKNIMPRWKKKLQQKISCLRAEISQMATFLGNKNHKKNLLKKINRIKRKYNVEDKLLGGRLAEHQALVKAFAAQIRNKDKKIQAKQINKLFATNPRLVYRKLANDTIEVQQPPERKEIEKFWRPLFEDPKQHQEAEWIEKIQQKNKDKQQMPAIVINEEEIRKKMSEYSNFKAPGIDKIPNFWLKRLTALHHHYAVAFTKILNGEEDTPDWLTTGNTSLIPKTKEIQLPNKYRPICCLTTTYKWLTGIIADAIYEHLDNGGYLENEQKGCSKRRLGAKDQLLTDKAILEDCKTRQRNLSMAWIDYKKAFDSVPHSWILRCLELYNINEKIRTFLKAQMNKWNTTITLNHTEGQITIPDVRVQRGILQGDSLSPLLFCLIMDPLSKILKEQDIGYDLSKDKGKENQKLVNHLLFMDDLKIYANTKNGLTQLVETAHKFSKDIGMEFGLDKCSKCTMTKGKKTKTENIQLDEGSYIADLAADSTYKYLGIEQSNSIEHKKMRTKTTKEYLNRLKKICKTQLTPKNKITAINQFAIPVVTYGFGIVNWPQCELNKLDTKTRKMLTLHKITYRNQCMDRIYLPRREGGMSLTEINQAYRASIISIGQYLKSSEEEIIKTVTQHHEAISERTSITKLAKNFGGELLQERKSNSLTPATKLARQTREQYCKKEGKHRVERWKQHKRAGRFQEELEKEYIDKVGSIQWLKNGKLGFDGERILIGAQDQGLLTNGFKKMAGISQNDKCRFCHTAVESVNHLTSACQILMADGHYTSRHNKICQYLHWKICKELELEVKEHVWEHEPTPVSSNGKITIFYDKEIPAGRHIEGGAIKPDIVIWNKQEKTAKIIDVTVPNDYGLNRAERGKISKYQDLKNDLRTTWSLKDIDIIPVVVGATGLMKKNLKKYLEAIPGHPSAHEVQLSAIKGTIQCQIWLR

SEQ ID NO: 8064 - protein, 1213 aa, Thalassophryne amazonica
MQQEVEKMIREGICPLTQPITPPKNDCPQKKFIPEKTNHPLPPEKPNHLLPPEKMNKSLPPQKTSNSLPPEKTNHSPPPEKPNHLLPPKKPNNSMPPEKPNNSMPPEKPNNSMPPEKTNNSMPPEKTNNSLPPEKPNHSLPHEKPNHLLPPEKMNNSLPPEKISNSLPTEKTNNSPAHLQNNSQVHTDPEQQELEEELSNKIEETRKMDMKEHPKLTKLKENKKFKNILQKVNIGLTKLVPRGATLTELNSVNYGAAWYIQSKLAPQDLERNSTTNKKKNIMPRWKKKLQQKISCLRAEISQMATFLGNKNHKKNLLKKINRIKRKYNVEDQLLGGRLAEHQALVKAFAAQIRNKDKKIQAKQINKLFATNPRLVYRKLANDTIEVQQPPERKEIEKFWRPLFEDPKQHQEAEWIEKIQQKNKDKQQMPAIVINEEEIRKKMSEYSNFKAPGIDKIPNFWLKRLTALHQHYAVAFTKILNGEEDTPDWLTTGNTSLIPKTKETQLPNKYRPICCLTTTYKWLTGIIADAIYEHLDNGGYLENEQKGCSKRRLGAKDQLLTDKAILEDCKTRQRNLSMAWIDYKKAFDSVPHSWILRCLELYNINEKIRTFLKAQMNNWNTTITLNHTEGQITIPDVRVQRGILQGDSLSPLLFCLIMDPLSKILKEQDIGYDLSKDKGKENQKLVNHLLFMDDLKIYANTKNGLTQLVETAHKFSKDIGMEFGLDKCSKCTMTKGKKTKTENIQLDEGSYIADLAADSTYKYLGIEQSNSIEHKKMRTKTTKEYLNRLKKICKTQLTPKNKITAINQFAIPVVTYGFGIVNWPQYELNKLDTKTRKMLTLHKITYRNQCMDRIYLPRREGGMGLTEINQAYRASIISISQYLKSSEEEIIKTVTQHHEAISERTSITKLAKNFGGELLQERKSNSLTPATKLARQTSEQYCKREGKHRVERWKQHKRAGRFQEELEKEYIDKVGSMQWLKNGKLGFDGERILIGAQDQGLLTNGFKKMAGISQNDKCRFCHTAVESVNHLTSACQILMADGHYTSRHNKICQYLHWKICKELELEVKEHVWEHEPTPVSSNGKITIFYDKEIPAGRHIEGGAIKPDIVIWNKQEKTAKIIDVTVPNDYGLNRAERGKISKYQDLKNDLRTTWSLKDIDIIPVVVGATGLMKKNLKKYLEAIPGHPSAHEVQLSAIKGTITILKRALGYNARSG

SEQ ID NO: 8065 - protein, 1173 aa, Thalassophryne amazonica
MPPEKPNNSMPPEKPNNSMPPEKPNNSMPPEKPNHSPPPEKPNHLLPPKKPNNSMPPEKPNNSMPPEKPNNSLPPEKPNNSLPPEKPNNSLPPEKPNHSLPPEKPNHSLPHEKPNHLLPPEKMNNSLPTEKANNSPAHLQNNSQVHTDPEQQVLEEELANKIEETRKMDMKERPKLTKLKENKKFKNILQKVNIGLTKLVPRGATLTELNSVNYGAAWYIQSKLAPQDLERNSTTNKKKNTMPRWKKKLQQKISCLRAEISQMATFLGNKNHKKNLLKKINRIKRKYNVEDKLLGGRLAEHQALVKAFAAQIRNKDKKIQAKQINKLFATNPRLVYRKLANDTIEVQQPPERKEIEKFWRPLFEDPKQHQEAEWIEKIQQKNKDKQQMPAIVINEEEIRKKMSEYSNFKAPGIDKIPNFWLKRLTALHQHYAVAFTKILNGEEDTPDWLTTGNTSLIPKTKETQLPNKYRPICCLTTTYKWLTGIIADAIYEHLDNGGYLENEQKGCSKRRLGAKDQLLTDKAILEDCKTRQRNLSMAWIDYKKAFDSVPHSWILRCLELYNINEKIRTFLKAQMNNWNTTITLNHTEGQITIPDVRVQRGILQGDSLSPLLFCLIMDPLSKILKEQDIGYDLSKDKGKENQKLVNHLLFMDDLKIYANTKNGLTQLVETAHKFSKDIGMEFGLDKCSKCTMTKGKKTKTENIQLDEGSYIADLAADSTYKYLGIEQSNSIEHKKMRTKTTKEYLNRLKKICKTQLTPKNKITAINQFAIPVVTYGFGIVNWPQYELNKLDTKTRKMLTLHKITYRNQCMDRIYLPRREGGMGLTEINQAFRASIISIGQYLKSSEEEIIKTVTQHHEAISERTSITKLAKNFGGELLQERKSNSLTPATKLARQTREQYCKKEGKHRVERWKQHKRAGRFQEELEKEYIDKVGSMQWLKNGKLGFDGERILIGAQDQGLLTNGFKKMAGISQNDKCRFCHTAVESVNHLTSACQILMADGHYTSRHNKICQYLHWKICKELELEVKEHVWEHEPTPVSSNGKITIFYDKEIPAGRHIEGGAIKPDIVIWNKQEKTAKIIDVTVPNDYGLNRAERGKISKYQDLKNDLRTTWSLKDIDIIPVVVGATGLMKKNLKKYLEAIPGHPSAHEVQLSAIKGTITILKRALGYNARSG

SEQ ID NO: 8066 - protein, 932 aa, Thalassophryne amazonica
MPRWKKKLQQKISCLRAEISQMATFLGNKNHKKNLLKKINCIKRKYNVEDKLLGGRLAEHQALVKAFAAQIRNKDKKIQAKQINKLFATNPRLVYRKLANDTIEVQQPPERKEIEKFWRPLFEDPKQHQEAEWIEKIQQKNKDKQQMPAIVINEEEIRKKMSEYSNFKAPGIDKIPNFWLKRLTALHQHYAVAFTKILNGEEDTPDWITTGNTSLIPKTKETQLPNKYRPICCLTTTYKWLTGIIADAIYEHLDNGGYLENEQKGCSKRRLGAKDQLLTDKAILEDCKTRQRNLSMAWIDYKKAFDSVPHSWILRCLELYNINEKIRTFLKAQMNNWNTTITLNHTEGQITIPDVRVQKGILQGDSLSPLLFCLIMDPLSKILKEQDIGYDLSKDKGKENQKLVNHLLFMDDLKIYANTKNGLTQLVETAHKFSKDIGMEFGLDKCSKCTMTKGKKTKTENIQLDEGSYIADLAADSTYKYLGIEQSNSIEHKKMRTKTTKEYLNRLKKICKTQLTPKNKITAINQFAIPVVTYGFGIVNWPQYELNKLDTKTRKMLTLHKITYRNQCMDRIYLPRREGGMGLTEINQAYRASIISIGQYLKSSEEEIIKTVTQHHEAISERTSITKLAKNFGGELLQERKSNSLTPATKLARQTREQYCKKEGKHRVERWKQHKRAGRFQDELEKEYIDKVGSMQWLKNGKLGFDGERILIGAQDQGLLTNGFKKMAGISQNDKCRFCHTAVESVNHLTSACQILMADGHYTSRHNKICQYLHWKICKELELEVKEHVWEHEPTPVSSNGKITIFYDKEIPAGRHIEGGAIKPDIVIWNKQEKTAKIIDVTVPNDYGLNRAERGKISKYQDLKNDLRTTWSLKDIDIIPVVVGATGLMKKNLKKYLEAIPGHPSAHEVQLSAIKGTITILKRALGYNARSG

SEQ ID NO: 8067 - protein, 1110 aa, Thalassophryne amazonica
MPPEKPNNSMPPEKPNNSMPPEKMNNSLPPEKPNHSLPHEKPNHLLPPEKMNNSLPPEKMSNSLPTEKTNNSPAHLQNNSQVHTDPEQQELEEELANKIEETRKMDMKERPKLTKLKENKKFKNILQKVNIGLTKLVPRGATLTELNSVNYGAAWYIQSKLAPQDLERNSTTNKKKNIMPRWKKKLQQKISCLRAEISQMATFLGNKNHKKNLLKKINRIKRKYNVEDKLLGGRLAEHQALVKAFAAQIRNKDKKIQAKQINKLFATNPRLVYRKLANDTIEVQQPPERKEIEKFWRPLFEDPKQHQEAEWIEKIQQKNKDKQQMPAIVINEEEIRKKMSEYSNFKAPGIDKIPNFWLKRLTALHQHYAVAFTKILNGEEDTPDWLTTGNTSLIPKTKETQLPNKYRPICCLTTTYKWLTGIIADAIYEHLDNGGYLENEQKGCSKRRLGAKDQLLTDKAILEDCKTRQRNLSMAWIDYKKAFDSVPHSWILRCLELYNINEKIRTFLKAQMNNWNTTITLNHTEGQITIPDVRVQRGILQGDSLSPLLFCLIMDPLSKILKEQDIGYDLSKDKEKENQKLVNHLLFMDDLKIYANTKNGLTQLVETAHKFSKDIGMEFGLDKCSKCTMTKGKKTKTENIQLDEGSYIADLAADSTYKYLGIEQSNSIEHKKMRTKTTKEYLNRLKKICKTQLTPKNKITATNQFAIPVVTYGFGIVNWPQYELNKLDTKTRKMLTLHKITYRNQCMDRIYLPRREGGMGLTEINQAYRASIISIGQYLKSSEEEIIKTVTQHHEAISERTSITKLAKNFGRELLQERKSNSLTPATKLARQTREQYCKKEGKHRVERWKQHKRAGRFQEELEKEYIDKVGSMQWLKNGKLGFDGERILIGAQDQGLLTNGFKKMAGISQNDKCRFCHTAVESVNHLTSACQILMADGHYTSRHNKICQYLHWKICKELELEVKEHVWEHEPTPVSSNGKITIFYDKEIPAGRHIEGGAIKPDIVIWNKQEKTAKIIDVTVPNDYGLNRAERGKISKYQDLKNDLRTTWSLKDIDIIPVVVGATGLMKKNLKKYLEAIPGHPSAHEVQLSAIKGTITILKRALGYNARSG

SEQ ID NO: 8068 - protein, 1358 aa, Thalassophryne amazonica
MQPLLVIKEETLPEHQEWNLSVDQEDIKEEEKLWISQQGEQLQQLEEADLTKFGFTAVLVKSENDDEKPESSQLHQSRSDESTEAEPVASSSSVHRTLTAEADGEDDGGPQPASNSGPNSHLQPDTSGRSSDSSGTDDSDDWKQTRELQSSCNCRKNANIVRSGNTDEKQFKGFKYEKASGHMNNSEQQKERQARRKPFSCSDQSKRQKQKGTLNKHIRIQTGQKPFVCSECGKRFGQKSTLNTHMIIHTGQKAFVCSECGQRFGRKSNLKTHMIIHTGQKAFVCSECGQRFGLKINLNTHMIIHARPKAFVCSDCGQRFGLKSHLNRHMIIHTEQQELEEELANKIEETRKMDMKERPKLTKLKENKKFKNILQKVNIGLTKLVPRGATLTELNSVNYGAAWYIQSKLAPQDLERNSTTNKKKNIMPRWKKKLQQKISCLRAEISQMATFLGNKNHKKNLLKKINRIKRKYNVEDKLLGGRLAEHQALVKAFAAQIRNKDKKIQAKQINKLFATNPRLVYRKLANDTIEVQQPPERKEIEKFWRPLFEDPKQHQEAEWIEKIQQKNKDKQQMPAIVINEEEIRKKMSEYSNFKAPGIDKIPNFWLKRLTALHQHYAVAFTKILNGEEDTPDWLTTGNTSLIPKTKETQLPNKYRPICCLTTTYKWLTGIIADAIYEHLDNGGYLENEQKGCSKRRLGAKDQLLTDKAILEDCKTRQRNLSMAWIDYKKAFDSVPHSWILRCLELYNINEKIRTFLKAQMNNWNTTITLNHTEGQITIPDVRVQRGILQGDSLSPLLFCLIMDPLSKILKEQDIGYDLSKDKGKENQKLVNHLLFMDDLKIYANTKNGLTQLVETAHKFSKDIGMEFGLDKCSKCTMTKGKKTKTENIQLDEGSYIADLAADSTYKYLGIEQSNSIEHKKMRTKTTKEYLNRLKKICKTQLTPKNKITAINQFAIPVVTYGFGIVNWPQYELNKLDTKTRKMLTLHKITYRNQCMDRIYLPRREGGMGLTEINQAYRASIISIGQYLKSSEEEIIKTVTQHHEAISERTSITKLAKNFGGELLQERKSNSLTPATKLARQTREQYCKKEGKHRVERWKQHKRAGRFQEELEKEYIDKVGSMQWLKNGKLGFDGERILIGAQDQGLLTNGFKKMAGISQNDKCRFCHTAVESVNHLTAACQILMADGHYTSRHNKICQYLHWKICKELELEVKEHVWEHEPTPVSSNGKITIFYDKEIPAGRHIEGGAIKPDIVIWNKQEKTAKIIDVTVPNDYGLNRAERGKISKYQDLKNDLRTTWSLKDIDIIPVVVGATGLMKKNLKKYLEAIPGHPSAHEVQLSAIKGTITILKRALGYNARSG

SEQ ID NO: 8069 - protein, 1128 aa, Thalassophryne amazonica
MPPEKPNNSMPPEKPNNSMPPEKPNNSMHPEKTNNSMHPEKPNHSLPPEKPNHSLPHEKPNHLLPPEKMNNSLPPEKMSNSLPTEKANNSPAHLQNNSQVHTDPEQQELEEELANKIEDTRKMDMKERPKLTKLKENKKFKNILQKVNIGLTKLVPRGATLTELNSVNYGAAWYIQSKLAPQDLERNSTTNKKKNIMPRWKKKLQQKISCLRAEISQMATFLGNKNHKKNLLKKINRIKRKYNVEDKLLGGRLAEHQALVKAFAAQIRNKDKKIQAKQINKLFATNPRLVYRKLANDTIEVQQPPERKEIEKFWRPLFEDPKQHQEAEWIEKIQQKNKDKQQMPAIVINEEEIRKKMSEYSNFKAPGIDKIPNFWLKRLTALHQHYAVAFTKILNGEEDTPDWLTTGNTSLIPKTKETQLPNKYRPICCLTTTYKWLTGIIADAIYEHLDNGGYLENEQKGCSKRRLGAKDQLLTDKAILEDCKTRQRNLSMAWIDYKKAFDSVPHSWILRCLELYNINEKIRTFLKAQMNNWNTTITLNHTEGQITIPDVRVQRGILQGDSLSPLLFCLIMDPLSKILKEQDIGYDLSKDKGKENQKLVNHLLFMDDLKIYANTKNGLTQLVETAHKFSKDIGMEFGLDKCSKCTMTKGKKTKTENIQLDEGSYIADLAADSTYKYLGIEQSNSIEHKKMRTKTTKEYLNRLKKICKTQLTPKNKITAINQFAIPVVTYGFGIVNWPQYELNKLDTKTRKMLTLHKITYRNQCMDRIYLPRREGGMGLTEINQAYRASIISIGQYLKSSEEEIIKTVTQHHEAISERTSITKLAKNFGGELLQERKSNSLTPATKLARQTREQYCKKEGKHRVERWKQHKRAGRFQEELEKEYIDKVGSMQWLKNGKLGFDGERILIGAQDQGLLTNGFKKMAGISQNDKCRFCHTAVESVNHLTSACQILMADGHYTSRHNKICQYLHWKICKELELEVKEHVWEHEPTPVSSNGKITIFYDKEIPAGRHIEGGAIKPDIVIWNKQEKTAKIIDVTVPNDYGLNRAERGKISKYQDLKNDLRTTWSLKDIDIIPVVVGATGLMKKNLKKYLEAIPGHPSAHEVQLSAIKGTITILKRALGYNARSG

SEQ ID NO: 8070 - protein, 987 aa, Thalassophryne amazonica
MKIHTGQKPFVCSECGKRFTEKGNLKTHMTIHTGQKPFVCSECGKRFRQKGNLNIHKQFHAGQKPFGCSECVKRFGNKGHLNRHMLVHTGDKKRNLLRKIYRIKRKYNIEDKQLAARLAEHQAIVKALAAQIRNKDKKIKAKQINKQFANNPRLVYRNMVNDTVEVQQPPEREEVERFWRPLFEDSKQHQEAEWIEIIKRKNKDKQQMPAMIITEELIRNKIHEYSNFKAPGIDKVPNFWLKRLTALHHHYAAAFTKILNGKEDTPDWLSTGNTTLLPKTKETQLPNKYRPICCLTTTYKWLTGIIADAVYEHLDTGGYLENEQKGCLRKRLGAKDQLLIDNAILEDCKRRRRNLSMAWIDYKKAFDKIPHSWIMRCLELYNINKEVRSLLKTQMNKWNTTITLNHAEGQIIIPDIKVTRGIFQGDSLSPLLFCLSIDPLSKILKELDIGYDLDGGRGRKHKQVVSHLLFMDDLKIFADSERGLRRLVEAVHTFSKEIGMEFGLDKCSKCTIRGGKKQDEGNVTEDLAEDSTYKYLGIEENTTIEHKKMREKVTQEYLNRLKKICKSELIPKNKITAINQFALPVLSYGFGIVDWPQGELNKLDTKTRKMLTLHKITYRNQCMDRIYLPRREGGLGLVEINQAYRASIISIGQYLKSSQEEVMKKVMQHHIKTMPQQTSIIKLAENFGGDLLRERESNELTPATTLARQAREKYSKREQKHRMNRWKQHKRAGRFQEELEKEYIDKEGSVRWLTNGELGFDGERIIVGAQDQGLLTNGFKKMAGISQNDQCRFCHAAVESVNHLVSACQILMADGHYTSRHNKICKYLHWKVCKELEVEVEGHVWEYEPAPVSSNGKVIVFYDKEIPAGRHIERGAVKPDIVIWNKQEKTAKIIDVTVPNDYGLNRAEREKITKYQDLKNDLRITWSLKEIDIIPVVVGATGLMKKNLKKYLEAIPGHPSAHEVQISAVKGTVTILKRALGYNANND

SEQ ID NO: 8071 - protein, 1119 aa, Thalassophryne amazonica
MPPEKPNNSMPPEKPNNSMPPEKPNNSMPPEKPNNSMPPEKPNNSMPPEKPNHSLPHEKMNNSLPPEKMSNSLPTEKTNNSPAHLQNNSQVHTDPEQQELEEELANKIEETRKMDMKERPKLTKLKENKKFKNILQKVNIGLTKLVPRGATLTELNSVNYGAAWYIQSKLAPQDLERNSTTNKKKNIMPRWKKKLQQKISCLRAEISQMATFLGNKNHKKNLLKKKKNRIKRKYNVEDKLLGGRLAEHQALVKAFAAQIRNKDKKIQAKQINKLFATNPRLVYRKLANDTIEVQQPPERKEIETFWRPLFEDPKQHQEAEWIEKIQQKNKDKQQMPAIVINEEEIRKKMSEYSNFKAPGIDKIPNFWLKRLTALHQHYAVAFTKILNGEEDTPDWLTTGNTSLIPKTKETQLPNKYRPICCLTTTYKWLTGIIADAIYEHLDNGGYLENEQKGCSKRRLGAKDQLLTDKAILEDCKTRQRNLSMAWIDYKKAFDSVPHSWILRCLELDNINEKIRTFLKAQMNKWNTTITLNHTEGQITIPDVRVQRGILQGDSLSPLLFCLIMDPLSKILKEQDIGYDLSKDKGKENQKLVNHLLFMDDLKIYANTKNGLTQLVETAHKFSKDIGMEFGLDKCSKCTMTKGKKTKTENIQLDEGSYIADLAADSTYKYLGIEQSNSIEHKKMRTKTTKEYLNRLKICKTQLTPKNKITAINQFAIPVVTYGFGIVNWPQCELNKLDTKTRKMLTLHKITYRNQCMDRIYLPRREGGMGLTEINQAYRASIISIGQYLKSSEEEIIKTVTQHHEAISERTSITKLAKNFGGELLQERKSNSLTPATKLARQTREQYCKKEGKHRVERWKQHKRAGRFQEELEKEYIDKVGSMQWLKNGKLGFDGERILIGAQDQGLLTNGFKKMAGISQNDKCRFCHTAVESVNHLTSACQILMADGHYTSRHNKICQYLHWKICKELELEVKEHVWEHEPTPVSSNGKITIFYDKEIPAGRHIEGGAIKPDIVIWNKQEKTAKIIDVTVPNDYGLNRAERGKISKYQDLKNDLRTTWSLKDIDIIPVVVGATGLMKKNLKKYLEAIPGHPSAHEVQLSAIKGTITILKRALGYNARSG

SEQ ID NO: 8072 - protein, 1323 aa, Schlechtendalia chinensis
MDYTGTSQSAGPSSRREVGPGEPVGDAPSETGYSCPTTMITRATRKNVGPRIPAGNIPLDTGGPRRRDEQLSPTMPGPRIPAGNIPPDTGGPGSQHAAVRQPELDGVVLRVFHPVPTVWECPVSGCDVQYNNQVWTSNRVNLVKHLQRHHAVDANYVLVCARCEEPLNKRPSTHECAIGVRAPVASPVVTARRQPEMADGTLRIYWPLPMELECVAERCSATFRTGSWTSAKQSLRRHIEFLHDMRPEVTLECVACETVLGFRPSEHKCQATFDDGDDDGNGRYKCTEPECGRSFASKRGLNNHALAYKRRDRVDEARVELPAPNTRQQRAAARVRGVQPAVNGAAAADPTSPRRTSPRTQETSSIVREKPRNERYDIVYASPHLWLPNPPVPIGSSARSDDEAPVGVEAAEEGGAVDVTADETVDDGVAEVQLNSDDTTEIHVHTPVLFEIRAAPLTVENWARFENVMAQVTADARAVAKVPDRAEGNRKRTRLDVNDAQGIQTVYRRNRRRAIRAIVEGEGAECEVPTEEVEAHFREVWAESQCDETVYEAVEGREPIPIGPFTSQEVRKRLMRFENTAPGDDGLTYKHWRRLDPECILLTLVLDICARYRRIPAQWKRSVTVLIPKKGDPAHIANWRPIAMCRTVYKLLVGCVADRLTKWAVENAALSPGQKGFMPADGAFEHTHTLNRLIEKTRCSGTERCVAWLDVSNAFGAVPHSALITALRTMGAGSAITELVRDIYDGSTSAVSTGVGTTGQIDVKSGIKQGCPLSGLLFNLAVDHVIRAVQADAAEHRVLAFADDLCVIADSPAELQTLLDVTTDRLRRTGLHLNPGKCVTMHMSGRTPVGVRDTRFSIDGQQVRPLRDGEATTFLGAQVGFQIVPRMSTVADITQLGLKVLRSKLAPWQRIDAMKTFVYPAVTHLLRVGDIKKTDWEAVDNVWKPEYKITLGLPQEASNDYLYGHRKGGACGIPLLAEESDVARVDTAFKLLTSPDERVATDATEHLKDVVHKRVREPPDIDSCMDFLSGANEGQMRAPSAGVANVWTRARKASRQAGAVWRSEGTEPVLTVPAASITLRRKQRRQVFSTMRQAAQTKRIRDLIDKPDQGRAIECAAAHPVSNHFLRGGEYTRFADWRFVHKARLNLVHLNGSAAWRSGDRRCRRCGYQTESLAHVVDHCMRYSALYLARHNAVVQRIKTAAARKFEIVAENRVVGSGNLRPDMVLRRKSDGKTYIVDVTIPFDNRMAAFKSAAEDKAMKYGDLAKELPESNPPRWSPSSSGPLARGIRLTTASWRNSAAGPTPLKCGSCVSVMSLRSPVTYT

SEQ ID NO: 8073 - protein, 1331 aa, Schlechtendalia chinensis
MSYIGTSQTAGPSSRRAVESGVPIGDAPSDTSGSHPTTITTRSAIDVGPRIPAVKIPPDTGGPRRRVEMPSPVVIPGPGIPAGNTPPDTGGPGIERAAVRQPSLVGGALRVYYPVPTVWECPVSGCDVHYNNQVWTSNRVNLIKHLQRLHAVEANYELVCARCEEPLNKRPSTHECAVEMRAPVAPPVVIARRQPQMADGVLKIFWPLPMEIECVAEKCSTTFRTGSWTSAKQSLRRHIEFLHEMRPEVVLECIGCSTVLGLRPSEHDCHSKFDDGDDDGNGRYKCTETECGRSFASKRGLNNHALAHKRRDRIDAARVELPAPNTRQQRAAARARGAPSVNDGPAAVNTTSPRRTSPRTQDTPSIIREKPRNERYDIVYASPHLWLPNPPVPIGSSTRTDDEASVGVEAAVDSGAGDVTDDDGVAEVELNPDDTTEIHIHMPVLSEVRTAPITVENWAKFENVMAQVTADARAVAKVPDRAEGSRKRTRLDVNDAQGIQTVYRRNRRRAIRAIVEGEGAECEVPTDEVEAHFREVWAESKCDETAYETVEGREPIPIGPFTSQEVRKRLMRFENTAPGDDGLTYKHWRRLDPECTLVTVVLDICARYRQIPALWKRSVTILIPKKGDPAHIANWRPIAMCRTLYKLFVGCVADRLTKWAVENAALSPCQKGFMPADGAFEHTHTLNRLIEKTRCSGTERCVAWLDVSNAFGAVPHSALITALRTMGAGSAITELVRNIYDGSTSTVSTGVGTTGEIDTKSGIKQGCPLSGLLFNLAIDHVIRAVQADAAEHRVLAFADDLCVIADSPAELQTLLDIATARLARTGLHLNPGKCVTMHLSGRTPVGVRDTRFSIDGQQIRPLRDGEATTFLGAQVGFQIVPRMSTVADITQLGLKVLRSKLAPWQRIDAMKTFVYPAVTHLLRVGDIKKTDWEAVDNVWKPEFKITLGLPQEASNDYLYGHRRGGACGIPLLAEESDVARVDTAFKLLTSPDERVATDATEHLKNVVHKRIREPPDIDSCMDFLSGNSEGQLRAPTAGVANVWTRARKASRQAGVAWRSEGNEPVLTVPAASITLRRKQRRQVFSTMRQAAQTKRTRDLIEKPDQGRAMECAAAHPVSNHFLRGGEYTRFADWRFIHKARLNLVHLNGSAAWRSGDRRCRRCGYQTESLAHVVDHCMRYSALYLARHNAIVNRIKTAAARKFEIVAENRVVGRDNLRPDMVLRRKSDGKTYIVDVTIPFDNRMAAFKAAAEEKINKYRDLAKGMSGEQPAEVIPFIVGALGAWDPANDSFMAKLCSRSYATQMRKLCVSDAIAFSRDIYVEHLTGTRQRQL

SEQ ID NO: 8074 - protein, 1139 aa, Schlechtendalia chinensis
MADGTLRIYWPLPMELECVAERCSATFRTGSWTSAKQSLRRHIEFLHDMRPEVTLECVACGTVLGFRPSEHNCQATFDDGDDDGNGRYKCTEPECGRSFASKRGLNNHALAHKRRDRVDAARVELPAPNTRQQRAAARVRGVQPAVNGAAAADPTSPRRTSPRTQETSSIVREKPRNERYDIVYASPHLWLPNPPVPIGSSARSDDEAPVGVEAAEEGAAVDVTADETVDDGVAEVQLNSDDTTEIHVHTPVLFEIRAAPLTVENWARFENVMAQVTADARAVAKVPDRAEGNRKRTLVDVNDAQGIQTVYRRNRRRAIRAIVEGEGAECEVPTEEVEAHFREVWAESQCDETVYEAVEGREPIPVGPFTSQEVRKRLMRFENTAPGDDGLTYKHWRRLDPECILLTLVLDICARYRRIPAQWKRSVTFLIPKKGDPAHIANWRPIAMCRTVYKLLVGCVADRLTKWAVENAALSPGQKGFMPADGAFEHTHTLNRLIEKTRCSGTERCVAWLDVSNAFGAVPHSALITALRTMGAGSAITELVRDIYDGSTSAVSTGVGTTGQIDVKSGIKQGFPLSGLLFNLAVDHVIRAVQADAAEHRVLAFADDLCVIADSPAELQTLLDVTTDRLRRTGLHLNPGKCVTMHMSGRTPVGVRDTRFSIDGQQVRPLRDGEATTFLGAQVGFQIVPRMSTVADITQLGLKVLRSKLAPWQRIDAMKTFVYPAVTHLLRVGDIKKTDWEAVDNVWKPEYKITLGLPQEASNDYLYGHRKGGACGIPLLAEESDVARVDTAFKLLTSPDERVATDATEHLKDVVHKRAREPPDIDSCMDFLSGNSEGQLRAPTAGVANVWTRARKASRQAGVAWRSEGNEPVLTVPAASITLRRKQRRQVFSTMRQAAQTKRIRDLIDKPDQGRAIECAAAHPVSNHFLRGGEYTRFADWRFIHNARLNLVHLNGSAAWRSGDRMCRRCGYQTESLAHVVDHCMRYSALYLARHNAIVNRIKTAAARKFEIVAENRVVGSDNLRPDMVLRRKSDGKTYIVDVTIPFDNRMAAFKAAAEEKINKYRDLAKGMSGEQPAEVIPFIVGALGAWDPANDSFMAKLCSRSYATQMRKLCVSDAIAFSRDIYVEHLTGTRQRQL

SEQ ID NO: 8075 - protein, 957 aa, Paramacrobiotus metropolitanus
MTNDRVPCPYCKQLYCRGGGLTRHKKKCPLRPADSVPSTAPPDTAYNSAGAAPTPPPTESFKPSKERVMRRIPHGARTTARDSLRTALQQVAIKNDKSSWDKLFSFAPAALRAPPKAKTDRTESLATFVKRNVGSYDNGTQLPPTPPPPAPKKRSDEEDLVRRVGQKIDDGSISGAMRLILSTDAVVAPSPDVLQELREKHPECPPPPNTAQPAPPVDAAPPITAAEVFSAVHTFPRGSAAGPDGLRPQHLLDMVGHKYNEHCRPLCEALAAVLNLAVNGSIPAEVRPLFFGGKLLALRKKDGGLRPIAVGLTLRRLVAKIICHRVADRITPVLSPQQLGFNVRGGAEAIVHATRVFVESSSLEPTAVLKIDFKNAFNTVSREAILAAAERHLPEYSAFFRSAYGDHSSLFIEQLMMSSESGVQQGDPLGPLLFCLALQPVVDSLNVDLNAWFLDDGTMGGKPAAVANAFDQIITRARAIGLVVNEGKCELYVSGGTEETRCEVVAEFRLKYPKLRILLNADFMLLGAPVLDEAIGPAVVEKCSTLKTACERLGLLPRHHALFLLKNCLGAPKIVYMLRCCNAWRQPQQLYQLDEVMRSCFQSLCNVRTNHDDYPCWRQATLPVSRGGIGIRRAEELALPAFLASIHSASDLMSKLLPDHPSVDASAPMELWKASARLTDLPESQFRKSQRTWDLPLCNASLSTLLDVFRHDEVNKARLLAQSTPEAGLWLNALPSAHIGNLLDDDTVKISVGLRLGATICEPHICAKCNKPVDVYGHHGLSCSFSAGRHARHGGLNNIVCRALVSAGIPAKVEPRGTSHTSDRRPDGCTTFAWKRGMCLAWDVTCVDTVAVSHLRSTSTTAGSAAAQAEEKKVRFYAYLDGRYIFAPLAFETLGPWGKSATLLVKEIGKRLQQHTGEPRSHEFLRQRLSLEIQRGNAASVLGTMEAAAALNEILFL

SEQ ID NO: 8076 - protein, 954 aa, Paramacrobiotus metropolitanus
MPQFSCSGCGKLLQAWGSHRPVCPKTLSQDLKLIPAASAASTSSNSRGAAPTPPTAASFHPSKERILRRVPHGARPAVRSALQKVLQQVATKNDSQFWTKLLFFCPSALRLPDKVKSERTASLATAVKKNLALYEQGTDVPPSPPPSSRRKRSSDEDLVRQVGQKIDDGSISGAMRVLLSTDSVADCTPEVLQSLREKHPLCAPPSTARRATTAPAAPVITAAEVFAAIHTFPRGSAAGPDGLRPQHLLDLVGSKLDDLSGPFCEAMASVLSLVMQGKVPADIRPIFFGGNLLALRKKDGGLRLIAVGLSMRHLLAKIICSRIADRATALLTPQQSGFNVRGGAEAIVHATRHFVQSTPESIKALVKIDFRNAFNTVSREVVLEAVHTHFPEYDDFFWPAYGHHSSLFIDEMVMSSESGVQQGDPLGPLLFCLALLRVIATLDTELNAWYLDDGTLGGTPATVAENFRRVIEGAHAIGLDINEAKCELFVSGGSEIERQAVVDEFVSHHPQLRVVSSSTLTLLGAPVLDDAIGETLSEKSSAIKKACERLQLLPRHHALYLLRHCLGAPKIIYVLRCCNAWKHSKLLYQIDESLRSCFQELSNVRVNHDDYPCWRQATLPVSRGGIGIRRAEELALPAYLASIHSVSDLLSSMLPHLPAVNASEAVELWKTKARLTEVPEVGFRKLQKTWDLPLCNVSASVLLNLFRGDIVNTARFLAQSCPEAGIWLNALPSAHIGNLLDDEMIKISIGLRLGADICEPHNCTKCQKLVDKLGHHGLSCSYSAGRHARHGGLNSIVCRACVSAGVPAKLEPRGTSSTTDQRPDGCTTFAWKRGMCLAWDVTCVDTVAFSHLPSTSVTAAAAAVQAEDKKSRLYAYLQGRYIFSPIAFKTMGPWGPSAIAIVKELGKRLQEHTGERRSHEFLRQRISLEIQRGNAASILGTMDGVDSLNEVLLL

SEQ ID NO: 8077 - protein, 954 aa, Paramacrobiotus metropolitanus
MPQFSCSGCGKLLQAWGSHRPVCPKTLSQDLKLIPAASAASTSSNSRGAAPTPPTAASFHPSKERILRRVPHGARPAVRSALQKVLHQVATKNDSQSWSKLLSFCPSALRLPDKVKSERAASLATAVKKNLALYEQGTDLPPSPPPSSRRKRSSDEDLVRQVGQKIDDGSISGAMRVLLSTDSVAVCTPEVLQSLREKHPLCAPPSTARRATTALAAPVITAAEVFAAIHTFPRGSAAVPDGLRPQHLLDLVGSKLDDLSGPFCEAMASLLSLVMQGKVPADIRPIFFGGKLLALRKKDGGLRPIAVGLSMRRLLAKIICSRIADRATALLTPQQSGFNVRGGAEAIVHAARHFVQSKPESIKALVKIDFRNAFNTVSREVVLDAVHTHFPEYDDFFWSAYGHHSSLFIDGMVMSSESGVQQGDPLGPLLFCLALLRVIATLDTELNAWYLDDGTLGGTPATVAENFRRVIEGAHAIGLDINEAKCELFVSGGTEIERQAVVDEFVSRHPQLRVVSSSTLTLLGAPVLDNAIGETLSEKSSAIKTACERLQLLPRHHALYLLRHCLGAPKIIYVLRCCNAWKDSKLLYQIDESLRSCFQELSNVRVNHDDYPCWRQATLPVSRGGIGILRAEELALPAYLASIHSVSDLLSSMLPHLPAVNTSEAVELWKTKARVAEVPEVGFRKLQKTWDLPLCNVSASVLLDLFRGDVINTARFLAQSRPEAGIWLNALPSAHIGNLLDDETIKISIGLRLGADICEPHDCTKCQKRVDKLGHHGLSCSYSAGRHARHGGLNSIVCRACVSAGVPAKLEPRGTSSITDQRPDGCTTFAWKRGMCLAWDVTCVDTMAFSHLLSTSVTAGTAAVQAEDKKSRRYAYLLGRYIFSPIAFETMGPWGPSAIAIVKELGKRLQEHTGERRSHEFLRQRISLEIQRGNAASILGTMDGVDSLNEVLLL

SEQ ID NO: 8078 - protein, 957 aa, Paramacrobiotus metropolitanus
MTGVKDPCPYCKKLYCRGGGLKRHMKKCPLRPADPPPPPVTAGTADNSTAPAPTPPPTECFKPSKERVMRRIPHGARSTARDSLRTALQQVASKNDKPSWLKLPSFAPTALCVPPKAKSERTESLASVVKKNVGIYDRNTELPPSAPPPAPRKKSEQEELVRRVGQKIDDGSISGAMRLILSTDAVVAPSPNVLQELREKHPECPPPSAAARPTPLADAAPPITAAEVFSAIHTFPRGSAAGPDGLRPQHLLDMVGHKFNDLCSPLCEALANVLNLSLSGSVPAEIRPIFFGGKLLALRKKDGGLRPIAVGVTLRRLIAKIICHRVADRITPVLSPQQLGFNVRGGAEAIVHATREFVESSVAEVTAILKVDFKNAFNTVSREAVLAAAECHLPEYKAFIQSAYGNHSSLFIEQLIMSSESGVQQGDPLGPLLFCLALQPVVASLKAALNAWFLDDGTMGGKPATVAHAFAEIILKAREIGLVVNEAKCELHISGGTEEARNDAVAYFQEMYSKLRILTNADFLLLGAPVLDDAIGPAVAEKCATVKMACERLEFLPRHQSLFLLKNCLGVPKIIYMLRCCNAWKQPQQLYQLDEAVRVCFQSLCNVRTSHDDYPCWRQATLPVSRGGIGIRRAEELALPAFLASIHSVSGLISLLLPDHPTVNVSAASELWKVNARLAELPEQNVRKVQRSWDLPLCNTSLSTLLDIFRDDEVNRARLLAQSTPEAGIWLNALPSAHIGNLLDDDTVKISVGLRLGVNICEAHSCSKCHKPVDVYGHHGLSCAFSAGRHPRHGGLNSILCRSLVSAGIPAKLEPRGTSHTSDRRPDGCTTFAWQRGMCLAWEVTCVDTVAMSHRKATSVTAGSAAAQAEDRKAGLYLYLQGRYIFVPLAFETLGPWGKSASRLVKEIGKRLQQHTGEPRSHEYLRQRLSLEIQRGNAASVLGTMEGAAALNEILLF

SEQ ID NO: 8079 - protein, 954 aa, Paramacrobiotus metropolitanus
MPQFSCSGCGKLLQAWGSHRPVCPKTLSQDLKLIPAASAASTSSNSRGAAPTPPTAASFHPSKERILRRVPHGARPAVRSALQKVLQQVATKNDSQSWTKLLFFCPSALRLPDKVKSERTASLATAVKKNLALYEQGTDVPPSPPPSSRRKRSSDEDLVRQVGQKIDDGSISGAMRVLLSTDSVADCTPEVLQSLREKHPLCAPPSTARRATTAPAAPVITAAEVFAGIHTFPRGSAAGPDGLRPQHLLDLVGSKLDDLSGPFCEAMASVLSLVMQGKVPADIRPIFFGGKLLALRKKDGGLRPIAVGLSMRRLLAKIICSRIADRATALLTPQQSGFNVRGGAEAIVHATRHFVQSTPESIKALVKIDFRNAFNTVSREVVLEAVHTHFPEYDDFFWSAYGHHSSLFIDEMVMSSESGVQQGDPLGPLLFCLALLRVIATLDTELNAWYLDDGTLGGTPATVAENFRRVIEGAHAIGLDINEAKCELFVSGGSEIERQAVVDEFVSHHPQLRVVSSSTLTLLGAPVLDDAIGETLSEKSSAIKKACERLQLLPRHHALYLLRHCLGAPKIIYVLRCCNAWKHSELLYQIDESLRSCFQELSNVRVNHDDYPCWRQATLPVSRGGIGIRRAEELALPAYLASIHSVSDLLSSMLPHLPAVNASEAVELWKTKARLTEVPEVGSRKLQKTWDLPLCNVSASVLLDLFRGDIVNTARFLAQSCPEAVIWLNALPSAHIGNLLDDETIKISIGLRLGADICEPHNCTKCQKRVDKLGHHGLSCSYSAGRHARHGGLNSIVCRACVSAGVPAKLEPRGTSSTTDQRPDGCTTFAWKRGMCLAWDVTCVDTVAFSHLPSTSVTAAAAAVQAEDKKSRLYAYLQGRFIFSPIAFETMGPWGPSAIAIVKELGKRLQEHTGERRSHEFLRQRISLEIQRGNAASILGTMDGVDSLNEVLLL

SEQ ID NO: 8080 - protein, 780 aa, Paramacrobiotus metropolitanus
MRVLLSTDSVAVCTPEVLQSLREKHPLSPPPSTARHATSAVAAPMITSAEVFAAIHTFPRGSAAGPDGLRPQHLLDLVGSKLDDQSGPFCESVASVLTLVQQGKIPAVIRPIFFGGKLLALRKKDGGLRPIAVGLSLRRLIAKIVCTRMEDRATALLTPHQSGFNVRGGAEAIVHATRHFIQSSPESIKVLVKIDFRNAFNTVSREVILDAVHQHFPEYDEYFWSAYGHHSSLFIDQPVLSSESGVQQGDPLGPLLFCLALLRVIATLDTVLNAWYLDDGTLGGAPATVAENFGRVITGARSIGLEINEAKCELFVSGGSESERQEVIDDFVSRHPQLRVVSSTTLTLLGAPVLDDAIEDSLQAKSSAIGRACERLQLLPRHHALYLLRHCLGAPKIIYVLRCCNAWKHPHLLYQIDESLRSCFQELSNVRVNHDDYPCWRQATLPVSRGGIGIRRAEELSLPAFFTSIHSVSCLLSSMLPHLPAVDASEAIELWKGKARQQEMPEVAFRKLQKTWDLPLCNVSVSVLLDLFRGDSVNTARLLAQSRPEAGIWLNALPSAHIGNLLDDETMKISIGLRLGADICEPHNCTKCDKHVDKLGHHGLSCTYSAGRHARHGGLNSIVCRACVSAGVPAKLEPRGTSSTTDQRPDGCTTFAWKRGMCLAWDVTCVDTMALSHLPSTSITAGAAAVQAEEKKSRLYTYLQGRYIFSPIAFETMGPWGPSAIAIVKELGKRLQEHTGERRSHEFLRQRLSLEIQRGNAASILGTMDGVDSLNEVLLL

SEQ ID NO: 8081 - protein, 958 aa, Paramacrobiotus metropolitanus
MVKTKPRDQQCPFCQNRFSKGIGITKHKEACQRRASTLPVQSAAATNAAGAAPTPPTTEAPFQPSKERVMRRIPHGARPAARASLQAALQRVASKNDKTSWLKLFAFASTTLRVPPKAKPERNESLASVVKRNVGSYDRDEEPPPTPPPSTTKKRSVDEDLARRVGQKIDDGCISGAMRLILSTDAIASPSPIVLQELREKHPESPPPPTTAQLDPPTNAAPPVTAAEVFSAIHAFPGGSAAGPDSLRPQHLLDMVGHKLDDHSKPLCESLAAVLNLLVDGTLPDDVRPVLFGGKLLALRKKDGGLRPIAVGLTLRRLIAKIICSRVADRVTAVLSPQQLGFNVRGGAEAIVHATRLFAESSTATPTAILKIDFRNAFNTVSREAVLNAGKLHLPEYGKFLQLAYGNHSWLFLEQFLLSSESGVQQGDPLGPLLFCLALQPVIADLIADLNAWFLDDGTLGGKPAAVAHAFDQITERARAIGLIVNEAKCELYVCGGSEEAQQEVVDSFREKYPSLRILTSATFSLLGAPVLDDAIGPAIAEKATTLKMACARLELLPRHQALFLLKNCLGAPKIMYMLRCCNAWKQPQQLYQLDEAMRECFQILCNVRTNQNDYPCWRQASLPVSRGGIGIRRAEELSLPAYLASIHSVSELMPQLLPHHPAVDAESARQSWKAKSRQTELPEASFRNSQRTWDLPLCNASLSTLLEIFHEDEINRARLLAQSKPEAGIWLNALPSAHIGNLLDDDTLKISVGLRLGAIICEAHLCAKCHKPVDVYGHHGLSCSFSARRHPRHGGLNSIVCRSLVSAGVPAKLEPRGTSHTSGRRPDGCTTFAWKRGMCLAWDVTCVDTVALSHIKSTSAAAGSAAAQAEDKKAKLYAYLEGRYIFAPLAFETFGPWGKSASLLVKEIGKRLQQHTGELRSLEFLRQRLSIEIQRGNAASVLGTMDGAEKFKEIFLL

SEQ ID NO: 8082 - protein, 946 aa, Paramacrobiotus metropolitanus
MPLQPFSCSGCGKQLRAWGNHRNACPKTLSSTLEPIPLTPATSDNSAAPAPTPPPAVTFRPSKVRIMRRIPHGARPAARASLVKALQQVATNNDNNSWWKLLSFAPTALRLPVKSKSPHSGSLASTVKQNIGTFDSGTATAPTSPPPSRKTRTDQDDLVRRVGQKIDDGSISGAMRVVLSTDAVLRPTPEVLAELREKHPQSAPPGVVRLDPPPPVPARITREEVFAAIQSFPKGSAAGPDGLRPQHLADMVGPKLDDHSAPLCDALVAVLNIAVDGKVPTDVRPVFFGGKLIALRKKDGGLRPIAVGMTLRRLLAKIICARLKDRSAAILSPQQLGVNVCGGAEAIVHATRTFIESPGDTTKVVLKVDFRNAFNTLSREAVLAAVMKHFPEYSDFLFCAYGHHSTLYVDDVSLSSESGVQQGDPLGPLLFSLALHPLVALLNAELNAWFLDDGTLGGAPTVVADCFRRIIEGALAIGLQVNEAKCELLVFGGTPDSRRVVTEEFLERYPRLRILTESTMSLLGAPVLDDAIGPLLNEKASTLKLMCERLQLLPSHQALFLLKNCLGAPKIIYMLRCCNAWKYPALLYQLDEAMRSCFQNLSNVRTNHNDYPPWRQATLPVSRGGIGIRRSEELSLPAFLASIHSVSGLLATLLPNHAAVDATGASESWKLKARQPQLPETLFRKSQKAWDLPLCNVSLAALLEVFQGDEINTARLLAQSRPEAGIWLNALPSAHIGNLLGDDELKISIGLRLGATICEPHDCVKCHKPVGGYGHHGLSCVFSAGRHPRHGGLNSIICRAFVSAGVPAKLEPRGTSHTNERRPDGCTTFAWKRGLCLAWDVTCVDTVALSHLKATSTTAGAAAAQAEGKKAGLYFYLTGRYLFVPIAFETLGPWGPSAIAIIKELGKKTAAAHRGSTLARISATAFVHRNSAGKCGFSAGHDGRAR

SEQ ID NO: 8083 - protein, 953 aa, Paramacrobiotus metropolitanus
MPSQLFSCSGCGKQLRGWGNHKNACPKTLSTTMEKIPVTPSTSDNSSAPAPTPPTEPFRPSKERIMRRIPHGARPAARASLLKVLQQVATNNDSNSWSKLLSFAPTALRQPVKSKSGHSGSLASTVKQNIGIFDSGAAVPPTPSPPARKKRTDQDDLVRKVGQKIDDGSISGAMRIVMSTDAVLRPTPDVLAELREKHPESDPPLVVRPDPPPQAAARITREEVFAAVHSFPKGSAAGPDGLRPQHLADMVGAKLDAQSAPLCDALATVMNIAIDGNIPVGVRPAFFGGKLIALRKKEGGLRPIAVGMTLRRLTAKIICARLKDRSAAILSPQQLGVNVRGGAEAIVHATRKFIESTGDTTKVVLKVDFKNAFNTLSREAVLTAAKERFPEYSDFLTAAYGHHSTLYVDDLTLSSESGVQQGDPLGPLLFSLALHPLISSLNAELNAWFLDDGTLGGAPATVAECFSRIIERARAIGLQVNEAKCELFVFGGTLESQGNVTAEYIDRFPRLRILSASTMSLLGAPVLDEAIGPLLIEKASTLKMVCERLQLLPSHQALFLLKNCLGAPKIIYMLRCCNAWKYPTLLYQLDETMRACFQNLSNVRTNHNDYPPWRQATLPVSRGGIGIRRSEELSLPAFLASIHSVSGLLSSLLPDHGVVDVSGAVESWKLKARQPEIPELAYRKSQKAWDLPLCNVSLSSLLEVFQGDELNKARLLAQSRPEAGIWLNALPSAHIGNLLGDDELKISVGLRLGATICEPHDCVKCLKPVDGYGHHGLSCDFSAGRHPRHGGLNSIICRGCVSVGVPAKLEPRGTSHTTERRPDGCTTFAWKRGLCLAWDVTCVDTVAPSHVKATSTTVGAAAVQAEDKKSRLYIYLAGRYLFVPIAFETMGPWGPSAIAFIKELGKILQQQTGEARSHEFLRQRLSIEIQRGNAASVLGTMEGLDKLNEIFLL

SEQ ID NO: 8084 - protein, 958 aa, Paramacrobiotus metropolitanus
MPQFSCCGCGKLLQAWGSHRPVCPKTLSRDLKLIPIAAAAGAAASTSTSSKSGGAAPAPPLAASFHLCKERILRRIPHGARPAVRSSLQKVLQQVATKNDSQSWFKLLSFCPNALPLPAKVKSERSASLATAVKRNLALYEQGTDLPPSPPPTSRKQRCNEEDLVRQVGQKIDDGSISGAMRVLLSTDSVAVCTPEVLQSLREKHPLSPPPSTARHATSAVAAPIITSAEVFAAIHTFPRGSAAGPDGLRPQHLLDLVGSKLDDQSGPFCESVASVLTLVQQGKIPAVIRPIFFGGKLLALRKKDGGLRPIALGLSLRRLIAKIVCTRMADRATALLTPHQSGFNVRGGAEAIVHATRHFIQSSPESIKALVKIDFRNAFNTVSREVILDAVHQHFPEYDEYFWSAYGHHSSLFIDQTVLSSESGVQPGDPLGPLLFCLALLRVIVTLDTVLNAWYLDDGTLGGEPATVAENFGRVITGARSIGLEINEAKCELFVSGGSESERQEVIDDFVSRHPQLRVVSSTALTLLGAPVLDDAIEDSLQAKSSAIGRARLQLLPRHHALYLLRHCLGAPKIIYVLRCCNAWKHPHLLYQIDESLRSCFQELSNVRVNHDDYPCWRQATLPVSRGGIGIRRAEELSLPAFLASIHSVSCLLSSMPPHLPAVDASEAIELWKGKARQPEMPEVAFRKLQKTWDLPLCNVSVSVLLDLFRGDSVNTARLLAQSRPEAGIWLNALPSAHIGKLLDDETMKISIGLRLGADICEPHNCTKCDKHVDKLGHHGLSCTYSARRHARHGGLNSIVCRACVSAGVPAKLEPRGTSSTTDQRPDGCTTFAWKRGMCLAWDVTCVDTMALSHLPSTSNTAGAAAVQAEEKKSRLYAYLQGRYIFSPIAFETMGPWGPSAIAIVKELGKRLQEHTGERRSHEFLRQRLSLEIQRGNAASILGTMDGVDSSNEVLLL

SEQ ID NO: 8085 - protein, 922 aa, Paramacrobiotus metropolitanus
MGNHKNACPKTLSTTMEKIPVTLSTTDNSSVPAPTPPAEPFRPSKERIMRRIPHGARPAARASLLKALQQVATNNDSNSLRQPVKSKSGHSASLASTVKQNIGIFDSGAAVPPTPSPPARKKRTDQDDLVRRVGQKIDDGSISGAMRIVMSTDAVLRPTPDVLAELREKHPESDPPLVVRSDPPPQEAARITREEVFAAVHSFPKGSAAGPDGLRPQHLADLVGAKLDAHSAPLCDALATVMSIAVDGNIPAEIRPAFFGGKLIALRKKEGGLRPIAIGMILRRLTAKIICTRLKDRSAAILSPQQLGVNVRGGAEAIVHATRKFLESTGDTTKVVLKVDLKNAFNTLSREAVLTAAKERFPEYSDFLTAAYGHHSTLFVDDLTLSSESGVQQGDPLGPLLFSLALHPLVSSLNTELNAWFLDDGTMGGAPATVADCFSRITERARAIGLQVNEAKCELFVFGGTLDSQRNVTAEFIDRFPRLRILSASTLSLLGAPVLDEAIGPLLIEKASTLKVVCERLQLLSSHQALFLLQNCLGAPKIIYMLRCCNAWKYPALLYQLDETMRDCFQNLSNVRTNHNDYPPWRQATLPVSRGGIGIRRSEELSLPAFLASIHSVSGLLSSLLPDHGVVDVSGAVESWKLKARQPEIPELAYRKSQKAWDLPLCNVSLSSLLEVFQGDEISTARLLAQSRPESGIWLNALPSAHIGNLLGDDELKISVGLRLGATICEPHDCVKCLKPVDGYGHHGLSCVFSAGRHPRHGGLNSIICVSAGVPAKLEPRGTSHTTERRPDGCTTFAWKRGLCLAWDVTCVDTVALSHVKATSTTVGAAAVQAEDKKSRLYIYLAGRYLFVPIAFETMGPWGPSAIAFIKELGKRLQQQTGEARSHEFLRQRLSIEIQRGNAASVLGTMEGLDKLNEIFLL

SEQ ID NO: 8086 - protein, 1117 aa, Vandiemenella viatica
MPFEPTKCETCLNSQAGGYIALSLKDLEAHLKRAHPSEIVRYECRGCKHSYAQKRSVAGHLPKCKGPDKIKEGEFVCRECGDIYPSQIGLSQHERHVHPKLRNEGRSAATAKPPRKLPRGKFKEEHLALMAKLETQLAGEKFINKAMAEIINEKFGGDFTCRQVSDKRREATYRRCLAEVTSGQSPQGRRMNDASDSGTDSGEEDPEVGEPAVTCEPATANSPEPQEDETERVWRAGLLHTFEEAVPKGVPPEVARLVREIKEATRRALVETEGKQAEVDRIYSEVVTHLSPVASAEGNDNKKVQRRRGQGNKAVKRFRYARSQDLFSKDPAGMAKHIIRGTDPFAPQAESDALKPEDVSSLYTSLWGTCKDGAKIDVENVSNDTDVPIDAVLHLFTATEVKLRIRRLKKASAPGPDGLKTRSLVGGGKQAALSALFNMVILTGALPTDWGVNRTTLIPKEGKDATKATNWRPLTISSVVSRLFWGLIDERVRKVIAITPRQKGFVNEAGCFNNITLLSDIMKHAKTTSGMVAVQLDVSKAFDTVPHSAISLALRRKGLPACVAKLVTQAYSNAKTKIKCGGGKVVEITLQRGVKQGDPMSPLLFNLIMEPLLLKLEGMAGLTIGDGINISSLAFADDLILLASDAEKARALLSATDRYLRNLGMNIAGNKSYAFQIQKTKDSWHLVNPMVSLNNGEQIPMAGPEDSLSYLGVEVSPWSGININAARRDFSRVLSTVKGMALKPHQKLYLLTTHLIPHFLHKLMAAVPTITALREMDQEIRVAVKEIFHLSQCTADGMVHCEKKNGGLGVKRLEHAVVGQTLRAGLKRNAINDPATKAMKAGFLSRLDKLARSARIPTPYTEKDIKNYEKRAAKTELKEWAQLTSQGKAVRSLAGDKVGNCIMQDPTLLKPNRFNTALRMRTDTAANRTAINRAIKQQDVNCRKCRVKLETLGHILGGCHYTKPMRIRRHDEIVGYVEESVLKRDPTALISREPEIDESQKGKLKPDLVINRQGRVLVVDVTVRHEDGEYLEVARQEKIAKYRALLPSIQRLFGVDAGEVLPIVVGTRGAMPRQTKLALKKLGLSDQSSLKTISLMALRSSIEMYHTFMDYDGPLLP

SEQ ID NO: 8087 - protein, 1117 aa, Vandiemenella viatica
MPFEPTKCETCLNSQAGGYIALSLKDLEAHLKRAHPSEIVRYECRGCKHSYAQKRSVAGHLPKCKGPDKIKEGEFVCRECGDIYPSQIGLSQHERHVHPKLRNEGRSAATAKPPRKLPRGKFKEEHLALMAKLETQLAGEKFINKAMAEIINEKFGGDFTCRQVSDKRREATYRRRLAEVTSGQSPQGRRMNDASDSGTDSGEEDPEVGEPAVTCEPATANSPEPQEDETERVWRAGLLHTFEEAVPKGVPPEVARLVREIKEATRRALVETEGKQAEVDRIYSEVVTHLSPVASAEGNDNKKVQRRRGQGNKAVKRFRYARSQDLFSKDPAGMAKHIIRGTDPFAPQAESDALKPEDVSSLYTSLWGTCKDGAKIDVENVSNDTDVPIDAVLHLFTATEVKLRIRRLKKASAPGPDGLKTRSLVGGGKQAALSALFNMVILTGALPTDWGVNRTTLIPKEGKDATKATNWRPLTISSVVSRLFWGLIDERVRKVIAITPRQKGFVNEAGCFNNITLLSDIMKHAKTTSGMVAVQLDVSKAFDTVPHSAISLALRRKGLPACVAKLVTQAYSNAKTKIKCGGGKVVEITLQRGVKQGDPMSPLLFNLIMEPLLLKLEGMAGLTIGDGINISSLAFADDLILLASDAEKARALLSATDRYLRNLGMNIAGNKSYAFQIQKTKDSWHLVNPMVSLNNGEQIPMAGPEDSLSYLGVEVSPWSGININAARRDFSRVLSTVKGMALKPHQKLYLLTTHLIPHFLHKLMAAVPTITALREMDQEIRVAVKEIFHLSQCTADGMVHCEKKNGGLGVKRLEHAVVGQTLRAGLKRNAVNDPATKAMKAGFLSRLDKLARSARIPTPYTEKDIKNYEKRAAKTELKEWAQLTSQGKAVRSLAGDKVGNCIMQDPTLLKPNRFNTALRMRTDTAANRTAINRAIKQQDVNCRKCRVKLETLGHILGGCHYTKPMRIRRHDEIVGYVEESVLKRDPTALISREPEIDESQKGKLKPDLVINRQGRVLVVDVTVRHEDGEYLEVARQEKIAKYRALLPSIQRLFGVDAGEVLPIVVGTRGAMPRQTKLALKKLGLSDQSSLKTISLMALRSSIEMYHTFMDYDGPLLP

SEQ ID NO: 8088 - protein, 1104 aa, Vandiemenella viatica
MPFEPTKCETCLNSQAGGYIALSLKDLEAHLKRAHPSEIVRYECRGCKHLYAYKRSVAGHLTKCKGSDKIKEGEFVCKECGDIYPSQIGLSQHERHVHPKLRNERRIAATAKPPKKLPRGKFKKEHLALMAKLEIQLAGEKYINKPMAEIINDKFGGDFTCRQVSDKRREATYRRRLAEATSGRSPQGRRLNETRDSGTDSEEEALEAVEPAVTCEPTKANSPEPQEDETERVWRAGLLHAFEEVVPKGVPPEVARLVKEIKESTRRVLEETKGKQAEVDRIYSDVVTHLSPVASAERNDNKKQQRRRGQGNKAVKRFRYARSQDLFTKDPTGMAKHIIKGTDPFAPQAESDALKPEDVSALYTSLWGTCEDGAKLDAENVSNDTDVPIDAVLHLFTATEVKLRIKRLKKGSAPGPDGLKTRSLVGGGKQAALSALFNMVVLTGTLPTDWGVNRTTLIPKEGKDASKATNWRPLTISSVVSRLFWGLIHERVRKVVAITPRQKGFVNEAGCFNNITLLSDIMKHAKTTSGMVAVQLDVSKAFDTVPHSTISLGLRRKGLPACVAKLVTQAYSNAKTKIKCGGGKVVEITLQRGVKQGDPMSPLLFNLIMEPLLLKLEGMAGLTIGDGINISSLAFADDLILLASDAEKARALLSATDRYLRNLGMSIAGNKSYNFQIQKTKDSWHLVNPMVSLNNGEQNPMAGPEDSLSYLGVEVSPWSGININAARRDFSRVLSTVKGMALKPHQKLYLLTTHLIPHFLHKLMAAVPNITALREMDQEIRVAVKEIFHLSQCTADGMVHCEKKNGGLGVKRLEHAVVGQTLRAGLKRNAINDPATKAMKAGFLTRLDKLARSARIPTPYTDKDIKNYEKRAAKTELKEWAQLTSQGIAVRSLAGDKVGNCIMQDPTLLKTNRFNTALRMRTDTAANRTALNRAIKQQDVNCQKCRVKLETLGHILGGCHYTKPMRIRRHDEIVGYVEESMLKRDPTALISREPEIDESQKGKLKPDLVINRQGRVFVVDVTVRHEDGEYLEVARQEKISKYRALLPSIQRLFGVDAGEVLPIVVGTRGAMPTQTKLALKKLDLSDQSSLKTISLMALRSSIEM

SEQ ID NO: 8089 - protein, 1136 aa, Vandiemenella viatica
MGITGDDTGKSKVMSVGLPFEPTECEACRKIGKGNYMALSVVDIERHVRTAHANYKVAYECRACNKRYVSKHGAECHMGKCTGPRPEKGGAFSCTECSMKFGSQIGLSQHQRYRHPEMRNQARIAAIVKPGKAAPRGKFTEEHLSKMAEMEVKFAGEKFINRLMAKELNGVFTCRQISDKRREATYKRRLAIMTAVTGRQSREPDENILSETDTVEGAPQVAEPPGIEETEEGGPPARETEVERRWREEFLLAFNNQKTTGLIPEAQVIIEDIKTTTCRLAEVQEDRQKEIDRLYSAVVDFVNPTSQTQEGPRQEPRRRGQGKKAVKRFRYARTQDIFKKDPGALAKHVLRGTNPFGSQATTEQLDPAEVRELYNGLWGTTNEGATLDCSEVNSDAEVPFDSVLQLFTLTEIKQRVRRLKKSSAPGPDGIKPKALHDRAKLATLTALFNTIQLMGTLPTEWNRNRTTLIPKAGKDPSKVTNWRPLTISSVISRVFWGIVDERIRKVVKICCRQKGFVNEAGCFNNITLLENVLRQSKTAGGMAAVQLDVSKAFDTVPHAVIQAALRRKGLPPHLVDMVASAYREARTKIKCRNGEHVEITLQRGVKQGDPLSPLLFNLVMEPLLLKLEKMTGLTVGNDTNVSSLAFADDLILVASDASKVRELLHATEQYLRSLGMGIAASKSFAFQIVKTKDSWYIADPGLKLQNGEQVPLAGPRDTLTYLGVEVSPWTGLNIKGARQEFSRVLAEVKGMALKPHQKLRLLTDYLVPHFLHKLVAAVPGLTDLREMDQEMRVVVKEMFHLSQCTAEGLIHCAKKDGGLGVKRLEHQVVCQSLRAGLKRNENSDPVLQALAEGFSRRLEKLARTARIQVPYREEDIRKYKKRAEKAELDRWAALSTQGKAVTSLTGDKIGNCIMQDPTLLKPCRFNTALRMRTDTAANRTAMNRAERQPDLNCRKCHVKLETLGHILGMCEYTKPLRIRRHDEIVNFIESAVQGKVGTEWVSKEPEIDEGSRGKLKPDLVINRQGRVLVVDVTVRHEDGKYLETARLQKIDKYNCLLPSFQRIFQVPAGEVLPIVVGTRGAMPRETIKALKKLGMGDRSSLKTISLMALRSSIELYHIFMDYNGPLVPGGELHTPG

SEQ ID NO: 8090 - protein, 1703 aa, Amphibalanus amphitrite
MESQPDEASSQILPPTCSKCHQANKKKRHKTCDVCKHAWHLGCVRLSRAQAAALNRWVCPTCLSSGRRSFQQCPDSIQGDGKSQSQPAAGGRELDTSANTDAVAETTASDGAPTDDSRESRAIAEDLVCQLTKKTNQSRVIPRIPRGARMQAAGALCELVEDVVSSGSDMAWVRLLKFPRHALSRPNWAKTNQKEASLTSKIKQQIGKYMDPASSQQNESKPGAPTEGQSTAKRRRLGDHADALKRRVAGKLADGDVRGAIRLLSSGDEIADDSGEVIKNLQAKHPPAPEHLDMPPGPDVTTTASLASEQEVLTAIGSFDTGSSAGLDGLRPAHIKDMTSRMAGEAGIRLVAALTKLVNLILDGGVPSSARAAVFGASLVALRKPDGGIRPIAIGTTYRRLASKVGLWPLRQQLGERFRPLQLGYGTPGGCEAAVHAVRHFCQALSPGHAVVKVDMKNAFNSVRRDHFLRLAREHTPSLYRLLFQAYGQPTPLCYGSHLITSATGIQQGDPCGPAVFSLAIDPIIRTAGSQLNCWYLDDGTLGGDLDTVCTDLQGLIGGMNSVGLDINPMKCEIILPADLSPDQSAAATERLHEWIPGATVMATTDQTLLGAPLTEAAAELVTLHKKTELSRLLERLHCLDSHSAFYLLRNALWLPKLQYVLRAAPLYRQPAPLHELDALMKTAVTSLTNVRLEGDCWEQAVLPTRYGGLGLRQLSDVALPSYVSSLHRCGQLIEAILPQELNSAADEQRRTATADWQALAGDSCAPDGEERQRQRAWDSVLAEKKRDQLFTEADQLGRARLLSAAAPESGAWLNAVPSASLGTNLDHETLRIAIALRVGSDVCSEHLCRCGAQADSRGHHLLTCRFSAGRHPRHTALNDVVRRALDSARISAILEPHGVELRDGKRPDGMTLFPFSDGKSLLWDATCVNSYAQSRLSAAATAAGGAAKAAEEEKRRKYAHLCPRYRFEPIAFETSGSCGPATKAFLKELGARLASVTGEKRETEWLFQRCSLAIIRGNAASVLLTSRSEESHATGGNRPSRRVTPDTDPMPSGDLQQNAQGTLQPALPLPQPPFKSQHPEGQPTEQSTPPQEPSSSALLTQKGDDVCLLDSCTANRIATLQAQQPPPSLLKRQITPSSNHECTDYKMPQNGVGRGTSDNDSLPKVKGLINLGNSCYLNSVLQCLSQCRYLTHYLDINSRSGRKAAVSADGETMELVLPEAGPITKSLFGFPEQMHTTRTGFTVSPSNLLKNIALKVPQFASCDQQDAHELLRELMQQTRLEDLQRRQSQILLGLGLSANSDSIEIPDHLKARAETLSRQVSHTTIDTIFSGQLVSAVVCQACTERTYHLESFLDLSLPLVDYKPSRPRKQCVTGACDEDSSDHILVPCRASDQSRRTETVPNGMTRAPNESVPAEGAASGQGDDPTPTTGASDELDRPPPLNRCEWLSRALTTLAPHYQAAAGECSLLTCLKQYTAPELLDGNNKFGCDNCTELRNKRLTAAEPASEKFGTMYSNATKQLLIYSPPPVLTIHLKRFEMSGSSLRKVNRHVQFCERFDLAPFCSSISQDLPQMRDGQRQVLYSLFGVVEHSGRLTSGHYTAYVRVRRRHSQLTVNPSLLTTLVTDAFALACERAGQCATQIQPEATYGSSPARASQPEADELKPDMEPEAGRWFHVSDTQVTEVTLDRVLRASAYMLFYERFL

SEQ ID NO: 8091 - protein, 961 aa, Mytilus edulis
MTSIIYSVGKDRFGVVPQGKQPTKLGHSNRRQKKIKELRGDLRRLKKRYKVANENERLPLQQLRKETREKLKTLTRAETHRRDRKKKAKERTTFTANPFQYMKRLFGARGSGKLENSREDVEEHLRKTHSDERRGEDLEECEKLLTPEEPKEQFDESDLKFQEVQDVVRKARAGSAPGPNGISYRVYKNCPRLIRRLWKLLKVIWRRRKMTESWYKAEGCFIPKEENSRKVEQFRTISLLNIEGKIFLAVLARRTTRYLLGNEYIDIAVQKGGMPEVSGCIEHTSVITQILREAKEKKSDLAVFWLDLANAYGSIPHKLVDLTLERYHVPPTIRTMLREYFDKIEMRFTAGDFTTAWQRLEVGILTGCTVSVVLFAAAMNLIVKSVEKPSRGPLLSSGVRQPPVRAFMDDMTVTAKTVIEGRWTLEELERMIKWARMKFKPSKSRSLIVRKGKVQDETFELAGEKIPTVGEKPVKCLGKKFDATLADMVNMGEVQVQLVEWLTKKDKSGLPGRYKAWIYQHGVLPRILWPLLVYEFPLSKVEALERKISACLRRWLGVPRSFSSIGFYSTGTKLQLPMKALTEEYKVTKTRQVMTLRDSKDAKVRGAKVKIRTGRKWKAEEAVKEAETRLKHSVIVGVTAVGRQGFGMTTKPRWDTANEKGRRELVQQEIRQMEEESRNVKAVGMKQQGSWLNWQGARSRALTWSEIWSMEGYRLSFLLRSVYDVLPSPSNLYTWGLIEDPTCTLCKDKPASLQHVLSACPVALTDGRYTWRHDSVLKTIAAKLDTTRRKKRKMQKNITFVNFVRAGEKKDNQAEGLGILGTASDWQMTADIHQRMSFPAEIAATSLRPDIVIWSQGTRQAVLLELTVPWEDRIEEAYERKMAKYQQLVEDCKQRGWRTWCLAIEVGCRGFAGQSMWRALRTLGVEGAERKKLITEVCREAEVASQWIWRKRDEVWKSTKC

SEQ ID NO: 8092 - protein, 1176 aa, Mytilus edulis
MRLGKSKCISCEGEPILHAMERYILRHPRGCARAREDEQPIGQDQETTMEPTRTTNQNNGCKCFCGKVCKNSRGLKIHQSRMKCVQPHSGNQRTERSGQTEEETIQEANHSDDSLPVTQGEDEHEEQPTEVEQLDEAEEIERIEPTVHREDGIETTVRKEDGIEPTTRREENEPRKEKIKWPTNADKAAWKALDEDLENILEATLAGSVDRKITAMTSIIYSVGKDRFGVVPQGKQPTKLGHSNRRQKKIKELRGDLRRLKKRYTVANENERLPLQQLRKETREKLKTLTRAETHRRDRKKKAKERTTFTANPFQYMKRLFGARGSGKLGNSREEVEEHLRKTHSDERRGEDLEECEKLLTPEEPKEQFDESDLKFQEVQDVVRKARAGSAPGPNGISYRVYKNCPRLIRRLWKLLKVIWRRRKMTESWYKAEGCFIPKEENSRKVEQFRTISLLNIEGKIFLAVLARRTTRYLLGNEYIDIAVQKGGMPEVSGCIEHTSVITQILREAKEKKSDLAVFWLDLANAYGSIPHKLVDLTLERYHVPPTIRTMLREYFDKIEMRFTAGDFTTAWQRLEVGILTGCTVSVVLFAAAMNLIVKSVEKPSRGPLLSSGVRQPPVRAFMDDMTVTAKTVIEGRWTLEELERMIKWARMKFKPSKSRSLIVRKGKVQDETFELAGEKIPTVGEKPVKCLGKKFDATLADMVNMGEVQVQLVEWLTKIDKSGLPGRYKAWIYQHGVLPRILWPLLVYEFPLSKVEALERKISACLRRWLGVPRSFSSIGLYSTGTKLQIPMKALTEEYKVTKTRQVMTLRDSKDAKVRGAKVKIRTGRKWKAEEAVKEAETRLKHSVIVGVTAVGRQGFGMTSKPRWDTANEKGRRELVQQEIRQMEEESRNVKAVGMKQQGSWLNWQGARSRALTWSEIWSMEGYRLSFLLRSVYDVLPSPSNLYTWGLIEDPTCTLCKDKPASLQHVLSACPVALKDGRYTWRHDSVLKTIAAKLDTTRRKKRKMQKNITLVNFVRAGEKKDNQAEGLGMLGTASDWQMTADIHQRMSFPAEIAATSLRPDIVIWSQGTRQAVLLELTVPWEDRIEEAYERKTAKYQQLVEDCKQRGWRTWCLAIEVGCRGFAGQSMWRALRTLGVVGAERKKLITEVSREAEVASQWIWRKRDEVWKSTKC

SEQ ID NO: 8093 - protein, 1156 aa, Mytilus edulis
MERYILRHPRGCARAREDEQPIGQDQETNMEPTRTTNQNNGCKCFCGKVCKNSRGLKIHQSRMKCVQPHSGKQRTERSGQTEEETIQEANHSDDSLPVTQGEDEHEEQPTEVEQLDEAEEIERIEPTVHREDGIETTVLREDRIEPTTRREENEPRKEKIKWPTNADKAAWKALDEDLENILEATLAGSVDRKITAMTSIIYSVGKDRFGVVPQGKQPTKQGHSNRRQKKIKDLRGDLRRLKKSYKVANENERLPLQQLRKETTEKLKTLTRAETHRRDRKKKAKERATFTANPFQYMKRLFGARGSGKLENSREEVEEHLSKTHSDERRGEDLEECEKLLTPEEPKEQFDESDLKFQEVQDVVRKARAGSAPGPNGISYRVYKNCPRLIRRLWKLLKVIWRRRKMTESWYKAEGCFIPKEENSRKVEQFRTISLLNIEGKIFLAVLARRTTRYLLGNEYIDIAVQKGGMPEVSGCIEHTSVITQILREAKEKKSDLAVFWLDLANAYGSIPHKLVDLTLERYHVPPTIRTMLREYFDKIEMRFTAGDFTTAWQRLEVGILTGCTVSVVLFAAAMNLIVKSVEKPNRGPLLSSGVRQPPVRAFMDDMTVTAKTVIEGRWTLEELERMIKWARMKFKPSKSRSLIVRKGKVQDETFELAGEKIPTVGEKPVKCLGKKFDATLADMVNMGEVQVQLVEWLTKIDKSGLPGRYKAWIYQHGVLPRILWPLLFYEFPLSKVEALERKISACLRRWLGVPRSFSSIGLYSTGTKLQLPMKALTEEYKVTKTRQVMTLRDSKDAKVRGAKVKIRTGRKWKAEEAVKEAETRLKHGVIVGVTAVGRQGFGMTTKPRWDTANEKGRRELVQQEIRQMEEESRNVKAVGMKQQGSWLNWQGARSRALTWSEIWSMEGYRLSFLLRSVYDVLPSPSNLYTWGLIEDPTCTLCKDKPASLQHVLSACPVALKDGRYTWRHDSVLKTIAAKLDTTRRKKRKMQKNITFVNFVRAGGKKDNQAEGLGILGTASDWQMTADIHQRMSFPAEIAATSLRPDIVIWSQGTRQAVLLELTVPWEDRIEEAYEKKMAKYQQLVEDCKQRGWRTWCLAIEVGCRGFAGQSMWRALRTLGVVGAERKKLITEVCREAEVASQWIWRKRDEVWKSAK

SEQ ID NO: 8094 - protein, 961 aa, Mytilus edulis
MTSIIYSVGKDRFGVVPQGKQPTKLGHSNRRQKKIKELRGDLRRLKKRYKVANENERLPLQQLRKETREKLKTLTRAETHRRDRKKKAKERTTFTANPFQYMKRLFGARGSGKLENSREEVEEHIRKTHSDERRGEDLEECEKLLTPEEPKEQFDESDLKFQEVQDVVRKARAGSAPGPNGISYRVYKNCPRLIRRLWKLLKVIWRRRKMTESWYKAEGCFIPKEENSRKVEQFRTISLLNIEGKIFLAVLARRTTRYLLGNEYIDIAVQKGGMPEVSGCIEHTSVITQILREAKEKKSDLAVFWLDLANAYGSIPHKLVDLTLERYHVPPTIRTMLREYFDKIEMRFTAGDFTTAWQRLEVGILTGCTVSVVLFAAAMNLIVKSVEKPSRGPLLSSGVRQPPVRAFMDDMTVTAKTVIEGRWTLEELERMIKWARMKFKPSKSRSLIVRKGKVQDETFELAGEKIPTVGEKPVKCLGKKFDATLADMVNMGEVQVQLVEWLTKIYKSGLPGRYKAWIYQHGVLPRILWPLLVYEFPLSKVEALERKISACIRRWLGVPRSFSSIGLYSTGTKLQLPMKALTEEYKVTKTRQVMTLRDSKDVKVRGAKVKIRTGRKWKVEEAVKEAETRLTHSVIVGVTAVGRQGFGMTTKQRWDTANEKGRRELVQQEIRQMEEESRNVKAVGMKQQGSWLNWQGARSRDLTWSEIWSMEGYRLSFLLRSVYDVLPSPSNLYTWGLIEDPTCTLCKDKPASLQHVLSACPVALKDGRYTWRHDSVLKTIAAKLDTTRRKKRKMQKNITFVNFVRAGEKKDNQAEGLGILGTASDWQMTADIHQRMSFPAEIAATSLRPDIVIWSQGTRQAVLLELTVPWEDRIEEAYERKMAKYQQLVEDCKQRGWRTWCLAIEVGCRGFAGQSMWRALRTLGVVGAERKKLITEVCREAEVASQWIWRKRDEVWKSTKC

SEQ ID NO: 8095 - protein, 1175 aa, Mytilus edulis
MRLGKSKCISCEGEPILHAMERYILRHPRGCARAREDEQPIGQDQETTMEPTRTTNQNNGCKCFCGKVCKNSRGLKIHQSRMKCVQPHSGNQRTERSGQTEEETIQEANHSDDSLPVTQGEDEHEEQPTEVEQLDEAEEIERIEPTVHREDGIETTVRKEDGIEPTTRREENEPRKEKIKWPTNADKAAWKALDDDLENILEATLAGSVDRKITAMTSIIYSVGKDRFGVVPQGKQPTKLGHSNRRQKIKELRGDLRRLKKRYKVANENERLPLQQLRKETREKLKTLTRAETHRRDRKKKAKERTTLTTNPFQYMKRLFGARGSGKLENSREEVEEHLRKTHSDERRGEDLEECEKLLTPEEPKEQFDESDLKFQEVQDVVRKARAGSAPGPNGISYRVYKNCPRLIRRLWKLLKVILRRRKMTESWYKAEGCFIPKEENSRKVEQFRTISLLNIEGKIFLAVFARRTTRYLLGNEYIDIAVQKGGMPEVSGCIEHTSVITQILREAKEKKSDLAVFWLDLANAYGSIPHKLVDLTLERYHVPPTIRTMLREYFDKIEMRFTAGDFTTAWQRLEVGILTGCTVSVVLFAAAMNLIVKSVEKPSRGPLLSSGVEQPPVRAFMDDMTVTAKTVIEGRWTLEELERMIKWARMKFKPSKSRSLIVRKGKVQDETFELAGEKIPTVGEKPVKCLGKKFDATLADMVNMGEVQVQLVEWLTKIDKSGLPGRYKAWIYQHGVLPRILWPLLVYEFPLSKVEALERKISACLRRWLGVPRSFSSIGLYSTGTKLQLPMKALTEEYKVTKTRQVMTLRDSKDAKVRGAKVKIRTGRKWKADEAVKEAETRLKHSVIVGVTAVGRQGFGMTTKPRWDTANEKGRRELVQQEIRQMEEESRNVKAVGMKQQGSWLNWQGARSRALTWSEIWSMEGYRLSFLLRSVYDVLPSPSNLYTWGLIEDPTCTLCKDKPASLQHVLSACPVALKDGRYTWRHDSVLKTIAAKLDTTRRKKRKMQKNITFVNFVRAGEKKDNQAEGLGILGTASDWQMTADIHQRMSFPAEIAAASLRPDIVIWSQGTRQAVLLELTVPWEDRIEEAYERKMAKYQQLVEDCKQRGWRTWCLAIEVGCRGFAGQSMWRALRTLGVIGAERKKLITEVCREAEVASQWIWRKRDEVWKSTKC

SEQ ID NO: 8096 - protein, 1122 aa, Mytilus galloprovincialis
MKMPMAEVECFCGKVCKNSRGLKIHQSRMKCVQPHSGNQRTERSGQTEEETIQEANHSDDSLPRTQGEDEHEEQPTEVEQLDEAEEIERIEPTVHREDGIETTVRREDRIEPTTRREENEPRKEKIKWPTNADKAAWKALDEDLENIFKATLAGSVDRKITAMQSIIYSVGKDRFGVVPQGKQPTKQGHSNPRQKKIKELRGDLRRLKKRYKVANENERLPLQQLRKETREKLKTLTRAETHRRDRKKKAKERATFTANPFQYMKRLFGARGSGKLENSREEVEEHLSKTHSDERRGEDLEECEKLLTPEEPKEQFDESDLKFQEVQDVVRKARAGSAPGPNGISYRVYKNCPRLIRRLWKLLKVIWRRRKMTESWYKAEGCFIPKEENSRKVEQFRTISLLNIEGKIFLAVLARRTTRYLLGNEYIDIAVQKGGMPEVSGCIEHTSVITQILREAKEKKSDLAVFWLDLANAYGSIPHKLVDLTLERYHVPPTIRTMLREYFDKIEMRFTAGDFTTAWQRLEVGILTGCTVSVVLFAAAMNLIVKSVEKPSRGPLLSSGVRQPPVRAFMDDMTVTAKTVIEGRWTLEELERMIKWARMKFKPSKSRSLIVRKGKVQDETFELAGEKIPTVGEKPVKCLGKKFDRTLADMVNMGEVQVQLVEWLTKIDKSGLPGRYKAWIYQHGVLPRILWPLLVYEFPLSKVEALERKISACLRRWLGVPRSFSSIGLYSTGTKLQLPMKALTEEYKVTKTRQVMTLRDSKDAKVRGAKVKIRTGRKWKAEEAVKEAETRLKHSVIVGVTAVGRQGFGMTTKPRWDTANEKGRRELVQQEIRQMEEESRNVKAVGMKQQGSWLNWQGARSRALTWSEIWSMEGYRLSFLLRSVYDVLPSPSNLYTWGLIEDPTCTLCKDKPASLQHVLSACPVALKDGRYTWRHDSVLKTIAAKLDTTRRKKRKMQKNITFVNFVRAGEKKDNQAEGLGILGTASDWQMTADIHQRMSFPAEIAATSLRPDIVIWSQGTRQAVLLELTVPWEDRIEEAYERKMAKYQQLVEDCKQRGWRTWCMAIEVGCRGFAGQSMWRALRTLGVVGAERKKLITEVCREAEVASQWIWRKRDEVWKSAK

SEQ ID NO: 8097 - protein, 1086 aa, Mayetiola destructor
MCGNFIVVAFETRSMVNGGRELSLRVATTGVNQANLPADNEPQLVSLTCQYCERDFETKIGLGVHKSKAHREELDRELAPNTSNSSRKRWTQDEDLALAKLVVALQKENAQLGKTAISNMLVGQMFNRSAEGIRARLKSNNYLRAQSEVERDFDRNIAVDSEPCGGVNHLNEDSNTIPIFTLHQNDVSVNLADSTESGLDLEGEQSLVSQQTPTGNVDKANSLMGDEQELPLPVGEDSELRAGLKKAARILLKKIGKVQSIAAKYKTKRLLRILSLPRGDPRVLTKLEKWIITVTAPENQGESVKRRGRRKFAFDRGASRGLDGRHEHAFIQNLYKKVGTKAVAGYLFQDLNDNTGGIECPLVGTEEMFESWSSTFMGSNDKMGALSCEGTYECDPTAREILAPITVDEIRQNELGNKKAPGLDGLKTSQWKAVPCSVRSSLYNVILYHGVVLDSLAKARTIFIAKTPNPKSPGEFRPISITSVIQRQLHKILGNRLSRLCKTSGCQVAFKNVDGVAANIATLQTVIEHSRNNLKDLHIISIDLKKAFDSVSHKAIIGMAIRKRLPVEFVEYLIELYSKAETQLQFEGETRDTKIGQGTFQGDPLSPVIFNLVIDVALESMDNKFGYCLDDGTRAKCTAFADDVVVLGSSKTGVQLNINTLANRLALVGLQVNPGKCLSLSLVADRKRKRTGLDTSGLFTAPVKNSTHQIKPLSHTCEWKYLGIKFNGAQVEKQLPDIRPYLQRLNAAKLTVQQKLEVLSNNVINKWIHKATFSAASREELKSIDKAVREYVRKWLHLPHDVPKAYIHAPTRVGGVGVFELALRIPVSRVKRLEGVIKEHFMGPSLRCSKFYQRKMGQLVCILNEYEVENENCDLFGAIYSKQLESKWATQGLTKSMGCVSSRAWVRSKADRVRPYDYIAYHHISSNSLPTKARRNWGRSDERSVECRAGCTGKAETTHHVLQECFTTHGMRVRRHNRVVNLICSELPVKNNLEIVKEPLFETMDGTRKPDLVILAQGGHAHVVDVQVCGRYDLERMNTEKASKYASIPGFTDLVRRRYNAGSVSYHAITIAYILVSSGRLRQICY

SEQ ID NO: 8098 - protein, 817 aa, Botryllus schlosseri
MSQHSYQGNLASAVDDESITPSEVAGVLATLNTSSSPGSDGLTYGFWKRLDPKGEILSELFEVCRRCRRIPLVWRSSRVILIPKDRDGDMQDVGNWRPIALSRTLYKIYASVIARRLQSWASDGDVISMEQKGFVPREGVFEHVFMLESLLADAKSSRQDIYLAWLDIRNAFGTVRHGSVIEVLKHFSAPEYLVEVMTDIYASNVFAVATSSGPTDPIPAGKGVRQGCPLSAITFNLVMEVLLRGVAGLQSSGYRFSAADGVTVRVQGYADDTCLCASSRDQLQAQLDLCDEFSRWSGMKFKPAKCRVLALGFKGSRSIVDSAPFCLDGGEVRVLDRDSFWRYLGKNMGYQATEKGGKALKTFEAYCDRLFLSHLTSFQKLLALKRFVIPRILFQLRIRRFFRSDLRRLDARIRTLVKAEFRLPNRACQPFFHAGLTTGGLGIPNLCCEADVLRLSQAVKMVNSTDPSVRAVARGRLALVVRRTCRVPEASETLTVEFLNCVSLTGHDSRAYGDAYGLWTEVRPVARRLGARWFVTEDGLYQLALGADCCQDLGRLTKFLHLKVNQRWKTRWMELPDQGKTVECHSRYGSSNRFLRSSNVLTAVERSWMLKARLNLLPLRSIRGRFRKRVEPSVVCCKCGQHTETLPHVLNHCLPVMDSITNRHNSVLGVLLDCIPSSSSFSRCDVDRVCEEHATLANRRLRPDLILADRRRVLVIDVVCPFENGVASMDAAVALKHSKYKDLCESLRVATAKVVEMHTFAVGSLGSYHPGNLTTLRAMGVSVFESRLVSERAVVASQRGSHRVWKAWCSVRDHERT

SEQ ID NO: 8099 - protein, 726 aa, Botryllus schlosseri
MTQHSYQGDLASAVDDESITSLEVAGVLATSNTSSSPGSDGLTYGFWKRLDPKGEILSELFEICRRCRRIPLEWRSSRVILIPKDHDGDMQDVDNWGPIALCRTLYKIYASVIARRLQSWASDGDVISMEQKGVVPREGVFEHVFMLESLLADAKSSRQDIYLACLDIRNAFGTVRHGSVIEVLKHFNAPEYLVAEVMTDIYAPNLFSVATSSGPTDPIPVGKGIRQGCPLSAITFNLVMEVLLRGVAGLQSSGYRFSAAEGVTVRVQGYADDTCLCASSRNQLQAQLDLCDEFSRWSGMKFKSAGCRVLALGFKGSRSIVDSAPFRLDGEEVRVLDRDSFWRYLGKNVGYQATSKGGEALKTFGAYCDRLFLSHLTSFQKLLALKRFVIPRILFQLRIRKFFRSDLRRLDARIRTLVKAECRLPNRACQPFFHAGLTTGGLGIPNLCCEADVLRLSQAVTMVNSTDPSVRAVARGRLTLVVRRTCRVPEASETLTVEFLNCTSLTGHDSRAYGDAYGLWTEIRPVARRLGARWFVTEDGLYQLALGDDCCQDLGRLTKFLHLKVNQHWKTRWMELPDQGKTVECHSRYRSSNRFLLSSNVLTAVERSWMLKARLNLLPLWSIRGRFRKRVEPSVVCRKCGQHTETLPHVLNHCLPVMDSITNRHNSVLEVLLDCIPSSSSFSRRDVDRVCEEHVTWANRRLRPDLILADRRRVLVIDVVCPFEME

SEQ ID NO: 8100 - protein, 824 aa, Botryllus schlosseri
MTLHSYHGDQASAVDDEPITSLEVTEVLATLNTSSSPGSDGLTYGFWKRLDPKGEILSELFEICRCCRRIPLEWRSSRVILIPKDLDGDMQDVGNWRPIALSRTLYKIYASVIARRLQSWASDVQSWASDGDVVSMEQTGFVPREGVFQHVFMLDSLLADAKSSRQYIYLAWLDIRNAFGTVRHGSVIEVLRHFDAPEYLVEVMADIYTSNVFSVATSSGPTEPIPAGKGVRQGYPLSAITFNLVMEVLLRGVAGLQSSGYRFSAAEGVTVRVQGYADDTCLCASSRDQLQAQLDLCDEFSRWSGMKFKPAKCRVLALGFKGGRSIVDSVPFRLDGGEVRVLDRDSFWRYLGKNMGYQATEKGGEAIKTLEAYCDRLFLSHLTSFQKLLALKRFIIPKFLFQLRIRRFFRCDLRRLDVRIRTLVKAEFRLPNRACQPFFHAGLTSGGLGIPNLCCEADVLRLSQAIKMVNSTDPSVRAVARGRLALVVRRTCRVSEASETLTVEFLNCVSLTGHDYRAYGDAHGLWTEVRPVTKRLGARWFVTEDGLYQLALGADCCQDFGRLTKFLHLKGNQRWKTRWMELPDQGKTVECHSRYGSSNRFLRSSNVLMAVERSWMLKARLNLLPLRLIRGRFRKRVEPSVVCYKCGQHTETLPHVLSHCLPVMDIITNRHNSVLGVLLDSIPRSSSFSRCDVDRVCEEHATLANRRLRPDLILADARRVLVIDVVCPFENGVASMDAAVELKHAKYENLCHSLRLATAKTVEMHTFAVGSLGSYHPRNLATLRAMGVSLFESRLVSERAVVASQRGSHRVWKVWCSFGGNERT

SEQ ID NO: 8101 - protein, 817 aa, Botryllus schlosseri
MTQHSYQGDQASAVDDESITSLEVTGVLATLNTSSSPGSDGLTYGFWKRLDPKGEILSELFEICRRCRRIPLEWRSSRVILIPKDRDGDMQDVDNWRPIALSRTLYKIYASVIARRLQSWASDGDVISMEQKGFVPREGVFEHVFMLESLLADAKSSRQDIYLACLDIRNAFGTVRHGSVIEVLKHFNAPEYLVEVMTDIYASNVFSVATSSGPTDPIPVGKGVRQGCPLSAITFNLVMEVLLRGVAGLQSSGYRFSAVEGVTVRVQGYADDTCLCASSRDQLQAQLDLCDEFSRWSGMKFKSAGCRVLALGFKGSRSIVDSAPFRLDGEEVRVLDRDSFWRYLGKNVGYQATSKGGEALKTFGAYCDRLFLSHLTSFQKLLALKRFVIPRILFQLRIRKFFRSDLRRLDARIRTLVKAEFRLPNRACQPFFHAGLSTGGLGIPNLCCEADVLRLSQAVTMVNSTDPSVRAVARGRLALVVRRTCQVPEASKTLTVEFLNCTSLTGHDSRAYGDAYGLWTEVRPVARRLGARWFVTEDGLYQLALGDDCCQDLGRLTKFLHLKVNQHWKTRWMELPDQGKTVECHSRYRSSNRFLLSSNVLTAVERSWMLKARLNLLPLRSIRGRFRKRVEPSMVCRKCGQHTETLPHVLNHCLPVMDSITNRHNSVLGVLLDCIPRSSSFSRCDVDRVCKEHVTWANRRLRPDLILEDRRRVLVIDAVCPFENGVARMDAAVALKHAKYKDLCESLRLATDKEVEMHTFAVGSLGSYHPENLTTLRAMGVSVLESRLVSERAVVASQRGSHRVWKAWCSVRDHERT

SEQ ID NO: 8102 - protein, 817 aa, Botryllus schlosseri
MSQHSYQGNLASAVDDESITPSEVAGVLATLNTSSSPGSDGLTYGFWKRLDPKGEILSELFEVCRRCRRIPLVWRSSRVILIPKDRDGDMQDVGNWRPIALSRTLYKIYASVIARRLQSWASDGDVISMEQKGFVPREGVFEHVFMLESLLADAKSSRQDIYLAWLDIRNAFGTVRHGSVIEVLKHFNAPEYLVEVMTDIYASNVFAVATSSGPTDPIPAGKGVRQGCPLSAITFNLVMEVLLRGVAGLQSSGYRFSAADGVTVRVQGYADDTCLCASSRVQLQAQLDLCDEFSRWSGMKFKPTKCRVLALGFKGSRSIVDSAPFCLDGGEVRVLDRDSFWRYLGKNMGYQATEKGEKALKTFEAYCDRLFLSHLTSFQKLLALKRFVIPRILFQLRIRKFYRSDLRRLDARIRTLVKAEFRLPNRACQPFFHAGLTTGGLGIPNLCCEADVLRLSQAVKMVNSTDPSVRAVARGTLALVVRRTCRVPEASETLTVEFLNCVSLTGHDSRAYGDAYGLWTEVRPVARRLGARWFVTEDGLYQLALGADCCQDLGRLTKFLHLKVNQRWRTRWMELPDQGKTVECHSRYGSSNRFLRSSNVLTAVERSWMLKARLNLLPLRSIRGRFRKRVEPSVVCCKCGQHTETLPHVLNHCLPVMDSITNRHNSVLGVLLDCIPSSSSFSRFDVDRVCEEHATLANRRLRPDLILADRCRVLVIDVVCPFENGVASMDAAVALKHSKYKDLCESLRVATAKVVEMHTFAVGSLGSYHPGNLTTLRAMGVSVFESRLVSERAVVASQRGSHRVWKAWCSVRDHERT

SEQ ID NO: 8103 - protein, 817 aa, Botryllus schlosseri
MSQHSYQGNLASAVDDESITSSEVAGVLATLNTSSSPGSDGLTYGFWKRLDPKGEILSELFEICRRCRRIPLVWRSSRVILIPKDRDGDMQDVGNWRPIALSRTLYKIYASVIARRLQSWASDGDVVSMEQKGFVPREGVFEHVFMLESLLADAKSSRQDIYLAWLDIRNAFGTVRHGSVIEVLKHFNAPEYLVEVMTDIYASNVFAVATSSGPTDPIPAGKGVRQGCPLSAITFNLVMEVLLRGVAGLQSSGYRFSAADGVTVRVQGYADDTCLCASSRVQLQAQLDLCDEFSRWSGMKFKPAKCRVLALGFKGSRSIVDSAPFCLDGGEVRVLDRDSFWRYLGKNMGYQATEKGGKALKTFEAYCDRLFLSHLTSFQKLLALKRFVIPRILFQLRIRKFFRSDLRRLDARIRTLVKAEFRLPNRACQPFFHAGLTTGGLGIPNLCCEADVLRLSQAVKMVNSTDPSVRAVARGRLALVVRRTCRVPEASETLTVEFLNCVSLTGHDSRAYGDADGLWTEVRPVARRLGARWFVTEDGLYQLALGADCCQDLGRLTKFLHLKVNQRWKTRWMELPDQGKTVECHSRYGSSNRFLRSSNVLTAVERSWMLKARLNLLPLRSIRGRFRKRVEPSVVCCKCGQHTETLPHVLNHCLPVMDSITNRHNSVLGVLLDCIPSSSSFSRFDVDRVCEEHATLANRRLRPDLILADRRRVLVIDVVCPFENGVASMDAAVALKHSKYKDLCESLRVATAKVVEMHTFAVGSLGSYHPGNLTTLRAMGVSVFESRLVSERAVVASQRGSHRVWKAWCSVRDHERT

SEQ ID NO: 8104 - protein, 884 aa, Ficedula albicollis
MIEYAGRRNINQQRNINQLIAERIPSKTLKQIRDKRRLLVQASKEKISPPEVEQVVEDSPSVTTGPRIADLPRKGFIRQRYQDYMGKMLASGRSFDSGDAFERIFRGEDGQAVVNECFEKFFGGSESSSQDKKSVKGRKPKKRRKADQRTTSWMKQRARKKGKYLQYQKLFYVHRKRLAKIILDDVEALQCQIPSGTVYSTFKARWETSVGFKGLGNFPPHRVIDNTAFEDLITAKEVEKNLNEMAKSSAPGPDALTMDQLCKTDSALLAEIFNLWLVTGTIPDALRGCRTVLIPKSSDPSKLGDINNWRPITIASTVLRLFSRIMTVRLSAACQINPRQRGFIRAPGCSENLKLLQIIVQYAKTNHFTLGVVFVDIAKAFDTVNHQHIIQGLEERHVDPHIIKLIKEFYNNITTSICMEKEKTAPIKILSGVKQGDPMSPILFNLALDPLICKLEKEGSGFQRDDFKITAMAFADDLVLLSDSWDGMCDNIKILETFCHLTGLQTKGEKCHGFLIKPTKDSYTINDCEPWLINGSSLKMIDPGSSEKYLGVHIDPWTGFAKSRLHEKLDTWLTRLGDAPLKPLQKVDMLRTFTIPRLIYSADHTDVKAGSLDSLDSQIKRVVKDWLHLPSSTCDAFLYSSCKDGGLGLTKLSALIPSVQARRLHRLAQSSDDGLASFWIAEQVEEQYKKLWIRAGGDKDSIPNIWALIPVPNTRLQSNGEYLSEWEAPAPKVQYPVPSKWRKAEFDKWKQLVVQGHGVATFENDNISNAFMVYYRGTPHRKLLTALQLRVNVYPTREFLSRGRKVGCAKSCRHCGAEYETVAHIIGNCAFTKDARIKRHNKICELLSEAARKEQWTIFQEPHIRDKRNELFKPDLVFVKDKKQ

SEQ ID NO: 8105 - protein, 1172 aa, Panagrolaimus sp.
MAPRRHKKNKNMAPRSHKKQSKERNYWTKGELKHLEGFVKQVQDNGEAVDLQLLIESRKEYALLNNEIFPRRTPKALELKVYACFQSLRGGTTVVRNRAPETFNPQCSQEESMETDVDSEIPSTSDMEQQMDVGECLKLDQQLVRDITDKYNEIKRTHLWRRPLRKIRIPTKDLKVVNDSVKHCLNILSIDDITKLDHLVYATGALLTDKYKKQVDKGQNEWNENHKNALKILKTYLTWANLLKKIKREKLTISHLSKKYWDAWCALNHKYQVQHPNECLEIIKQDIKAVRKMGKVRKLKDKLKKIHSLTGKRVIKSKKCPIEINPDRLRAFWLEIVGKEKPFEVSERFKEWFDHMETLEREQDNSSIATEFMLALKKVKPWKAAGPDGIQAYWFKRLSAFSNKLKEFVISFIENETEPPRWLCAGRVVSIPKGGDKDDCNNYRPISCLNTAYKLLTGTVHGLVRNYCDANKILPIEQRACRKGDWATTRGIVQDSAFRTNVRHNRMQATMAWIDYSKAYDSVSHDFLFQTLVAIKIPPNILRIIRRIMNKWHVRYIGANEQSSRELQIKRGVLQGDTLSPLLFCLALTPLSFIINEYVTKISVNGMMFNHQYYMDDLILYAKLREIVYAVKLVKTISAEVGLDMNMKKCAINIDKSDNDIEGIPCLSEIQVYKYLGIHCNEQTQQSVTREIAMKTLQGKKYDILDSEASYKQKRLLYNSQLIPKLSYISTNVIAGSGTLMSDLAQMEEFDKGLPLWLREKDRKLMQLSANSNRLFLPVDMGGLGFKSAREDMCKQIARCYTYIKFHRDLREIDELLESLAKRQKRNTISDFRQMLNICQGLNLNIECSRGNYIKVNGTCFLTLKKAVQTISKTMDKYFAELRLEQWQSKQCAGDVLREEDINIAESFRYLKLDFGIGPILNGMAVQEKAIMCYAHPANAALLDRKCRRCRQHKVLKPQLETIQHIMTGCPIGQVTTMVTRHDDVVKHLVQELRKEYNFKKLHYTEHIPKSDISECRKYKMFVDCPQPVTSEIISNKPDIVLETDDMVYIIEIGISWFTILSKQSRWKYCKYALNSTIKYEDFDYNQGEAFVSAESLKNRLKDLFRKEVKVIPLVLGVCGEITDQTLDFYKQLPLPANRIDKVRLLMQRSVMLGSHYVLKSHMGTGSCANKP

SEQ ID NO: 8106 - protein, 1167 aa, Panagrolaimus sp.
MAPRRHRKQSKDRNYWTKGELKHLEGFAKQAQDNGEAVDLQLLLESREEYALLNNEIFPPRTPKALELKVYACFRSRRGGTTVVRNRAPDVFNPQSSQEENMETEVESASSSDDHEPSVAREASQMECDKNLKPDEVLVKSITSKYNEIKRNHLWRTPLRKTRIPAKDLKVINDSIEQCLNTLNIDDITKLDHLVYATGAILMDKYKKSVDMGQIEWAENHKEALKVLKKYLSWAILLKDIKREKLNFNNLSRKQWNAWCALSHKYQVTHPSECLEIVKQDLKAVRKMGIVRKTKDKLKKIHALTGKRIVKTVRNPIEINPDRLRTFWYEIVGKEKQFTVSERYQEWFDAMETVTRQPDNSPIAAEFMIALKKVKPWKAAGPDGIQAYWFKRIKAFSNRLKSLVVLMIENEIDPPRWLCAGRVVSIPKGGDKDDCNNYRPISCLNTAYKLLTGTIHGLVRNYCDTNKVLPIEQRACRRGDWATTRRIVQDSAFRTNVQHNKMQATMAWIDYSKAYDSVSHDFLFQVLIALKVPSNLLRIIRRIMNKWHVRYIGANEQSSRELQIKRGVLQGDTLSPLLFCLALTPISFVINEYVTPVSVNGMMFNHQYYMDDLILYAKLREIVYAVKLVKTISAEVGLDMNLKKCAINFDKDGNDINGIPCLSEIQVYKYLGIHCNEQTQQSVTRELAMKVLQGKKHDILNNEASYKQKRLLYNSQLIPKLSYISTNVITGSGTLMSDLAQMDEFDKGLPLWLREKDRKLMQLSANSNRLFLPIKRGGLGFKSAREDMCKQIARCYTYIKFHRDLREIDELLESLAKRQKRNTISDFRQMLNICQGLNLNIECSRGNYIKVNGTCFLVLKKAVQEVSKIMDMYFAEMRLEQWQSKPCAGDVLREEDINIPESFRYLKLDFGIGPILNAMAIQEKAIMCYAHPANAALTDRKCRRCRQHRVLKPQLETIQHIMTGCPIGQVTTMVTRHDDVVRHLVQELRKAFNFKKLHYTEHIPKSDASECKKYRMFVDCPQPVTSEIICNKPDIVLETDEMVYIIEIGISWFTILDKQSRWKYCKYAQNSTIRYEDFDNNQGEAFVSAESLKNRLKDLFRKEVKVIPLVLGVCGEITDRTLGFYKQLPLPANRIDKVQLLMQRSVMLGSHYVLKSHMGTVSCASKP

SEQ ID NO: 8107 - protein, 943 aa, Macrocentrus cingulum
MKKNKLKQPRMNDVLLGGPTGPTEPDNLPGAPDDNPEMFACRLEGCPKVFPSSRGRTLHEQKMHKAWYDDRQLEDNGGKKVRWTAEEATLLARKEAQLVREGIRFVNMALEPFFPERSREAIKGQRRRPDHKRAVERFLAEPEDGDRVDEPVQAAVAELPDECQNLFQSVVDALTNGAPVRGREFAAGRLNNICGNAASWSKQRVTHELELYLLEVFPSQQRLNNKKRVDVGDRYLTKRQQRRGEFAITQRAWRKNPCKCLRVILKGKSAESAPAMDVMVPFWRAVMSSDDGTSPGVNNRRETINALWAPILEEEITAAFPENNTSPGPDGVSARQLRAVPSCVLAKIFNLFLICETLPKHLLESTTTLIPKKDGAVDPGDYRPITVSSVIVRTFHKLLATRLLKNIVLDSRQKAFLPVDGCAENTFSLDLILRYLRQNFKPLYMASVDVAKAFDSVTHNTIRDVMLAMGVPQAMVKYIMAVYERSTTRLICGGWVSDPIHPSCGVKQGDPLSPMIFNMVMDGLLRKLPKEIGVKIGDKIFNAFAFADDLVFVAASAPGLQTAIDCANEYLAQCGLKINAGKSFTVAIKGIPKVGRTAVDRNAIFSCGGHNMPALSREEDWKYLGVPYSPEGRLNIKIEAQLRESIDKLTRAPLKPQQRIFGLKTTVIPGLIHLLVLGNITLGRLKKTDAIVRSAVRQWLHLPETVPNAYIHAGVKDGGLGIPSARWFMPLKRMERLMKFSQREEQLSPFLRGEIQKAQRRLLEGREVLKDNDDIGKRWARLLHESIDGSALKDSADVPQQHLWICEGTRFLSGRDFVNSVKWRINAMPTRSRRARGQIKNRQCRAGCHEIETLNHVSQKCHRTHGARVDRHNALAAYVQRALGKKCDPVEAEPIFDTADGKRKPDLVAVREDQAFVFDAQIVSEQSDLGRAHEAKIVRPCRR

SEQ ID NO: 8108 - protein, 849 aa, Euglossa dilemma
MESAAKEDADYEEIDKILELATKKITEGTVEAGGGNRNRNEPRNRLGQRRKESDRTRFSKFQYARYQELYNKCPRKLIDMAVAGDGIEAGKQIKLPDRGAIEQLYEGLWGHEEAATGLPKLGRGPSAHIPIIELLKPISVDELITKMKKIKSGTAPGVDGVKKPHLRQSGFLQLLSKFYNLIMLKMYYPAQWRINRTTLIPKTGKDTLNIKNWRPITIGSLLSRVYSSMLDSRLRDKIQNHIRQKGFTKEDGCKHNTAILQRALAEMKEKSGGVVTVVDVSKAFDTVSHAATRDGLVNKGIPSVVAEYVHSMFGGCKTKIKTGSEELELDIKRGVKQGDPLSPLMFNIVLNPIIQKLDETTEGIRLGDERVSVLAFADNLVLLGKDGGTAARQIQILDKYLKELGMSVQADKCSAFQVVHKNKTWHLKDPGIKLNETAFPYTGPEDTLRYLGVNVSPWRGLRQIDIDRIVAAATNIHKMKLKPHQKVNLIRTHLLPKYVHEMVSSPPPIKTLESLDQEIKGVIKKILHLHPSTTDGVIYTEKVNGRLGIQKITDIVRIAALRSGVKMLRSDDLAVLEAYSAREAIIQKYAQSLGMEWPASDREIESKRASLRQRYADRWETLSSQGQGLKCFFNDKHGNAWLRQPSLLKPSRYIDALKLRTNTFGTRIALKRANKEIDPICRRCKGQIETLGHILGNCIFTKNARIRRHNEIVDLIESKTSKHKAVFKEPSINVIGDLKKPDLMIKDQDRLRVVDVTVRFEDVDGFRKAFKDKIDKYKETARYLRARLNCNRADVLPIVVGSRGAVPLSTVRNLKALGLTASDIKTIALIALRSSIEIANQFIDYDYIL

SEQ ID NO: 8109 - protein, 1506 aa, Schmidtea mediterranea
MRDPKIWFTDDDIDCYLENHISGPEFATIKCFIVEILRTNHGEEIFPIPEIVFRAQKILCPLNIDKSHWILFIYCKESLTSYYIDPILKYRHKLTNKTHALQITMALNQLFNLKAAMTFHPHDDFLFQENNYDCGPYICAYAMMICGEWDCFPDNFIENIRVEIHSFRLNSLSKIPKISGGAITKFNNTKQIKPHGFTSKANQIHFYNQHSCPSSLMKVWFEKHRKITVLSPDLTTQLIAQNDSFIRENVTFKQFTDNEFIFSVIPNDKNWCLFLFSIRHGTSYVFDFQNRSISERLSGIGENLTDYLNRFCFSKTVRFDNDYKTDHLYFRSEDPTFFASVFIVFLERFLFGNNFLTGSVEKFLKSIKLKQTNEICQDINLLNCKISDKILTNYYENLNLSGKYHLLNATMCTAILDDCTQYLSEFLNFDHLSKAQVLFTIVAPVKSREILFVIDYETDEHYFLNPTTLTINSEYSSICLNLLKKINEIRDSLGCAMITGDCPHDTRGSGLINQILICAFITNYANDVPLENINLRNIGNVIKSLVPVVIKTNETKIKGNIKSNKNMNGKMKLEERKIIINMILLTITNSSVNEIVDIFIKEIPKKEKPAHKPYLGNKIRATENKISKTKLITLFMTEMKETVYKILNNSNISVRPPIKDIIQFFTHNFPIEKSWDDVLQFCKTSMNTLRLESFSSDEVLFEMKRADNTCPGLDGIQYKDIILFDPEAKLLTFLFNKIIADKIIPTSWKSFKTILIPKPDKDGKYDNVSSWRPIALLSVIYKIFASVLASRLTKWINSNNLLHVGQKGGSSHDGCVEHNSILSAALEHSKYSITHHLSIAWLDIKDAFGSVPHQYMWTLLRHIGVSKEFTLILEMLYTDTSSFYSCGPILTPNIAIKQGVKQGCPISMILFSLAINPVLEAVSRSNIAPFPIGKSPIQILAYADDIALVANSVVDLQNITDVAVDIATKIGFEYRPDKCGYLQIPRVYIDSEISISGVKIKKLLQNEFYQYLGVPVGEEPDQNPYDILQKVISDTKKISECDLLGWQKLKAYKVFIHSRLIFPFRTREIKTSVLTGTLKSKDSSVSFSCKLSGYFRKMLSLPNYSETAYFYNSTENGGAACVDLLDEYHTQTICHFFRLFTSECEFSRTVNIASLNYVTSPRLRIKRPSLQESFNWLNGLECKYTASGKKTRFQRVRTAIKYFEKTHEIKISFETINDDPLLHITTKARGTCIMNSDSRKEVSQVLHSFLHESYLIKWQNGIASKYIACAVNLSPIINKMIYRGDLSEFAWNFIHRARLNALPFNAKPYKFGNERLCRRCHSEEESMTHALQSCEVHLSLATKRHNDCLRLIVDNLKTPDLIVVVDNACSLVLNSKQRVDLIITNLVKKKIYMVDVKCPIDMIANFEQVDKMNLSKYGSLKSEIETVKPDYSVDLDTCIFGSLGTIPPMTVEVLLKIGIKAVDINRLLKECAISNIMNSAKIWYYHSKGVLLDIETHRLNSDEIKI

SEQ ID NO: 8110 - protein, 914 aa, Schmidtea mediterranea
MKSSTFLLRKIPKKEKPAHKPYLGNKIRATENKISKTKLITLFMTEMKETVYKILNNSNISVRPPIEDIIQFFTHNFPIEKSWDDVLQFCKTSMNTLRLESFSSDEVLFEMKRADNTCPGLDGIQYKDIILFDPEAKLLTFLFNKIIADKIIPTSWKSFKTILIPKPDKDGKYDNVSSWRPIALLSVIYKIFASVLASRLTKWINSNNLLHVGQKGGSSHDGCVEHNSILSAALEHSKYSITHPLSIAWLDIKDAFGSVPHQYMWTLLRHIGVSKEFTLILEMLYTDTSSFYSCGPILTPNIAIKQGVKQGCPISMILFSLAINPVLEAVSRSNIAPFPIGKSPIQILAYADDIALVANSVVDLQNITDVAVDIATKIGFEYRPDKCGYLQIPRVHIDSEISISGVKIKKLLQNEFYQYLGVPVGEEPDQNPYDILQKVISDTKKISECDLLGWQKLKAYKVFIHSRLIFPFRTREIKTSVLSGTLKSKDSSVSFSCRLRGYFRKMLSLPNYSETAYFYNSTENGGAACVDLLDEYHTQTICHFFRLFTSECEFSRTVNIASLNYVTSPRLRIKRPSLQESFNWLNGLECKYTASGKKTRFQRVRTAIKYFEKTHEIKISFETINDDPLLHITTKARGTCIMNSDSRKEVSQVLHSFIHESYLIKWQNGIASKYIACAVNLSPIINKMIYRGDLSEFAWNFIHRARLNALPFNAKPYKFGNERLCRRCHSEEESMTHALQSCEVHLSLATKRHNDCLRLIVENLKTPDLIVVVDNACSLVLNSKQRVDLIITNLVKKKIYMVDVKCPIDMIANFEQVDKMNLSKYGSLKSEIETAKPDYSVDLDTCIFGSLGTIPPMTVEILLKIGIKAVDIIRLLKECAISNIINSAKIWHYHSKGVLLDIETHRLNSDEIKI

SEQ ID NO: 8111 - protein, 1506 aa, Schmidtea mediterranea
MRDPKIWFTDDDIDCYLENHISGPEFATIKCFIVEILRTNHGEEIFPIPEIVFRAQKILCPLNIDKSHWILFIYCKESLTSYYIDPILKYRHKLTNKTHALQITMALNQLFNLKAAMTFHPHDDFLFQENNYDCGPYICAYSMMICGEWDCFPDNFIENIRVEIHSFRLNSLSKIPKISGGAITKFNNTKQIKPHGFTSKANQIHFYNQHSCPSSLMKVWFEKHRKITVLSPDLTTQLIAQNDSFIRENVTFKQFTDNEFIFSVIPNDKNWCLFLFSIRHGTSYVFDFQNRSISQRLSGIGENLTDYLNRFCFSKTVRFDNDYKTDHLYFRSEDPTFFASVFIVFLERFLFGNNFLTGSVEKFLKSIKLKQTNEICQDINLLNCKISDKILTNYYENLNLSGKYHLLNATMCTAILDDCTQYLSEFLNFDHLSKAQVLFTIVAPVKSREILFVIDYETDEHYFLNPTTLTINSEYSSICLNLLKKINEIRDSLGCAMITGDCPHDTRGSGLINQILICAFITNYANDVPLENINLRNIGNVIKSLVPVVIKTNETKIKGNIKSNKNMNGKMKVEERKIIINAILLTITNSSVNEIVDIFIKEIPKKEKPAHKPYLGNKIRATENKISKTKLITLFMTEMKETVYKILNNSNISVRPPIEDIIQFFTHNFPIEKSWDDVLQFCKTSMNTLRLESFSSDEVLFEMKRADNTCPGLDGIQYKDIILFDPEAKLLTFLFNKIIADKIIPTSWKSFKTILIPKPDKDGKYDNVSSWRPIALLSVIYKIFASVLASRLTKWINSNNLLHVGQKGGSSHDGCVEHNSILSAALEHSKYSITHPLSIAWLDIKDAFGSVPHQYMWTLLRHIGVSKEFTLILEMLYTDTSSFYSCGPILTPNIAIKQGVKQGCPISMILFSLAINPVLEAVSRSNIAPFPIGKSPIQILAYADDIALVANSVVDLQNITDVAVDIATKIGFEYRPDKCGYLQIPRVHIDSEISISGVKIKKLLQNEFYQYLGVPVGEEPDQNPYDILQKVISDTKKISECDLLGWQKLKAYKAFIHSRLIFPFRTREIKTSVLSGTLKSKDSSVSFSCKLRGYFRKMLSLPNYSETAYFYNSTENGGAACVDLLDEYHTQTICHFFRLFTSECEFSRTVNIASLNYVTSPRLRIKRPSLQESFNWLNGLECKYTASGKKTRFQRVRTAIKYFEKTHEIKISFETINDDPLLHITTKARGTCIMNSDSRKEVSQVLHSFLHESYLIKWQNGIASKYIACAVNLSPIINKMIYRGDLSEFAWNFIHRARLNALPFNAKPYKFGNERLCRRCHSEEESMTHALQSCEVHLCLATKRHNDCLRLIVDNLKTSDLIVVVDNACSLVLNSKQRVDLIITNLVKKKIYMVDVKCPIDMIANFEQVDKMNLSKYGSLKSEIETAKPDYSVDLDTCIFGSLGTIPPMTVEVLLKIGIKAVDINRLLKECAISNIMNSAKIWYYHSKGVLLDIETHRLNSDEIKI

SEQ ID NO: 8112 - protein, 1506 aa, Schmidtea mediterranea
MRDPKIWFTDDDIDCYLENHISGPEFATIKCFIVEILRTNHGEEIFPIPEIVFRAQKILCPLNIDKSHWILFTYCKESLTSYYIDPILKYRHKLTNKTHALQITMALNQLFNLKAAMTFHPHDDFLFQENNYDCGPYICAYAMMICGEWDCFPDNFIENIRVEIHSFRLNSLSKIPKISGGAITKFNNTKQIKPHGFTSKANQIHFYNQHSCPSSLMKVSFEKHRKITVLSPDLTTQLIAQNNSFIRENVTFKQFTDNEFIFSVIPNDKNWCLFLFSIRHGTSYVFDFQNRSISERLSGIGENLTDYLNRFCFSKTVRFDNDYKTDHLYFRSEDPTFFASVFIVFLERFLFGNNFLTGSVEKFLKSIKLKQTNEICQDINLLNCKISDKILTNYYENLNLSGKYHLLNATMCTAILDDCTQYLSEFLNFDHLSKAQVLFTIVAPVKSREILFVIDYETDEHYFLNPTTLTINSEYSSICLNLLKKINEIRDSLGCAMITGDCPHDTRGSGLINQILICAFITNYANDVPLENINLRNIGNVIKSLVPVVIKTNETKIKGNIKSNKNMNGKMKVEERKIIINAILLTITNSSVNEIVDIFIKEIPKKEKPAHKPYLGNKIRATENKISKTKLITLFMTEMKETVYKILNNSNISVRPPIEDIIQFFTHNFPIEKSWDDVLQFCKTSMNTLRLESFSSDEVLFEMKRADNTCPGLDGIQYKDIILFDPEAKLLTFLFNKIIADKIIPTSWKSFKTILIPKPDKDGKYDNVSSWRPIALLSVIYKIFASVLASRLTKWINSNNLLHVGQKGGSSHDGCVEHNSILSAALEHSKYSITHPLSIAWLDIKDAFGSVPHQYMWTLLRHIGVSKEFTLILEMLYTDTSSFYSCGPILTPNIAIKQGVKQGCPISMILFSLAINPVLEAVSRSNIAPFPIGKSPIQILAYADDIALVVNSVVDLQNITDVAVDIATKIGFEYRPDKCGYLQIPRVHIDSEISISGVKIKKLLQNEFYQYLGVPVGEEPDQNPYDILQKVISDTKKISECDLLGWQKLKAYKVFIHSRLIFPFRTREIKTSVLSGTLKSKDSSVSFSCKLRGYFRKMLSLPNYSETAYFYNSTENGGAACVDLLDEYHTQTICHFFRLFTSECEFSRTVNIASLNYVTSPRLRIKRPSLQESFNWLNGLECKYTASGKKTRFQRVRTAIKYFEKTHEIKISFETINDDPLLHITTKARGTCIMNSDSRKEVSQVLHSFLHESYLIKWQNGIASKYIACAVNLSPIINKMIYRGDLSEFAWNFIHRARLNALPFNAKPYKFGNERLCRRCHSEEESMTHALQSCEVHLSLATKRHNDCLRLIVENLKTPDLIVVVDNACSLVLNSKQRVDLIITNLVKKKIYMVDVKCPIDMIANFEQVDKMNLSKYGSMKSEIETAKPDYSVDLDTCIFGSLGTIPPMTVEILLKIGIKAVDINRLLKECAISNIINSAKIWHYHSKGVLLDIETHRLNSDEIKI

SEQ ID NO: 8113 - protein, 1506 aa, Schmidtea mediterranea
MRDPKIWFTDDDIDCYLENHISGPEFATIKCFIVEILRTNHGEEIFPIPEIVFRAQKILCPLNIDKSHWILFIYCKESLTSYYIDPILKYRHKLTNKTHALQITMALNQLFNLKAAMTFHPHDDFLFQENNYDCGPYICAYAMMICGEWDCFPDNFIENIRVEIHSFRLNSLSKIPKISGGAITKFNNTKQIKPHGFTSKANQIHFYNQHSCPSSLMKVWFEKHRKITVLSPDLTTQLIAQNDSFIRENVTFKQFTDNEFIFSVIPNDKNWCLFLFSIRHGTSYVFDFQNRSISERLSGIGENLTDYLNRFCFSKTVRFDNDYKTDHLYFRSEDPTFFASVFIVFLERFLFGNNFLTGSVEKFLKSIKLKQTNEICQDINLLNCKISDKILTNYYENLNLSGKYHLLNATMCTAILDDCTQYLSEFLNFDHLSKAQVLFTIVAPVKSREILFVIDYETDEHYFLNPTTLTINSEYSSICLNLLKKINEIRDSLGCAMITGDCPHDTRGSGLINQILICAFITNYANDVPLENINLRNIGNVIKSLVPVVIKTNETKIKGNIKSNKNINGKMKLEERKIIINAILLTITNSSVNEIVDIFIKEIPKKEKPAHKPYLGNKIRATENKISKTKLITLFMTEMKETVYKILNNSNISVRPPIKDIIQFFTHNFPIEKSWDDVLQFCKTSMNTLRLESFSSDEVLFEMKRADNTCPGLDGIQYKDIILFDPEAKLLTFLFNKIIADKIIPTSWKSFKTILIPKPDKDGKYDNVSSWRPIALLSVIYKIFASVLASRLTKWINSNNLLHVGQKGGSSHDGCVEHNSILSAALEHSKYSITHPLSIAWLDIKDAFGSVPHQYMWTLLRHIGVSNEFTLILEMLYTDTSSFYSCGPILTPNIAIKQGVKQGCPISMILFSLAINPVLEAVSRSNIAPFPIGKSPIQILAYADDIALVANSVVDLQNITDVAVDIATKIGFEYRPDKCGYLQIPRVHIDSEISISGVKIKKLLQNEFYQYLGVPVGEEPDQNPYDILQKVISDTKKISECDLLGWQKLKAYKVFIHSRLIFPFRTREIKTSVLSGTLKSKDSSVSFSCKLRGYFRKMLSLPNYSETAYFYNSTENGGAACVDLLDEYHTQTICHFFRLFTSECEFSRTVNIASLNYVTSPRLRIKRPSLQESFNWLNGLECKYTASGKKTRFQRVRTAIKYFEKTHEIKISFETINDDPLLHITTKARGTCIMNSDSRKEVSQVLHSFLHESYLIKWQNGIASKYIACAVNLSPIINKMIYRGDLSEFAWNFIHRARLNALPFNAKPYKFGNERLCRRCHSEEESMTHALQSCEVHLSLATKRHNDCLRLIVDNLKTPDLIVVVDNACSLVLNSKQRVDLIITNLVKKKIYMVDVKCPIDMIANFEQVDKMNLSKYGSLKSEIETVKPDYSVDLDTCIFGSLGTIPPMTVEVLLKIGIKAVDINRLLKECAIINIMNSAKIWYYHSKGVLLDIETHRLNSDEIKI

SEQ ID NO: 8114 - protein, 1506 aa, Schmidtea mediterranea
MRDPKIWFTDDDIDCYLENHISGPEFATIKCFIVEILRTNHGEEIFPIPEIVFRAQKILCPLNIDKSHWILFIYCKESLTSYYIDPILKYRHKLTNKTHALQITMALNQLFNLKAAMTFHPHDDFLFQENNYDCGPYICAYSMMICGEWDCFPDNFIENIRVEIHSFRLNSLSKIPKISGGAITKFNNTKQIKPHGFTSKANQIHFYNQHSCPSSLMKVWFEKHRKITVLSPDLTTQLIAQNDSFIRENVTFKQFTDNEFIFSVIPNDKNWCLFLFSIRHGTSYVFDFQNRSISQRLSGIGENLTDYLNRFCFSKTVRFDNDYKTDHLYFRSEDPTFFASVFIVFLERFLFGNNFLTGSVEKFLKSIKLKQTNEICQDINLLNCKISDKILTNYYENLNLSGKYHLLNATMCTAILDDCTQYLSEFLNFDHLSKAQVLFTIVAPVKSREILFVIDYETDEHYFLNPTTLTINSEYSSICLNLLKKINEIRDSLGCAMITGDCPHDTRGSGLINQILICAFITNYANDVPLENINLRNIGNVIKSLVPVVIKTNETKIKGNIKSNKNMNGKMKVEERKIIINAILLTITNSSVNEIVDIFIKEIPKKEKPAHKPYLGNKIRATENKISKTKLITLFMTEMKETVYKILNNSNISVRPPIEDIIQFFTHNFPIEKSWDDVLQFCKTSMNTLRLESFSSDEVLFEMKRADNTCPGLDGIQYKDIILFDPEAKLLTFLFNKIIADKIIPTSWKSFKTILIPKPDKDGKYDNVSSWRPIALLSVIYKIFASVLASRLTKWINSNNLLHVGQKGGSSHDGCVEHNSILSAALEHSKYSITHPLSIAWLDIKDAFGSVPHQYMWTLLRHIGVSKEFTLILEMLYTDTSSFYSCGPILTPNIAIKQGVKQGCPISMILFSLAINPVLEAVSRSNIAPFPIGKSPIQILAYADDIALVANSVVDLQNITDVAVDIATKIGFEYRPDKCGYLQIPRVHIDSEISISGVKIKKLLQNEFYQYLGVPVGEEPDQNPYDILQKVISDTKKISECDLLGWQKLKAYKVFIHSRLIFPFCTREIKTSVLTGTLKSKDSSVSFSCKLRGYFRKMLSLPNYSEIAYFYNSTENGGAACVDLLDEYHTQTICHFFRLFTSECEFSRTVNIASLNYVTSPRLRIKRPSLQESFNWLNGLECKYTASGKKTRFQRVRTAIKYFEKTHEIKISFETINDDPLLHITTKARGTCIMNSDSRKEVSQVLHSFLHESYLIKWQNGIASKYIACAVNLSPIINKMIYRGDLSEFAWNFIHRARLNALPFNAKPYKFGNERLCRRCHSEEESMTHALQSCEVHLCLATKRHNDCLRLIVDNLKTPDLIVVVDNACSLVLNSKQRVDLIITNLVKKKIYMVDVKCPIDMIANFEQVDKMNLSKYGSLKSEIETAKPDYSVDLDTCIFGSLGTIPPMTVEVLLKIGIKAVDINRLLKECAISNIMNSAKIWYYHSKCVLLDIETHRLNSDEIKI

SEQ ID NO: 8115 - protein, 1506 aa, Schmidtea mediterranea
MRDPKIWFTDDDIDCYLENHISGPEFATIKCFIVEILRTNHGEEIFPIPEIVSRAQKILCPLNIDKSHWILFIYCKESLTSYYIDPILKYRHKLTNKTHALQITMALNQLFNLKAAMTFHPHDDFLFQENNYDCGPFICAYAMMICGEWDCFPDNFIENIRVEIHSFRLNSLSKIPKISGGAITKFNNTKQIKPHGFTSKANQIHFYNQHSCPSSLMKVWFEKHRKITVLSPDLTTQLIAQNDSFIRENVTFNQFTDNEFIFSVIPNDKNWCLFLFSIRHGTSYVFDFQNRSISQRLSGIGENLTDYLNRFCFSKTVRFDNDYKTDHLYFRSEDPTFFASVFIVFLERFLFGNNFLTGSVEKFLKSIKLKQTNEICQDINLLNCKISDKILTNYYENLNLSGKYHLLNATMCTAILDDCTEYLSEFLNFDHLSKAQVLFTIVAPVKSREILFVIDYETDEHYFLNPTTLTINSEYSSICLNLLKKINEIRDSLGCAMITGDCPHDTRGSGLINQILICAFITNYANDVPLENINLRNIGNVIKSLVPVVIKTNETKIKGNIKSNKNMNGKMKLEERKIIINMILLTITNSSVNEIVDIFIKEIPKKEKLAHKPYLGNKIRATENKISKTKLITLFMTEMKETVCKILNNSNISVRPPIEDIIQFFTHNFPIEKSWDDVLQFCKTSMNTLRLESFSSDEVLFEMKRADNTCPGLDGIQYKDIILFDPEAKLLTFLFNKIIADKIIPTSWKSFKTILIPKPDKDGKYDNVSSWRPIALLSVIYKIFACVLASRLTKWINSNNLLHVGQKGGSSHDGCVEHNSILSAALEHSKYSITHPLSIAWLDIKDAFGSVPHQYMWTLLRHIGVSKEFTLILEMLYTDTSSFYSCGPILTPNIAIKQGVKQGCPISMILFSLAINPVLEAVSRSNIAPFPIGKSPIQILAYADDIALVANSVADLQNITDVAVDIATKIGFEYRPDKCGYLQIPRVHIDSEISISGVKIKKLLQNEFYQYLGVPVGEEPDQNPYDILQKVISDTKKISECDLLGWQKLKAYKVFIHSRLIFPFRTREIKTSVLSGTLKSKDSSVSFSCKLRGYFRKMLCLPNYSETAYFYNSTENGGAACVDLLDEYHTQTICHFFRLFTSECEFSRTVNIASLNYVTSPRLRIKRPSLQESFNWLNGLECKYTASGKKTRFQRVRTAIKYFEKTHEIKISFETINDDPLLHITTKARGTCIMNSDSRKEVSQVLHSFLHESYLIKWQNGIASKYIACAVNLSPIINKMIYRGDLSEFAWNFIHSARLNALPFNAKPYKFGNERLCRRCHSEEESMTHALQSCEVHLCLATKRHNDCLRLIVENLKTPDLIVVVDNACSMVLNSKQRVDLIITNLVKKKIYMVDVKCPIDMIANFEQVDKMNLSKYGSLKSEIETAKPDYSVDLDTCIFGSLGTIPPKTIEVLLKIGIKSVDINRLLKECAISNIMNSAKIWYYHSKGVLLDIETHGLKSDEIKI

SEQ ID NO: 8116 - protein, 1290 aa, Schmidtea mediterranea
MKVWFEKHRKITVLSPDLTTQLIAQNDSFIRENVTFKQFTDNEFIFSVIPNDKNWCLFLFSIRHGTSYVFDFQNRSISERLSGIGENLTDYLNRFCFSKTVRFDNDYKTDRLYFRSEDPTFFASVFIVFLERFLFGNNFLTGSVEKFLKSIKLKQTNEICQDINLLNCKISDKILTNYYENLNLSGKYHLLNATMCTAILDDCTEYLSEFLNFDHLSKAQVLFTIVAPVKSREILFVIDYETDEHYFLNPTTLTINSEYSSICLNLLKKINEIRDSLGCAMITGDCPHDTRGSGLINQILICAFITNYANDVPLENINVRNIGNVIKSLVPVVIKTNETKIKGNIKSNKNINGKMKLEERKIIINAILLTITNSSVNEIVDIFIKEIPKKEKPAHKPYLGNKIRATENKISKTKLITLFMTEMKETVYKILNNSNISVRPPIEDIIQFFTHNFPIEKSWDDVLQFCKTSMNTLRLESFSSDEVLFEMKRADNTCPGLDGIQYKDIILFDPEAKLLTFLFNKIIADKIIPTSWKSFKTILIPKPDKDGKYDNVSSWRPIALLSVIYKIFASVLASRLTKWINSNNLLHVGQKGGSSHDGCVEHNSILSAALEHSKYSITHPLSIAWLDIKDAFGSVPHQYMWTLLRHIGVSKEFTLILEMLYTDTSSFYSCGPILTPNIAIKQGVKQGCPISMILFSLAINPVLEAVSRSNIAPFPIGKSPIQILAYADDIALVANSVVDLQNITDVAVDIATKIGFEYRPDKCGYLQIPRVHIDSEISISGVKIKKLLQNEFYQYLGVPVGEEPDQNPYDILQKVISDTKKISECDLLGWQKLKAYKVFIHSRLIFPFRTREIKTSVLTGTLKSKDSSVSFSCKLRGYFRKMLSLPNYSETAYFYNSTENGGAACVDLLDEYHTQTICHFFRLFTSECEFSRTVNIASLNYVTSPRLRIKRPSLQESFNWLNGLECKYTASGKKTRFQRVRTAIKYFEKTHEIKISFETINDDPLLHITTKARGTCIMNSDSRKEVSQVLHSFLHESYLIKWQNGIASKYIACAVNLSPIINKMIYRGDLSEFAWNFIHRARLNALPFNAKPYKFGNERLCRRCHSEEESMTHALQSCEVHLSLATKRHNDCLRLIVDNLKTPDLIVVVDNACSLVLNSKQRVDLIITNLVKKKIYMVDVKCPIDMIANFEQVDKMNLSKYGSLKSEIETAKPDYSVDLDTCIFGSLGTIPPMTVEVLLKIGIKAVDINRLLKECAISNIMNSAKIWYYHSKGVLLDIETHRLNCDEIKI

SEQ ID NO: 8117 - protein, 944 aa, Trichinella murrelli
MGPERFPECDSFQTHSANADLSNPCPQHPDGLLSEQGLVRDQGGVLRKHLEDGLASCNSELEGLLNFIVSKVLNSGIEDRNKHVDAAISVLTEFLCESKSHQPPPPRKKRTREEPKNRRQKIRSKYAQMQTLFKRDPKRVAAHLIRNQPLCNVSCPIDPAESALRQRLSQRPGVDAAPITSKCPQNSKNILDPIFPEEVTLHLQKMKIHTSAGPDGIKVSHLRSCDPVCLAKAFNLFLLARHIPQQLKDCRTTLIPKTDDPRPDAEDYRPITVASCLYRLFSKIVTRRLEDSLSLHPRQKAFRSGTDGAFDNTSTLMTVIREAHNCGKELNIVSIDLAKAFDTVNHTSITRALRMHGLDDESRTLITEMVTGSSTIIKGDGGALSNRIEINQGVRQGDPISPLLFNAVMDELVERLERTGEGFKLKGVEVTTLAFADDVTLISRSHRGMEKLLSITLDFLNERGLQLNINKCKGIRLVRTPKTKSLVEDTSKPFRVPSFGEENLHIPMVLPGDLIKFLGIDITLNGKPHFDLAPLEDTLERIRKAPLKPAQKLATVRDYLIPSLEYRLGVPGISRKLLESVDGAIRLTVKRFLHLPLTGMNSMFLSMPVKEGGLGLRSLSTQHIARLAVGANSMSISTDTVSRVVADTTTLRKPLLSALEHFAVPTATKSAIREGKRNLLRAEIAQLSETYQGSCLPSFKHGSLVNSWLRGTSGMRSRDYITGLKLRFGVIETRSQKWRGRTPQNPDALLCRHCGHSSGNRETAAHVSQKCLVTHALIVQRHNKIVRLVGDRAKDEGFAVHVETAVKSGEEVYKPDLILIKADTAHIIDVAVPWEKGTNMHEKHERKTNKYAQLADDVKALFGVQNCTVGALVIGARSSWCTSNDGSLKACGLHLPKKFKRLLCRVALEGTCRIFRTSSHAHKHQRKKKKKKKKKKKKKKNQKH

SEQ ID NO: 8118 - protein, 1372 aa, Trichinella britovi
MGKQSRPAQEKSSTAAGSDGQARSDRGRRNHAEVLYPGPFKCTICTFTECVYSRFSNHCMKHGLHLELHCSICTKMFPSIYSVACHYSRCAKTLRNLENPEIPSGSHLNDLHSNDLAENKEISKNKENNKKVKRAKVKRSSVNVNNLEGSLSNNEAPENNRMVTRSTIKRATVVDSRSAPPLLDRPPVERPEIKLVCATIDNRRQKSTAASAPLNIVGICQPLFEAPDDNAAVVSNNCAVSEIKEMPPARINMRLRSRKACGNILEPPRPPRTSQSASESHDGSQPCPGSSAASTNSPRASISQPASTNAQGTHVCSVCSRAFNSFPGLRLHEKRAHPATFAASSQKSVKHLWTIDHLREVKEVEEMLAANNSRSVKALAEALSRKWSEDISMDMAKYLRKKLRAVDLNSAQPTNTALTDGVNSPREGPENTTEEGESLNNGSQVVGTEIMGPERLPECDSLQTHSANADLSNPCPQHPDGLLSEQGLDRDQWGVLRKHLEDGLASCNSELEGLLNFIINKILNSGSEDRNKLVDAAISVLIEFLGEPKSHQPPPPRKKRTREEPKNRRQKIRSKYAQMQTLFKRDPKRVAAHLIKNQPLCNVSCPIDAAESALRQRLSQRPGVDAAPFTSKCPQNSKNILDPIFPEEVTLHLQNMKLQTSAGPDGIKVSHLRSCDPVCLAKAFNLFLLARHIPQQLKDCRTSLIPKTDDPRPDAEDYRPITVASCLYRLFSKIVTRRLEDSLSLHPRQKAFRSGTDGAFDNTSTLMTVIREAHSCGKELNIVSIDLAKAFDTVNHTSITRALRMHGLDDESRTLITEMVTGSSTIIKGDGGALSNRIEINQGVRQGDPISPLLFNAVMDELVERLEQTGEGFKLKGVEVTTLAFADDVTLISRSHRGMEKLLSTTLDFLNERGLKLNISKCKGIRLVRTPKTKSLVEDTSKPFRVPSFGEENQHIPMVLPGDLIKFLGIDITLNGKPHFDLAPLEATLERIRKAPLKPAQKLATVRDYLIPSLEYRLGVPGISRKLLESVDGAIRLTVKRFLHLPLTGMNSMFLSMPVKEGGLGLRSLSTQHIARLAVGTNSMSISTDTVSRVVADTTTLRKPLLSALEHFAVPTATKSAIREGKRNLLRAEIAQLSETYQGSCLPSFKHGSLVNSWLRGTSGMRSRDYITGLKLRFGVIETRSQKWRGRTPQNPDALLCRHCGHSSGNRETAAHVSQKCLVTHALIVQRHNKIMRLVGDRAKDEGFAVHVETAIKSGEEVYKPDLILIKDDTAHILDVAVPWEKGTNMHEKHERKTNKYAQLVGDVKALFGVQNCTVGALVIGARSSWCPSNDGSLKACGLHLPKKFKRLLCRVALEGTCRIFRNFFTRT

SEQ ID NO: 8119 - protein, 1149 aa, Trichinella nelsoni
MAAIRVNYPGPFTCQKCTFTETVFARFVTHCTHHALNVNLACSICGKDFTSINAVASHFPHCKKGTKRNETPIDAPTNTEMHVSTHNTHICTVCSRAFNSFAGLRLHEKRAHPATFAASSQKPTKHQWTIDHLREAKEVEDQLTDSNSCSAKSFAEALSSKWSEAISVDMAKYLRKKLRRVDINFNAHNRGTTDGDTSGLLPEVVGKSISLEGVGGKNRAALIGEEIHGVGVLSMRKTSGFRVEIVGQTTPSPNKSSNALSPQHRDRDPGRDLRHHLEDSLTSCNSELEGLLNFLTNKILNSKPEDRNKYVDDVISIVTEFVCKPNGHQPPPAPKKRTKEEPKNRRQKIRSKYAKMQSLFKRDPKRIAAHLIKNQPLCNVSCPIDAAESALRQRLSQRPSVDAAPFTSKCPPNSKNILDPISPEEVTLHLQRMKIHTSAGPDGIQVSHLRSCDPVCLAKAFNLFLLARHIPQQLKDCRTTLIPKIDHPRPDAEDYRPITVASSLYRLFSKIVTRRLEDSLSLHPRQKAFRSGTDGAFDNTSTLMTIIRNAHKRGRELNIVSIDLAKAFDTINHTSIDRALRMQGLDVDSRALIAQMVTGSSTIIKGDGGAFSNRIEINQGVRQGDPISPLLFNSVMDELIERLEKSKVGFKFMGEEITTLAFADDVTLISRSHRGMAKLLSITLDFLNERGLSLNVNKCKGIRLVRTPKTKSLVQDTSKAFRVPNIGEEKQYIPMVPSGNVIKFLGIQITLNGKPHFELAPLEGTLERIRKAPLKPAQKLATVRDYLIPSLEYKLGVPGISMKLLESVDAAIRLTVKRFLHLQITGMNSMFLTMPIKEGGLGLRPLTTQRIARVAVGTNSMMTSMDNVSRVVANTATLRKPLLSALEHFAVPAATKGAIREGKQNLLREEIAQLSETYQGSCLPSFKKGSLVNSWLRGTCGMRSRDYITGLKLRFGVIETRSQKWRGRTPQNPDALLCRHCGHLSGYRETAAHISQKCPTTHATIIQRHNKIVNLVADRAKREGFAVHVEPAIKSGGNVFKPDLVLVKDGAAHIVDVAVPWEKGTSMHEKHQKKTNEYSPTVEEVRAQFDAETCTVGAIIIGARSSWCPSNNRSLKACGLHLPKKFKRLLCRVALEGTCKIFQNFFTLT

SEQ ID NO: 8120 - protein, 1189 aa, Trichinella nativa
MNKRSVNPAQGNLNSAAGATSQGSVSDNRACFTFSYPGPFKCQACEHVEAVFARIVNHCTHHNVLVNGLTCNICNKHFRTVNAVASHFTHCRKVANSVPAPATVTPLDSEVTVPAATSYVCTACSRTFSTFSGLRLHEKRKHASTFVASSQRPKNHRWSEHEMHDVRATLAKLEKTGSSSLAALAEELSCLWQESISVNTAKYLRKKALATESSEPKAPACTTQIIDCVDCSGSSSPRELKNLMSDGEETIGEGRVNPKASKTPEIRNGVNDLLIQNSNLNLKYVGYSSPISENQEYTVGELDNFNSGLLSALEDSLTSNNTEIEGLINFLIKKIIKSSDEDRKHYTDGVASVLATLLRPNCDGRNPPAPTNRRKRLPPPARNRSERKRCNYASFQSLFKRDPKRIAAHLIKNQPLRNVSCPIDVAESALRQRLSQRPGIDAAPFKFKRPPNSECILSPISADEVTLHLKLMSAETSAGLDGVQVSHLRQCDPMCLAKAFNCFLLARYIPPQLKDCRTTLIPKTDNPRPDADDYRPITIASCIYRLFSKIVTRRLENCISLHPRQKAFRSGTDGAFDNITTLTTIVRDAHKSGKELNIVCVDLAKAFDTVNHSSIDRALRMHGLDANSRALIAQMVTGSTTVIKGDGGVLSHKIEINQGVRQGDPISPLLFNSVMDELIERLEQSGVGYKINNTEVVTLAFADDVTLVSSSHRGMEKLLSITHDFINERGLKLNIRKCKGIRFVRTPKTKSLVQDTSKAFKVRGSGEESSCIPMAGPGEFIKILGVPIAPNGKPSFDIDTLEGTLERIRKAPLKPAQKLAIVRDYLIPSLEYKLGVPGVGRRVLDEVDASIRQTVKRFLHLPHTGMNSMFLTMPIKDGGLGLRSLRTQHLARVAVGTNSMMSSADPTSHTIASMPQHQKPLHAALQHFSVPAATKDALKKGKRQLLCAEIAELTETYQGSCLPTFRKRPVGNSWLSGLNGMRSRDFITGLKLRFGVIETRSQKWRGRTPQNPAVLLCRHCGHSTGKRETAAHISQKCPQTKNLNIQRHNKIVHLVAEHARREGFTVHVEHALKSDGQVYKPDLILTKGNAAHVLDVAVPWETGTDMHEHHERKVTKYCMISDDVKAHFGVDSCTVGAIVVGARSSWCASNKTTLKACNTHFTKRFKRLLCRVALEGTCRVFQTFFTSTP

SEQ ID NO: 8121 - protein, 1189 aa, Trichinella nativa
MNKRSVNPAQGNLNSAAGATSQGSVSDNRACFTFSYPGPFKCQACEHVEAVFARIVNHCTHHNVLVNGLTCNICNKHFRTVNAVASHFTHCRKVANSVPAPATVTPLDSEVTVPAATSYVCTACSRTFSTFSGLRLHEKRKHASTFVASSQRPKNHRWSEHEMHDVRATLAKLEKTGSSSLAALAEELSCLWQESISVNTAKYLRKKALATESSEPKALACTTQIIDCVDCSGSSSPRELKNLMSDGEETIGEGRVNPKASKTPEIRNGVNDLLIQNSNLNLKYVGYSNPISENQEYTVGELDNFNSGLLSALEDSLTSNNTEIEGLINFLIKKIIKSSDEDRKHYTDGVASVLATLLRPNCDGRNPPAPTNRRKRLPPPARNRSERKRCNYASFQSLFKRDPKRIAAHLIKNQPLRNVSCPIDVAESALRQRLSQRPGIDAAPFKFKRPPNSECILSPISADEVTLHLKLMSAETSAGLDGVQVSHLRQCDPMCLAKAFNCFLLARYIPPQLKDCRTTLIPKTDNPRPDADDYRPITIASCIYRLFSKIVTRRLENCISLHPRQKAFRSGTDGAFDNITTLTTIVRDAHKSGKELNIVCVDLAKAFDTVNHSSIDRALRMHGLDANSRALIAQMVTGSTTVIKGDGGVLSHKIEINQGVRQGDPISPLLFNSVMDELIERLEQSGVGYKINNTEVVTLAFADDVTLVSSSHRGMEKLLSITHDFINERGLKLNIRKCKGIRFVRTPKTKSLVQDTSKAFKVRGSGEESSCIPMAGPGEFIKILGVPIAPNGKPSFDIDTLEGTLERIRKAPLKPAQKLAIVRDYLIPSLEYKLGVPGVGRRVLDEVDASIRQTVKRFLHLPHTGMNSMFLTMPIKDGGLGLRSLRTQHLARVAVGTNSMMSSADPTSHTIASMPQHQKPLHAALQHFSVPAATKDALKKGKRQLLCAEIAELTETYQGSCLPTFRKRPVGNSWLSGLNGMRSRDFITGLKLRFGVIETRSQKWRGRTPQNPAVLLCRHCGHSTGKRETAAHISQKCPQTKNLNIQRHNKIVHLVAEHARREGFTVHVEHALKSDGQVYKPDLILTKGNAAHVLDVAVPWETGTDMHEHHDRKVTKYCMISDDVKAHFGVDSCTVGAIVVGARSSWCASNKTTLKACNIHFTKRFKRLLCRVALEGTCRVFQTFFTSTP

SEQ ID NO: 8122 - protein, 1185 aa, Trichinella nativa
MNKRSVNPAQGNLNSAAGATSQGSVSDNRACFTFSYPGPFKCQACEHVEAVFARIVNHCTHHNVLVNGLTCNICNKHFRTVNAVASHFTHCRKVANSVPAPATVTPLDSEVTVPAATSYVCTACSRTFSTFSGLRLHEKRKHASTFVASSQRPKNHRWSEHEMHDVRATLAKLEKTGSSSLAALAEELSCLWQESISVNTAKYLRKKALATESSEPKAPACTTQIIDCVDCSGSSSPRELKNLMSDGEETIGEGRVNPKASKTPEIRNGVNDLLIQNSNLNLKYVGYSSPISENQEYTVGELDNFNSGLLSALEDSLTSNNTEIEGLINFLIKKIIKSSDEDRKHYTDGVASVLATLLRPNCDGRNPPAPTNRRKRLPPPARNRSERKRCNYASFQSLFKRDPKRIAAHLIKNQPLRNVSCPIDVAESALRQRLSQRPGIDAAPFKFKRPPNSECILSPISADEVTLHLKLMSAETSAGLDGVQVSHLRQCDPMCLAKAFNCFLLARYIPPQLKDCRTTLIPKTDNPRPDADDYRPITIASCIYRLFSKIVTRRLENCISLHPRQKAFRSGTDGAFDNITTLTTIVRDAHKSGKELNIVCVDLAKAFDTVNHSSIDRALRMHGLDANSRALIAQMVTGSTTVIKGDGGVLSHKIEINQGVRQGDPISPLLFNSVMDELIERLEQSGVGYKINNTEVVTLAFADDVTLVSSSHRGMEKLLSITHDFINERGLKLNIRKCKGIRFVRTPKTKSLVQDTSKAFKVRGSGEESSCIPMAGPGEFIKILGVPIAPNGKPSFDIDTLEGTLERIRKAPLKPAQKLAIVRDYLIPSLEYKLGVPGVGRRVLDEVDASIRQTVKRFLHLPHTGMNSMFLTMPIKDGGLGLRSLRTQHLARVAVGTNSMMSSADPTSHTIASMPQHQKPLHAALQHFSVPAATKDALKKGKRQLLCAEIAELTETYQGSCLPTFRKRPVGNSWLSGLNGMRSRDFITGLKLRFGVIETRSQKWRGRTPQNPAVLLCRHCGHSTGKRETAAHISQKCPQTKNLNIQRHNKIVHLVAEHARREGFTVHVEHALKSDGQVYKPDLILTKGNAAHVLDVAVPWETGTDMHEHHDRKVTKYCMISDDVKAHFGVDSCTVGAIVVGARSSWCASNKTTLKACNIHFTKRFKRLLCRVALEGTCRVFQTFF

SEQ ID NO: 8123 - protein, 1105 aa, Ennomos quercinarius
MLPVSPLREEYFTPENSEDESLLPPPPPQPVRRSMRPLELEPARQPASSPQSITTQTIFDSQQNTANRNSDQNSFPKVDVSLGNSENAPENSEDESLLPPPPPQPVRRSRRPLELEPTRQLASSPQSIPTQTIFDPQQNAANRNSDQNSFPKVDVSLGNSTLVKCNQCSQPRFFKGIRGLKIHAGRAHRTAPDVSLPKISNACPVQDSSTKPFWQTLSEFKNNLPVVRRIPRGARLSVARCLIEDLKSAISNNTLQAWEHLLTFPFRILHVSKKPLDTSSLTSRIKKNCLLNSNCTPNFFITSGRNSNLFPFPSISYSMVENRLSDGDIKGSAKILFSNDTIAPNTPETLLALKDKHPPSVADLNVLSPPDLTDDIPVATPEDVASALGSFPSGSVGGLDALTPQHIKDLISGDSGETGDALLKQLTVLTNFMLCGQVNSEILEILYGANLCALLKKDGGIRPIAVGTFYRRLTAKICCKRISESLREYFQPVQLGFGSRGGCEAAVHALRTFLSNKGGEVLLKVDVKNAFNSVDRGTLLTEIKDQIPHLYKYLWHCYGKPSKLIYKNNLISSEVGCQQGDPLGPAIFSLAIHPIINSLKSKFNVWYLDDGTLGGDVSTVSRDLELMISKFETIGLTLNFSKCEIYIPNSVTHKNDIIDIFQKIAPNIIVLKDSSLRLLGSPILDEALPDFVEEKIQNFRSVSDRLFKINIHMAYFIIRYCLFVAKFMYALRCCQLWNQPLLLQQLDNILRDTLTAILNTPFDDRTWCQAALPIRIGGLGIRKISSVSLPAFLSSVHSTQKLISAILSPSLAHFDITYMAEAVDTWKAACPSQPLPKTPNSQRQWDGPLCEIERNTLLNTSVSSAESARLLAVSRWESSLWLQALPSKNIGNLLDNNTFRLAVSLRLGAACQVPHLCLCGELVDRLGYHGLACSRSAGRIPRHASLNDVIRRAFVSAGVPSVLEPNGLMRDDGKRPDGMTLIPWKMGRPLVWDATCVDTMAPSHLPETKNQAGSAAAKAENLKRRKYGSLDRGYMFVPFGVETMGPWGPGAFEIYRDLAKLLVEATSDQKAGSYFAQKISIAIQRGNAASLLGTFPSAKGLFDNL

SEQ ID NO: 8124 - protein, 1030 aa, Ennomos quercinarius
MLPVSPLREEYFTPENSEDESLLPPPPPQPVRRSRRPLELEPTRQPASSPQSIPTQTIFDPQQNAANRNSDQNSFLKVDVSLGNSTLVKCNQCSQPRFFKGIRGLKIHAGRAHRTAPDVSLPEISNACPVQDSSTKPFWQTLSEFKNNLPVVRRIPRGARLSVARCLIEDLKSAISNNTLQAWEHLLTFPFRILHVSKKPLDTSSLTSRIKKNCLLNSTCTPNFFITSGRNSNLFPFPSISYSMVENRLSDGDIKGSARILFSNDTIAPNTPETLLALKDKHPPSVADLNVLSPPDLTDDIPVATPEDVASALGSFPSGSAGGLDALTPQHIKDLISGGSGETGDALLKQLTALTNFMLCGQVNSEILEILYGANLCALLKKDGGIRPIAVGTFYRRLTAKICCKRISESLREYFQPVQLGFGSRGGCEAAVHALRTFLSNKGGEVLLKVDVKNAFNSVDRGTLLTEIKDQIPHLYKYLWHCYGKPSKLIYKNNLISSEVGCQQGDPLGPAIFSLAIHPIINSLKSKFNVWYLDDGTLGGDVNTVSRDLELLISKFETIGLTLNFSKCEIYIPNSVTHKNDIIDIFQKIAPNIIVLKDSSLRLLGSPILDEALPDFVEEKIQNFRSVSDRLFKINIHMAYFIIRYCLFVPKFMYALRCCQLWNQPLLLQQLDNILRDTLTAILNTPFDDRTWCQAALPIRIGGLGIRKISSVSLPAFLSSVHSTQKLISAILSPSLAHFDITYMAEAVDTWKAACPSQPLPKTPNSQRQWDGPLCEIEQNTLLNTSVSSAESARLLAVSRWESGLWLQALPSKNIGNLLDNNTFRLAVSLRLGAACQVPHLCLCGELVDRLGYHGLACSRSAGRIPRHASLNDVIRRAFVSAGVPSVLEPNGLMRDDGKRPDGMTLIPWKMGRPLVWDATCVDTMAPSHLPETKNQAGSAAAKAENLKRRKYGSLDRGYMFVPFGVETMGPWGPGAFEIYRDLAKLLVEVTSDQKAGSYFAQKISIAIQRGNAASLLGTFPSAKGLFDNL

SEQ ID NO: 8125 - protein, 787 aa, Ennomos quercinarius
MVENRLSDGDIKGSARILFSNDTIAPNTPETLLALKDKHPPSVADLNVLSPPDLTDDIPVATPEDVASALGSFPSGSAGGLDALTPQHIKDLISGGSGETGDALLKQLTALTNFMLCGQVNSEILEILYGANLCALLKKDGGIRPIAVGTFYRRLTAKICCKRISESLREYFQSVQLGFGSRGGCEAAVHALRTFLSNKGGEVLLKVDVKNAFNSVDRGTLLTEIKDQIPHLYKYLWHCYGKPSKLIYKNNLISSEVGCQQGDPLGPAIFSLAIHPIINSLKSKFNVWYLDDGTLGGDVNTVSRDLELLISKFETIGLTLNFSKCEIYIPNSVTHKNDIIDIFQKIAPNIIVLKDSSLRLLGSPILDEALPDFVEEKIQNFRSVSDRLFKINIHMAYFIIRYCLFVPKFMYALRCCQLWNQPLLLQQLDNILRDTLTAILNTPFDDRTWCQAALPIRIGGLGIRKISSVSLPAFLSSVHSTQKLISAILSPSLAHFDITYMAEAVDTWKAACPSQPLPKTPNSQRQWDGPLCEIERNTLLNTSVSSAESARLLAVSRWESGLWLQALPSKNIGNLLDNNTFRLAVSLRLGAACQVPHLCLCGELVDRLGYHGLACSRSAGRIPRHASLNDVIRRAFVSAGVPSVLEPNGLMRDDGKRPDGMTLIPWKMGRPLVWDATCVDTMAPSHLPETKNQAGSAAAKAENLKRRKYGSLDRGYMFVPFGVETMGPWGPGAFEIYRDLAKLLVEATSDQKAGSYFAQKISIAIQRGNAASLLGTFPSAKGLFDNL

SEQ ID NO: 8126 - protein, 1105 aa, Ennomos quercinarius
MLPVSPLREEYFTPENSEDESLLPPPPPQPVRRSRRPLELEPARQPASSPQSITTQTIFDSQQNTANRNSDQNSFPKVDVSLGNSENAPENSEDESLLPPPPPQPVRRSRRPLELEPTRQPASSPQSIPTQTIFDPQQNAANRNSDQNSFPKVDVSLGNSTLVNCNQCSQPRFFKGIRGLKIHAGRAHRTAPDVSLPKISNACPVQDSSTKPFWQTLSEFKNNLPVVRRIPRGARLSVARCLIEDLKSAISNNTLQAWEHLLTFPFRILHVSKKPLDTSSLTSRIKKNCLLNSNCTPNFFITSGRNSNLFPFPSISYSMVENRLSDGDIKGSARILFSNDTIAPNTPETLLALKDKHPPSVADLNVLSPPDLTDDIPVATPEDVASALGSFPSGSAGGLDALTPQHIKDLISGGSGETGDALLKQLTALTNFMLCGQVNSEILEILYGANLCALLKKDGGIRPIAVGTFYRRLTAKICCKRISESLREYFQPVQLGFGSRGGCEAAAHALRTFLSNKGGEVLLKVDVKNAFNSVDRGTLLTEIKDQIPHLYKYLWHCYGKPSKLIYKNNFISSEVGCQQGDPLGPAIFSLAIHPIINSLKSKFNVWYLDDGTLGGDVSTVSRDLELLISKFETIGLTLNFSKCEIYIPNSVTHKNDIIDIFQKIAPNIIVLKESSLRLLGSPILDEALPDFVEEKIQNFRSVSDRLFKINIHMAYFIIRYCLFVPKFMYALRCCQLWNQPLLLQQLDNILRDTLTAILNTPFDDRTWCQAALPIRIGGLGIRKISSVSLPAFLSSVHSTQKLISAILSPSLSHFDITYMAEAVDTWKAACPSQPLPKTPNSQRQWDGPLCEIERNTLLNTSVSSAESARLLAVSRWESGLWLQALPSKNIGNLLDNNTFRLAVSLRLGAACQVPHLCLCGELVDRLGYHGLACSRSAGRIPRHASLNDVIRRAFVSAGVPSVLEPNGLMRDDGKRPDGMTLIPWKMGRPLVWDATCVDTMAPSHLPETKHQAGSAAAKAENLKRRKYGSLDRGYMFVPFGVETMGPWGPGAFEIYRDLAKLLVEATSDQKAGSYFAQKISIAIQRGNAASLLGTFPSAKGLFDNL

SEQ ID NO: 8127 - protein, 1105 aa, Ennomos quercinarius
MLPVSPLREEYFTPENSEDESLLPPPPPQPVRRSRRPLELEPARQPASSPQSITTQTIFDSQQNAANRNSDQNSFPKVDVSLGNNENAPENSEDESLLPPPPPQPVRRSRRPLELEPTRQPASSPQSIPTQTIFDPQQNAANRNSDQNSFPKVDVSLGNSTLVKCNQCSQPRFFKGIRGLKIHAGRAHRTAPDVSLPEISNACPVQDSSTKPFWQTLSEFKNNLPVVRRIPRGARLSVARCLIEDLKSAISNNTLQAWEHLLTFPFRILHVSKKPLDTSSLTSRIKKNCLLNSTCTPNFFITSGRNSNLFPFPSISYSMVENRLSDGDIKGSARILFSNDTIAPNTPETLLALKDKHPPSVADLNVLSPPDLTDDIPVATPEDVASALGSFPSGSAGGLDALTPQHIKDLISGGSGETGDALLKQLTALTNFMLCGQVNSEILEILYGANLCALLKKDGGIRPIAVGTFYRRLTAKICCKRISESLREYFQPVQLGFGSRGGCEAAVHALRTFLSNKGGEVLLKVDVKNAFNSVDRGTLLTEIKDQIPHLYKYLWHCYGKPSKLIYKNNLISSEVGCQQGDPLGPAIFSLAIHPIINSLKSKFNVWYLDDGTLGGDVNTVSRDLELLISKFETIGLTLNFSKCEIYIPNSVTHKNDIIDIFQKIAPNIIVLKDSSLRLLGSPILDEALPDFVEEKIQNFRSVSDRLFKINIHMAYFIIRYCLFVPKFMYALRCCQLWNQPLLLQQLDNILRDTLTAILNTPFDDRTWCQAALPIRIGGLGIRKISSVSLPAFLSSVHSTQKLISAILSPSLAHFDITYMAEAVDTWKAACPSQPLPKTPNSQRQWDGPLCEIERNTLLNTSVSSAESARLLAVSRWESGLWLQALPSKNIGNLLDNNTFRLAVSLRLGAACQVPHLCLCGELVDRLGYHGLACSRSAGRIPRHASLNDVIRRAFVSAGVPSVLEPNGLMRDDGKRPDGMTLIPWKMGRPLVWDATCVDTMAPSHLPETKNQAGSAAAKAENLKRRKYGSLDRGYMFVPFGVETMGPWGPGAFEIYRDLAKLLVEATSDQKAGSYFAQKISIAIQRGNAASLLGTFPSAKGLFDNL

SEQ ID NO: 8128 - protein, 1105 aa, Ennomos quercinarius
MLPLSPLREEYFTPENSEDESLLPPPPPQPVRRSRRPLELEPARQPASSPQSITTQTIFDSQQNAANRNSDQNSFPKVDVSLGNSENAPENSEDESLLPPPPPQPVRRSRRPLELEPTRQPASSPQSIPTQTIFDPQQNAANRNSDQNSFPKVDVSLGNSTLVKCNQCSQPRFFKGIRGLKIHAGRAHRTAPDVSLPEISNACPVQDSSTKPFWQTLSEFKNNLPVVRRIPRGARLSVARCLIGDLKSAISNNTLQAWEHLLTFPFRILHVSKKPLDTSSLTSRIKKNCLLNSTCTPNFFITSGRNSNLFPFPSISYSMVENRLSDGDIKGSARILFSNDTIAPNTPETLLALKDKHPPSVADLNVLSPPDLTDDIPVATPEDVASALGSFPSGSAGGLDALTPQHIKDLISGGSGETGDALLKQLTALTNFMLCGQVNSEILEILYGANLCALLKKDGGIRPIAVGTFYRRLTAKICCKRISESLREYFQPVQLGFGSRGGCEAAVHALRTFLSNKGGEVLLKVDVKNAFNSVDRGTLLTEIKDQIPHLYKYLWHCYGKPSKLIYKNNLISSEVGCQQGDPLGPAIFSLAIHPIINSLKSKFNVWYLDDGTLGGDVSTVSRDLELLISKFETIGLTLNFSKCEIYIPNSVTHKNDIIDIFQKIAPNIIVLKDSSLRLLGSPILDEALPDFVEEKIQNFRSVSDRLFKINIHMAYFIIRYCLFVPKFMYALRCCQLWNQPLLLQQLDNILRDTLTAILNTPFDDRTWCQAALPIRIGGLGIRKISIVSLPAFLSSVHSTQKLISAILSPSLAHFDITYMAEAVDTWKAACPSQPLPKTRNSQRQWDGPLCEIERNTLLNTSVSSVESARLLAVSRWESGLWLQALPSKNIGNLLDNNTFRLAVSLRLGAACQVPHLCLCGELVDRLGYHGLACSRSAGRIPRHASLNDVIRRAFVSAGVPSVLEPNGLMRDDGKRPDGMTLIPWKMGRPLVWDATCVDTMAPSHLPETKNQAGSAAAKAENLKRRKYGSLDRGYMFVPFGVETMGPWGPGAFEIYRDLAKLLVEATSDQKAGSYFAQKISIAIQRGNAASLLGTFPSAKGLFDNL

SEQ ID NO: 8129 - protein, 1029 aa, Ennomos quercinarius
MFMPLLSPHFSEDDEQFHTPEEIHPSPPPQQILRCRRQLPFSDTEAAGPSSLPPVITPAVTTSNSNVQDTASRNVTQNSNINANVSLENLVKCDQCSQTRFFKGNRGLKIHISKAHRLDLNSNQVQHPTTQITTNFWKTLSDFKNNLPIVKRIPRGARISVAKCLINDIKNVTTCNSSTSIQAWEHLLTFPYRILHVSKNPLEQNSLTKKIKQNCQQNSKSCPVFSFSSRSQTKSTYSVPYRLVEDKMAEGDIRGSARLLFSNDTIAPNTPGTLLALKEKHPPAPANYQNLLPPPDSSEEDSLLATPDDVSLALASFPSGSAGGLDSLTPQHLKDLTGPGCGETGDALLKELTILINLMLGGKVDVNIIDILYGANLCALLKKDGGIRPIAVGTVYRRLAAKICCKNIRESLCKEFQPHQLGFGSRGGCEAAVHALRIFLAHQGGEVLVKVDVKNAFNSVGRSVLLNRVKDKIPLIYNFIWQCYGKPTKLIYKNNLISSEVGCQQGDPLGPALFSLAIQPIIKKLESKFNVWYLDDGTLGGDVNTVYNDLNSLVTDFDAIGLTLNFSKCEIFIPNILMTSQNDTINLFEKIAPQIKLLDSQSLRLLGSPILDDSIPNFVDEKIQNFRSVSDRLGKINTHVAYFILRYCLFVPKFMYVLRCCQLWNHPILLQQLDNIQRNTITAILNTPFDDRAWRQASLPIRFGGLGIRKISSVSLPAFLSSAYSTQKLVNAILSPSLQNYNFGFLAEATESWRTACPSDPLPKTPASQRQWDGPLCALEYKKLVDTASSSTERARLLAVARWESGLWLHALPSRNFGNLLDNNTFRLAVSLRIGAPSQVPHRCPCGEMVDGLGLHGLSCIKSTGRIPRHADLNDIIRRALVSAGVPSVLEPNGLMRDDGKRPDGMTLIPWKMGRPLVWDATCVDTLALSHLPLTTAQAGAAAIKAENLKRHKYALLDRAYIFEPFGVETMGPWGPAAMETYRDLAKRLVEASGDQNAGFYFAQKISIAIQRGNAASILGTFPSANGLF

SEQ ID NO: 8130 - protein, 1029 aa, Ennomos quercinarius
MFMPLLSPHFSEDDEQFHTPEETHPSPPPQQILRCRRQLPFSDTEAAGPSSLPPVITPAVTTSNSNVQDTASRNVTQNSNINANVSLENLVKCDQCSQTRFFKGNRGLKIHISKAHRLDLNSNQVQHPTTQITTNFWKTLSDFKNNLPIVKRIPRGARISVAKCLINDIKNVTTCNSSTSIQAWEHLLTFPYRILHVSKNPLEQNSLTKKIKQNCQQNSKSCPVFSFSSRSQTKSTYSVPYRLVEDKMAEGDIRGSARLLFSNDTIAPNTPGTLLALKEKHPPAPANYQNLLPPPDSSEEDSLLATPDDVSSALASFPSGSAGGLDSLTPQHLKDLTGPGCGETGDALLKELTILINLMLGGKVDVNIIDILYGANLCALLKKDGGIRPIAVGTVYRRLAAKICCKNIRESLCKEFQPHQLGFGSRGGCEAAVHALRIFLAHQGGEVLVKVDVKNAFNSVGRSVLLNRVKDKIPLIYNFIWQCYGKPTKLIYKNNLISSEVGCQQGDPLGPALFSLAIQPIIKKLESKFNVWYLDDGTLGGDVNTVYNDLNSLVTDFDAIGLTLNFSKCEIFIPNILMTSQNDTINLFEKIAPQIKLLDSQSLRLLGSPILDDSIPNFVDEKIQNFRSVSDRLGKINTHVAYFILRYCLFVPKFMYVLRCCQLWNHPILLQQLDNIQRNTITAILNTPFDDRAWRQASLPIRFGGLGIRKISSVSLPAFLSSAYSTQKLVNAILSPSLQNYNFGFLAEATESWRTACPSDPLPKTPASQRQWDGPLCALEYKKLVDTASSSTERARLLAVARWESGLWLHALPSRNFGNLLDNNTFRLAVSLRIGAPSQVPHRCPCGEMVDGLGLHGLSCIKSTGRIPRHADLNDIIRRALVSAGVPSVLEPNGLMRDDGKRPDGMTLIPWKMGRPLVWDATCVDTLALSHLPLTTAQAGAAAIKAENLKRHKYALLDRAYIFEPFGVETMGPWGPAAMETYRDLAKRLVEASGDQNAGFYFAQKISIAIQRGNAASILGTFPSANGLF

SEQ ID NO: 8131 - protein, 1029 aa, Ennomos quercinarius
MFMPLLSPHLSEDDEQFHTPEEIHPSPPPQQILRCRRQLPFSDTEAAGPSSLPPVITPAVTTSNSNVQDTASRNVTQNSNINANVSLENLVKCDQCSQTRFFKGNRGLKIHISKAHRLDLNSNQVQHPTTQITTNFWKTLSDFKNNLPIVKRIPRGARISVAKCLINDIKNVTTCNSSTSIQAWEHLLTFPYRILHVSKNPLEQNSLTKKIKQNCQQNSKSCPVFSFSSRSQTKSTYSVPYRLVEDKMAEGNIRGSARLLFSNDTIAPNTPGTLLALKEKHPPAPANYQNLLPPPDSSEEDSLLATPDDVSLALASFPSGSAGGLDSLTPQHLKDLTGPGCGETGDALLKELTILINLMLGGKVDVNIIDILYGANLCALLKKDGGIRPIAVGTVYRRLAAKICCKNIRESLCKEFQPHQLGFGSRGGCEAAVHALRIFLAHQGGEVLVKVDVKNAFNSVGRSVLLNRVKDKIPLIYNFIWQCYGKPTKLIYKNNLISSEVGCQQGDPLGPALFSLAIQPIIKKLESKFNVWYLDDGTLGGDVNTVYNDLNSLVTDFDAIGLTLNFSKCEIFIPNILMTSQNDTINLFEKIAPQIKLLDSQSLRLLGSPILDDSIPNFVDEKIQNFRSVSDRLGKINTHVAYFILRYCLFVPKFMYVLRCCQLWNHPILLQQLDNIQRNTITAILNTPFDDRAWRQASLPIRFGGLGIRKISSVSLPAFLSSAYSTQKLVNAILSPSLQNYNFGFLAEATESWRTACPSDPLPKTPASQRQWDGPLCALEYKKLVDTASSSTERARLLAVARWESGLWLHALPSRNFGNLLDNNTFRLAVSLRIGAPSQVPHRCPCGEMVDGLGLHGLSCIKSTGRIPRHADLNDIIRRALVSAGVPSVLEPNGLMRDDGKRPDGMTLIPWKMRRPLVWDATCVDTLALSHLPLTTAQAGAAAIKAENLKRHKYALLDRAYIFEPFGVETMGPWGPAAMETYRDLAKRLVEASGDQNAGFYFAQKISIAIQRGNAASILGTFPSANGLF

SEQ ID NO: 8132 - protein, 1030 aa, Ennomos fuscantarius
MPLLSPLSNDDDDQFHTPEEISKHPLLPPQQSPHCRRQLPFLDNEAAGPSSQLPLIAPVAFTSNLNLQDTANRNVTQNSSVNANVSLENLVKCDQCSQPRFFKGNRGLKIHLSKAHRLDLNSNQVQHPTTQVSTNFWQTLSDFKNNLPIVKRIPRGARISVAKCLLQDIKNVTSCNSSTSLQAWEHLLTFPYRILHVSKNPLDQNSLTKKIKQNCLQNSKSCPVFSFSSRSATKATCSVPYRLVEDKMAEGDIRGSARLLFSNDTMAPNTSETLLALKEKHPSSPVNNQNLPLPPDSSVENSLTATADDVRLAIASFPSGSAGGLDSLTPQHLKDLTGPGCGETGDALLKELTILINIMLGGKVAANIIDILYGANLCALLKKDGGIRPIAVGTVYRRLAAKICCKNIKESLCKEFQPQQLGFGSRGGCEAAVHALRTFLAHQGGEVLVKVDVKNAFNSVGRSVLLTRVKDKIPLIYNFIWQCYGKPTKLIYKNNLISSEVGCQQGDPLGPALFSLAIHPIIKKLKSKFNVWYLDDGTLGGDVNTVYDDLNLIITEFDAIGLTLNYSKCEIFIPNISITSQKVTLNLFEQIAPKIKLLDSQSLRLLGSPILDDSIPNFVNEKIQNFLSVSDRLGKINTHVAYFILRYCLFVPKFMYVLRCCQLWNHPILLQQLDNIQRDTITAILNTSFDDRAWRQASLPIRFGGIGIRKISSVSLPAFLSSAYSTQKLVSSILSPSLQNYNLDFLAEATESWRAACPSVSLPKTPNSQRQWDGPLCASEYKELLDTSNSSAERARLLAVACWESGLWLHALPSRNFGNLLDNNTFRLAASLRIGAPSQVPHHCSSCGEMVHGLGYHGLSCIKSTGRIPRHADLNDIIRRALVSAGIPSVLEPNGLMRDDGKRPDGMTLIPWKMGRPLVWDATCVDTMALSHLPLTTVQAGAAAVKAENLKRHKYALLDRAYMFVPFGVETMGPWGPAAMETYRDLAKRLVEASGDQNAGFYFAQKISIAIQRGNAASILGTFPSTNGLF

SEQ ID NO: 8133 - protein, 1030 aa, Ennomos fuscantarius
MPLLSPLSNDDDDQFHTPEEISKHPLLPPQQSPHCRRQLPFLDNEAAGPSSQLPLIAPVAFTSNLNLQDTANRNVTQNSSVNANVSLENLVKCDQCSQPRFFKGNRGLKIHLSKAHRLDLNSNQVQHPTTQVSTNFWQTLSDFKNNLPIVKRIPRGARISVAKCLLQDIKNVTSCNSSTSLQAWEHLLTFPYRILHVSKNPLDQNSLTKKIKQNCLQNSKSCPVFSFSSRSATKATCSVPYRLVEDKMAEGDIRGSARLLFSNDTMAPNTSETLLALKEKHPSSPVNNQNLPLPPDSSVENSLTATADDVRLAIASFRSGSAGGLDSLTPQHLKDLTGPGCGETGDALLKELTILINIMLGGKVAANIIDILYGANLCALLKKDGGIRPIAVGTVYRRLAAKICCKNIKESLCKEFQPQQLGFGSRGGCEAAVHALRTFLAHQGGEVLLKVDVKNAFNSVGRSVLLTRVKDKIPLIYNFIWQCYGKPTKLIYKNNLISSEVGCQQGDPLGPALFSLAIHPIIKKLKSKFNVWYLDDGTLGGDVNTVYDDLNLIITEFDAIGLTLNYSKCEIFIPNISITSQKVTLNLFEQIAPKIKLLDSQSLRLLGSPILDDSIPNFVNEKIQNFLSVSDRLGKINTHVAYFILRYCLFVPKFMYVLRCCQLWNHPILLQQLDNIQRDTITAILNTSFDDRAWRQASLPIRFGGLGIRKISSVSLPAFLSSAYSTQKLVSSILSPSLQNYNLDFLAEATESWRAACPSDSLPKTPNSQRQWDGPLCASEYKELLDTSNSSAERARLLAVACWESGLWLHALPSRNFGNLLDNNTFRLAASLRIGAPSQVPHHCSSCGEMVHGLGYHGLSCIKSTGRIPRHADLNDIIRRALVSAGIPSVLEPNGLMRDDGKRPDGMTLIPWKMGRPLVWDATCVDTMALSHLPLTTVQAGAAAVKAENLKRHKYALLDRAYMFVPFGVETMGPWGPAAMETYRDLAKRLVEASGDQNAGFYFAQKISIAIQRGNAASILGTFPSTNGLF

SEQ ID NO: 8134 - protein, 1030 aa, Ennomos fuscantarius
MPLLSPLSNDDDDQFHTPEEISKHPLLPPQQSPHCRRQLPFLDNEAAGPSSQLPLIAPVAFTSNLNLQDTANRNVTQNSSVNANVSLENLVKCDQCSQPRFFKGNRGLKIHLSKAHRLDLNSNQVQHPTTQVSTNFWQTLSDFKNNLPIVKRIPRGARISGAKCLLQDIKNVTSCNSSTSLQAWEHLLTFPYRILHVSKNPLDQNSLTKKIKQNCLQNSKSCPVFSFSSRSATKATCSVPYRLVEDKMAEGDIRGSARLLFSNDTMAPNTSETLLALKEKHPSSPVNNQNLPLPPDSSVENSLTATADDVRLAIASFPSGSAGGLDSLTPQHLKDLTGPGCGETGDALLKELTILINIMLGGKVAANIIDILYGANLCALLKKDGGIRPIAVGTVYRRLAAKICCKNIKESLCKEFQPQQLGFGSRGGCEAAVHALRTFLAHQGGEVLLKVDVKNAFNSVGRSVLLTRVKDKIPLIYNFIWQCYGKPTKLIYKNNLISSEVGCQQGDPLGPALFSLAIHPIIKKLKSKFNVWYLDDGTLGGDVNTVYDDLNSIITEFDAIGLTLNYSKCEIFIPNISITSQKVTLNLFEQIAPKIKLLDSQSLRLLGSPILDDSIPNFVNEKILNFLSVSDRLGKINTHVAYFILRYCLFVPKFMYVLRCCQLWNHPILLQQLDNIQRDTITAILNTSFDDRAWRQASLPIRFGGIGIRKISSVSLPAFLSSAYSTQKLVSSILSPSLQNYNLDFLAEATESWRAACPSVSLPKTPNSQRQWDGPLCASEYKKLLDTSNSSAERARLLAVACWESGLWLHALPSRNFGNLLDNNTFRLAASLRIGAPSQVPHHCSSCGEMVHGLGYHGLSCIKSTGRIPRHADLNDIIRRALVSAGIPSVLEPNGLMRDDGKRPDGMTLIPWKMGRPLVWDSTCVDTMALSHLPLTTVQAGAAAVKAENLKRHKYALLDRAYMFVPFGVETMGPWGPAAMETYRDLAKRLVEASGDQNAGFYFAQKISIAIQRGNAASILGTFPSTNGLF

SEQ ID NO: 8135 - protein, 1030 aa, Ennomos fuscantarius
MPLLSPLSNDDDDQFHTPEEISKHPLLPPQQSPHCRRQLPFLDNEAAGPSSQLPLIAPVAFTSNLNLQDTANRNVTQNSSVNANVSLENLVKCDQCSQPRFFKGNRGLKIHLSKAHRLDLNSNQVQHPTTQVSTNFWQTLSDFKNNLPIVKRIPRGARISVAKCLLQDIKNVTSCNSSTSLQAWEHLLTFPYRILHVSKNPLEQNSLTKKIKQNCLQNSKSCPVFSFSSRSATKATCSVPYRLVEDKMAEGDIRGSARLLFSNDTMAPNTSETLLALKEKHPSSPVNNQNLPLPPDSSVENSLTATADDVRLAIASFPSGSAGGLDSLTPQHLKDLTGPGCGETGDALLKELTILINIMLGGKVAANIIDILYGANLCALLKKDGGIRPIAVGTVYRRLAAKICCKNIKESLCKEFQPQQLGFGSRGGCEAAVHALRTFLAHQGGEVLLKVDVKNAFNSVGRSVLLTRVKDKIPLIYNFIWQCYGKPTKLIYKNNLISSEVGCQQGDPLGPALFSLAIHPIIKKLKSKFNVWYLDDGTLGGDVNTVYDDLNLIITEFDAIGLTLNYSKCEIFIPNISITSQKVTLNLFEQIAPKIKLLDSQSLRLLGSPILDDSIPNFVNEKIQNFLSVSDRLGKINTHVAYFILRYCLFVPKFMYVLRCCQLWNHPILLQQLDNIQRDTITAILNTSFDDRAWRQASLPIRFGGLGIRKISSVSLPAFLSSAYSTQKLVSSILSPSLQNYNLDFLAEATESWRAACPSVSLPKTPNSQRQWDGPLCASEYKELLDTSNSSAERARLLAVACWESGLWLHALPSRNFGNLLDNNTFRLAASLRIGAPSQVPHHCSSCGEMVHGLGYHGLSCIKSTGRIPRHADLNDIIRRALVSAGIPSVLEPNGLMRDDGKRPDGMTLIPWKMGRPLVWDATCVDTMALSHLPLTTVQAGAAAVKAENLKRHKYALLDRAYMFVPFGVETMGPWGPAAMETYRDLAKRLVEASGDQNAGFYFAQKISIAIQRGNAASILGTFPFTNGLF

SEQ ID NO: 8136 - protein, 1030 aa, Ennomos fuscantarius
MPLLSPLSNDDDDQFHTPEEISKHPLLPPQQSPHCRRQLPFLDNEAAGPSSQLPLIAPVAFTSNLNLQDTANRNVTQNSSVNANVSLENLVKCDQCSQPRFFKGNRGLKIHLSKAHRLDLNSNQVQHPTTQVSTNFWQTLSDFKNNLPIVKRIPRGARISVAKCLLQDIKNVTSCNSSTSLQAWEHLLTFPYRILHVSKNPLDQNSLTKKIKQNCLQNSKSCPVFSFSSRSATKATCSVPYRLVEDKMAEGDIRGSARLLFSNDTMAPNTSETLLALKEKHPSSPVNNQNLPLPPDSSVENSLTATADDVRLAIASFPSGSAGGLDSLTPQHLKDLTGPGCGETGDALLKELTILINIMLGGKVAANIIDILYGANLCALLKKDGGIRPIAVGTVYRRLAAKICCKNIKESLCKEFQPQQLGFGSRGGCEAAVHALRTFLAHQGGEVLLKVDVKNAFNSVGRSVLLTRVKDKIPLIYNFIWQCYGKPTKLIYKNNLISSEVGCQQGDPLGPALFSLAIHPIIKKLKSKFNVWYLDDGTLGGDVNTVYDDLNLIITEFDAIGLTLNYSKCEIFIPNISITSQKVTLNLFEQIAPKIKLLDSQSLRLLGSPILDDSIPNFVNEKIQNFLSVSDRLGKINTHVAYFILRYCLFVPKFMYVLRCCQLWNHPILLQQLDNIQRDTITAILNTSFDDRAWRQASLPIRFGGLGIRKISSVSLPAFLSSAYSTQKLVSSILSPSLQNYNLDFLAEATESWRAACPSVSLPKTPNSQRQWDGPLCASEYKELLDTSNSSAERARLLAVACWESGLWLHALPSRNFGNLLDNNTFRLAASLRIGAPSQVPHHCSSCGEMVHGLGYHGLSCIKSTGRIPRHADLNDIIRRALVSAGIPSVLEPNGLMRDDGKRPDGMTLIPWKMGRPLVWDATCVDTMALSHLPLTTVQAGAAAIKAENLKRHKYALLDRAYMFVPFGVETMGPWGPAAMETYRDLAKRLVEASGDQNAGFYFAQKISIAIQRGNAASILGTFPSTNGLF

SEQ ID NO: 8137 - protein, 1030 aa, Ennomos fuscantarius
MPLLSPLSNDDDDQFHTPEEISKHPLLPPQQSPHCRRQLPFLDNEAAGPSSQLPLIAPVAFTSNLNLQDTANRNVTQNSSVNANVSLENLVKCDQCSQPRFFKGNRGLKIHLSKAHRLDLNSNQVQHPTTQVSTNFWQTLSDFKNNLPIVKRIPRGARISVAKCLLQDIKNVTSCNSSTSLQAWEHLLTFPYRILHVSKNPLDQNSLTKKIKQNCLQNSKSCPVFSFSSRSATKATCSVPYRLVEDKMAEGDIRGSARLLFSNDTMAPNTSETLLALKEKHPSSPVNNQNLPLPPDSSVENSLTATADDVRLAIASFPSGSAGGLDSLTPQHLKDLTGPGCGETGDALLKELTILINIMLGGKVAANIIDILYGANLCALLKKDGGIRPIAVGTVYRRLAAKICCKNIKESLCKEFQPQQLGFGSRGGCEAAVHALRTFLAHQGGEVLVKVDVKNAFNSVGRSVLLTRVKDKIPLIYNFIWQCYGKPTKLIYKNNLISSEVGCQQGDPLGPALFSLAIHPIIKKLKSKFNVWYLDDGTLGGDVNTVYDDLNLIITEFDAIGLTLNYSKCEIFIPNISITSQKVTLNLFEQIAPKIKLLDSQSLRLLGSPILDDSIPNFVNEKIQNFLSVSDRLGKINTHVVYFILRYCLFVPKFMYVLRCCQLWNHPILLQQLDNIQRDTITAILNTSFDDRAWRQASLPIRFGGIGIRKISSVSLPAFLSSAYSTQKLVSSILSPSLQNYNLDFLAEATESWRAACPSVSLPKTPNSQRQWDGPLCASEYKELLDTSNSSAERARLLAVACWESGLWLHALPSRNFGNLLDNNTFRLAASLRIGAPSQVPHHCSSCGEMVHGLGYHGLSCIKSTGRIPRHADLNDIIRRALVSAGIPSVLEPNGLMRDDGKRPDGMTLIPWKMGRPLVWDATCVDTMALSHLPLTTVQAGAAAVKAENLKRHKYALLDRAYMFVPFGVETMGPWGPAAMETYRDLAKRLVEASGDQNAGFYFAQKISIAIQRGNAASILGTFPSTNGLF

SEQ ID NO: 8138 - protein, 1030 aa, Ennomos fuscantarius
MPLLSPLSNDDDDQFHTPEEISKHPLLPPQQSPHCRRQLPFLDNEAAGPSSQLPLIAPVAFTSNLNLQDTANRNVTQNSSVNANVSLENLVKCDQCSQPRFFKGNRGLKIHLSKAHRLDLNSNQVQHPTTQVSTNFWQTLSDFKNNLPIVKRIPRGARISVAKCLLQDIKNVTSCNSSTSLQAWEHLLTFPYRILHVSKNPLEQNSLTKKIKQNCLQNSKSCPVFSFSSRSATKATCSVPYRLVEDKMAEGDIRGSARLLFSNDTMAPNTSETLLALKEKHPSSPVNNQNLPLPPDSSVENSLTATADDVRLAIASFPSGSAGGLDSLTPQHLKDLTGPGCGETGDALLKELTILINIMLGGKVAANIIDILYGANLCALLKKDGGIRPIAVGTVYRRLAAKICCKNIKESLCKEFQPQQLGFGSRGGCEAAVHALRTFLAHQGGEVLLKVDVKNAFNSVGRSVLLTRVKDKIPLIYNFIWQCYGKPTKLIYKNNLISSEVGCQQGDPLGPALFSLAIHPIIKKLKSKFNVWYLDDGTLGGDVNTVYDDLNLIITEFDAIGLTLNYSKCEIFIPNISITSQKVTLNLFEQIAPKIKLLDSQSLRLLGSPILDDSIPNFVNEKIQNFLSVSDRLGKINTHVAYFILRYCLFVPKFMYVLRCCQLWNHPILLQQLDNIQRDTITAILNTSFDDRAWRQASLPIRFGGLGIRKISSVSLPAFLSSAYSTQKLVSSILSPSLQNYNLDFLAEATESWRAACPSVSLPKTPNSQRQWDGPLCASEYKELLDTSNSSAERARLLAVACWESGLWLHALPSRNFGNLLDNNTFRLAASLRIGAPSQVPHHCSSCGEMVHGLGYHGLSCIKSTGRIPRHADLNDIIRRALVSAGIPSVLEPNGLMRDDGKRPDGMTLIPWKMGRPLVWDATCVDTMALSHLPLTTVQAGAAAVKAENLKRHKYALLDRAYMFVPFGVETMGPWGPAAMETYRDLAKRLVEASGDQNAGFYFAQKISIAIQRGNAASILGTSPSTNGLF

SEQ ID NO: 8139 - protein, 1030 aa, Ennomos fuscantarius
MPLLSPLSNDDDDQFHTPEEISKHPLLPPQQSPHCRRQLPFLDNEAAGPSSQLPLIAPVAFTSNLNLQDTANRNVTQNSSVNANVSLENLVKCDQCSQPRFFKGNRGLKIHLSKAHRLDLNSNQVQHPTTQVSTNFWQTLSDFKNNLPIVKRIPRGARISVAKCLLQDIKNVTSCNSSTSLQAWEHLLTFPYRILHVSKNPLEQNSLTKKIKQNCLQNSKSCPVFSFSSRSATKATCSVPYRLVEDKMAEGDIRGSARLLFSNDTMAPNTSETLLALKEKHPSSPVNNQNLPLPPDSSVENSLTATADDVRLAIASFPSGSAGGLDSLTPQHLKDLTGPGCGETGDALLKELTILINIMLGGKVAANIIDILYGANLCALLKKDGGIRPIAVGTVYRRLAAKICCKNIKESLCKEFQPQQLGFGSRGGCEAAVHALRTFLAHQGGEVLLKVDVKNAFNSVGRSVLLTRVKDKIPLIYNFIWQCYGKPTKLIYKNNLISSEVGCQQGDPLGPALFSLAIHPIIKKLKSKFNVWYLDDGTLGGDVNTVYDDLNLIITEFDAIGLTLNYSKCEIFIPNISITSQKVTLNLFEQIAPKIKLLDSQSLRLLGSPILDDSIPNFVNEKIQNFLSVSNRLGKINTHVAYFILRYCLFVPKFMYVLRCCQLWNHPILLQQLDNIQRDTITAILNTSFDDRAWRQASLPIRFGGLGIRKISSVSLPAFLSSAYSTQKLVSSILSPSLQNYNLDFLAEATESWRAACPSVSLPKTPNSQRQWDGPLCASEYKELLDTSNSSAERARLLAVACWESGLWLHALPSRNFGNLLDNNTFRLAASLRIGAPSQVPHHCSSCGEMVHGLGYHGLSCIKSTGRIPRHADLNDIIRRALVSAGIPSVLEPNGLMRDDGKRPDGMTLIPWKMGRPLVWDATCVDTMALSHLPLTTVQAGAAAVKAENLKRHKYALLDRAYMFVPFGVETMGPWGPAAMETYRDLAKRLVEASGDQNAGFYFAQKISIAIQRGNAASILGTFPSTNGLF

SEQ ID NO: 8140 - protein, 1030 aa, Ennomos fuscantarius
MPLLSPLSNDDDDQFHTPEEISKHPLLPPQQSPHCRRQLPFLDNEAAGPSSQLPLIAPVAFTSNLNLQDTANRNVTQNSSVNANVSLENLVKCDQCSQPRFFKGNRGLKIHLSKAHRLDLNSNQVQHPTTQVSTNFWQTLSDFKNNLPIVKRIPRGARISVAKCLLQDIKNVTSCNSSTSLQAWEHLLTFPYRILHVSKNPLDQNSLTKKIKQNCLQNSKSCPVFSFSSRSATKATCSVPYRLVEDKMAEGDIRGSARLLFSNDTMAPNTSETLLALKEKHPSSPVNNQNLPLPPDSSVENSLTATADDVRLAIASFPSGSAGGLDSLTPQHLKDLTGPGCGETGDALLKELTILINIMLGGKVAANIIDILYGANLCALLKKDGGIRPIAVGTVYRRLAAKICCKNIKESLCKEFQPQQLGFGSRGGCEAAVHALRTFLAHQGGEVLVKVDVKNAFNSVGRSVLLTRVKDKIPLIYNFIWQCYGKPTKLIYKNNLISSEVGCQQGDPLGPALFSLAIHPIIKKLKSKFNVWYLDDGTLGGDVNTVYDDLNLIITEFDAIGLTLNYSKCEIFIPNISITSQKVTLNLFEQIAPKIKLLHSQSLRLLGSPILDDSIPNFVNEKIQNFLSVSDRLGKINTHVAYFILRYCLFVPKFMYVLRCCQLWNHPILLQQLDNIQRDTITAILNTSFDDRAWRQASLPIRFGGLGIRKISSVSLPAFLSSAYSTQKLVSSILSPSLQNYNLDFLAEATESWRAACPSFSLPKTPNSQRQWDGPLCASEYKELLDTSNSSAERARLLAVACWESGLWLHALPSRNFGNLLDNNTFRLAASLRIGAPSQVPHHCSSCGEMVHGLGYHGLSCIKSTGRIPRHADLNDIIRRALVSAGIPSVLEPNGLMRDDGKRPDGMTLIPWKMGRPLVWDATCVDTMALSHLPLTTVQAGAAAVKAENLKRHKYALLDRAYMFVPFGVETMGPWGPAAMETYRDLAKRLVEASGDQNAGFYFAQKISIAIQRGNAASILGTFPSTNGLF

SEQ ID NO: 8141 - protein, 1030 aa, Ennomos fuscantarius
MPLLSPLSNDDDDQFHTPEEISKHPLLPPQQSPHCRRQLPFLDNEAAGPSSQLPLIAPVAFTSNLNLQDTANRNVTQNSSVNANVSLENLVKCDQCSQPRFFKGNRGLKIHLSKAHRLDLNSNQVQHPTTQVSTNFWQTLSDFKNNLPIVKRIPRGARISVAKCLLQDIKNVTSCNSSTSLQAWEHLLTFPYRILHVSKNPLEQNSLTKKIKQNCLQNSKSCPVFSFSSRSATKATCSVPYRLVEDKMAEGDIRGSARLLFSNDTMAPNTSETLLALKEKHPSSPVNNQNLPLPPDSSVENSLTATADDVRLAIASFPSGSAGGLDSLTPQHLKDLTGPGCGETGDALLKELTILINIMLGGKVAANIIDILYGANLCALLKKDGGIRPIAVGTVYRRLAAKICCKNIKESLCKEFQPQQLGFGSRGGCEAAVHALRTFLAHQGGEVLLKVDVKNAFNSVGRSVLLTRVKDKIPLIYNFIWQCYGKPTKLIYKNNLISSEVGCQQGDPLGPALFSLAIHPIIKKLKSKFNVWYLDDGTLGGDVNTVYDDLNLIITEFDAIGLTLNYSKCEIFIPNISITSQKVTLNLFEQIAPKIKLLDSQSLRLLGSPILDDSIPNFVNEKIQNFLSVSDRLGKINTHVAYFILRYCLFVPKFMYVLRCCQLWNHPILLQQLDNIQRDTITAILNTSFDDRAWRQASLPIRFGGLGIRKISSVSLPAFLSSAYSTQKLVSSILSPSLQNYNLDFLAEATESWRAACPSVSLPKTPNSQRQWDGPLCASEYKELLDTSNSSAERARLLAVACWESGLWLHALPSRNFGNLLDNNTFRLAASLRIGAPSQVPHHCSSCGEMVHGLGYHGLSCIKSTGRIPRHADLNDIIRRALVSAGIPSVLEPNGLMRDDGKRPDGMTLIPWKMGRPLVWDATCVDTMALSHLPLTTVQAGAAAVKAENLKRHKYALLDRAYMFVPFGVETMGPWGPAAMETYRDLAKRLVEASGDQNAGFYFAQKISIAIQRGNAASILGTFPSTNGLF

SEQ ID NO: 8142 - protein, 1030 aa, Ennomos fuscantarius
MPLLSPLSNDDDDQFHTPEEISKHPLLPPQQSPHCRRQLPFLDNEAAGPSSQLPLIAPVAFTSNLNLQDTANRNVTQNSSVNANVSLENLVKCDQCSQPRFFKGNRGLKIHLSKAHRLDLNSNQVQHPTTQVSTNFWQTLSDFKNNLPIVKRIPRGARISVAKCLLQDIKNVTSCNSSTSLQAWEHLLTFPYRILHVSKNPLDQNSLTKKIKQNCLQNSKSCPVFSFSSRSATKATCSVPYRLVEDKMAEGDIRGSARLLFSNDTMAPNTSETLLALKEKHPSSPVNNQNLPLPPDSSVENSLTATADDVRLAIASFPSGSAGGLDSLTPQHLKDLTGPGCGETGDALLKELTILINIMLGGKVAANIIDILYGANLCALLKKDGGIRPIAVGTVYRRLAAKICCKNIKESLCKEFQPQQLGFGSRGGCEAAVHALRTFLAHQGGEVLLKVDVKNAFNSVGRSVLLTRVKDKIPLIYNFIWQCYGKPTKLIYKNNLISSEVGCQQGDPLGPALFSLAIHPIIKKLKSKFNVWYLDDGTLGGDVNTVYDDLNLIITEFDAIGLTLNYSKCEIFIPNISITSQKVTLNLFEQIAPKIKLLDSQSLRLLGSPILDDSIPNFVNEKIQNFLSVSDRLGKINTHVAYFILRYCLFVPKFMYVLRCCQLWNHPILLQQLDNIQRDTITAILNTSFDDRAWRQASLPIRFGGLGIRKISSVSLPAFLSSAYSTQKLVSSILSPSLQNYNLDFLAEATESWRAACPSVSLPKTPNSQRQWDGPLCASEYKELLDTSNSSAERARLLAVACWESGLWLHALPSRNFGNLLDNNTFRLAASLRIGAPSQVPHHCSSCGEMVHGLGYHGLSCIKSTGRIPRHADLNDIIRRALVSAGIPSVLEPNGLMRDDGKRPDGMTLIPWKMGRPLVWDATCVDTMALSHLPLTTVQAGAAAVKAENLKRHKYALLDRAYMFVPFGVETMGPWGPAAMETYRDLAKRLVEASGDQNAGFYFAQKISIAIQRGNAASILGTFPSTNGLF

SEQ ID NO: 8143 - protein, 1030 aa, Ennomos fuscantarius
MPLLSPLSNDDDDQFHTPEEISKHPLLPPQQSPHCRRQLPFLDNEAAGPSSQLPLIAPVAFTSNLNLQDTANRNVTQNSSVNANVSLENLVKCDQCSQPRFFKGNRGLKIHLSKAHRLDLNSNQVQHPTTQVSTNFWQTLSDFKNNLPIVKRIPRGARISVAKCLLQDIKNVTSCNSSTSLQAWEHLLTFPYRILHVSKNPLEQNSLTKKIKQNCLQNSKSCPVFSFSSRSATKATCSVPYRLVEDKMAEGDIRGSARLLFSNDTMAPNTSETLLALKEKHPSSPVNNQNLPLPPDSSVENSLTATADDVRLAIASFPSGSAGGLDSLTPQHLKDLTGPGCGETGDALLKELTILINIMLGGKVAANIIDILYGANLCALLKKDGGIRPIAVGTVYRRLAAKICCKNIKESLCKEFQPQQLGFGSRGGCEAAVHALRTFLAHQGGEVLLKVDVKNAFNSVGRSVLLTRVKDKIPLIYNFIWQCYGKPTKLIYKNNLISSEVGCQQGDPLGPALFSLAIHPIIKKLKSKFNVWYLDDGTLGGDVNTVYDDLNLIITEFDAIGLTLNDSKCEIFIPNISITSQKVTLNLFEQIAPKIKLLDSQSLRLLGSPILDDSIPNFVNEKIQNFLSVSDRLGKINTHVAYFILRYCLFVPKFMYVLRCCQLWNHPILLQQLDNIQRDTITAILNTSFDDRAWRQASLPIRFGGLGIRKISSVSLPAFLSSAYSTQKLVSSILSPSLQNYNLDFLAEATESWRAACPSVSLPKTPNSQRQWDGPLCASEYKELLDTSNSSAERARLLAVACWESGLWLHALPSRNFGNLLDNNTFRLAASLRIGAPSQVPHHCSSCGEMVHGLGYHGLSCIKSTGRIPRHADLNDIIRRALVSAGIPSVLEPNGLMRDDGKRPDGMTLIPWKMGRPLVWDATCVDTMALSHLPLTTVQAGAAAVKAENLKRHKYALLDRAYMFVPFGVETMGPWGPAAMETYRDLAKRLVEASGDQNAGFYFAQKISIAIQRGNAASILGTFPSTNGLF

SEQ ID NO: 8144 - protein, 992 aa, Erannis defoliaria
MFFIAFFFVGICFCIIFLSHPRQNYLMASRNVVVQPVPLEDTFVCNRCSQPRSFQTSRGLRIHIGKVHKNRENEPQNQIVFSQIPQVAIVPPDQPFWSILTQFKAGLPVIKRIPRGARIPVAQCLASDIVRAISENSERAWEHLLAFPYRILHVPRITSDHSSLTARIKRNCADSNPPIAPVGNAVHTLPRLRASSSKTIIPYHLIENKISDGDIRGAARLLFSNDTVAPNNLDTVAALRSKHPSAATTSNLPPPPDSKDDCYPTVTTDDVTIAILSFQSGSAGGLDALTPQHLKDLTCGGCGAAGECLTVALTNLVNYMLAGSVNSNITELLYGANLCALKKKDGGIRPIAVGTTYRRLTAKICCRKKSEQLTQYFQPTQLGFGSRGGCEAAVHSLRTFLMHDAGDVLLKVDVKNAFNSVDRGALLTEVKNNIPDLYPFLWQCYGKNSKLLYRNEPLSSEVDCQQGDPLGPAIFSLAIHPIIKRLESKFNVWYLDDGTLGGDADVVFKDLSTLINEFQTIGLEFNFTKCELFVSDHCTSKNEIIRKFNSLAPNIKIINNTSLRLLGSPVLDESIPDFIDEKIQNFNAVSDRLSKINMHMAFVIIKHCLFVPKFTYSLRCCQLWKRPDLLQRLDSIVRDTLTTILNISLEDRNWRQASLPIRYGGLGIRKISSVSLPAFLSSVKSTQNLTNLILSPCLGTFQISFSTEAMDAWKLACPNSTLPRDPSSQRQWDVPLCELERNYLLETTNSSSERARYLAVSRWEAGLWLQALPSVNLGNLLDNNTFRVAISLRIGTSCVVPHQCACGERVDSLGHHGLSCSRSAGRMARHCALNDIIRRAFGSANVAAVLEPNGLMRDDGKRPDGMTLIPWKMGRPLVWDATCVDTLAPSHLPETSKHAGGAANAAECLKRRKYSSLDRGYMFVPFGVETLGPWGPGALRIFKDLSGRLKESTRDQNAGLYLGQKISLAIQRGNVASILGTLPEIRDRLNYL

SEQ ID NO: 8145 - protein, 966 aa, Erannis defoliaria
MASRNVVVQLVPLEDTFVCNRCFQPRSFQTSRGLRIHIGKVHKNRENEPQNQIVFSQIPQVAIVPPDQPFWSILTQFKAGLPVIKRIPRGARIPVAQCLASDIVRAISENSERAWEHLLAFPYRILHVPRITSDHSSLTARIKRNCADSNPPIAPVGNAVHTLPRLRASSSKTIIPYHLIENKISDGDIRGAARLLFSNDTVAPNNLDTVAALRSKHPSAATTSNLPPPPDSKDDCYPTVTTDDVTIAILSFQSGSAGGLDALTPQHLKDLTCGGCGAAGECLTVALTNLVNYMLAGSVNSNITELLYGANLCALKKKDGGIRPIAVGTTYRRLTAKICCRKKSEQLTQYFQPTQLGFGSRGGCEAAVHSLRTFLMHDAGDVLLKVDVKNAFNSVDRGALLTEVKNNIPDLYPFLWQCYGKNSKLLYRNEPLSSEVGCQQGDPLGPAIFSLAIHPIIKRLESKFNVWYLDDGTLGGDADVVFKDLSTLINEFQTIGLELNFTKCELFVSDHCTSKNEIIRKFNSLAPNIKIINNTSLRLLGSPVLDESIPDFIDEKIQNFNAVANRLSKINMHMAFVIIKHCLFVPKFTYSLRCCQLWKRPDLLQRLDSIVRDTLTTILNISLEDRNWRQASLPIRYVGLGIRKISSVSLPAFLSSVKSTQNLTNVILSPCLGTFQISFSTEAMDAWKLACPNSTLPRDPSSQRQWDVPLCELERNYLLETTNSSSERARYLAVSRWESGLWLQALPSVNLGNLLDNNTFRVAISLRIGTSCVVPHQCACGERVDSLGHHGLSCSRSAGRMARHCALNDIIRRAFGSANVAAVLEPNGLMRDDGKRPDGMTLIPWKMGRPLVWDATCVDTLAPSHLPETSKHAGGAANAAECLKRRKYSSLDRGYMFVPFGVETLGPWGPGALRIFKDLSGRLKESTRDQNAGLYLGQKISLAIQRGNVASILGTLPEIRDRLNYL

SEQ ID NO: 8146 - protein, 992 aa, Erannis defoliaria
MFFIAFFFVGICFCIIFLSHPRQNYLMASRNVVVQPVPLEDTFVCNRCSQPRSFQTSRGLRIHIGKVHKNRENEPQNQIVFSQIPQVAIVPPDQPFWSILTQFKAGLPVIKRIPRGARIPVAQCLASDIVRAISENSERAWEHLLAFPYRILHVPRITSDHSSLTARIKRNCADSNPPIAPVGNAVHTLPRLRASSSKTIIPYHLIENKISDGDIRGAARLLFSNDTVAPNNLDTVAALRSKHPSAATTSNLPPPPDSKDDCYPTVTTDDVTIAILSFQSGSAGGLDALTPQHLKDLTCGGCGAAGECLTVALTNLVNYMLAGSVNSNITELLYGANLCALKKKDGGIRPIAVGTTYRRLTAKICCRKKSEQLTQYFQPTQLGFGSRGGCEAAVHSLRTFLMHDAGDVLLKVDVKNAFNSVDRGALLTEVKNNIPDLYPFLWQCYGKNSKLLYRNEPLSSEVGCQQGDPLGPAIFSLAIHPIIKRLESKFKVWYLDDGTLGGDADVVFKDLSTLINEFQTIGLELNFTKCELFVSDHCTSKNEIIRKFNSLAPNIKIINNTSLRLLGSPVLDESIPDFIDEKIQNFNAVSDRLSKINMHMAFVIIKHCLFVPKFTYSLRCCQLWKRPDLLQRLDSIVRDTLTTILNISLEDRNWRQASLPIRYGGLGIRKISSVSLPAFLSSVKSTQNLTNLILSPCLGTFQISFSTEAMDAWKLACPNSTLPRDPSSQRQWDVPLCELERNYLLETTNSSSERARYLAVSRWESGLWLQALPSVNLGNLLDNNTFRVAISLRIGTSCVVPHQCACGERVDSLGHHGLSCSRSAGRMARHCALNDIIRRAFGSANVAAILEPNGLMRDDGKRPDGMTLIPWKMGRPLVWDATCVDTLAPSHLPETSKHAGGAANAAECLKRRKYSSLDRGYMFVPFGVETLGPWGPGALRIFKDLSGRLKESTRDQNAGLYLGQKISLAIQRGNVASILGTLPEIRDRLNYL

SEQ ID NO: 8147 - protein, 952 aa, Bembecia ichneumoniformis
MDTRDVASLEKSYACNECSQPRSFQTYRGLKIHIAKVHKNTQTQSQSTLPQVSHCKAFPKDESLFTRLTKFKTSLPVVKRIPRGARIPVAQHLSSNIQNAIAENSEQAWELLLTFPYRILHIPHITTDNSSLTTRIKRNCQSSSDFCNHLENTFSTSKPTSIPYRLIENKVSDGDIRGAARLLFSNDTVAPHNLDTVAALRSKHPSATGQNSPPPPDANDNNYPIVTAQDTLFAITSFQSGSAGGLDALTPQHLKDLTGGACGNAGENLAVALTNLVNHMLTGRINSNITEILYGANLCALKKKDGGIRPIAVGTTYRRLAAKICCKQKRAFLSKHLQPTQLGFGSRGGCEAAVHALRTFLVDNDSDVVLKVDIKNAFNSLERNVLLTEVKNNIPDLYPFLWQCYGQNSKLAYGNDFLSSEMGCQQGDPLGPAIFSLAIHPIIKRLQSKFNVWYLDDGTLAGKAETVLKDLTFLKTEFKTIGLELNFSKCELYVSEEISNKSDIIKRFDHLAHNIKILDKNSLRLLGSPVLDESIPDFIQEKIQNFNDTSKRLLNINMHVAYVIIKYCLFVPKFTYTLRCCQLWNHPDILQKLDNSVKETLSATFNISLDDRSWNQASLPIRYGGLGIRKISSLALPAFLSSINSTKNLTQMILKQNTETLHASYLTEATNAWKIVCPNASLPKDLTSQKKWDLPLCELEQKNLMQSSNSPTDRARLLAASRWESGLWLHTLPSVYLGNFLDNNTFRVSISLRIGAPCIVPHRCVCGESVNSLGHHGLSCNRSAGRIARHSALNDIIRRAFASANVAAILEPNGLSRDDGKRPDGMALIPWKMGRPLVWDATCADTLAPSHLSETSVSAGSAATYAEHLKRRKYSNLDKGYIFMPFGVETLGPWGPDALKIFKDLSGRLITATRDQNAGFYFGQKLSIAIQRGNAASILGTLPQISEHLLLT

SEQ ID NO: 8148 - protein, 992 aa, Erannis defoliaria
MFFIAFFFVGICFCIIFLSHPRQNYLMASRNVVVQPVPLEDTFVCNRCSQPRSFQTSRGLRIHIGKVHKNRENEPQNQIVFSQIPQVAIVPPDQPFWSILTQFKAGLPVIKRIPRGARIPVAQCLASDIVRAISENSERAWEHLLAFPYRILHVPRITSDHSSLTARIKRNCADSNPPIAPVGNAVHTLPRLRASSSKTIIPYHLIENKISDGDIRGAARLLFSNDTVAPNNLDTVAALRSKHPSAATTSNLPPPPDSKDDCYPTVTTDDVTIAILSFQSGSAGGLDALTPQHLKDLTCGGCGAAGECLTVALTNLVNYMLAGSVNSNITELLYGANLCALKKKDGGIRPIAVGTTYRRLTAKICCRKKSEQLTQYFQPTQLGFGSRGGCEAAVHSLRTFLMHDAGDVLLKVDVKNAFNSVDRGALLTEVKNNIPDLYPFLWQCYGKNSKLLYRNEPLSSEVGCQQGDPLGPAIFSLAIHPIIKRLESKFNVWYLDDGTLGGDADVVFKDLSTLINEFQTIGLELNFTKCELFVSDHCTSKNEIIRKFNSLAPNIKIINNTSLRLLGSPVLDESIPDFIDEKIQNFNAVSDRLSKINMHMAFVIIKHCLFVPKFTYSLRCCQLWKRPDLLQRLDSIVRDTLTTILNISLEDRNWRQASLPIRYGGLGIRKISSVSLPAFLSSVKSTQNLTNLILSPCLGTFQISFSTEAMDAWKLACPNSTLPRDPSSQRQWDVPLCELERNYLLETTNSSSERARYLAVSRWESGLWLQALPSVNLGNLLDNNTFRVAISLRIGTSCVVPHQCACGERVDSLGHHGLSCSRSAGRMARHCALNDIIRRAFGSANVAAVLEPNGLMRDDGKRPDGMTLIPWKMGRPLVWDATCVDTLAPSHLPETSKHAGGAANAAECLKRRKYSSLDRGYMFVPFGVETLGPWGPGALRIFKDLSGRLKESTRDQNAGLYLGQKISLAIQRGNVASILGTLPEIRDRLNYL

SEQ ID NO: 8149 - protein, 992 aa, Erannis defoliaria
MFFIAFFFVGICFCIIFLSHPRQNYLMASRNVVVQPVPLEDTFVCNRCSQPRSFQTSRGLRIHIGKVHKNRENEPQNQIVFSQIPQVAIVPPDQPFWSILTQFKAGLPVIKRIPRGARIPVAQCLASDIVRAISENSERAWEHLLAFPYRILHVPRITSDHSSLTARIKRNCADSNPPIAPVGNAVHTLPRLRASSSKTIIPYHLFENKISDGDIRGAARLLFSNDTVAPNNLDTVAALRSKHPSAATTSNLPPPPDSKDDCYPTVTTDDVTIAILSFQSGSAGGLDALTPQHLKDLTCGGCGAAGECLTVALTNLVNYMLAGSVNSNITELLYGANLCALKKKDGGIRPIAVGTTYRRLTAKICCRKKSEQLTQYFQPTQLGFGSRGGCEAAVHSLRTFLMHDAGDVLLKVDVKNAFNSVDRGALLTEVKNNIPDLYPFLWQCYGKNSKLLYRNEPLSSEVGCQQGDPLGPAIFSLAIHPIIKRLESKFNVWYLDDGTLGGDADVVFKDLSTLINEFQTIGLELNFTKCELFVSDHCTSKNEIIRKFNSLAPNIKIINNTSLRLLGSPVLDESIPDFIDEKIQNFNAVSDRLSKINMHMAFVIIKHCLFVPKFTYSLRCCQLWKRPDLLQRLDSIVRDTLTTILNISLEDRNWRQASLPIRYGGLGIRKISSVSLPAFLSSVKSTQNLTNLILSPCLGTFQISFSTEAMDAWKLACPNSTLPRDPSSQRQWDVPLCELERNYLLETTNSSSERARYLAVSRWESGLWLQALPSVNLGNLLDNNTFRVAISLRIGTSCVVPHQCACGERVDSLGHHGLSCSRSAGRMARHCALNDIIRRAFGSANVAAVLEPNGLMRDDGKRPDGMTLIPWKMGRPLVWDATCVDTLAPSHLPETSKHAGGAANAAECLKRRKYSSLDRGYMFVPFGVETLGPWGPGALRIFKDLSGRLKESTRDQNAGLYLGQKISLAIQRGNVASILGTLPEIRDRLNYL

SEQ ID NO: 8150 - protein, 965 aa, Ennomos quercinarius
MASQNVDLNAVPLDDSIICHQCSQPRSFKSLRGLKIHTSKVHKVPCSPTTNNNTSTHNTQTTSVSSDTNIPFWTILTKLKNSFPVVKRIPRGARASVAQCLTTDINNAVQENSERAWEHLLTFPYRILHVPRIQSDHTSLTSRIKQNCSKNSKCFDAFDFSSKSSSSSHSRTLSVPYHLIENKLSDGDIRGAARLMFSSDTVAPNTLDTLTALRSKHPSAAARTNPLPAPDDDSAVISALAQDVTAALSSFQSGSAGGLDALTPQHLKDLTSGGCGSTGDSLVVTLTKLVNFMLAGSVNSNITGILYGANLCALTKKDGGIRPIAVGTTYRRLTAKICCRLKSQVLSQQFQPIQLGFGSRGGCEAAVHALRTFLMNNGGDVLLKVDVKNAFNSVDRGCLLAEVQDKVPEIYRFLWQCYGQNSKLVYRNDLLLSEVGCQQGDPLGPAIFSLAIHPIIKRLESKFNVWYLDDGTIGGDANTVFKDLSFLISEFKTIGLELNFSKCELFLSDSCKSRDDIINTFNSIAPNIKIIDNSSLRLLGSPIFDESIPDFIEEKIQNFRSVSDRLFKINAHMAFIIIRFCLFVPKFTYSLRCCQLWNHPDLLQQLDNIVKDTLTSIFNISLDERTWCQASLPIRLGGLGIRKISSVSLPAFLSSVKSTQNLVNAILSDGSDTLDISFLTEAVNSWKMACPNSSLPKDLSSQRQWDAPLCELERKNLVDTSSNLTERARLLAASRWESGLWLQALPSHHLGTLLDNNTFRLAISLRIGAPCVAPHRCKCGEKVSSLGHHGLSCSKSAGRIPRHSALNDVIRRAFGNVNVAAVLEPNGLIRDDGKRPDGMTLIPWKMGRPLVWDATCVDTLAPSHLPDTSHQAGGAAAAAEFAKWRKYSSLDRGFIFVPFGVETMGPWGPGAIEIFNDLAGRLVESARDHNAGVYFGQRISLAIQRGNAASIMGTLPDSTDCLNYL

SEQ ID NO: 8151 - protein, 992 aa, Erannis defoliaria
MFFIAFFFVGICFCIIFLSHPRQNYLMASRNVVVQPVPLEDTFVCNRCSQPRSFQTSRGLRIHIGKVHKNRENEPQNQIVFSQIPQVAIVPPDQPFWSILTLFKAGLPVIKRIPRGARIPVAQCLASDIVRAISENSERAWEHLLAFPYHILHVPRITSDHSSLTARIKRNCADSNPPIAPVGNAVHTLPRLRASSSKTIIPYHLIENKISDGDIRGAARLLFSNDTVAPNNLDTVAALRSKHPSAATTSNLPPPPDSKDDCYPTVTTDDVTIAILSFQSGSAGGLDALTPQHLKDLTCGGCGAAGECLTVALTNLVNYMLAGSVNSNITELLYGANLCALKKKDGRIRPIAVGTTYRRLTAKICCRKKSEQLTQYFQPTQLGFGSRGGCEAAVHSLRTFLMHDAGDVLLKVDVKNAFNSVDRGALLTEVKNNIPDLYPFLWQCYGKNSKLLYRNEPLSSEVGCQQGDPLGPAIFSLAIHPIIKRLESKFNVWYLDDGTLGGDADVVFKDLSTLINEFQTIGLELNFTKCELFVSDHCTSKNEIIRKFNSLAPNIKIINNTSLRLLGSPVLDESIPDFIDEKIQNFNAVSDRLSKINMHMAFVIIKHCLFVPKFTYSLRCCQLWKRPDLLQRLDSIVRDTLTTILNISLEDRNWRQASLPIRYGGLGIRKISSVSLPAFLSSVKSTQNLTNLILSPCLGTFQISFSTEAMDAWKLACPNSTLPRDPSSQRQWDVPLCELERNYLLETTNSSSERARYLAVSRWESGLWLQALPSVNLGNLLDNNTFRVAISLRIGTSCVVPHQCACGERVDSLGHHGLSCSRSAGRMARHCALNDIIRRAFGSANVAAVLEPNGLMRDDGKRPDGMTLIPWKMGRPLVWDATCVDTLAPSHLPETSKHAGGAANAAECLKRRKYSSLDRGYMFVPFGVETLGPWGPGALRIFKDLSGRLKESTRDQNAGLYLGQKISLAIQRGNVASILGTLPEIRDRLNYL

SEQ ID NO: 8152 - protein, 992 aa, Erannis defoliaria
MFFIAFFFVGICFCIIFLSHPRQNYLMASRNVVVQPVPLEDTFVCNRCSQPRSFQTSRGLRIHIGKVHKNRENEPQNQIVFSQISQVAIVPPDQPFWSILTQFKAGLPVIKRIPRGARIPVAQCLASDIVRAISENSERAWEHLLAFPYRILHVPRITSDHSSLTARIKRNCADSNPPIAPVGNAVHTLPRLRASSSKTIIPYHLIENKISDGDIRGAARLLFSNDTVAPNNLDTVAALRSKHPSAATTSNLPPPPDSKDDCYPTVTTDDVTIAILSFQSGSAGGLDALTPQHLKDLTCGGCGAAGECLTVALTNLVNYMLAGSVNSNITELLYGANLCALKKKDGGIRPIAVGTTYRRLTAKICCRKKSEQLTQYFQPTQLGFGSRGGCEAAVHSLRTFLMHDAGDVLLKVDVKNAFNSVDRGALLTEVKNNIPDLYPFLWQCYGKNSKLLYRNEPLSSEVGCQQGDPLGPAIFSLAIHPIIKRLESKFNVWYLDDGTLGGDADVVFKDLSTLINEFQTIGLELNFTKCELFVSDHCTSKNEIIRKFNSLAPNIKIINNTSLRLLGSPVLDESIPDFIDEKIQNFNAVSDRLSKINMHMAFVIIKHCLFVPKFTYSLRCCQLWKRPDLLQRLDSIVRDTLTTILNISLEDRNWRQASLPIRYGGLGIRKISSVSLPAFLSSVKSTQNLTNLILSPCLGTFQISFSTEAMDAWKLACPNSTLPRDPSSQRQWDVPLCELERNYLLETTNSSSERARYLAVSRWESGLWLQALPSVNLGNLLDNNTFRVAISLRIGTSCVVPHQCACGERVDSLGHHGLSCSRSAGRMARHCALNDIIRRAFGSANVAAVLEPNGLMRDDGKRPDGMTLIPWKMGRPLVWDATCVDTLAPSHLPETSKHAGGAANAAECLKRRKYSSLDRGYMFVPFGVETLGPWGPGALRIFKDLSGRLKESTRDQNAGLYLGQKISLAIQRGNVASILGTLPEIRDRLNYL

SEQ ID NO: 8153 - protein, 931 aa, Ennomos quercinarius
MFLQIYTHKVPCSPTTNNNTSTHNTQTTSVSSDTNIPFWTILTKLKNSFPVVKRIPRGARASVAQCLTTDINNAVQENSERAWEHLLTFPYRILHVPRIQSDHTSLTSRIKQNCSKNSKCFDAFDFSSKSSSSSHSRTLSVPYHLIENKLSDGDIRGAARLMFSSDTVAPNTLDTLTALRSKHPSAAARTNPLPAPDDDSAVISALAQDVTAALSSFQSGSAGGLDALTPQHLKDLTSGGCGSTGDSLVVTLTKLVNFMLAGSVNSNITGILYGANLCALTKKDGGIRPIAVGTTYRRLTAKICCRLKSQVLSQQFQPIQLGFGSRGGCEAAVHALRTFLMNNGGDVLLKVDVKNAFNSVDRGCLLAEVQDKVPEIYRFLWQCYGQNSKLVYRNDLLLSEVGCQQGDPLGPAIFSLAIHPIIKRLESKFNVWYLDDGTIGGDANTVFKDLSFLISEFKTIGLELNFSKCELFLSDSCKSRDNIINTFNSIAPNIKIIDNSSLRLLGSPIFDESIPDFIEEKIQNFRSVSDRLFKINAHMAFIIIRFCLFVPKFTYSLRCCQLWNHPDLLQQLDNIVKDTLTSIFNISLDERTWCQASLPIRLGGLGIRKISSVSLPAFLSSVKSTQNLVNAILSDGSDTLDISFLTEAVNSWKMACPNSSLPKDLSSQRQWDAPLCELERKNLVDTSSNLTERARLLAASRWESGLWLQALLSHHLGTLLDNNAFRLAISLRIGAPCVAPHRCKCGEKVSSLGHHGLSCSKSAGRIPRHSALNDVIRRAFGNVNVAAVLEPNGLIRDDGKRPDGMTLIPWKMGRPLVWDATCVDTLAPSHLPDTSHQAGGAAAAAEFAKRRKYSSLDRGFIFVPFGVETMGPWGPGAIEIFNDLAGRLVESARDHNAGVYFGQRISLAIQRGNAASIMGTLPDSTDCLNYL

SEQ ID NO: 8154 - protein, 996 aa, Ennomos quercinarius
MIYFFIIFIVILVWYVFFSTYCTGQPPLNHHMASQNVDLNAVPLDDSIICHQCSQPRSFKSLRGLKIHTSKVHKVPCSPTTNNNTSTHNTQTTSVSSDTNIPFWTILTKLKNSFPVVKRIPRGARASVAQCLTTDINNAVQENSERAWEHLLTFPYRILHVPRIQSDHTSLTSRIKQNCSKNSKCFDAFDFSCKSSSSSHSRTLSVPYHLIENKLSDGDIRGAARLMFSSDTVAPNTLDTLTALRSKHPSAAARTNPLPAPDDDSAVISALAQDVTAALSSFQSGSAGGLDALTPQHLKDLTSGGCGSTGDSLVVTLTKLVNFMLAGSVNSNITGILYGANLCALTKKDGGIRPIAVGTTYRRLTAKICCRLKSQVLSQQFQPIQLGFGSRGGCEAAVHALRTFLMNNGGDVLLKVDVKNAFNSVDRGSLLAEVQDKVPEIYRFLWQCYGQNSKLVYRNDLLLSEVGCQQGDPLGPAIFSLAIHPIIKRLESKFNVWYLDDGTIGGDANTVFKDLSFLISEFKTIGLELNFSKCELFLSDSCKSRDDIINTFNSIAPNIKIIDNSSLRLLGSPIFDESIPDFIEEKIQNFRSVSDRLFKINAHMAFIIIRFCLFVPKFTYSLRCCQLWNHPDLLQQLDNIVKDTLTSIFNISLDERTWCQASLPIRLGGLGIRKISSVSLPAFLSSVKSTQNLVNAILSDGSDTLDISFLTEAVNSWKMACPNSSLPKDLSSQRQWDAPLCELERKNLVDTSSNLTERARLLAASRWESDLWLQALPSHHLGTLLDNNTFRLAISLRIGAPCVAPHRCKCGEKVSSLGHHGLSCSKSAGRIPRHSALNDVIRRAFGNVNVAAVLEPNGLIRDDGKRPDGMTLIPWKMGRPLVWDATCVDTLAPSHLPDTSHQAGGAAAAAEFAKRRKYSNLDRGFIFVPFGVETMGPWGPGAIEIFNDLAGRLVESARDHNAGVYFGQRISLAIQRGNAASIMGTLPDSTDCLNYL

SEQ ID NO: 8155 - protein, 952 aa, Bembecia ichneumoniformis
MDTRDVASLEKSYACNECSQPRSFQTYRGLKIHIAKVHKNTQTQSQCALPQVSHCKAFPKDESLFTRLTKFKTSLPVVKRIPRGARIPVAQHLSSNIQNAIAENSEQAWELLLTFPYRILHIPHITTDNSSLTTRIKRNCQSSSDFCNHLENTFSTSKPTSIPYRLIENKVSDGDIRGAARLLFSNDTVAPHNLDTVAALRSKHPSATGQNSPPPPDANDNNYPIVTAQDTLFAITSFQSGSAGGLDALTPQHLKDLTGGACGNAGENLAVALTNLVNHMLTGRINSNITEILYGANLCALKKKDGGIRPIAVGTTYRRLAAKICCKQKRAFLSKHLQPTQLGFGSRGGCEAAVHALRTFLVDNDSDVVLKVDIKNAFNSLERNVLLTEVKNNIPDLYPFLWQCYGQNSKLAYGNDFLSSEMGCQQGDPLGPAIFSLAIHPIIKRLQSKFNVWYLDDGTLAGKVETVLKDLTFLKTEFKTIGLELNFSKCELYVSEEISNKSDIIKRFDHLAHNIKILDKNSLRLLGSPVLDESIPDFIQEKIQNFNDTSKRLLNINMHVAYVIIKYCLFVPKFTYTLRCCQLWNHPDILQKLDNSVKETLSATFNISLDDRSWNQASLPIRYGGLGIRKISSLALPAFLSSINSTKNLTQMILKQNTETLHASYLTEPTNAWKIVCPNASLPKDLTSQKKWDLPLCELEQKNLMQSSNSPTDRARLLAASRWESGLWLHTLPSVYLGNFLDNNTFRVSISLRIGAPCIVPHRCVCGESVNSLGHHGLSCNRSAGRIARHSALNDIIRRAFASANVAAILEPNGLSRDDGKRPDGMTLIPWKMGRPLVWDATCADTLAPSHLSETSVSAGSAATYAEHLKRRKYSNLDKGYIFMPFGVETLGPWGPDALKIFKDLSGRLITATRDQNAGFYFGQKLSIAIQRGNAASILGTLPQISEHLLLT

SEQ ID NO: 8156 - protein, 966 aa, Erannis defoliaria
MASRNVVVQPVPLEDTFVCNRCSQPRSFQTSRGLRIHIGKVHKNRENEPQNQIVFSQIPQVAIVPPDQPFWSILTQFKAGLPVIKRIPRGARIPVAQCLASDIVRAISENSERAWEHLLAFPYRILHVPRITSDHSSLTARIKRNCADSNPPIAPVGNAVHTLPRLRASSSKTIIPYHLIENKISDGDIRGAARLLFSNDTVAPNNLDTVAALRSKHPSAATTSNLPPPPDSKDDCYPTVTTDDVTIAILSFQSGSAGGLDALTPQHLKDLTCGGCGAAGECLTVALTNLVNYMLAGSVNSNITELLYGANLCALKKKDGGIRPIAVGTTYRRLTAKICCRKKSEQLTQYFQPTQLGFGSRGGCEAAVHSLRTFLMHDAGDVLLKVDVKNAFNSVDRGALLTEVKNNIPDLYPFLWQCYGKNSKLLYRNEPLSSEVGCQQGDPLGPAIFSLAIHPIIKRLESKFNVWYLDDGTLGGDADVVFKDLSTLINEFQTIGLELNFTKCELFVSDHCTSKNEIIRKFNSLAPNIKIINNTSLRLLGSPVLDESIPDFIDEKIQNFNAVSDRLSKINMHMAFVIIKHCLFVPKFTYSLRCCQLWKRPDLLQRLDSIVRDTLTTILNISLEDRNWRQASLPIRYGGLGIRKISSVSLPAFLSSVKSTQNLTNLILSPCLGTFQISFSTEAMDAWKLACPNSTLPRDPSSQRQWDVPLCELERNYLLETTNSSSERARYLAVSRWESGLWLQALPSVNLGNLLDNNTFRVAISLRIGTSCVVPHQCACGERVDSLGHHGLSCSRSAGRMARHCALNDIIRRAFGSANVAAVLEPNGLMRDDGKRPDGMTLIPWKMGRPLVWDATCVDTLAPSHLPETSKHAGGAANAAECLKRRKYSSLDRGYMFVPFGVETLGPWGPGALRIFKDLSGRLKESTRDQNAGLYLGQKISLAIQRGNVASILGTLPEIRDRLNYL

SEQ ID NO: 8157 - protein, 992 aa, Erannis defoliaria
MFFIAFFFVGICFCIIFLSHPRQNYLMASRNVVVQPVPLEDTFVCNRCSQPRSFQTSRGLRIHIGKVHKNRENEPQNQIVFSQIPQVAIVPPDQPFWSILTQFKAGLPVVKRIPRGARIPVAQCLASDIVLAISENSERAWEHLLAFPYRILHVPRITSDHSSLTARIKRNCADSNPPIAPVGNAVHTLPRLRASSSKTIIPYHLIENKISDGDIRGAARLLFSNDTVAPNNLDTVAALRFKHPSAATTSNLPPPPDSKDDCYPTVTTDDVTIAILSFQSGSAGGLDALTPQHLKDLTCGGCGAAGECLTVALTNLVNYMLAGSVNSNIIELLYGANLCALKKKDGGIRPIAVGTTYRRLTAKICCRKKSEQLTQYFQPTQLGFGSRGGCEAAVHSLRTFLMHDAGDVLLKVDVKNAFNSVDRGALLTEVKNNIPDLYPFLWQCYGKNSKLLYRNEPLSSEVGCQQGDPLGPAIFSLAIHPIIKRLESKFNVWYLDDGTLGGDADVVFKDLSTLINEFQTIGLELNFTKCELFVSDHCTSKNEIIRKFNSLAPNIKIINNTSLRLLGSPVLDESIPDFIDEKIQNFNAVSDRLSKINMHMAFVIIKHCLFVPKFTYSLRCCQLWKRPDLLQRLDSIVRDTLTTILNISLEDRNWRQASLPIRYGGLGIRKISSVSLPAFLSSVKSTQNLTNLILSPCLGTFQISFSTEAMDAWKLACPNSTLPRDPSSQRQWDVPLCELERNYLLETTNSSSERARYLAVSRWEAGLWLQALPSVNLGNLLDNNTFRVAISLRIGTSCVVPHQCACGEQVDSLGHHGLSCSRSAGRMARHCALNDIIRRAFGSANVAAVLEPNGLMRDDGKRPDGMTLIPWKMGRPLVWDATCVDTLAPSHLPETSKHAGGAANAAECLKRRKYSSLDRGYMFVPFGVETLGPWGPGALRIFKDLSGRLKESTRDQNAGLYLGQKISLAIQRGNVASILGTLPEIRDRLNYL

SEQ ID NO: 8158 - protein, 996 aa, Ennomos quercinarius
MIYFFIIFIVILVWYVFFSTYCTRQPPLNHHMASQNVDLNAVPLDDSIICHQCSQPRSFKSLRGLKIHTSKVHKVPCSPTTNNNTSTHNTQTTSVSSDTNIPFWTILTKLKNSFPVVKRIPRGARASVAQCLTTDINNAVQENSERAWEHLLTFPYRILHVPRIQSDHTSLTSRIKQNCSKNSKCFDAFDFSSKSSSSSHSRTLSVPYHLIENKLSDGDIRGAARLMFSSDTVAPNTLDTLTALRSKHPSAAARTNPLPAPDDDSAVISALAQDVTAALSSFQSGSAGGLDALTPQHLKDLTSGGCGSTGDSLVVTLTKLVNFMLAGSVNSNITGILYGANLCALTKKDGGIRPIAVGTTYRRLTAKICCRLKSQVLSQQFQPIQLGFGSRGGCEAAVHALRTFLMNNGGDVLLKVDVKNAFNSVDRGSLLAEVQDKVPEIYRFLWQCYGQNSKLVYRNDLLLSEVGCQQGDPLGPAIFSLAIHPIIKRLESKFNVWYLDDGTIGGDANTVFKDLSFLISEFKTIGLELNFSKCELFLSDSCKSRDDIINTFNSIAPNIKIIDNSSLRLLGSPIFDESIPDFIEEKIQNFRSVSDRLFKINAHMAFIIIRFCLFVPKFTYSLRCCQLWNHPDLLQQLDNIVKDTLTSIFNISLDERTWCQASLPIRLGGLGIRKISSVSLPAFLSSVKSTQNLVNAILSDGSDTLDISFLTEAVNSWKMACPNSSLPKDLSSQRQWDAPLCELERKNLVDTSSNLTERARLLAASRWESGLWLQALPSHHLGTLLDNNTFRLAISLRIGAPCVAPHRCKCGEKVSSLGHHGLSCSKSAGRIPRHSALNDVIRRAFGNVNVAAVLEPNGLIRDDGKRPDGMTLIPWKMGRPLVWDATCVDTLAPSHLPDTSHQAGGAAAAAEFAKRRKYSSLDRGFIFVPFGVETMGPWGPGAIEIFNDLAGRLVESARDHNAGVYFGQRISLAIQRGNAASIMGTLPDSTDCLNYL

SEQ ID NO: 8159 - protein, 992 aa, Erannis defoliaria
MFFIAFFFVSICFCIIFLSHPRQNYLMASRNVVVQPVPLEDTFVCNRCSQPRSFQTSRGLRIHIGKVHKNRENEPQNQIVFSQIPQVAIVPPDQPFWSILTQFKAGLPVIKRIPRGARIPVAQCLASDIVRAISENSERAWEHLLAFPYRILHVPRITSDHSSLTARIKRNCADSNPPIAPVGNAVHTLPRLRASSSKTIIPYHLIENKISDGDIRGAARLLFSNDTVAPNNLDTVAALRSKHPSAATTSNLPPPPDSKDDCYPTVTTDDVTIAILSFQSGSAGGLDALTPQHLKDLTCGGCGAAGECLTVALTNLVNYMLAGSVNSNITELLYGANLCALKKKDGGIRPIAVGTTYRRLTAKICCRKKSEQLTQYFQPTQLGFGSRGGCEAAVHSLRTFLMHDAGDVLLKVDVKNAFNSVDRGALLTEVKNNIPDLYPFLWQCYGKNSKLLYRNEPLSSEVGCQQGDPLGPAIFSLAIHPIIKRLESKFNVWYLDDGTLGGDADVVFKDLSTLINEFQTIGLELNFTKCELFVSDHCTSKNEIIRKFNSLAPNIKIINNTSLRLLGSPVLDESIPDFIDEKIQNFNAVSDRLSKINMHMAFVIIKHCLFVPKFTYSLRCCQLWKRPDLLQRLDSIVRDTLTTILNISLEDRNWRQASLPIRYGGLGIRKISSVSLPAFLSSVKSTQNLTNLILSPCLGTFQISFSTEAMDAWKLACPNSTLPRDPSSQRQWDVPLCELERNYLLETTNSSSERARYLAVSRWESGLWLQALPSVNLGNLLDNNTFRVAISLRIGTSCVVPHQCACGERVDSLGHHGLSCSRSAGRMARHCALNDIIRRAFGSANVAAVLEPNGLMRDDGKRPDGMTLIPWKMGRPLVWDATCVDTLAPSHLPETSKHAGGAANAAECLKRRKYSSLDRGYMFVPFGVETLGPWGPGALRIFKDLSGRLKESTRDQNAGLYLGQKISLAIQRGNVASILGTLPEIRDRLNYL

SEQ ID NO: 8160 - protein, 673 aa, Erannis defoliaria
MLAGSVNSNITELLYGANLCALKKKDGGIRPIAVGTTYRRLTAKICCRKKSEQLTQYFQPTQLGFGSRGGCEAAVHSLRTFLMHDAGDVLLKVDVKNAFNSVDRGALLTEVKNNIPDLYPFLWQCYGKNSKLLYRNEPLSSEVGCQQGDPLGPAIFSLAIHPIIKRLESKFNVWYLDDGTLGGDADVVFKDLSTLINEFQTIGLELNFTKCELFVSDHCTSKNEIIRKFNSLAPNIKIINNTSLRLLGSPVLDESIPDFIDEKIQNFNAVSDRLSKINMHMAFVIIKHCLFVPKFTYSLRCCQLWKRPDLLQRLDSIVRDTLTTILNISLEDRNWRQASLPIRYGGLGIRKISSVSLPAFLSSVKSTQNLTNLILSPCLGTFQISFSTEAMDAWKLACPNSTLPRDPSSQRQWDVPLCELERNYLLETTNSSSERARYLAVSRWESGLWLQALPSVNLGNLLDNNTFRVAISLRIGTSCVVPHQCACGERVDSLGHHGLSCSRSAGRMARHCALNDIIRRAFGSANVAAVLEPNGLMRDDGKRPDGMTLIPWKMGRPLVWDATCVDTLAPSHLPETSKHAGGAANAAECLKRRKYSSLDRGYMFVPFGVETLGPWGPGALRIFKDLSGRLKESTRDQNAGLYLGQKISLAIQRGNVASILGTLPEIRDRLNYL

SEQ ID NO: 8161 - protein, 992 aa, Erannis defoliaria
MFFIAFFFVGICFCIIFLSHPRQNYLMASRNVVVQPVPLEDTFVCNRCSQPRSFQTSRGLRIHIGKVHKNRENEPQNQIVFSQIPQVAIVPPDQPFWSILTQFKAGLPVIKRIPRGARIPVAQCLASDIVRAISENSERAWEHLLAFPYRILHVPRITSDHSSLTARIKRNCADSNPPIAPVGNAVHTLPRLRASSSKTIIPYHLIENKISDGDIRGAARLLFSNDTVAPNNLDTVAALRSKHPSAATTSNLPPPPDSKDDCYPTVTTDDVTIAILSFQSGSAGGLDALTPQHLKDLTCGGCGAAGECLTVALTNLVNYMLAGSVNSNITELLYGANLCALKKKDGGIRPIAVGTTYRRLTAKICCRKKSEQLTQYFQPTQLGFGSRGGCEAAVHSLRTFLMHDAGDVLLKVDVKNAFNSVDRGALLTEVKNNIPDLYPFLWQCYGKNSKLLYRNEPLSSEVGCQQGDPLGPAIFSLAIHPIIKRLESKFNVWYLDDGTLGGDADVVFKDLSTLINEFQTIGLELNFTKCELFVSDHCTSKNEIIRKFNSLAPNIKIINNTSLRLLGSPVLDESIPDFIDEKIQNFNAVSDRLSKINMHMAFVIIKHCLFVPKFTYSLRCCQLWKRPDLLQRLDSIVRDTLTTILNISFEDRNWRQASLPIRYGGLGIRKISSVSLPAFLSSVKSTQNLTNLILSPCLGTFQISFSTEAMDAWKLACPNSTLPRDPSSQRQWDVPLCELERNYLLETTNSSSERARYLAVSRWESGLWLQALPSVNLGNLLDNNTFRVAISLRIGTSCVVPHQCACGERVDSLGHHGLSCSRSAGRMARHCALNDIIRRAFGSANVAAVLEPNGLMRDDGKRPDGMTLIPWKMGRPLVWDATCVDTLAPSHLPETSKHAGGAANAAECLKRRKYSSLDRGYMFVPFGVETLGPWGPGALRIFKDLSGRLKESTRDQNAGLYLGQKISLAIQRGNVASILGTLPEIRDRLNYL

SEQ ID NO: 8162 - protein, 952 aa, Bembecia ichneumoniformis
MDTRDVASLEKSYACNECSQPRSFQTYRGLKIHIAKVHKNTQTQSQCTLPQVSHCKAFPKDESLFTRLTKFKTSLPVVKRIPRGARIPVAQHLSSNIQNAIAENSEQAWELLLTFPYRILHIPHITTDNSSLTTRIKRNCQSSSDFCNHLENTFSTSKPTSIPYRLIENKVSDGDIRGAARLLFSNDTVAPHNLDTVASLRSKHPSATGQNSPPPPDVNDNNYPIVTAQDTLFAITSFQSGSAGGLDALTPQHLKDLTSGACGNAGENLAVALTNLVNHMLTGRINSNITEILYGANLCALKKKDGGIRPIAVGTTYRRLAAKICCKRKRAFLSKHLQPTQLGFGSRGGCEAAVHALRTFLVDNDSDVVLKVDIKNAFNSLERNVLLTEVKNNIPDLYPFLWQCYGQNSKLAYGNDFLSSEMGCQQGDPLGPAIFSLAIHPIIKRLQSKFNVWYLDDGTLAGKAETVLKDLTFLKTEFKTIGLELNFSKCELYVSEEISNKSDIIKRFDHLAHNIKILDKNSLRLLGSPVLDESIPDFIQEKIQNFNDTSKRLLNINMHVAYVIIKYCLFVPKFTYTLRCCQLWNHPDILQKLDNSVKETLSATFNISLDDRSWNQASLPIRYGGLGIRKISSLALPAFLSSINSTKNLTQMILKQNTETLHASYLTEATNAWKIVCPNASLPKDLTSQKKWDLPLCELEQKNLMQSSNSPTDRARLLAASRWESGLWLHTLPSVYLGNFLDNNTFRVSISLRIGAPCIVPHRCVCGESVNSLGHHGLSCNRSAGRIARHNALNDIIRRAFASANVAAILEPNGLSRDDGKRPDGMTLIPWKMGRPLVWDATCADTLAPSHLSETSVSAGSAATYAEHLKRRKYSNLDKGYIFMPFGVETLGPWGPDALKIFKDLSGRLITATRDQNAGFYFGQKLSIAIQRGNAASILGTLPQISEHLLLT

SEQ ID NO: 8163 - protein, 996 aa, Ennomos quercinarius
MIYFFIIFIVILVWYVFFSTYCTGQPPLNHHMASQNVDLNAVPLDDSIICHQCSQPRSFKSLRGLKIHTSKVHKVPCSPTTNNNTSTHNTQTTSVSSDTNIPFWTILTKLKNSFPVVKRIPRGARASVAQCLTTDINNAVQENSERAWEHLLTFPYRILHVPRIQSDHTSLTSRIKQNCSKNSKCFDAFDFSSKSSSSSHSRTLSVPYHLIENKLSDGDIRGAARLMFSSDTVAPNTLDTLTALRSKHPSAAARTNPLPAPDDDSAVISALAQDVTAALSSFQSGSAGGLDALTPQHLKDLTSGGCGSTGDSLVVTLTKLVNFMLAGSVNSNITGILYGANLCALTKKDGGIRPIAVGTTYRRLTAKICCRLKSQVLSQQFQPIQLGFGSRGGCEAAVHALRTFLMNNGGDVLLKVDVKNAFNSVDRGCLLAEVQDKVPEIYRFLWQCYGQNSKLVYRNDLLLSEVGCQQGDPLGPAIFSLAIHPIIKRLESKFNVWYLDDGTIGGDANTVFKDLSFLISEFKTIGLELNFSKCELFLSDSCKSRDDIINTFNSIAPNIKIIDNSSLRLLGSPIFDESIPDFIEEKIQNFRSVSDRLFKINAHMAFIIIRFCLFVPKFTYSLRCCQLWNHPDLLQQLDNIVKDTLTSIFNISLDERTWCQASLPIRLGGLGIRKISSVSLPAFLSSVKSTQNLVNAILSDGSDTLDISFLTEAVNSWKMACPNSSLPKDLSSQRQWDAPLCELERKNLVDTSSNLTERARLLAASRWESGLWLQALPSHHLGTLLDNNTFRLAISLRIGAPCVAPHRCKCGEKVSSLGHHGLSCSKSAGRIPRHSALNDVIRRAFGNVNVAAVLEPNGLIRDDGKRPDGMTLIPWKMGRPLVWDATCVDTLAPSHLPDTSHQAGGAAAAAEFAKWRKYSSLDRGFIFVPFGVETMGPWGPGAIEIFNDLAGRLVESARDHNAGVYFGQRISLAIQRGNAASIMGTLPDSTDCLNYL

SEQ ID NO: 8164 - protein, 992 aa, Erannis defoliaria
MFFIAFFFVGICFCIIFLSHPRQNYLMASRNVVVQPVPLEDTFVCNRCSQPRSFQTSRGLRIHIGKVHKNRENEPQNQIVFSQIPQVAIVPPDQPFWSILTQFKAGLPVVKRIPRGARIPVAQCLASDIVLAISENSERAWEHLLAFPYRILHVPRITSDHSSLTARIKRNCADSNPPIAPVGNAVHTLPRLRASSSKTIIPYHLIENKISDGDIRGAARLLFSNDTVAPNNLDTVAALRFKHPSAATTSNLPPPPDSKDDCYPTVTTDDVTIAILSFQSGSAGGLDALTPQHLKDLTCGGCGAAGECLTVALTNLVNYMLAGSVNSNIIELLYGANLCALKKKDGGIRPIAVGTTYRRLTAKICCRKKSEQLTQYFQPTQLGFGSRGGCEAAVHSLRTFLMHDAGDVLLKVDVKNAFNSVDRGALLTEVKNNIPDLYPFLWQCYGKNSKLLYRNEPLSSEVGCQQGDPLGPAIFSLAIHPIIKRLESKFNVWYLDDGTLGGDADVVFKDLSTLINEFQTIGLELNFTKCELFVSDHCTSKNEIIRKFNSLAPNIKIINNTSLRLLGSPVLDESIPDFIDEKIQNFNAVSDRLSKINMHMAFVIIKHCLFVPKFTYSLRCCQLWKRPDLLQRLDSIVRDTLTTILNISLEDRNWRQASLPIRYGGLGIRKISSVSLPAFLSSVKSTQNLTNLILSPCLGTFQISFSTEAMDAWKLACPNSTLPRDPSSQRQWDVPLCELERNYLLETTNSSSERARYLAVSRWEAGLWLQALPSVNLGNLLDNNTFRVAISLRIGTSCVVPHQCACGEQVDSLGHHGLSCSRSAGRMARHCALNDIIRRAFGSANVAAVLEPNGLMRDDGKRPDGMTLIPWKMGRPLVWDATCVDTLAPSHLPETSKHAGDAANAAECLKRRKYSSLDRGYMFVPFGVETLGPWGPGALRIFKDLSGRLKESTRDQNAGLYLGQKISLAIQRGNVASILGTLPEIRDRLNYL

SEQ ID NO: 8165 - protein, 674 aa, Carposina sasakii
MLAGHVNGNILGILYGANLCALTKKDGGIRPIAVGTTYRRLTAKICCRAKSRVLSQEVQPTQFGFGSRGGCEAAVHALRTHLSNSDGGDVLLKVDVKNAFNSVDRTTLLTEIKDKVPDLFPFLLQCYGQNSKLIYRSHILSSETGCQQGDPLGPAIFSLAIHPIIKNLESKFNVWYLDDGTLGGDPKTVFNDLKYLISQFKTVGLDLNFSKCELYVKETCHSRNEIFKMFNTLAPNIKILNNSSLRLLGSPILDESIPDFVEEKLQNFRSFSDRLEKINMHMAYVILKYCLFVPKFTYALRCCQLWKYRNLLQQVDSILKDTITTIFNIPLDDRTWSQAELPIRFGGLGIRKISSVSLPAFLSSVMGTEKLIKTILAPSNNHSDTAYITEAMNAWNLACPNSSLPKDLSSQKQWDDPLSKLARNRLLETSSNPTERARLLAVSRWESGLWLQAPPSSNLGTLLDNNTFRLAVSLRIGAPCIVPHRCACGETVERLGHHGLSCSRSAGRIARHSAINDVIRRALGTANIAAVLEPNGLTRDDGKRPDGMTLIPWKMGRPLVWDATCVDTLAPSHLPETSQKAGGAAEAAESLKRRKYSSLDRGYLFAPFGVETLGPWGPAALKTYRDLAGRLVESTRDQNSGCYLGQRISIAIQRGNAASILGTLSDKVDRLTIL

SEQ ID NO: 8166 - protein, 957 aa, Carposina sasakii
MDNRNVTQSTSSLDNSIICNECSQPRSFKTLRGLNIHVGKVHKNTKSPPVINNSLPLNAPLNNSNQTPFWQTLSKLKRNLPIVKRIPRGARILVAQHLTGDIKKAYEENSERAWEHLLTFPYRILHVPRSQTNPTSLTTRIKHNCQNSPIASAPFNTRTPSNHHASSVPYHLVENKLNDGDIRGAARLLFSSDKVATDSPETLTALQDKHPSAAPHTIFPTPPEDDALSVVAANVINAIGSFQSGSAGGLDGLTPQHLKDLTGPGCGGAGESLTAALTNLVNFMLAGHVNGNILGILYGANLCALTKKDGGIRPIAVGTTYRRLTAKICCRAKSRVLSQEFQPTQLGFGSRGGCEAAVHALRTHLSNSDGGDVLLKVDVKNAFNSVDRTTLLTEIKDKVPDLFPFLLQCYGQNSKLIYRSHILSSETGCQQGDPLGPAIFSLAIHPIIKNLESKFNVWYLDDGTLGGDPKTVFNDLKSLISQFKTVGLDLNFSKCELYVKETCHSRNEIYKMFNTLAPNIKILNNSSLRLLGSPILDESIPDFVEEKLQNFRSFSDRLDKINMHMAYVILKYCLFVPKFTYALRCCQLWKYRNLLQQVDSILKDTITTIFNIPLDDRTWSQAELPIRFGGLGIRKISSVSLPAFLSSVMGTEKLIKTILAPSNNHSDTAYTTEAMNAWNLACPNSSLPKDLSSQKQWDDPLSKLARNRLLETSSNPTERARLLAVSRWESGLWLQAPPSSNLGTLLDNNTFRLAVSLRIGAPCIVPHRCACGETVERLGHHGLSCSRSAGRIARHSAINDVIRRALGTANIAAVLEPNGLTRDDGKRPDGMTLIPWKMGRPLVWDATCVDTLAPSHLPETSQKAGGAAEAAESLKRRKYSSLDRGYLFAPFGVETLGPWGPAALKTYRDLAGRLVESTRDQNAGCYLGQRISIAIQRGNAASILGTLPDKVDRLTIL

SEQ ID NO: 8167 - protein, 957 aa, Carposina sasakii
MDNRNVTQSTSSLDNSIICNECSQPRSFKTLRGLNIHVGKVHKNTKSPPIINNSLPLNAPLNNSNQTPFWQTLSKLKRNLPIVKRIPRGARILVAQHLTGDIKKAYEENSERAWEHLLTFPYRILHVPRSQTNPTSLTTRIKHNCQNSPIASAPFNTRTPSNHHASSVPYHLVENKLNDGDIRGAARLLFSSDKVATDSPETLTALQDKHPSAAPHTIFPTPPEDDALSVVAANVINAIGSFQSGSAGGLDGLTPQHLKDLTGPGCGGAGESLTAALTNLVNFMLAGHVNGNILGILYGANLCALTKKDGGIRPIAVGTTYRRLTAKICCRAKSRVLSQEFQPTQLGFGSRGGCEAAVHALRTHLSNSDGGDVLLKVDVKNAFNSVDRTTLLTEIKDKVPDLFPFLLQCYGQNSKLIYRSHILSSETGCQQGDPLGPAIFSLAIHPIIKNLESKFNVWYLDDGTLGGDPKTVFNDLKSLISQFKTVGLDLNFSKCELYVKETCHSRNEIYKMFNTLAPNIKILNNSSLRLLGSPILDESIPDFVEEKLQNFRSFSDRLDKINMHMAYVILKYCLFVPKFTYALRCCQLWKYRNLLEQVDSILKDTITTIFNIPLDDRTWSQAELPIRFGGLGIRKISSVSLPAFLSSVMGTEKLIKTILAPSNNHSDTAYTTEAMNAWNLACPNSSLPKDLSSQKQWDDPLSKLARNRLLETSSNPTERARLLAVSRWESGLWLQAPPSSNLGTLLDNNTFRLAVSLRIGAPCIVPHRCACGETVERLGHHGLSCSRSAGRIARHSAINDVIRRALGTANIAAVLEPNGLTRDDGKRPDGMTLIPWKMGRPLVWDATCVDTLAPSHLPETSQKAGGAAEAAESLKRRKYSSLDRGYLFAPFGVETLGPWGPAALKTYRDLAGRLVESTRDQNAGCYLGQRISIAIQRGNAASILGTLPDKVDRLTIL

SEQ ID NO: 8168 - protein, 957 aa, Carposina sasakii
MDNRNVTQSTSSLDNSIICNECSQPRSFKTLRGLNIHVGKVHKNTKSPPVINNSLPLNAPLNNSNQTPFWQTLSKLKRNLPIVKRIPRGARILVAQHLTGDIKKAYEENSERAWEHLLTFPYRILHVPRSQTNPTSLTTRIKHNCQNSPIASAPFNTRTPSNHHASSVPYHLVENKLNDGDIRGAARLLFSSDKVATDSPETLTALQDKHPSAAPHTIFPTPPEDDALSVVAANVINAIGSFQSGSAGGLDGLTPQHLKDLTGPGCGGAGESLTAALTNLVNFMLAGHVNGNILGILYGANLCALTKKDGGIRPIAVGTTYRRLTAKICCRAKSRVLSQEFQPTQLGFGSRGGCEAAVHALRTHLSNSDGGDVLLKVDVKNAFNSVDRTTLLTEIKDKVPDLFPFLLQCYGQNSKLIYRSHILSSETGCQQGDPLGPAIFSLAIHPIIKNLESKFNVWYLDDGTLGGDPKTVFNDLKSLISQFKTVGLDLNFSKCELYVKETCHSRNEIYKMFNTLAPNIKILNNSSLRLLGSPILDESIPDFVEEKLQNFRSFSDRLDKINMHMAYVILKYCLFVPKFTYALRCCQLWKYRNLLEQVDSILKDTITTIFNIPLDDRTWSQAELPIRFGGLGIRKISSVSLPAFLSSVMGTEKLIKTILAPSNNHSDTAYTTEAMNAWNLACPNSSLPKDLSSQKQWDDPLSKLARNRLLETSSNPTERARLLAVSRWESGLWLQAPPSSNLGTLLDNNTFRLAVSLRIGAPCIVPHRCACGETVERLGHHGLSCSRSAGRIARHSAINDVIRRALGTANIAAVLEPNGLTRDDGKRPDGMTLIPWKMGRPLVWDATCVDTLAPSHLPETSQKAGGAAEAAESLKRRKYSSLDRGYLFAPFGVETLGPWGPAALKTYRDLAGRLVESTRDQNAGCYLGQRISIAIQRGNAASILGTLPDKVDRLTIL

SEQ ID NO: 8169 - protein, 910 aa, Carposina sasakii
MDNRNVTQSTSSLDSSIICNECSQPRSFKTLRGLNIHVGKVHKNTKSLPVINNSLPLNAPLNNSNQTPFWQTLSKLKRNLPIVKRIPRGARILVAQHLTGDIKKAYEENSERAWEHLLTFPYRILHVPRSQTNPTSLTNRIKHNCQNSPIASAPFNTRTPSNHHTSSVPYHLVENKLNDGDIRGTARLLFSSDKVATDSPETLTALQDKHPPAAPHTIFPTPPEDDALSVVAANVVNAIGSFQSGSAGGLDGLTPQHLKDLTGPGCGGAGESLTAALTNLVNFMLAGHVNGNILGILYGANLCALTKKDGGIRPIAVGTTYRRLTAKICCRAKSRVLSQEFQPTQLGFGSRGGCEAAVHALRTHLSNSDGDDVLLKVDVKNAFNSVDRTTLLMEIKDKVPDLFPFLLQCYGQNSKLIYRSHILSSETGCQQGDPLGPAIFSLAIHPIIKNLESKFNVWYLDDGTLGGDPKTVFNDLKYLISQFKTVGLDLNFSKCELYVKETCHSRNEIFKMFNTLAPNIKILNNSSLRLLGSPILDESIPDFVEEKLQNFRSFSDRLEKINMHMAYVILKYCLFVPKFTYALRCCQLWKYRNLLQQVDSILKDIITTIFNIPLDDRTWSQAELPIRFGGLGIRKISSVSLPAFLSSVMGTEKLIKTILAPSNNHSDTAYITEAMYAWNLACPNSSLPKDLSSQKQWDDPLSKLARNRLLETSSNPTERARLLAVSRWESGLWLQAPPSSNLGTLLDNNTFRLAVSLRIGAPCIVPHRCACGETVERLGHHGLSCSRSAGRIARHSAINDVIRRALGTANIAAVLEPNGLTRDDGKRPDGMTLIPWKMGRPLVWDATCVDTLAPSHLPETSQKAGGAAEAAESLKRRKYSSLDRGYLFAPFGVETLGPWGPHVTKMLAAT

SEQ ID NO: 8170 - protein, 957 aa, Carposina sasakii
MDNRNVTQSTSSLDNSIICNECSQPRSFKTLRGLNIHVGKVHKNTKSPPVINNSLPLNAPLNNSNQTPFWQTLSKLKRNLPIVKRIPRGARILVAQHLTGDIKKAYEENSERAWEHLLTFPYRILHVPRSQTNPTSLTTRIKHNCQNSPIASAPFNTRTPSNHHASSVPYHLVENKLNDGDIRGAARLLFSSDKVATDSPETLTALQDKHPSAAPHTIFPTPPEDDALSVVAANVINAIGSFQSGSAGGLDGLTPQHLKDLTGPGCGGAGESLTAALTNLVNFMLAGHVNGNILGILYGANLCALTKKDGGIRPIAVGTTYRRLTAKICCRAKSRVLSQEFQPTQLGFGSRGGCEAAVHALRTHLSNSDGGDVLLKVDVKNAFNSVDRTTLLTEIKDKVPDLFPFLLQCYGQNSKLIYRSHILSSETGCQQGDPLGPAIFSLAIHPIIKNLESKFNVWYLDDGTLGGDPKTVFNDLKSLISQFKTVGLDLNFSKCELYVKETCHSRNEIYKMFNTLAPNIKILNNSSLRLLGSPILDESIPDFVEEKLQNFRSFSDRLDKINMHMAYVILKYCLFVPKFTYALRCCQLWKYRNLLQQVDSILKDTITTIFNIPLDDRTWSQAELPIRFGGLGIREISSVSLPAFLSSVMGTEKLIKTILAPSNNHSDTAYTTEAMNAWNLACPNSSLPKDLSSQKQWDDPLSKLARNRLLETSSNPTERARLLAVSRWESGLWLQAPPSSNLGTLLDNNTFRLAVSLRIGAPCIVPHRCACGETVERLGHHGLSCSRSAGRIARHSAINDVIRRALGTANIAAVLEPNGLTRDDGKRPDGMTLIPWKMGRPLVWDATCVDTLVPSHLPETSQKAGGAAEAAESLKRRKYSSLDRGYLFAPFGVETLGPWGPAALKTYRDLAGRLVESTRDQNAGCYLGQRISIAIQRGNAASILGTLPDKVDRLTIL

SEQ ID NO: 8171 - protein, 1074 aa, Cosmia trapezina
MTSIMSSPKSTEKQNENDQEMLTRSASQRACPPPTRISSDSDSSLSSASPPSPVPSPTMSAVTTPAAVAASSSSDEYFSPPTTPTPARRLGGRVLSSRVKQRCVQADITDSVYRTVSQENLIRCSECSQERYFKGQKGLKIHQGKCHKINTIPLSAPNLNTGILNSPSTSLSAHPFQKILAHCKISIPVLKRIPRGARISVASVLSQAIRAVILQNSKHAWEHLLYFPYAVLYVVPEPSNKKSLTTRVKENCVKYSTLEKPILLSGIDSVSNQNSKFTAKPVSESATYRLVESKLGDGDIKGASRILFSSDTIAPATPETLSALEGKHPPPTATLLLPEAPCGSDIAVEVNDLDISAAVASFQKGSAGGLDALTPQHLKDLLCSGNGETGGSLLKDLTSLVNLMLSGRVNGDIIETLYGANLCALKKKDGGIRPIAIGTTYRRLAAKICCKKSSSELANLFQPLQLGFGSRGGCEAAVHSVRTFLDQNCGEVLLKVDVKNAFNSVDRGALLTQVKDKIPKLYNFLWQCYGSSSKLTYHGNEILSAVGCQQGDPLGPAVFGLAIHPIIQRLDSKLNVWYLDDGTLGGDINTVYNDLTFLIDEFRKIGLELNFSKCELFISDTYPSKDLVVQKFNSLAPNITIIDKSSLRLLGSPILDESFPLFFEEKIQNFVDCSNRLSKINVHMAFTIIRFCLFVPKFTYNIRCCQLWKHTELLKSLDNIIRNTLASILNINLGEREWLQASLPIRFGGLGIRSISGVALPAFLSSVHSTLNLTKKILAASLDNIDISFLNEAKNAWILACPSYELPQTSSSQRLWDRPLCELIRNNLLHTYLSSADRARLLAVGEWESGLWLQALPSPNTGTFIDSSAFRIAASLRLGASCCAPHRCHCGIAVGRLGHHGLSCCRSAGRIPRHSSLNDLIRRAFATANCAAILEPVGLMRDDGKRPDGMTLIPWKMGRPLVWDATCVDTLAPSHLQGTQSRAGAAAESAEGLKRRKYSTLDSGYIFEPFGVETLGPWGPGAHRIYKELSGRLVDATCDQNAGLYFAQRLSIAIQRGNAASILGTLPSGSGLLD

SEQ ID NO: 8172 - protein, 1002 aa, Cosmia trapezina
MLLYIFFFIFISFAFVFKVFLSLVFPLEMPQCAQANEVENSQGVSVENQVQCHECSEVRFFKGQKGLKIHQAKCHKSDNIPLSTSNSNQETNSSRTSPDITFWKTLSHCKISLPVLKRIPRGARISVATALSHAVKAVLLHNSKRTWEHLLFFPYAVLHVTSDPKNKKSLTVRVKENCVRYGVLEETFSLLDNISFTNRNPKFTLRPFSESATYKLVESKLGDGDIKGAARILFSSDTLAPATPETLSILKEKHPPPAENLHLPEAPEESDDAAVEVTAQEVSAAVASFQSGSAGGLDALTPQHLKDLLCGGTGETGETLLRDLTTLINLMLSGRVNGDIVEILYGANLCALKKKDGGIRPIAVGTTYRRLAAKTCCKNAGLTLASIFQPVQLGFGSRGGCEVAVHSVRTFLNQNCGDVLLKVDVKNAFNSVDRGALLTQVKDKIPNLYRFLWQCYGSPTKLTYHGNEILSATGCQQGDPLGPAIFSLAIHPIIQRLHSKLNVWYLDDGTLGGDANTVYDDLRNLIDEFHSIGLDLNFSKCELYVSDTYAAKDLVIQNFNNLAPNITVINKCSLRLLGSPILDESFPLFFEEKIQNFLQYSDRLFKINTHMAFTIVRFCLFVPKFTYIIRCCQLWKHIEILQNLDNIIKTTLASILNINLEERAWLQASLPVRLGGLGVRSISGVALPAFLSSINSTQNLSKKVFAASLDSFEITYFNEARNAWLLACPNTEFPKILTSQRLWDGPLCEQVRKQLLHTCLNSADRARLLAVAQWESGLWLQALPSLNTGTLMDTSTFRLAASLRLGASCCAPHRCQCGTAVDRLGHHGLSCTSSAGRIPHHASLNDIIRRAFTTANCAAILEPRGLSRDDGKRPDGMTLIPWKMGRPLVWDATCVDTLAPSHLPGTQNRTGAAAESAENFKRRKYSSLDSGYMFEPFGVETLGPWGPGAHKIFKDLSARLVEATRDQNAGLYFAQRLSIAIQRGNAASILGTLPTGSGFIDL

SEQ ID NO: 8173 - protein, 1074 aa, Cosmia trapezina
MTSIMSSPKSTEKQNENDQEMLTRSASQRACPPPTRISSDSDSSLSSASPPSPVPSPTMSAVTTQAAVAASSSSDEYFSPPTTPTPARRLGGRVLSSRVKQRCVQADITDSVYRTVSQENLIRCSECSQERYFKGQKGLKIHQGKCHKINTIPLSAPNLNTGILNSPSTSLSAHPFQKILAHCKISIPVLKRIPRGARISVASVLSQAIRAVILQNSKHAWEHLLYFPYAVLYVVPEPSNKKSLTTRVKENCVKYSTLEKPILLSGIDSVSNQNSKFTAKPVSESASYRLVESKLGDGDIKGASRILFSSDTIAPATPETLSALEGKHPPPTATLLLPEAPCGSDIAVEVNDLDISAAVASFQKGSAGGLDALTPQHLKDLLCSGNGETGGSLLKDLTSLVNLMLSGRVNGDIIETLYGANLCALKKKDGGIRPIAIGTTYRRLAAKICCKKSSSELANLFQPLQLGFGSRGGCEAAVHSVRTFLDQNCGEVLLKVDVKNAFNSVDRGALLTQVKDKIPKLYNFLWQCYGSSSKLTYHGNEILSAVGCQQGDPLGPAVFGLAIHPIIQRLDSKLNVWYLDDGTLGGDINTVYNDLTFLIDEFRKIGLELNFSKCELFISDTYPSKDLVVQKFNSLAPNITIIDKSSLRLLGSPILDESFPLFFEEKIQNFVDCSNRLSKINVHMAFTIIRFCLFVPKFTYNIRCCQLWKHTELLKSLDNIIRNTLASILNINLGEREWLQASLPIRFGGLGIRSISGVALPAFLSSVHSTLNLTKKILAASLDNIDISFLNEAKNAWILACPSYELPQTSSSQRLWDRPLCELIRNNLLHTYLSSADRARLLAVGEWESGLWLQALPSPNTGTLIDSSAFRIAASLRLGASCCAPHRCHCGIAVGRLGHHGLSCCRSAGRIPRHSSLNDLIRRAFATANCAAILEPVGLMRDDGKRPDGMTLIPWKMGRPLVWDATCVDTLAPSHLQGTQSRAGAAAESAEGLKRRKYSTLDSGYIFEPFGVETLGPWGPGAHRIYKELSGRLVDATCDQNAGLYFAQRLSIAIQRGNAASILGTLPSGSGLLD

SEQ ID NO: 8174 - protein, 1002 aa, Ennomos fuscantarius
MLFFSVLFILPLIYVIFKLCYKLVIYSEMQRCVQTTQGEVDHPSESLDNRVQCHDCTQVHYFKGQRGLKIHQGKCHKNLNIPLSAPNSNLITIDYNNVLDQPFWKKLSDCKLNMPVVKRIPRGARLSVASALSQAIKAVILHNSKSTWEHLLLFSYSVLHVKKDSINRKSLTTRIKENCVKYSVLEEQSILFPENDVATNRISRTFPKPFNEASVFKVVENKLFDGDIKGAARILFSSDTMASASPETLTILREKHPLSAAPEAPREPNEATDASLEVNALDVSNAVMSFRSGSAGGLDALSPQHLKDLLCGRSGEVGEALLRDLTTLINLMLAGRVNGEVIDILYGANLCALKKKDGGIRPIAVGMTYRRLAAKICCKKIAPQLANLFQPVQLGFGSRGGCEAAVHSTRTFLSSGCGEVLLKVDVKNAFNSVDRGALLTQVIDKIPNLFNFLWQCYGSSTKLTYHGNEILSAVGCQQGDPLGPAIFSLAIHPIIQRLKSKLNVWYLDDGTLGGDVNTVYDDLFLLVNEFRAIGLELNFSKCELFISNDNPASDLILQKFYSLAPNIKNIDKHSLRLLGSPILDESFSPFFEEKIQNFLLCSERLTKINTHVAFTIIRFCLFVPKFTYILRCCQLWKHSDILNRLDNIVKNTLASILNINLDEREWSQASLPVRLGGLGVRSISGVALPAFLSSVYSTLNLSQKILGSSLDTVEITFFGEARNAWLLACPNIDLPKTLFSQRLWDGPLCEQVRNQLLHTCSSSADRARLLAVAEWESGLWLQALPSPNTGTFIDSSTFRIAASLRLGAPCCAPHRCQCGNAVDRLGHHGLSCVRSAGRISRHASLNDIIRRAFVSANYAAILEPNGLVRDDGKRPDGMTLIPWKMGRPLVWDATCVGTLAPSHLAGTQGKAGAAAESAENLKRRKYNSLDSGYIFAPFGVETLGPWGPSAHKIYKELSERLIEATRDQNAGFYLAQRLSIAIQRGNAASILGTLPTGSGFLD

SEQ ID NO: 8175 - protein, 1059 aa, Ennomos fuscantarius
MQPMSIKTLDYTSNPSHIVGVYVGHYPTSLRRDDTFLFIICDTIGRIRLIVFVFFLFMLFFSVLFILPLIYVIFKLCYKLVIYSEMQRCVQTTQGEIDHPSESLDNRVQCHDCTQVRYFKGQRGFKIHQGKCHKNLNIPLSAPNSNLITIDYNNVLDQPFWKKLSDCKLNMPVVKRIPRGARLSVASALSQAIKAVILHNSKSTWEHLLLFSYSVLHVKKDSINRKSLTTRIKENCVKYSVLEEQSILFPENDVATNRISRTFPKPFNEASVFKVVENKLFDGDIKGAARILFSSDTMASASPETLTILREKHPLSAAPEAPREPNEATDASLEVNALDVSNAVMSFRSGSAGGLDALSPQHLKDLLCGRSGEVGEALLRDLTTLINLMLAGRVNGEVIDILYGANLCALKKKDGGIRPIAVGMTYRRLAAKICCKKIAPQLANLFQPVQLGFGSRGGCEAAVHSTRTFLSSGCGEVLLKVDVKNAFNSVDRGALLTQVIDKIPNLFNFLWQCYGSSTKLTYHGNEILSAVGCQQGDPLGPAIFSLAIHPIIQRLKSKLNVWYLDDGTLGGDVNTVYDDLFLLVNEFRAIGLELNFSKCELFISNDNPASDLILQKFYSLAPNIKNIDKHSLRLLGSPILDESFSPFFEEKIQNFLLCSERLTKINTHVAFTIIRFCLFVPKFTYILRCCQLWKHSDILNRLDNIVKNTLASILNINLDEREWSQASLPVRLGGLGVRSISGVALPAFLSSVYSTLNLSQKILGSSLDTVEITFFGEARNAWLLACPNIDLPKTLFSQRLWDGPLCEQVRNQLLHTCSSSADRARLLAVAEWESGLWLQALPSPNTGTFIDSSTFRIAASLRLGAPCCAPHRCQCGNAVDRLGHHGLSCFRSAGRISRHASLNDIIRRAFVSANYAAILEPNGLVRDDGKRPDGMTLIPWKMGRPLVWDATCVDTLAPSHLAGTQGKAGAAAESAENLKRRKYNSLDSGYIFAPFGVETLGPWGPSAHKIYKELSERLIEATRDQNAGFYLAQRLSIAIQRGNAASILGTLPTGSGFLD

SEQ ID NO: 8176 - protein, 1074 aa, Cosmia trapezina
MTSIMSSPKSTEKQNENDQEMLTRSASQRACPPPTRISSDSDSSLSSASPPSPVPSPTMSAVTTPAAVAASSSSDEYFSPPTTPTPARRLGGRVLSSRVKQRCVQADITDSVYRTVSQENLIRCSECSQERYFKGQKGLKIHQGKCHKINTIPLSAPNLNTGILNSPSTSLSAHPFQKILAHCKISIPVLKRIPRGARISVASVLSQAIRAVILQNSKHAWEHLLYFPYAVLYVVPEPSNKKSLTTRVKENCVKYSTLEKPILLSGIDSVSNQNSKFTAKPVSESATYRLVESKLGDGDIKGASRILFSSDTIAPATPETLSALEGKHPPPTATLLLPEAPCGSDIAVEVNDLDISAAVASFQKGSAGGLDALTPQHLKDLLCSGNGETGGSLLKDLTSLVNLMLSGRVNGDIIETLYGANLCALKKKDGGIRPIVIGTTYRRLAAKICCKKSSSELANLFQPLQLGFGSRGGCEAAVHSARTFLDQNCGEVLLKVDVKNAFNSVDRGALLTQVKDKIPKLYNFLWQCYGSSSKLTYHGNEILSAVGCQQGDPLGPAVFGLAIHPIIQRLDSKLNVWYLDDGTLGGDINTVYNDLTFLIDEFRKIGLELNFSKCELFISDTYPSKDLVVQKFNSLAPNITIIDKSSLRLLGSPILDESFPLFFEEKIQNFVDCSNRLSKINVHMAFTIIRFCLFVPKFTYNIRCCQLWKHTELLKSLDNIIRNTLASILNINLGEREWLQASLHIRFGGLGIRSISGVALPAFLSSVHSTLNLTKKILAASLDNIDISFLNEAKNTWILACPSYELPQTSSSQRLWDRPLCELIRNNLLHTYLSSADRARLLAVGEWESGLWLQALPSPNTGTLIDSSAFRIAASLRLGASCCAPHRCHCGIAVGRLGHHGLSCCRSAGRIPRHSSLNDLIRRAFATANCAAILEPVGLMRDDGKRPDGMTLIPWKMGRPLVWDATCVDTLAPSHLQGTQSRAGAAAESAEGLKRRKYSTLDSGYIFEPFGVETLGPWGPGAHRIYKELSGRLVDATCDQNAGLYFAQRLSIAIQRGNAASILGTLPSGSGLLD

SEQ ID NO: 8177 - protein, 1070 aa, Cosmia trapezina
MSSPKSTDKQNENDQEMLTRSASQRACPPPTRISSDSDSSLSSASPPSPVPSPTMSAVTTPAAVAASSSSDEYFSPPTTPTPARRLGGRVLSSRVKQRCVQANITDSVYRTVSQENLIRCSECSQERYFKGQKGLKIHQGKCHKINTIPLSAPNINTGILNSPSTSLSAHPFQKILAHCKISIPVLKRIPRGARISVASVLSQAIRAVILQNSKHAWEHLLYFPYAVLYVVPEPSNKKSLTTRVKENCVKYSTLEKPILLSGIDSVSNQNSKFTAKPVSESATYRLVESKLGDGDIKGASRILFSSDTIAPATPETLSALEGKHPPPTATLLLPEAPCGSDIAVEVNDLDISAAVASFQKGSAGGLDALTPQHLKDLLCSGNGETGGSLLKDLTSLVNLMLSGRVNGDIIETLYGANLCALKKKDGGIRPIAIGTTYRRLAAKICCKKSSSELANLFQPLQLGFGSRGGCEAAVHSVRTFLDQNCGEVLLKVDVKNAFNSVDRGALLTQVKDKIPKLYNFLWQCYGSSSKLTYHGNEILSAVGCQQGDPLGPAVFGLAIHPIIQRLDSKLNVWYLDDGTLGGDINTVYNDLTFLIDEFRKIGLELNFSKCELFISDTYPSKDLVVQKFNSLAPNITIIDKSSLRLLGSPILDESFPLFFEEKIQNFVDCSNRLSKINVHMAFTIIRFCLFVPKFTYNIRCCQLWKHTELLESLDNIIRNTLASILNINLGEREWLQASLPIRFGGLGIRSISGVALPAFLSSVHSTLNLTKKILAASLDNIDISFLNEAKNAWILACPSYELPQTSSSQRLWDRPLCELIRNNLLHTYLSSADRARLLAVGEWESGLWLQALPSPNTGTLIDSSAFRIAASLRLGASCCAPHRCHCGIAVGRLGHHGLSCCRSAGRIPRHSSLNDLIRRAFATANCAAILEPVGLMRDDGKRPDGMTLIPWKMGRPLVWDATCVDTLAPSHLQGTLSRAGAAAESAEGLKRRKYSTLDSGYIFEPFGVETLGPWGPGAHRIYKELSRRLVDATCDQNAGLYFAQRLSIAIQRGNAASILGTLPSGSGLLD

SEQ ID NO: 8178 - protein, 1064 aa, Cosmia trapezina
MYSICHPVQEMLTRSASQRACPPPTRISSDSDSSLSSASPPSPVPSPTMSAVTTPAAVAASSSSDEYFSPPTTPTPARRLGGRVLSSRVKQRCVQADITDSVYRTVSQENLIRCSECSQERYFKGQKGLKIHQGKCHKINTIPLSAPNLNTGILNSPSTSLSAHPFQKILAHCKISIPVLKRIPRGARISVASVLSQAIRAVILQNSKHAWEHLLYFPYAVLYVVPEPSNKKSLTTRVKENCVKYSTLEKPILLSVIDSVSNQNSKFTAKPVSESATYRLVESKLGDGDIKGASRILFSSDTIAPATPETLSALEGKHPPPTATLLFPEAPCGSDIAVEVNDLDISAAVASFQKGSAGGLDALTPQHLKDLLCSGNGETGGSLLKDLTSLVNLMLSGRVNGDIIETLYGANLCALKKKDGGIRPIAIGTTYRRLAAKICCKKSSSELANLFQPLQLGFGSRGGCEAAVHSVRTFLDQNCGEVLLKVDVKNAFNSVDRGALLTQVKDKIPKLYNFLWQCYGSSSKLTYHGNEILSAVGCQQGDPLGPAVFGLAIHPIIQRLDSKLNVWYLDDGTLGGDINTVYNDLTFLIDEFRKIGLELNFSKCELFISDTYPSKDLVVQKFNSLAPNITIIDKSSLRLLGSPILDESFPLFFEEKIQNFVDCSNRLSKINVHMAFTIIRFCLFVPKFTYNIRCCQLWKHTELLKSLDNIIRNTLASILNINLGEREWLQASLPIRFGGLGIRSISGVALPAFLSSVHSTLNLTKKILAASLDNIDISFLNEAKNAWILACPSYELPQTSSSQRLWDRPLCELIRNNLLHTYLSSADRARLLAVGEWESGLWLQALPSPNTGTLIDSSAFRIAASLRLGASCCAPHRCHCGIAVGRLGHHGLSCCRSAGRIPRHSSLNDLIRRAFATANCAAILEPVGLMRDDGKRPDGMTLIPWKMGRPLVWDATCVDTLAPSHLQGTQSRAGAAAESAEGLKRRKYSTLDSGYIFEPFGVETLGPWGPGAHRIYKELSGRLVDATCDQNAGLYFAQRLSIAIQRGNAASILGTLPSGSGLLD

SEQ ID NO: 8179 - protein, 722 aa, Cosmia trapezina
MDISAAVASFQKGSAGGLDALTPQHLKDLLCNGNGETGGSLLKDLTSLVNLMLSGRVNGDIIETLYGANLCALKKKDGGIRPIAIGTTYRRLAAKICCKKSSSELANLFQPLQLGFGSRGGCEAAVHSVRTFLDQNCGEVLLKVDVKNAFNSVDRGALLTQVKDKIPKLYNFLWQCYGSSSKLTYNGNEILSAVGCQQGDPLGPAVFGLAIHPIIQRLDSKLNVWYLDDGTLGGDINTVYNDLTFLIDEFRKIGLELNFSKCELFISDTYPSKDLVIQKFNSLAPNITIIDKSSLRLLGSPILDESFPLFFEEKIQNFVDCSNRLSKINVHMAFTIIRFCLFVPKFTYNIRCCQLWKHTELLKSLDNIIRNTLASILNINLGEREWLQASLPIRFGGLGIRSISGVALPAFLSSVHSTLNLTKKILAASLDNIDISFLNEAKNAWILACPSYELPQTSSSQRLWDRPLCELIRNNLLHTYLSSADRARLLAVGEWESGLWLQALPSPNTGTLIDSSAFRIAASLRLGASCCAPHRCHCGIAVGRLGHHGLSCCRSAGRIPRHSSLNDLIRRAFATANYAAILEPVGLMRDDGKRPDGMTLIPWKMGRPLVWDATCVDTLAPSHLQGTQSRAGAAAESAEGLKRRKYSTLDSGYIFEPFGVETLGPWGPGAHRIYKELSGRLVDATCDQNAGLYFAQRLSIAIQRGNAASILGTLPSGSGLLD

SEQ ID NO: 8180 - protein, 1001 aa, Hypena proboscidalis
MIIYFLSFICIYFLFRLCLHVNFKYMPLCAGANQGESSVHHAASQGDLVPCPECPQGRLFKGQRGLKVHQGHCHKKVNASLSSSSHINIPSGNINHSIFIDQHFSKTLSACKISKPLIKRIPRGARLSVATALSQSIKAVILHNSKRTWEHLLFFPYAVLHVSRDNGNKKSLTCRIKENCVKYSATDGYFQSSDSISATYSNFNFSSTTESAHYKTVESKLSDGDIRGAARILFSSDTIAPANQETLSELEAKHPAPAADLQLPEAPKDSDNVDFDVTALEVAAAVESFQSGSAGGLDGITPQHLKDMLSAGCGETGDALLRDLTALVTFMISGRVNGDIVEILYGANLIALKKKDGGIRPIAVGTVYRRLAAKLCCKKIAPDLTNNFVPIQLGFGTRGGCEAAVHSVRTYINNKCGEVLLKVDVKNAFNSVDRGALLTQIRNKIPNLYKFLWQCYGSATKLSYFGDEILSTVGCQQGDPLGPAIFSLAIHPVIQRVRSKLNVWYLDDGTFGGDINTVYEDLVLLIEEFRHIGLHLNFSKCELFFLDDFPSKHLAIQKFNHLAPGIKIIDKYSLCLLGSPILDEAFPSFIDSKIQNFLQTSDRLSKINAHMAFTIIKYCLFVPKFTYVLRCCQLWKHSQLLRNLDNIIKNTLATIININMDERAWLQASLPVRCGGLGVRATSDVALPAFLSSVHGSLNLCQKILSASINNIEISTMSEARGAWRLACPNSDFPSNPASQRLWDGPLCELARNELLNTCSSSTDRARLLAVARWESGLWLQALPSPNTGTLIDTASFRTVVSLRLGAPCCAPHRCQCGTAVSALGHHGLSCIKSAGRFSRHASINEIIRRALTTANCTAVLEPCGLSRDDGKRPDGMTLVPWRMGRPLVWDATCVDTLASSHLPRTQVKAGAAAESAECLKRRKYDLLDSGYMFVPFGVETLGPWGSEALNLYKQISARLFEATRSQSAGIYFGQKLSIAIQRGNAASILGTLPTGSGLLD

SEQ ID NO: 8181 - protein, 1028 aa, Erannis defoliaria
MSAAKSALSPTDDQFHTPVEDARALSPPPPLQGRRCRRQLPLPEDLDPGCLRTSPEAPVFSLFSQRDTAVQSDSQNSKNNANVSSENLVKCNQCSQSRFFKGIRGLKIHISKSHRLAQNCPNEVRNNIQNNNFQHFGELLGNLKTNLPILKRIPRGARISVAQCLINDIKRVISCNSLQAWKHLMTFPYRILHVSKNLSDQNSLTYKIKQNCKQHSNSCPDFSFPARNEDRNASPSTSYHLVENKLSEGDIRGAARILFSNDTLAPNTPGTLLALKDKHPPSAAEPLPLPASVSEEDVLTATIDDVLLAVASFPSGSAGGLDSLTPQHLKDLTSATCGEVGDSLLKEITLLVNLMLAGKVNNEIVDILYGANLCALLKKDGGIRPIAVGTVYRRLTAKICTKYIKETLCEEFQPLQLGFGSRGGCEAAVHALRTFLNHQGGEVLLKVDVQNAFNSVDRNTLLAQVKDKIPFIFNFIWQCYGNPSKLLYKNNVLSSEVGCQQGDPLGPAIFSLAIHPIIKKLESKFNVWYLDDGTLGGDVNTVFKDLQNVIKDFSDIGLVLNFSKCELFIPNYSTTPKQDIITLFGKIAPNIKVLENRSLRLLGSPILDESIQDYVDDKIQNFVSVSDRLQKLNSHMAYFLIRYCLFVPKFMYSLRCCQLWNHPAVLQQLDSIQRDTLTTILNTPFDDRTWRQASLPVRFGGLGIRKISSVSLPAFLSSVFSSTHLVNTILSPSLQNFEISFLSEAMESWKLACPKQTLPKAPTSQRQWDEPLCELECKNLIDSSSSSTERARLLAVTRWESGLWLHALPSKNVGNLLDNQTFRIAVSLRIGAPCQVPHRCSCSSGYIADRFGHHALSYVKSAGRIPRHACLNDIIRRAFVSAGIPSILEPNGLMRDDGKRPDGMTLIPWKMGRPLVWDATCVDTLAPSHLLRTNDHAGAAASNAENLKRHKYGYLDRLYMFVPFGVETLGPWGPAAHVLYRDLAKRLVEVSGDRNAGVYFGQKLSIAIQRGNAASILATFPSSTGLLV

SEQ ID NO: 8182 - protein, 1072 aa, Erannis defoliaria
MQCTSFEGFFFVLLDVYSVGMLKINNKPIKKCINIYTFLIIYFIAYMSAAKSALSPTDDQFHTPVEDARALSPPPPLQGRRCRRQLPLPEDLDPGCLRTSPEAPVFSLFSQRDTAVQSDSQNSKNNANVSSENLVKCNQCSQSRFFKGIRGLKIHISKSHRLAQNCPNEVRNNIQNNNFQHFGELLGNLKTNLPILKRIPRGARISLAQCLINDIKRVISCNSLQAWEHLMTFPYRILHVSKNLSDQNSLTYKIKQNCKQHSNSCPDFSFPARNEDRNASPSTSYHLVENKLSEGDIRGAARILFSNDTLAPNTPGTLLALKDKHPPSAAEPLPLPASVSEEDVLTATIDDVLLAVASFPSGSAGGLDSLTPQHLKDLTSATCGEVEDSLLKEITLLVNLMLAGKVNDEIVDILYGANLCALLKKDGGIRPIAVGTVYRRLTAKICTKYIKETLCEEFQPLQLGFGSRGGCEAAVHALRTFLNHQGGEVLLKVDVQNAFNSVDRNTLLAQVKDKIPFIFNFIWQCYGNPSKLLYKNNVLSSEVGCQQGDPLGPAIFSLAIHPIIKKLESKFNVWYLDDGTLGGDVNTVFKDLQNLIKDFSDIGLVLNFSKCELFIPNYSTTPKQDIITLFGKIAPNIKVLENRSLRLLGSPILDESIQDYVDDKIQNFVSVSDRLQKLNSHMAYFLIRYCLFVPKFMYSLRCCQLWNHPAVLQQLDSIQRDTLTTILNTPFDDRTWRQASLPVRFGGLGIRKISSVSLPAFLSSVFSSTHLVNTILSPSLQNFEISFLSEAMESWKLACPKQTLPKAPTSQRQWDEPLCELECKNLIDSSSSSTERARLLAVTRWESGLWLHALPSKNVGNLLDNQTFRIAVSLRIGAPCQVPHRCSCSDIADRFGHHALSCVKSAGRIPRHASLNDIIRRAFVSAGIPSILEPNGLMRDDGKRPDGMTLIPWKMGRPLVWDATCVDTLAPSHLPRTNDHAGAAASNAENLKRHKYGYLDRLYMFVPFGVETLGPWGPAAHVLYRDLAKRLVEVSGARNAGVYFGQKLSIAIQRGNAASILATFPSSTGLFV

SEQ ID NO: 8183 - protein, 1013 aa, Peribatodes rhomboidaria
MLSSSSPTSNDEFHTPEEASKHPTPPPTQLGQRCRRQLPLSSNVLPENKSDSVSSPSRDAALPNVPKIPNLHADVSLENQVKCDQCSELRFFKGVRGLKIHAAKAHRSVPNTHFPILDKPSNLWETLSKFKNNLPIVKRIPRGARISVANCLFLDISRVTSTNSVQAWEHLLTFPYRILHVPKNNLDQNSLTNKIKQNCINNSKSCPDFSFPPRPPSRSKSSVAYSLVEDKMAEGDIRGSARLLFSSDTMAPNTTETLLALKEKHPLSPASIPVLQDAPEENSLIATFEDISLALSSFPSGSAGGLDSLTPQHLKDLTGAGCGEIGDALLKELTALVNLMLSGKVDNSITAIIYGANLCALLKKDGGVRPIAVGTVYRRLTAKICCKNIKETLCKEFSPLQLGFGSRGGCEAAVHALRTFLNKQGGEVLVKVDVKNAFNSVHRTAFINEVKDKIPQIYNFIRQCYGTPSHLVYKNNLISSEVGCQQGDPLGPALFSLAINPIIQKLVSKFNVWYLDDGTLGGDISSVLQDLKLIISGFNKLGLSLNFSKCEIYIPQSTTYSQNEILNLFEQITPNIKLLTKKSLRLLGSPILDESIADFVDEKINLFRSCSDRLRLGKINTHVAYFIIKYCLFVPKFTYALRCCQLWNHPLLLQQLDSIQRDTLTAILNTPFDERTWRQASLPVRFGGLGIRKISSVSLPAFLSSAFSTQHLVQDILLSSLPKIEISFLSDALESWKSACPNESLPKTPSSQRQWDGPLCVLEYKNLLHSSTSSAERARLLAVARWESGLWLHALPSKNIGNLLDKNTFRLAVSLRIGAACQVPHRCNCGDNVDRLGHHGLSCLKSAGRIPRHASLNDVIRRAFVSAGVPSVLEPNGLMRDDGKRPDGMTLIPWKVGQPLVWDATCVDTMAPSHLPGTSVQAGAAAAQAENLKRRKYAHLDRVYMFAPFGVETMGPWGPAALGLFRDLARRLVEASGVQNAGFYFAQKLSIAIQRGNAASILGTFPSTNGLLV

SEQ ID NO: 8184 - protein, 1030 aa, Agriopis aurantiaria
MISSPPSPRRDDEIFHTPVEDSRLLSPPPHQQDRRCRRQLPLHEDDEDLLRPSPVVPNLSVTSRRDTATCADSQISKTGVSVSSENLVKCNQCSQPRFFKGNRGLKIHISKSHRSTQNFTNEFNVPNENIQDFGKLLSDCKTNLPVIKRIPRGARISVAKCLVDDIRNVILHNSTQAWEHLLSFPFRILHVSKNQSDQNSLTSKIKQNCKQNSSCPDISFASTNQDRSVPSSMSYRLVEDKLSEGDIRGSARLLFSSDTLAPNNLETLLALREKHPASAFNPDLPLPDGITEEDAVTATVEDLSSALASFPSGSAGGLDSLTPQHLKDLTSASCGEIGDSLLKELTLLVNLMLAGKVNDGIIEILYGANLCALLKKDGGIRPIAVGTVYRRLTAKVCVKHIKECLCKEFQPLQLGFGSRGGCEAAVHALRTYLYHQKCEVLLKVDVKNAFNSVDRNTLLAQVKDKIPSIYNFIWQCYSKPSKLMYKNNLLSSESGCQQGDPLGPAIFGLAIHPIIQKLESKFNVWYLDDGTLGGDLNTVYKDLQNLITEFNAIGLVLNFSKCELFIPNSFSSQKNETINLFEQVAPNIKVLDNRSLRLLGSPILDESIQDFIDEKIQNFQSVSDRLQKINTHMAYFIIRYCLFVPKFMYSLRCCQLWNHPLPLQQLDNIQRDTLTTILNTPFDDRTWRQASLPVRFGGLGIRKISSVSLPAFLSSVFSTQKLVNTILSPTLQNSEISYLTDALESWKIACPNQPLPKAPASQRQWDGPLCEIERQNLFDSASSSTERARLLAVTRWESGLWLHALPSKNVGNLLDNNTFRVAVSLRIGAPCQVPHRCSCSEMVDRHGHHALACAKSAGRIPRHASLNDIIRRAFVSAGVPSVLEPNGLMRDDGKRPDGMTLIPWKMGRPVIWDATCVDTLAPSHLPGTSLQAGAAATKAENLKRHKYRFLDRVYMFVPFGVETLGPWGPAAHDLYRDLAKRLMEATCDRNAGAYFGLTINHNWKYDMQGRSTCGVYLDISLCTHTGRTDR

SEQ ID NO: 8185 - protein, 1014 aa, Agriopis aurantiaria
MLSPSSPTSNDEFHTPEEVARLLSPPPPQLGQRCRRQLPLPVDNALPKSESASVTSPSRDTAILNVSQIQNLNANVSLENLIKCDQCSQPRFFKGIRGLKIHVSKAHRAAPNINTHSQITDNPSSFWETLSKFKNNLPIVKRIPRGARISVANCLFQDIRSVTSTNSVRAWEHLLTFPYRILHVSKDSLDQNSLTNKIKQNCQNNSKSCPEFSFPPRPPSRSKCPVAYSLVEDKMAEGDIRGSARLLFSSDTMAPCTPETLLALKEKHPLSPASISLLPDAPEENSLVATFEDVSQAVSSFPSGSAGGLDSLTPQHLKDLIGAGCGEIGDALLKELTALVNLMLAGKVDNNITALLYGANLCALLKKDGGIRPIAVGTVYRRLTAKICCKNIKESLCEEFSPLQVGFGSRGGCEAAVHALRTFLNHQGGEVLVKVDVKNAFNSVHRTVFLKEVKDKIPHIYNFIQQCYGTPTNLVYKNNLISSEVGCQQGDPLGPALFSLAIHPIIQKLESKFNVWYLDDGTLGGEISTVYKDLESIISGFNNLGLSLNFSKCEIYIPQSTTNSQNEILNCFEKLTPNIKLLTSKSLRLLGAPILDDSIADFVDEKINLFRSCSDRLEKINTHVAYFIIKYCLFVPKFTYALRCCQLWNHPLLLQQLDNIQRDTLTTILNIPFDERAWSQASLPVRFGGLGIRKISSVSLPAFLSSAFSTQNLVQDILQPSLQNFQISSLSDALESWKTACPSESLPKAPSSQRQWDGPLCVLEYKNLLDSTTSSAERARLLAVARWESGLWLHALPSRNIGNLLDKITFCLAVSLRIGAACQVPHRCNCGDNVDRLGHHGLSCIKSAGRIPRHASLNDVIRRAFVSAGVPSVLEPNGLMRDDGKRPDGMTLIPWKVGQPLVWDATCVDTMTPSHLPGTSVQAGAAAAQAENLKRRKYAHLDRVYMFAPFGVETMGPWGPAAMGLYRDLARRLVEASGVQNAGFYFAQKLSIAIQRGNAASILGTFPSTNGLLV

SEQ ID NO: 8186 - protein, 1026 aa, Erannis defoliaria
MSAAKSALSPTDDQFHTPVEDARALSPPPPLQGRRCRRQLPLPEDLDPGCLRTSPEAPVFSLFSQRDTAVQSDSQNSKNNANVSSENLVKCNQCSQSRFFKGIRGLKIHISKSHRLAQNCPNEVRNNIQNNNFQHFGELLGNLKTNLPILKRISRGARISVAQCLINDIKRVISCNSLQAWKHLMTFPYRILHVSKNLSDQNSLTYKIKQNCKQHSNSCPDFSFPARNEDRNASPSTSYHLVENKLSEGDIRGAARILFSNDTLAPNTPGTLLALKDKHPPSAAEPLPLPASVSEEDVLTATIDDVLLAVASFPSGSAGGLDSLTPQHLKDLTSATCGEVGDSLLKEITLLVNLMLAGKVNDEIVDILYGANLCALLKKDGGIRPIAVGTVYRRLTAKICTKYIKETLCEEFQPLQLGFGSRGGCEAAVHALRTFLNHQGGEVLLKVDVQNAFNSVDRNTLLAQVKDKIPFIFNFIWQCYGNPSKLLYKNNVLSSEVGCQQGDPLGPAIFSLAIHPIIKKLESKFNVWYLDDGTLGGDVNTVFKDLQNFIKDFSDIGLVLNFSKCELFIPNYSTTPKQDIITLFGKIAPNIKVLENRSLRLLGSPIIDESIQDYVDDKIQNFVSVSDRLQKLNSHMAYFLIRYCLFVPKFMYSLRCCQLWNHPAVLQQLDSIQRDTLTTILNTPFDDRTWRQASLPVRFGGLGIRKISSVSLPAFLSSVFSSTHLVNTILSPSLQNFEISFLSEAMESWKLACPKQTLPKAPTSQRQWDEPLCELECKNLIDSSSSSTERVRLLAVTRWESGLWLHALPSKNVGNLLDNQTFRIAVSLRIGAPCQVPHRCSCSDIADRFGHHALSCVKSAGRIPRHASLNDIIRRAVVSAGIPSILEPNGLMRDDGKRPDGMTLIPWKMGRPLVWDATCVDTLAPSHLPRTNDHAGAAASNAENLKRHKYGYLDRLYMFVPFGVETLGPWGPAAHVLYRDLAKRLVEVSGDRNAGVYFGQKLSIAIQRGNAASILATFPSSTGLLV

SEQ ID NO: 8187 - protein, 1011 aa, Peribatodes rhomboidaria
MLSSSPPTSNDEFHTPEEASKHPTPPPTQLGQRCRRQLPLSSNVLPENKSDSVSSPSRDAALPNVPKIPNLHADVSLENQVKCDQCSELRFFKGIRGLKIHAAKAHRSVPNTHFPILDKPSNLWETLSKFKNNLPIVKRIPRGARITVANCLFLDISRVTSTNTVQAWEHLLTFPYRILHVPKNNLDQNSLTNKIKQNCVNNSKSCPDFSFPPRPPSRSKGSVAYSLVEDKMAEGDIRGSARLLFSSDTMAPNTTETLLALKEKHPLSPASIPVIQDAPEENSLIATFEDISLALSSFPSGSAGGLDSLTPQHLKDLTGAGCGQIGDALLKELTALVNLMLSGKVDNSITAIIYGANLCALLKKDGGVRPIAVGTVYRRLTAKICCKSIKETLCKEFSPLQLGFGSRGGCEAAVHALRTFLNKQGGEVLVKVDVKNAFNSVHRTAFINEVKDKIPQIYNFIRQCYGTPSHLVYKNNLISSEVGCQQGDPLGPALFSLAINPIIQKLVSKFNVWYLDDGTLGGDISSVLQDVKLIISGFNKLGLSLNFSKCEIYIPQSMTYSQNEILNLFEQITPNIKLLTKKSLRLLGSPILDESIADFVDEKINLFRSCSDRLEKINTHVAYFIIKYCLFVPKFTYALRCCQLWNHPLLLQQLDSIQRDTLTAILNTPFDERTWRQASLPVRFGGLGIRKISSVSLPAFLSSAFSTQHLVQDILLPSLPKIEISFLSDALESWKSACPNESLPKTPSSQRQWDGPLCALEYKNLLHSSTSSAERARLLAVARWESGLWLHALPSKNIGNLLVKNTFCLAVSLRVGAACQVPHRCNCGDNVDRLGHHGLSCLKSAGRIPRHASLNDVIRRAFVSAGVPSVLEPNGLMRDDGKRPDGMTLIPWKVGQPLVWDATCVDTMAPSHLPGTSVQAGAAAAQAENLKRRKYAHLDRVYMFAPFGVETMGPWGPAALGLFRDLARRLVEASGVQNAGFYFAQKLSIAIQRGNAASILGTFPSTNGLLV

SEQ ID NO: 8188 - protein, 1011 aa, Peribatodes rhomboidaria
MLSSSPPTSNDEFHTPEEASKHPTPPPTQLGQRCRRQLPLSSNVLPENKSDSVSSPSRDAALPNVPKIPNLHADVSLENQVKCDQCSELRFFKGIRGLKIHAAKAHRSVPNTHFPILDKPSNLWETLSKFKNNLPIVKRIPRGARITVANCLFLDISRVTSTNTVQAWEHLLTFPYRILHVPKNNLDQNSLTNKIKQNCVNNSKSCPDFSFPPRPPSRSKGSVAYSLVEDKMAEGDIRGSARLLFSSDTMAPNTTETLLALKEKHPLSPASIPVIQDAPEENSLIATFEDISLALSSFPSGSAGGLDSLTPQHLKDLTGAGCGQIGDALLKELTALVNLMLSGKVDNSITAIIYGANLCALLKKDGGVRPIAVGTVYRRLTAKICCKSIKETLCKEFSPLQLGFGSRGGCEAAVHALRTFLNKQGGEVLVKVDVKNAFNSVHRTAFINEVKDKIPQIYNFIRQCYGTPSHLVYKNNLISSEVGCQQGDPLGPALFSLAINPIIQKLVSKFNVWYLDDGTLGGDISSELQDLKLIISGFNKLGLSLNFSKCEIYIPQSKTYSQNEILNLFEQITPNIKLLTKKSLRLLGSPILDESIADFVDEKINLFRSCSDRLEKINTHVAYFIIKYCLFVPKFTYALRCCQLWNHPLLLQQLDSIQRDTLTAILNTPFDERTWRQASLPVRFGGLGIRKISSVSLPAFLSSAFSTQHLVQDILLPSLPKIEISFLSDALESWKSACPNESLPKTPSSQRQWDGPLCALEYKNLLHSSTSSAERARLLAVARWESGLWLHALPSKNIGNLLDKNTFCLAVSLRVGAACQVPHRCNCGDNVDRLGHHGLSCLKSAGRIPRHASLNDVIRRAFVSAGVPSVLEPNGLMRDDGKRPDGMTLIPWKVGQPLVWDATCVDTMAPSHLPGTSVQAGAAAAQAENLKRRKYAHLDRVYMFAPFGVETMGPWGPAALGLFRDLARRLVEASGVQNAGFYFAQKLSIAIQRGNAASILGTFPSTNGLLV

SEQ ID NO: 8189 - protein, 780 aa, Agriopis aurantiaria
MAEGDIRGSARLLFSSDTMAPCTPETLLALKEKHPLSPASISLLPDAPEENSLVATFEDVSQAVSSFPSGSAGGLDSLTPQHLKDLIGAGCGEIGDALLKELTALVNLMLAGKVDNNITALLYGANLCALLKKDGGIRPIAVGTVYRRLTAKICCKNVKESLCEEFSPLQVGFGSRGGCEAAVHALRTFLNHQGGEVLVKVDVKNAFNSVHRTVFLKEVKDKIPHIYNFIQQCYGTPTNLVYKNNLISSEVGCQQGDPLGPALFSLAIHPIIQKLESKFNVWYLDDGTLGGEISTVYKDLESIISGFNNLGLSLNFSKCEIYIPQSTTNSQNEILNCFEKLTPNIKLLTSKSLRLLGAPILDDSIADFVDEKINLFRSCSDRLEKINTHVAYFIIKYCLFVPKFTYALRCCQLWNHPLLLQQLDSIQRDTLTTILNIPFDERAWSQASLPVRFGGLGIRKISSVSLPAFLSSAFSTQNLVQDILQPSLQNFQISSLSDALESWKTACPSESLPKAPSSQRQWDGPLCVLEYKNLLDSTTSSAERARLLAVARWESGLWLHALPSRNIGNLLDKITFCLAVSLRIGAACQVPHRCNCGDNVDRLGHHGLSCIKSAGRIPRHASLNDVIRRAFVSAGVPSVLEPNGLMRDDGKRPDGMTLIPWKVGQPLVWDATCVDTMAPSHLPATSVQAGAAAAQAENLKRRKYAHLDRVYMFAPFGVETMGPWGPAAMGLYRDLARRLVEASGVQNAGFYFAQKLSIAIQRGNAASILGTFPSTNGLLV

SEQ ID NO: 8190 - protein, 1026 aa, Erannis defoliaria
MSAAKSALSPTDDQFHTPVEDARALSPPPPLQGRRCRRQLPLPEDLDPGCLRTSPEAPVFSLLSQRDTAVQSDSQNSKNNANVSSENLVKCNQCSQSRFFKGIRGLKIHISKSHRLAQNCPNEVRNNIQNNNFQHFGELLGNLKTNLPILKRIPRGARISVAQCLINDIKRVISCNSLQAWEHLMTFPYRILHVSKNLSDQNSLTYKIKQNCKQHSNSCPDFSFPARNEDRNASPSTSYHLVENKLSEGDIRGAARILFSNDTLAPNTPGTLLGLKDKHPPSAAEPLPLPASVSEEDVLTATIDDVLLAVASFPSGSAGGLDSLTPQHLKDLTSATCGEVGDSLLKEITLLVNFMLAGKVNDEIVDILYGANLCALLKKDGGIRPIAVGTVYRRLTAKICTKYIKETLCEEFQPLQLGFGSRGGCEAAVHALRTFLNHQGGEVLLKVDVQNAFNSVDRNTLLAQVKDKIPFIFNFIWQCYGNPSKLLYKNNVLSSEVGCQQGDPLGPAIFSLAIHPIIKKLESKFNVWYLDDGTLGGDVNTVFKDLQNLIKDFSDIGLVLNFSKCELFIPNYSTTPKQDIITLFGKIAPNIKVLENRSLRLLGSPILDESIQDYVDDKIQNFVSVSDRLQKLNSHMAYFLIRYCLFVPKFMYSLRCCQLWNHPAVLQQLDSIQRDTLTTILNTPFDDRTWRQASLPVRFGGLGIRKISSVSLPAFLSSVFSSTHLVNTILSSSLQNFEISFLSEAMESWKLACPKQTLPKAPTSQRQWDEPLCELECKNLIDSSSSSTERARLLAVTRWESGLWLHALPSKNVGNLLDNQTFRIAVSLRIGAPCQVPHRCSCSDIADRFGHHALSCVKSAGRIPRHASLNDIIRRAFVSAGIPSILEPNGLMRDDGKRPDGMTLIPWKMGRPLVWDATCVDTLAPSHLPRTNDHAGAAASNAENLKRHKYGYLDRLYMFVPFGVETLGPWGPAAHLLYRDLAKRLVEVSGDQNAGVYFGQKLSIAIQRGNAASILATFPSSTRLLV

SEQ ID NO: 8191 - protein, 1011 aa, Peribatodes rhomboidaria
MLSSSPPTSNDEFHTPEEASKHPTPPPTQLGQRCRRQLPLSSNVLPENKSDSVSSPSRDAALPNVPKIPNLHADVSLENQVKCDQCSELRFFKGIRGLKIHAAKAHRSVPNTHFPILDKPSNLWETLSKFKNNLPIVKRIPRGARITVANCLFLDISRVTSTNTVQAWEHLLTFPYRILHVPKNNLDQNSLTNKIKQNCVNNSKSCPDFSFPPRPSSRSKGSVAYSLVEDKMAEGDIRGSARLLFSSDTMAPNTTETLLALKEKHPLSPASIPVIQDAPEENSLIATFEDISLALSSFPSGSAGGLDSLTPQHLKDLTGAGCGQIGDALLKELTALVNLMLSGKVDNSITAIIYGANLCALLKKDGGVRPIAVGTVYRRLTAKICCKSIKETLCKEFSPLQLGFGSRGGCEAAVHALRTFLNKQGGEVLVKVDVKNAFNSVHRTAFINEVKDKIPQIYNFIRQCYGTPSHLVYKNNLISSEVGCQQGDPLGPALFSLAINPIIQKLVSKFNVWYLDDGTLGGDISSVLQDLKLIISGFNKLGLSLNFSKCEIYIPQSKTYSQNEILNLFEQITPNIKLLTKKSLRLLGSPILDESIADFVDEKINLFRSCSDRLEKINTHVAYFIIKYCLFVPKFTYALRCCQLWNHPLLLQQLDSIQRDTLTAILNTPFDERTWRQASLPVRFGGLGIRKISSVSLPAFLSSAFSTQHLVQDILLPSLPKIEISFLSDALESWKSACPNESLPKTPSSQRQWDGPLCALEYKNLLHSSTSSAERARLLAVARWESGLWLHALPSKNIGNLLDKNTFCLAVSLRVGAACQVPHRCNCGDNVDRLGHHGLSCLKSAGRIPRHASLNDVIRRAFVSAGVPSVLEPNGLMRDDGKRPDGMTLIPWKVGQPLVWDATCVDTMAPSHLPGTSVQAGAAAAQAENLKRRKYAHLDRVYMFAPFGVETMGPWGPAALGLFRDLARRLVEASGVQNAGFYFAQKLSIAIQRGNAASILGTFPSTNGLLV

SEQ ID NO: 8192 - protein, 1011 aa, Peribatodes rhomboidaria
MLSSSSPTSNDEFHTPEEASKHPTPPPTQLGQRCRRQLPLSSNVLPENKSDSVSSPSRDAALPNVPKIPNLHADVSLENQVKCDQCSELRFFKGVRGLKIHAAKAHRSVPNTHFPILDKPSNLWETLSKFKNNLPIVKRIPRGARISVANCLFLDISRVTSTNSVQAWEHLLTFPYRILHVPKNNLDQNSLTNKIKQNCINNSKSCPDFSFPPRPPSRSKSSVAYSLVEDKMAEGDIRGSARLLFSSDTMAPNTTETLLALKEKHPLSPASIPVLQDAPEESSLIATFEDISLALSSFPSGSAGGLDSLTPQHLKDLTGAGCGEIGDALLKELTALVNLMLSGKVDNSITAIIYGANLCALLKKDGGVRPIAVGTVYRRLTAIICCKNIKETLCKEFSPLQLGFGSRGGCEAAVHALRTFLNKQGGEVLVKVDVKNAFNSVHRTAFINEVKDKIPQIYNFIRQCYGTPSHLVYKNNLISSEVGCQQGDPLGPALFSLAINPIIQKLVSKFNVWYLDDGTLGGDISSVLQDLKLIISGFNKLGLSLNFSKCEIHIPQSTTYSQNEILNLFEQITPNIKLLTKKSLRLLGSPILDESIADFVDEKINLFRSCSDRLGKINTHVAYFIIKYCLFVPKFTYALRCCQLWNHPLLLQQLDSIQRDTLTAILNTPFDERTWRQASLPVRFGGLGIRKISSVSLPAFLSSAFSTQHLVQDILLSSLPKIEISFLSDALESWKSACPNESLPKTPSSQRQWDGPLCVLEYKNLLHSSTSSAERARLLAVARWESGLWLHALPSKNIGNLLDKNTFRLAVSLRIGAACQVPHRCNCGDNVDRLGHHGLSCLKSAGRIPRHGSLNDVIRRAFVSAGVPSVLEPNGLMRDDGKRPDGMTLIPWKVGQPLVWDATCVDTMAPSHLPGTSVQAGAAAAQAENLKRRKYAHLDRVYMFAPFGVETMGPWGPAALGLFRDLARRLVEASGVQNAGFYFAQKLSIAIQRGNAASILGTFPSTNGLLV

SEQ ID NO: 8193 - protein, 1023 aa, Agriopis aurantiaria
MISSPLSPRRDDEIFHTPVEDSRLLSPPPHQQDRRCRRQLPLHEDDEDLLRPSPVVPNLSVTSRRDTATCADSQISKTGVSVSSENLVKCNQCSQPRFFKGNRGLKIHISKSHRSTQNFTNEFNVPNENIQDFGKLLSNCKTNLPVIKRIPRGARISVAKCLVDDIRNVILHNSTQAWEHLLSFPFRILHVSKNQSDQNSLTSKIKQNCKQNSSCPDISFASTNQDRFVPSSTSYRLVEDKLSEGDIRGSARLLFSSDTLAPNNLETLLALREKHPASAFNPDLPLPDGITEEDAVTATVEDLSSALASFPSGSAGGLDSLTPQHLKDLTSASCGEIGDSLLKELTSLVNLMLAGKVNDGIIEILYGANLCALLKKDGGIRPIAVGTVYRRLTAKVCVKHIKECLCKEFQPSQLGFGSRGGCEAAVHALRTYLYHQKCEVLLKVDVKNAFNSVDRNTLLAQVKDKIPSIYNFIWQCYSKPSKLMYKNNLLSSESGCQQGDPLGPAIFGLAIHPIIQKLESKFNVWYLDDGTLGGDLNTVYKDLQNLITEFNAIGLVLNFSKCELFIPNSFSSQKNETVNLFEQIAPNIKVLDNRSLRLLGSPILDESIQDFIDEKIQNFQSVSDRLQKINTHMAYFIIRYCLFVPKFMYSLRCCQLWNHPLPLQQLDNIQRDTLTTILNTPFDDRTWRQASLPVRFGGLGIRKISSVSLPAFLSSVFSTQKLVNTILSPTLQNSEISYLTDALESWKIACPNQPLPKAPASQRQWDGPLCEIERQNLFDSASSSTERARLLAVTRWESGLWLHALPSKNVGNLLDNNTFRVAVSLRIGAPCQVPHRCSCSEMVDRHGHHALSCAKSAGRIPRHASLNDIIRRAFVSAGVPSVLEPNGLMRDDGKRPDGMTLIPWKMGRPVIWDATCVDTLAPSHLPGTSFQAGAAATKAENLKRHKYRFLDRVYMFVPFGVETLGPWGPAAHDLYRDLAKRLMEATCDRNAGAYFGQKISIAIQRGNAASILATFPSTEGLLD

SEQ ID NO: 8194 - protein, 1011 aa, Peribatodes rhomboidaria
MLSSSSPTSNDEFHTPEEASKHPTPPPTQLGQRCRRQLPLSSNVLPENKSDSVSSPSRDAALPNVPKIPNLHADVSLENQVKCDQCSELRFFKGVRGLKIHAAKAHRSVPNTHFPILDKPSNLWETLSKFKNNLPIVKRIPRGARISVANCLFLDISRVTSTNSVQAWEHLLTFPYRILHVPKNNLDQNSLTNKIKQNCINNSKSCPDFSFPPRPPSRSKSSVAYSLVEDKMAEGDIRGSARLLFSSDTMAPNTTETLLALKEKHPLSPASIPVLQDAPEENSLIATFEDISLALSSFPSGSAGGLDSLTPQHLKDLTGAGCGEIGDALLKELTALVNLMLSGKVDNSITAIIYGANLCALLKKDGGVRPIAVGTVYRRLTAKICCKNIKETLCKEFSPLQLGFGSRGGCEAAVHALRTFLNKQGGEVLVKVDVKNAFNSVHRTAFINEVKDKIPQIYNFIRQCYGTPSHLVYKNNLISSEVGCQQGDPLGPALFSLAINPIIQKLVSKFNVWYLDDGTLGGDISSVLQDLKLIISGFNKLGLSLNFSKCEIYIPQSTTYSQNEILNLFEQITPNIKLLTKKSLRLLGSPILDESIADFVDEKINLFRSCSDRLGKINTHVAYFIIKYCLFVPKFTYALRCCQLWNHPLLLQQLDSIQRDTLTAILNTPFDERTWRQASLPVRFGGLGIRKISSVSLPAFLSSAFSTQHLVQDILLSSLPKIEISFLSDALESWKSACPNESLPKTPSSQRQWDGPLCVLEYKNLLHSSTSSAERARLLAVARWESGLWLHALPSKNIGNLLDKNTFRLAVSLRIGAACQVPHRCNCGDNVDRLGHHGLSCLKSAGRIPRHASLNDVIRRAFVSAGVPSVLEPNGLMRDDGKRPDGMTLIPWKVGQPLVWDATCVDTMAPSHLPGTSVQAGAAAAQAENLKRRKYAHLDRVYMFAPFGVETMGPWGPAALGLFRDLARRLVEASGVQNAGFYFAQKLSIAIQRGNAASILGTFPSTNGLLV

SEQ ID NO: 8195 - protein, 842 aa, Erannis defoliaria
MTFPYRILHVSKNLSDQNSLTYKIKQNCKQHSNSCPDFSFPARNEDRNASPSTSYHLVENKLSEGDIRGAARILFSNDTLAPNTPGTLLALKDKHPPSAAEPLPLPASVSEEDVLTATIDDVLLAVASFPSGSAGGLDSLTPQHLKDLTSATCGEVGDSLLKEITLLVNLMLAGKVNDEIVDILYGANLCALLKKDGGIRPIAVGTVYRRLTAKICTKYIKETLCEEFQPLQLGFGSRGGCEAAVHALRTFLNHQGGEVLLKVDVQNAFNSVDRNTLLAQVKDKIPFIFNFIWQCYGNPSKLLYKNNVLSSEVGCQQGDPLGPAIFSLAIHPIIKKLESKFNVWYLDDGTLGGDVNTVFKDLQNLIKDFSDIGLVLNFSKCELFIPNYSTTPKQDIITLFGKIAPNIKVLENRSLRLLGSPILDESIQDYVDDKIQNFVSVSDRLQKLNSHMAYFLIRYCLFVPKFMYSLRCCQLWNHPAVLQQLDSIQRDTLTTILNTPFDDRTWRQASLPVRFGGLGIRKISSVSLPAFLSSVFSSTHLVNTILSPSLQNFEISFLSEAMESWKLACPKQTLPKAPTSQRQWDEPLCELECKNLIDSSSSSTERARLLAVTRWESGLWLHALPSKNVGNLLDNQTFRIAVSLRIGAPCQVPHRCSCSDIADRFGHHALSCVKSAGRIPRHASLNDIIRRAFVSAGIPSILEPNGLMRDDGKRPDGMTLIPWKMGRPLVWDATCVDTLAPSHLPRTNDHAGAAASNAENLKRHKYGYLDRLYMFVPFGVETLGPWGPAAHVLYRDLAKRLVEVSGDRNAGVYFGQKLSIAIQRGNAASILATFPSSTGLLV

SEQ ID NO: 8196 - protein, 842 aa, Erannis defoliaria
MTFPYRILHVSKNLSDQNSLTYKIKQNCKQHSNSCPDFSFTARNEDQNASPSTSYHLVENKLSEGDIRGAARILFSNDTLAPNTPGTLLALKDKHPPSTAEPLPLPASVSEEDVLTATIDDVLLAVASFPSGSAGGLDSLTPQHLKDLTSATCGEVGDSLLKEITLLVNLMLAGKVNDEIVDILYGANLCALLKKDGGIRPIAVGTVYRRLTAKICTKYIKETLCEEFQPLQLGFGSRGGCEAAVHALRTFLNHQGGEVLLKVDVQNAFNSVDRNTLLAQVKDKIPFIFNFIWQCYGNPSKLLYKNNVLSSEVGCQQGDPLGPAIFSLAIHPIIKKLESKFNVWYLDDGTLGGDVNTVFKDLQNLIKDFSDIGLVLNFSKCELFIPNYSTTPKQDIITLFGKIAPNIKVLENRSLRLLGSPILDESIQDYVDDKIQNFVSVSDRLQKLNSHMAYFLIRYCLFVPKFMYSLRCCQLWNHPAVLQQLDSIQRDTLTTILNTPFDDRTWRQASLPVRFGGLGIRKISSVSLPAFLSSVFSSTHLVNTILSPSLQNFEISFLSEAMESWKLACPKQTLPKAPTSQRQWDEPLCELECKNLIDSSSSSTERARLLAVTRWESGLWLHALPSKNVGNLLDNQTFRIAVSLRIGAPCQVPHRCSCSDIADRFGHHALSCVKSAGRIPRHASLNDIIRRAFVSAGIPSILEPNGLMRDDGKRPDGMTLIPWKMGRPLVWDATCVDTLAPSHLPRTNDHAGAAASNAENLKRHKYGYLDRLYMFVPFGVETLGPWGPAAHVLYRDLAKRLVEVSGDRNAGVYFGQKLSIAIQRGNAASILATFPSSTGLLV

SEQ ID NO: 8197 - protein, 1012 aa, Peribatodes rhomboidaria
MLSSHSSPNDEFHTPEDAAGHVSPPPTHLGQRCRRQLPLLPDPRPFPSSIDSVPLSTASQVAATQNHLQITNVSMENQVKCEQCSQPRFFKGYRGLKIHTSKVHRSAPPILDQGETVSVSTFWETLSQFKNNLPVLKRIPRGARLSVASCLVDDIKKAVSSDISNSVVAWEHLLTFPYRILHVPKNPSDSTSLTNKIKHNCIQNSKSCPVFSFPSSGPFRRKCSTPYSLVEDKMAEGDIRGSARLLFSTDTLAPDTPETLLALKEKHPTSPAEPIILDEPDVNPLVATPLDVISALSSFPSGSAGGLDGLTPQHLKDLIGAGCGEIGDALVKELTALVNLMLSGKVNDKITNILYGANLCALLKKDGGIRPIAVGTVYRRLAAKVCCKHIKESLCKEFQPLQLGYGSRGGCEAAIHALRSYLSHQTCEVLVKIDVKNAFNTVNRTILLNEVHNKIPHIYNFIRQCYGKPSNLVYKNSFISSEVGCQQGDPLGPALFSLTIHPIIKNLGSKFNVWYLDDGTLAGDVTSVYEDLKYLTTEFETIGLSLNFSKCEIFIPSFSTISKNNTLNLFEQVAPKIKLLDNTSLRLLGSPILDESLAGFVEEKINLFNICSDRLQKINSHVAFYIILYCLFVPKFMYSLRCCQFWNHTLLLQKLDNIQRNTLTTILNIAFDDHTWRQASLPVRFGGLGIRKISSVSLPAFLSSAHSTHQLVTDILASSLPNYQFSFIAEALESWQRACPDGSLPKDPSSQRQWDEPLCKLEFDNLVSSSNSPVEHARLLAAARWESGLWLHALPSRNIGTLLDNNSFRLAASLRVGAICQVLHRCVCGDMADQLGHHGLSCARSAGRIPRHAELNGIIRRAFVTAGVPSVLEPSGLMRDDGKRPDGMTLIPWKVGRPLVWDATCVDTLAPSHLPGTTVQAGAAAAKAENLKRHKYSRLDRVYMFVPFAVETLGPWGPAALSLYRDLAKRLVEASGVQNAGIYFGQKLSIAIQRGNAASILGTFPSANGLLD

SEQ ID NO: 8198 - protein, 1026 aa, Erannis defoliaria
MSAAKSALSPTDDQFHTPVEDARALSPPPPLQGRRCRRQLPLPEDLDPGCLRTSPEAPVFSLFSQRDTAVQSDSQNSKNNANVSSENLVKCNQCSQSRFFKGIRGLKIHISKSHRLAQNCPNEVRNNIQNNNFQHFEELLGNLKTNLPILKRIPRGARISVAQCLINDIKRVISCNSLQAWEHLMTFPYRILHVSKNLSDQNSLTYKIKQNCKRHSNSCPDFSFPARNEDRNASPSTSYHLVENKLSEGDIRGAARILFSNDTLAPNTPGTLLALKDKHPPSAAEPLPLPASVSEEDVLTATIDDVLLAVASFPSGSAGGLDSLTPQHLKDLTSATCGEVGDSLLKEITLLVNLMLAGKVNDEIVDILYGANLCALLKKDGGIRPIAVGTVYRRLTAKICTKYIKETLCEEFQPLQLGFGSRGGCEAAVHALRTFLNHQGGEVLLKVDVQNAFNSVDRNTLLAQVKDKIPFIFNFIWQCYGNPSKLLYKNNVLSSEVGCQQGDPLGPAIFSLAIHPIIKKLESKFNVWYLDDGTLGGDVNTVFKDLQNLIKDFSDIGLVLNFSKCELFIPNYSTTPKQDIITLFGKIAPNIKVLENRSLRLLGSPILDESIQDYVDDKIQNFVSVSDRLQKLNSHMAYFLIRYCLFVPKFMYSLRCCQLWNHPAVLQQLDSIQRDTLTTILNTPFDDRTWRQASLPVRFGGLGIRKISSVSLPAFLSSVFSSTHLVNTILSPSLQNFEISFLSEAMESWKLACPKQTLPKAPTSQRQWDEPLCELECKNFIDSSSSSTERARLLAVTRWESGLWLHALPSKNVGNLLDNQTFRIAVSLRIGAPCQVPHRCSCSDIADRFGHHALSCVKSAGRIPRHASLNDIIRRAFVSAGIPSILEPNGLMRDDGKRPDGMTLIPWKMGRPLVWDATCVDTLAPSHLPRTNDHAGAAASNAENLKRHKYGYLDRLYMFVPFGVETLGPWGPAAHVLYRDLAKRLVEVSGDRNAGVYFGQKLSIAIQRGNAASILATFPSSTGLLV

SEQ ID NO: 8199 - protein, 1011 aa, Peribatodes rhomboidaria
MLSSSSPTSNDEFHTPEEASKHPTPPPTQLGQRCRRQLPLSSNVLPENKSDSVSSPSRDAALPNVPKIPNLHADVSLENQVKCDQCSELRFFKGVRGLKIHAAKAHRSVPNTHFPILDKPSNLWETLSKFKNNLPIVKRIPRGARISVANCLFLDISRVTSTNSVQAWEHLLTFPYRILHVPKNNLDQNSLTNKIKQNCINNSKSCPDFSFPPRPPSRSKSSVAYSLVEDKMAEGDIRGSARLLFSSDTMAPNTTETLLALKEKHPLSPASIPVLQDAPEENSLIATFEDISLALSSFPSGSAGGLDSLTPQHLKDLTGAGCGEIGDALLKELTALVNLMLSGKVDNSITAIIYGANLCALLKKDGGVRPIAVGTVYRRLTAKICCKNIKETLCKEFSPLQLGFGSRGGCEAAVHALRTFLNKQGGEVLVKVDVKNAFNSVHRTAFINEVKDKIPQIYNFIRQCYGTPSHLVYKNNLISSEVGCQQGDPLGPALFSLAINPIIQKLVSKFNVWYLDDGTLGGDISSVLQDLKLIISGFNKLGLSLNFSKCEIYIPQSTTYSQNEILNLFEQITPNIKLLTKKSLRLLGSPILDESIADFADEKINLFRSCSDRLGKINTHVAYFIIKYCLFVPKFTYALRCCQLWNHPLLLQQLDSIQRDTLTAILNTPFDERTWRQASLPVRFGGLGIRKISSVSLPAFLSSAFSTQHLVQDILLSSLPKIEISFLSDALESWKSACPNESLPKTPSSQRQWDGPLCVLEYKNLLHSSTSSAERARLLAVARWESGLWLHALPSKNIGNLLDKNTFRLAVSLRIGAACQVPHRCNCGDNVDRLGHHGLSCLKSAGRIPRHASLNDVIRRAFVSAGVPSVLEPNGLMRDDGKRPDGMTLIPWKVGQPLVWDATCVDTMAPSHLPGTSVQAGAAAAQAENLKRRKYAHLDRVYMFAPFGVETMGPWGPAALRLFRDLTRRLVEASGVQNAGFYFAQKLSIAIQRGNAASILGTFPSTNGLLV

SEQ ID NO: 8200 - protein, 1011 aa, Peribatodes rhomboidaria
MLSSSSPTSNDEFHTPEEASKHPTPPPTQLGQRCRRQLPLSSNVLPENKSDSVSSPSRDAALPNVPKIPNLHADVSLENQVKCDQCSELRFFKGVRGLKIHAAKAHRSVPNTHFPILDKPSNLWETLSKFKNNLPIVKRIPRGARISVANCLFLDISRVTSTNSVQAWEHLLTFPYRILHVPKNNLDQNSLTNKIKQNCINNSKSCHDFSFPPRPPSRSKSSVAYSLVEDKMAEGDIRGSARLLFSSDTKAPNTTETLLALKEKHPLSPASIPVLQDAPEENSLIATFEDISLALSSFPSGSAGGLDSLTPQHLKDLTGAGCGEIGDALLKELTALVNLMLSGKVDNSITAIIYGANLCALLKKDGGVRPIAVGTVYRRLTAKICCKNIKETLCKEFSPLQLGFGSRGGCEAAVHALRTFLNKQGGEVLVKVDVKNAFNSVHRTAFINEVKDKIPQIYNFIRQCYGTPSHLVYKNNLISSEVGCQQGDPLGPALFSLAINPIIQKLVSKFNVWYLDDGTLGGDISSVLQDLKLIISGFNKLGLSLNFSKCEIYIPQSTTYSQNEILNLFEQITPNIKLLTKKSLRLLGSPILDESIADFVDEKINLFRSCSDRLGKINTHVAYFIIKYCLFVPKFTYALRCCQLWNHPLLLQQLDSIQRDTLTAILNTPFDERTWRQASLPVRFGGLGIRKISSVSLPAFLSSAFSTQHLVQDILLSSLPKIEISFLSDALESWKSACPNESLPKTPSSQRQWDVPLCVLEYKNLLHSSTSSAERARLLAVARWESGLWLHALPSKNIGNLLDKNTFRLAVSLRIGAACQVPHRCNCGDNVDRLGHHGLSCLKSAGRIPRHASLNDVIRRAFVSAGVPSVLEPNGLMRDDGKRPDGMTLIPWKVGQPLVWDATCVDTMAPSHLPGTSVQAGAAAAQAENLKRRKYAHLDRVYMFAPFGVETMGPWGPAALGLFRDLARRLVEASGVQNAGFYFAQKLSIAIQRGNAASILGTFPSTNGLLV

SEQ ID NO: 8201 - protein, 780 aa, Peribatodes rhomboidaria
MAEGDIRGSARLLFSSDTMAPNTTETLLALKEKHPLSPASIPVLQDAPEENSLIATFEDISLALSSFPSGSAGGLDSLTLQHLKDLTGAGCGEIGDALLKELTALVNLMLSGKVDNSITAIIYGANLCALLKKDGGVRPIAVGTVYRRLTAKICCKNIKETLCKEFSPLQLGFGSRGGCEAAVHALRTFLNKQGGEVLVKVDVKNAFNSVHRTAFINEVKDKIPQIYNFIRQCYGTPSHLVYKNNLISSEVGCQQGDPLGPALFSLAINPIIQKLVSKFNVWYLDDGTLGGDISSVLQDLKLIISGFNKLGLSLNFSKCEIYIPQSTTYSQNEILNLFEQITPNIKLLTKKSLRLLGSPILDESIADFVDEKINLFRSCSDRLGKINTHVAYFIIKYCLFVPKFTYALRCCQLWNHPLLLQQLDSIQRDTLTAILNTPFDERTWRQASLPVRFGGLGIRKISSVSLPAFLSSAFSTQHLVQDILLSSLPKIEISFLSDALESWKSACPNESLPKTPSSQRQWDGPLCVLEYKNLLHSSTSSAERARLLAVARWESGLWLHALPSKNIGNLLDKNTFRLAVSLRIGAACQVPHRCNCGDNVDRLGHHGLSCLKSAGRIPRHASLNDVIRRAFVSAGVPSVLEPNGLMRDDGKRPDGMTLIPWKVGQPLVWDATCVDTMAPSHLPGTSVQAGAAAAQAENLKRRKYAHLDRVYMFAPFGVETMGPWGPAALGLFRDLARRLVEASGVQNAGFYFAQKLSIAIQRGNAASILGTFPSTNGLLV

SEQ ID NO: 8202 - protein, 791 aa, Agriopis aurantiaria
MSYRLVEDKLSEGDIRGSARLLFSSDTLAPNNLETLLALREKHPASAFNPDLPLPDGITEEDAVTATVEDLSSALASFPSGSAGGLDSLTPQHLKDLTSASCGEIGDSLLKELTSLVNLMLAGKVNDGIIEILYGANLCALLKKDGGIRPIAVGTVYRRLTAKVCVKHIKECLCKEFQPLQLGFGSRGGCEAAVHALRTYLYHQKCEVLLKVDVKNAFNSVDRNTLLAQVKDKIPFIYNFIWQCYSKPSKLMYKNNLLSSESGCQQGDPLGPAIFGLAIHPIIQKLESKFNVWYLDDGTLGGDLNTVYKDLQNLITEFNAIGLVLNFSKCELFIPNSFSSQKNETINLFEQVAPNIKVLDNRSLRLLGSPILDESIQDFIDEKIQNFQSVSDRLQKINTHMAYFIIRYCLFVPKFMYSLRCCQLWNHPLPLQQLDNIQRDTLTTILNTPFDDRTWRQASLPVRFGGLGIRKISSVSLPAFLSSVFSTQKLVNTILSPTLQNSEISYLTDALESWKIACPNQPLPKAPASQRQWDGPLCEIERQNLFDSASSSTERARLLAVTRWESGLWLHALPSKNVGNLLDNNTFRVAVSLRIGAPCQVPHRCSCSEMVDRHGHHALSCAKSAGRIPRHASLNDIIRRAFVSAGVPSVLEPNGLMRDDGKRPDGMTLIPWKMGRPVIWDATCVDTLAPSHLPGTSLQAGAAATKAENLKRHKYRFLDRVYMFVPFGVETLGPWGPAAHDLYRDLAKRLMEATCDRNAGAYFGQKISIAIQRGNAASILATFPSTEGLLD

SEQ ID NO: 8203 - protein, 1026 aa, Erannis defoliaria
MSAAKSALSPTDDQFHTPVEDARALSPPPPLQGRRCRRQLPLPEDLDPGCLRTSPEAPVFSLFSQRDTAVQSDSQNSKNNANVSSENLVKCNQCSQSRFFKGIRGLKIHISKSHRLAQNCPNEVRNNIQNNNFQHFGELLGNLKTNLPILKRIPRGARISVAQCLINDIKRVISCNSLQAWEHLMTFPYRILHVSKNLSDQNSLTYKIKQNCKQHSNSCPDFSFPARNEDRNASPSTSYHLVENKLSEGDIRGAARILFSNDTLAPNTPGTLLALKDKHPPSAAEPLPLPASVSEEDVLTATIDDVLLAVASFPSGSAGGLDSLTPQHLKDLTSATCGEVGDSLLKEITLLVNLMLAGKVNDEIVDILYGANLCALLKKDGGIRPIAVGTVYRRLTAKICTKYIKETLCEEFQPLQLGFGSRGGCEAAVHALRTFLNHQGGEVLLKVDVQNAFNSVDRNTLLAQVKDKIPFIFNFIWQCYGNPSKLLYKNNVLSSEVGCQQGDPLGPAIFSLAIHPIIKKLESKFNVWYLDDGTLGGDVNTVFKDLQNLIKDFSDIGLVLNFSKCELFIPNYSTTPKQDIITLFGKIAPNIKVLENRSLRLLGSPILDESIQDYVDDKIQNFVSVSDRLQKLNSHMAYFLIRYCLFVPKFMYSLRCCQLWNHPAVLQQLDSIQRDTLTTILNTPFDDRTWRQASLPVRFGGLGIRKISSVSLPAFLSSVFSSTHLVNTILSPSLQNFEISFLSEAMESWKLACPKQTLPKAPTSQRQWDEPLCELECKNLIDSSSSSTERARLLAVTRWESGLWLHALPSKNVGNLLDNQTFRIAVSLRIGAPCQVPHRCSCSDIADRFGHHALSCVKSAGRIPRHASLNDIIRRAFVSAGIPSILEPNGLMRDDGKRPDGMTLIPWKMGRPLVWDATCVDTLAPSHLPRTNDHAGAAASNAENLKRHKYGYLDRLYMFVPFGVETLGPWGPAAHVLYRDLAKRLVEVSGDRNAGVYFGQKLSIAIQRGNAASILATFPSSTGLLV

SEQ ID NO: 8204 - protein, 1012 aa, Peribatodes rhomboidaria
MLSSHSSPNDEFHTPEDAAGHVSPPPTHLGQRCRRQLPLLPDPRPFPSSIDSVPLSTSSQVAATQNHLQITNVSMENQVKCEQCSQPRFFKGYRGLKIHTSKVHRSAPPILDQGETVSVSTFWETLSQFKNNLPVLKRIPRGARLSVASCLVDDIKKAVSSDISNSVVAWEHLLTFPYRILHVPKNPSDSTSLTNKIKHNCIQNSKSCPVFSFPSSGPFRRKCSTPYSLVEDKMAEGDIRGSARLLFSTDTLAPDTPETLLALKEKHPTSPAEPIILDEPDVNPLVATLLDVISALSSFPSGSAGGLDGLTPQHLKDLIGAGCGEIGDALVKELTALVNLMLSGKVNDKITNILYGANLCALLKKDGGIRPIAVGTVYRRLAAKVCCKHIKESLCKEFQPLQLGYGSRGGCEAAIHALRSYLSHQTCEVLVKIDVKNAFNTVNRTILLNEVHNKIPHIYNFIRQCYGKPSNLVYKNSFISSEVGCQQGDPLGPALFSLTIHPIIKNLGSKFNVWYLDDGTLAGDVTSVYEDLKYLTTEFETIGLSLNFSKCEIFIPSFSTISKNNTLNLFEQVAPKIKLLDNTSLRLLGSPILDESLAGFVEEKINLFNICSDRLQKINSHVAFYIILYCLFVPKFMYSLRCCQFWNHTLLLQKLDNIQRNTLTTILNIAFDDHTWRQASLPVRFGGLGIRKISSVSLPAFLSSAHSTHQLVTDILASSLPNYQFSFIAEALESWQRACPDGSLPKDPSSQRQWDEPLCKLEFDNLVSSSNSPVEHARLLAAARWESGLWLHALPSRNIGTLLDNNSFRLAASLRVGAICQVPHRCVCGDMADQLGHHGLSCARSAGRIPRHAELNGIIRRAFVTAGVPSVLEPSGLMRDDGKRPDGMTLIPWKVGRPLVWDATCVDTLAPSHLPGTTVQAGAAAAKAENLKRHKYSRLDRVYMFVPFAVETLGPWGPAALSLYRDLAKRLVEASGVQNAGIYFGQKLSIAIQRGNAASILGTFPSANGLLD

SEQ ID NO: 8205 - protein, 1011 aa, Peribatodes rhomboidaria
MLSSSSPTSNDEFHTPEEASKHPTPPPTQLGQRCRRQLPLSSNVLPENKSDSVSSPSRDAALPNVPKIPNLHADVSLENQVKCDQCSELRFFKGVRGLKIHAAKAHRSVPNTHFPILDKPSNLWETLSKFKNNLPIVKRIPRGARISVANCLFLDISRVTSTNSVQAWEHLLTFPYRILHVPKNNLDQNSLTNKIKQNCINNSKSCPDFSFPPRPLSRSKSSVAYSLVEDKMAEGDIRGSARLLFSSDTMAPNTTETLLALKEKHPLSPASIPVLQDAPEENSLIATFEDISLALSSFPSGSAGGLDSLTPQHLKDLTGAGCGEIGDALLKELTALVNLMLSGKVDNSITAIIYGANLCALLKKDGGVRPIAVGTVYRRLTAKICCKNIKETLCKEFSPLQLGFGSRGGCEAAVHALRTFLNKQGGEVLVKVDVKNAFNSVHRTAFINEVKDKIPQIYNFIRQCYSTPSHLVYKNNLISSEVGCQQGDPLGPALFSLAINPIIQKLVSKFNVWYLDDGTLGGDISSVLQDLKLMISGFNKLGLSLNFSKCEIYIPQSTTYSQNEILNLFEQITPNIKLLTKKSLRLLGSPILDESIADFVDEKINLFRSCSDRLGKINSHVAYFIIKYCLFVPKFTYALRCCQLWNHPLLLQQLDSIQRDTLTAILNTPFDERTWRQASLPVRFGGLGIRKISSVSLPAFLSSAFSTQHLVQDILLSSLPKIEISFLSDALESWKSACPNESLPKTPSSQRQWDGPLCVLEYKNLLHSSTSSAERARLLAVARWESGLWLHALPSKNIGNLLDKNTFRLAVSLRIGAACQVPHRCNCGDNVDRLGHHGLSCLKSAGRIPRHASLNDVIRRAFVSAGVPSVLEPNGLMRDDGKRPDGMTLIPWKVGQPLVWDATCVDTMAPSHLPGTSVQAGAAAAQAENLKRRKYAHLDRVYMFAPFGVETMGPWGPAALGLFRDLARRLVEASGVQNAGFYFAQKLSIAIQRGNAASILGTFPSTNGLLV

SEQ ID NO: 8206 - protein, 1013 aa, Peribatodes rhomboidaria
MLSSSSPTSNDEFHTPEEASKHPTPPPTQLGQRCRRQLPLSSNVLPENKSDSVSSPSRDAALPNVPKIPNLHADVSLENQVKCDQCSELRFFKGVRGLKIHAAKAHRSVPNTQYNFPILDKPSNLWETLSKFKNNLPIVKRIPRGARISVANCLFLDISRVTSTNSVQAWEHLLTFPYRILHVPKNNLDQNSLTNKIKQNCINNSKSCPDFSFPPRPPSRSKSSVAYSLVEDKMAEGDIRGSARLLFSSDTMAPNTTETLLALKEKHPLSPASIPVLQDAPEENSLIATFEDISLALSSFPSGSAGGLDSLTPQHLKDLTGAGCGEIGDALLKELTALVNLMLSGKVDNSITAIIYGANLCALLKKDGGVRPIAVGTVYRRLTAKICCKNIKETLCKEFSPLQLGFGSRGGCEAAVHALRTFLNKQGGEVLVKVDVKNAFNSVHRTAFINEVKDKIPQIYNFIRQCYGTPSHLVYKNNLISSEVGCQQGDPLGPALFSLAINPIIQKLVSKFNVWYLDDGTLGGDISSVLQDLKLIISGFNKLGLSLNFSKCEIYIPQSTTYSQNEILNLFEQITPNIKLLTKKSLRLLGSPILDESLSDFVDEKINLFRSCSDRLGKINTHVAYFIIKYCLFVPKFTYALRCCQLWNHPLLLQQLDSIQRDTLTAILNTPFDERTWRQASLPVRFGGLGIRKISSVSLPAFLSSAFSTQHLVQDILLSSLPKIEISFLSDALESWKSACPNESLPKTPSSQRQWDGPLCVLEYKNLLHSSTSSAERARLLAVARWESGLWLHALPSKNIGNLLDKNTFRLAVSLRIGAACQVPHRCNCGDNVDRLGHHGLSCLKSAGRIPRHASLNDVIRRAFVSAGVPSVLEPNGLMRDDGKRPDGMTLIPWKVGQPLVWDATCVDTMAPSHLPGTSVQAGAAAAQAENLKRRKYAHLDRVYMFAPFGVETMGPWGPAALGLFRDLARRLVEASGVQNAGFYFAQKLSIAIQRGNAASILGTFPSTNGLLV

SEQ ID NO: 8207 - protein, 1026 aa, Erannis defoliaria
MSAAKSALSPTDDQFHTPVEDARALSPPPPLQGRRCRRQLPLPEDLDPGCLKTSPEAPVFSLFSQRDTAVQSDSQNSKNNANVSSENLVKCNQCSQSRFFKGIRGLKIHISKSHRLAQNCPNEVRNNIQNNNFQHFGELLGNLKTNLPILKRIPRGARISVAQCLINDIKRVISCNSLQAWEHLMTFPYRILHVSKNLSDQNSLTYKIKQNCKQHSNSCPDFSFPARNEDRNASPSTSYHLVENKLSEGDIRGAARILFSNDTLAPNTPGTLLALKDKHPPSAAEPLPLPASVSEEDVLTATIDDVLLAVASFPSGPAGGLDSLTPQHLKDLTSATCGEVGDSLLKEITLLVNLMLAGKVNDEIVDILYGANLCALLKKDGGIRPIAVGTVYCRLTAKICTKYIKETLCEEFQPLQLGFGSRGGCEAAVHALRTFLNHQGGEVLLKVDVQNAFNSVDRNTLLAQVKDKIPFIFNFIWQCYGNPSKLLYKNNVLSSEVGCQQGDPLGPAIFSLAIHPIIKKLESKFNVWYLDDGTLGGDVNTVFKDLQNLIKDFSDIGLVLNFSKCELFIPNYSTTPKQDIITLFGKIAPNIKVLENRSLRLLGSPILDESIQDYVDDKIQNFVSVSDRLQKLNSHMAYFLIRYCLFVPKFMYSLRCCQLWNHPAVLQQLDSIQRDTLTTILNTPFDDRTWRQASLPVRFGGLGIRKISSVSLPAFLSSVFSSTHLVNTILSPSLQNFEISFLSEAMESWKLACPKQTLPKAPTSQRQWDEPLCELECKNLIDSSSSSTERARLLAVTRWESGLWLHALPSKNVGNLLDNQTFRIAVSLRIGAPCQVPHRCSCSDIADRFGHHALSCVKSAGRIPRHASLNDIIRRAFVSAGIPSILEPNGLMRDDGKRPDGMTLIPWKMGRPLVWDATCVDTLAPSHLPRTNDHAGAAASNAENLKRHKYGYLDRLYMFVPFGVETLGPWGPAAHVLYRDLAKRLVEVSGDRNAGVYFGQKLSIAIQRCNAASILATFPSSMGLLV

SEQ ID NO: 8208 - protein, 1011 aa, Peribatodes rhomboidaria
MLSSSSPTSNDEFHTPEEASKHPTPPPTQLGQRCRRQLPLSSNVLPENKSDSVSSPSRDAALPNVPKIPNLHADVSLENQVKCDQCSELRFFKGVRGLKIHAAKAHRSVPNTHFPILDKPSNLWETLSKFKNNLPIVKRIPRGARISVANCLFLDISRVTSTNSVQAWEHLLTFPYRILHVPKNNLDQNSLTNKIKQNCINNSKSCPDFSFPPRPPSRSKSSVAYSLVEDKMAEGDIRGSARLLFSSDTMAPNTTETLLALKEKHPLLPASIPVHQDAPEENSLIATFEDISLALSSFPSGSAGGLDSLTPQHLKDLTGAGCGEIGDALLKELTALVNLMLSGKVDNSITAIIYGANLCALLKKDGGVRPIAVGTVYRRLTAKICCKNIKETLCKEFSPLQLGFGSRGGCEAAVHALRTFLNKQGGEVLVKVDVKNAFNSVHRTAFINEVKDKIPQIYNFIRQCYGTPSHLVYKNNLISSEVGCQQGDPLGPALFSLAINPIIQKLVSKFNVWYLDDGTLGGDISSVLQDLKLIISGFNKLGLSLNFSKCEIYIPQSTTYSQNEILNLFEQITPNIKLLTKKSLRLLGSPILDESIADFVDEKINLFRSLSDRLGKINTHVAYFIIKYCLFVPKFTYALRCCQLWNHPLLLQQLDSIQRDTLTAILNTPFDERTWRQASLPVRFGGLGIRKISSVSLPAFLSSAFSTQHLVQDILLSSLPKIEISFLSDALESWKSACPNESLPKTPSSQRQWDGPLCVLEYKNLLHSSTSSAERARLLAVARWESGLWLHALPSKNIGNLLDKNTFRLAVSLRIGAACQVPHRCNCGDNVDRLGHHGLSCLKSAGRIPRHASLNDVIRRAFVSAGVPSVLEPNGLMRDDGKRPDGMTLIPWKVGQPLVWDATCVDTMAPSHLPGTSVQAGAAAAQAENLKRRKYAHLDRVYMFAPFGVETMGPWGPAALGLFRDLARRLVEASGVQNAGFYFAQKLSIAIQRGNAASILGTFPSTNGLLV

SEQ ID NO: 8209 - protein, 1023 aa, Agriopis aurantiaria
MISSPPSPRRDDEIFHTPVEDSRLLSPPPHQQDRRCRRQLPLHEDDEDLLRPSPVVPNLSVTSRRDTATCADSQISKTGVSVSSENLVKCNQCSQPRFFKGNRGLKIHISKSHRSTQNFTNEFNVPNENIQDFGKLFSNCKTNLPVIKRIPRGARISVAKCLVDDIRNVILHNSTQAWEHLLSFPFRILHVSKNQSDQNSLTSKIKQNCKQNSSCPDISFASTNQDRSVPSSTSYRLVEDKLSEGDIRGSARLLFSSDTLAPNNLETLLALREKHPASAFNPDLPLPDGITEEDAVTATVEDLSSALASFPSGSAGGLDSLTPQHLKDLTSASCGEIGDSLLKELTSLVNLMLAGKVNDGIIEILYGANLCALLKKDGGIRPIAVGTVYRRLTAKVCVKHIKECLCKEFQPLQLGFGSRGGCEAAVHALRTYLYHQKCEVLLKVDVKNAFNSVDRNTLLAQVKDKIPSIYNFIWQCYSKPSKLMYKNNLLSSESGCQQGDPLGPAIFGLAIHPIIQKLESKFNVWYLDDGTLGGDLNTVYKDLQNLITEFNAIGLVLNFSKCELFIPNSFSSQKNETINLFEQIAPNIKVLDNRSLRLLGSPILDESKQDFIDEKIQNFQSVSDRLQKINTHMAYFIIRYCLFVPKFMYSLRCCQLWNHPLPLQQLDNIQRDTLTTILNTPFDDRTWRQASLPVRFGGLGIRKISSVSLPAFLSSVFSTQKLVNTILSPTLQNSKISYLTDALESWKIACPNQPLPKAPASQRQWDGPLCEIERQNLFDSASSSTERARLLAVTRWESGLWLHALPSKNVGNLLDNNTFRVAVSLRIGAPCQVPHRCSCSEMVDRHGHHALSCAKSAGRIPRHASLNDIIRRAFVSAGVPSVLEPNGLMRDDGKRPDGMTLIPWKMGRPVIWDATCVDTLAPSHLPGTSLQAGAAATKAENLKRHKYRFLDRVYMFVPFGVETLGPWGPAAHDVYRDLAKRLMEATCDRNAGAYFGQKISIAIQRGNAASILATFPSTEGLLD

SEQ ID NO: 8210 - protein, 1014 aa, Agriopis aurantiaria
MLSPSSPTSNDEFHTPEEVARLLSPPPPQLGQRCRRQLPLPVDNALPKSESASVTSPSRDTAIQNVSQIQNLNANVSLENLVKCDQCSQPRFFKGIRGLKIHVSKAHRAAPNSNTHSQITDNPSSFWETLSKFKNNLPIVKRIPRGARISVANCLFQDIRSVTSTNSVRAWEHLLTFPYRILHVSKDSLDQNSLTNKIKQNCQNNSKSCPEFSFPPRPPSRSKCPVAYSLVEDKMAEGDIRGSARLLFSSDTMAPCTPETLLALKEKHPLSPASISLLPDAPEENSLVATFEDVSQAVSSFPSGSAGGLDSLTPQHLKDLMGAGCGEIGDALLKELTALVNLMLAGKVDNNITALLYGANLCALLKKDGGIRPIAVGTVYRRLTAKICCKNIKESLCEEFSPLQVGFGSRGGCEAAVHALRTFLNHQGGEVLVKVDVKNAFNSVHRTVFLKEVKDKIPHIYNFIQQCYGTPTNLVYKNNLISSEVGCQQGDPLGPALFSLAIHPIIQKLESKFNVWYLDDGTLGGEISTVYKDLESIISGFNNLGLSLNFSKCEIYIPQSTTNSQNEILNCFQKLTPNIKLLTSKSLRLLGAPILDDSIADFVDEKINLFRSCSDRLEKINTHVAYFIIKYCLFVPKFTYALRCCQLWNHPLLLQQLDSIQRDTLTTILNIPFDERPWSQASLPVRFGGLGIRKISSVSLPAFLSSAFSTQNLVQDILQPSLQNFQISSLSDALESWKTACPSESLPKAPSSQRQWDGPLCVLEYKNLLDSTTSSAERARLLAVARWESGLWLHALPSRNIGNLFDKITFCLAVSLRIGAACQVPHRCNCGDNVDRLGHHGLSCIKSAGRIPRHASLNDVIRRAFVSAGVPSVLEPNGLMRDDGKRPDGMTLIPWKVGQPLVWDATCVDTMAPSHLPATSVQAGAAAAQAENLKRRKYAHLDRVYMFAPFGVETMGPWGPAAMGLYRDLARRLVEASGVQNAGFYFAQKLSIAIQRGNAASILGTFPSTNGLLV

SEQ ID NO: 8211 - protein, 1023 aa, Agriopis aurantiaria
MISSPPSPRRDDEIFHTPVEDSRLLSPPPHQQDRRCRRQLPLHEDDEDLLRPSPVVPTLSVTSRRDTATCADSQISKTGVSVSSENLVKCNQCSQPRFFKGNRGLKIHISKSHRSTQNFTNEFNVPNENIQDFGKLLSNCKTNMPVIKRIPRGARISVAKCLVDDIRNVILHNSTQAWEHLLSFPFRILHVSKNQSDQNSLTSKIKQNCKQNSSCPDISFASTNQDRSVPSSTSYRLVEDKLSEGDIRGSARLLFSSDTLAPNNLETLLALREKHPASAFNPDLPLPDGITEEDAVTATVEDLSSALASFPSGSAGGLDSLTPQHLKDLTSASCGEIGDSLLKELTSLVNLMLAGKVNDGIIEILYGANLCALLKKDGGIRPIAVGTVYRRLTAKVCVKHIKECLCKEFQPLQLGFGSRGGCEAAVHALRTYLYHQKCEVLLKVDVKNAFNSVDRNTLLAQVKDKIPSIYNFIWQCYSKPSKLMYKNNLLSSESGCQQGDPLGPAIFGLAIHPIIQKLESKFNVWYLDDGTLGGDLNTVYKDLQNLITEFNAIGLVLNFSKCELFIPNSFSSQKNETINLFEQIAPNIKVLDNRSLRLLGSPILDESIQDFIDEKIQNFQSVSDRLQKINTHMAYFIIRYCLFVPKFMYSLRCCQLWNHPLPLQQLDNIQRYTLTTILNTPFDDRTWRQASLPVRFGGLGIRKISSVSLPAFLSSVFSTQKLVNTILSPTLQNSEISYLTDALESWKIACPNQPLPKAPASQRQWDGPLCEIERQNLFDSASSSTERARLLAVTRWESGLWLHALPSKNIGNLLDNNTFRVAVSLRIGAPCQVPHRCSCSEMVDRHGHHALSCAKSAGRIPRHASLNDIIRRAFVSAGVPSVLEPNGLMRDDGKRPDGMTLIPWKMGRPVIWDATCVDTLAPSHLPGTSLQAGAAATKAENLKRHKYRFLDRVYMFVPFGVETLGPWGPAAHDLYRDLAKRLMEATCDRNAGAYFGQKISIAIQRGNAASILATFPSTEGLLD

SEQ ID NO: 8212 - protein, 842 aa, Erannis defoliaria
MTFPYRILHVSKNLSDQNSLTYKIKQNCKQHSNSCPDFSFPARNEDRNASPSTSYHLVENKLSEGDIRGAARILFSNDTLAPNTPGTLLALKDKHPPSAAEPLPLPASVSEEDVLTATIDDVLLAVASFPSGSAGGLDSLTPQHLKDLTSATCGEVGDSLLKEITLLVNLMLAGKVNDEIVDILYGANLCALLKKDGGIRPIAVGTVYRRLTAKICTKYIKETLCEEFQPLQLGFGSRGGCEAAVHALRTFLNHQGGEVLLKVDVQNAFNSVDRNTLLAQVKDKIPFIFNFIWQCYGNPSKLLYKNNVLSSEVGCQQGDPLGPAIFSLAIHPIIKKLESKFNVWYLDDGTLGGDVNTVFKDLQNLIKDFSDIGLVLNFSKCELFIPNYSTTPKQDIITLFGKIAPNIKVLENRSLRLLGSPILDESIQDYVDDKIQNFVSVSDRLQKLNSHMAYFLIRYCLFVPKFMYSLRCCQLWNHPAVLQQLDSIQRDTLTTILNTPFDDRTWRQASLPVRFGGLGIRKISSVSLPAFLSSVFSSTHLVNTILSPSLQNFEISFLSEAMESWKLACPKQTLPKAPTSQRQWDEPLCELECKSLIYSSSSSTERARLLAVTRWESGLWLHALPSKNVGNLLDNQTFRIAVSLRIGAPCQVPHRCSCSDIADRFGHHALSCVKSAGRIPRHASLNDIIRRAFVSAGIPSILEPNGLMRDDGKRPDGMTLIPWKMGRPLVWDATCVDTLAPSHLPRTNDHAGAAASNAENLKRHKYGYLDRLYMFVPFGVETLGPWGPAAHVLYRDLAKRLVEVSGDRNAGVYFGQKLSIAIQRGNAASILATFPSSTGLLV

SEQ ID NO: 8213 - protein, 1011 aa, Peribatodes rhomboidaria
MLSSSSPTSNDEFHTPEEASKHPTPPPTQLGQRCRRQLPLSSNVLPGNKSDSVSSPSRDAALPNVPKIPNLHADVSLENQVKCDQCSELRFFKGVRGLKIHAAKAHRSVPNTHFPILDKPSNLWETLSKFKNNLPIVKRIPRGARISVANCLFLDISRVTSTNSVQAWEHLLTFPYRILHVPKNNLDQNSLTNKIKQNCINNSKSCPDFSFPPRPPSRSKSSVAYSLVEDKMAEGDIRGSARLLFSSDTMAPNTTETLLALKEKHPLSPASIPVLQDAPEENSLIATFEDISLALSSFPSGSAGGLDSLTPQHLKDLTGAGCGEIGDALLKELTALVNLMLSGKVDNSVTAIIYGANLCALLKKDGGVRPIAVGTVYRRLTAKICCKNIKETLCKEFSPLQLGFGSRGGCEAAVHALRTFLNKQGGEVLVKVDVKNAFNSVHRTAFINEVKDKIPQIYNFIRQCYGTPSHLVYKNNLISSEVGCQQGDPLGPALFSLAINPIIQKLVSKFNVWYLDDGTLGGGISSVLQDLKLIISGFNKLGLSLNFSKCEIYIPQSTTYSQNEILNLFEQITPNIKLLTKKSLRLLGSPILDESIADFVDEKINLFRSCSDRLGKINTHVAYFIIKYCLFVPKFTYALRCCQLWNHPLLLQQLDSIQRDTLTAILNTPFDERTWRQASLPVRFGGLGIRKISSVSLPAFLSSAFSTQHLVQNILLSSLPKIEISFLSDALESWKSACPNESLPKTPSSQRQWDGPLCVLEYKNLLHSSTSSAERARLLAVARWESGLWLHALPSKNIGNLLDKNTFRLAVSLRIGAACQVPHRCNCGDNVDRLGHHGLSCLKSAGRIPRHASLNDVIRRAFVSAGVPSVLEPNGLMRDDGKRPDGMTLIPWKVGQPLVWDATCVDTMAPSHLPGTSVQAGAAAAQAENLKRRKYAHLDRVYMFAPFGVETMGPWGPAALGLFRDLARRLVEASGVQNAGFYFAQKLSIAIQRGNAASILGTFPSTNGLLV

SEQ ID NO: 8214 - protein, 1023 aa, Agriopis aurantiaria
MISSPPSPRRDDEIFHTPVEDSRLLSPPPHQQDRRCRRQLPLHEDDEDLLRPSPVVPNLSVTSRRDTATCADSQISKTGVSVSSENLVKCNQCSQPRFFKGNRGLKIHISKSHRSTQNFTNEFNVPNENIQDFGKLLSDCKTNLPVIKRIPRGARISVAKCLVDDIRNVILHNSTQAWEHLLSFPFRILHVSKNQSDQNSLTSKIKQNCKQNSSCPDISFASTNQDRSVPTSMSYRLVEDKLSEGDIRGSARLLFSSDTLAPNNLETLLALREKHPASAFNPDLPLPDGITEEDAVTATVEDLSSALASFPSGSAGGLDSLTPQHLKDLTSASCGEIGDSLLKELTSLVNLMLAGKVNDGIIEILYGANLCALLKKDGGIRPIAVGTVYRRLTAKVCVKHIKECLCKEFQPLQLGFGSRGGCEAAVHALRTYLYHQKCEVLLKVDVKNAFNSVDRNTLLAQVKDKIPSIYNFIWQCYSKPSKLMYKNNLLSSESGCQQGDPLGPAIFGLAIHPIIQKLESKFNVWYLDDGTLGGDLNTVYKDLQNLITEFNAIGLVLNFSKCELFIPNSFSSQKNETINLFEQVAPNIKVLDNRSLRLLGSPILDESIQDFIDEKIQNFQSVSDRLQKINTHMAYFIIRYCLFVPKFMYSLRCCQLWNHPLPLQHLDNIQRDTLTTILNTPFDDRTWRQASLPVRFGGLGIRKISSVSLPAFLSSVFSTQKLVNTILSPTLQNSEISYLTDALESWKIACPNQPLPKAPASQRQWDGPLCEIERQNLFDSASSSTERARLLAVTRWESGLWLHALPSKNVGNLLDNNTFRVAVSLRIGAPCQVPHRCSCSEMVDRHGHHALSCAKSAGRIPRHASLNDIIRRAFVSAGVPSVLEPNGLMRDDGKRPDGMTLIPWKMGRPVIWDATCVDTLAPSHLPGTSLQAGAAATKAENLKRHKYRFLDRVYMFVPFGVETLGPWGPAGHDLYRDLAKRLMEATCDRNAGAYFGQKISIAIQRGNAASILATFPSTEGLLD

SEQ ID NO: 8215 - protein, 1014 aa, Agriopis aurantiaria
MLSPSSPTSNDEFHTPEEVARPLSPPPPQLGRRCRRQLPLPVDNALPKSESASVTSPSRDTAILNVSQIQKLNANVSLENLVKCDQCSQPRFFKGIRGLKIHVSKAHRAAPNSNTHSQITDNPSSFWETLSKFKNNLPIVKRIPRGARISVANCLFQDIRSVTSTNSVRAWEHLLTFPYRILHVSKDSLDQNSLTNKIKQNCQNNSKSCPEFSFPPRPPSRSKCPVAYSLVEDKMAEGDIRGSARLLFSSDTMAPCTPETLLALKEKHPLSPASISLLPDAPEENSLVATFEDVSQAVSSFPSGSAGGLDSLTPQHLKDLIGAGCGEIGDALLKELTALVNLMLAGKVDNNITALLYGANLCALLKKDGGIRPIAVGTVYRRLTAKICCKNIKESLCEEFSPLQVGFGSRGGCEAAVHALRTFLNHQGGEVLVKVDVKNAFNSVHRTVFLKEVKDKIPHIYNFIQQCYGTPTNLVYKNNLISSEVGCQQGDPLGPALFSLAIHPIIQKLESKFNVWYLDDGTLGGEISTVYKDLESIISGFNNLGLSLNFSKCEIYIPQSTTNSQNEILNCFEKLTPNIKLLTSKSLRLLGAPILDNSIADFVDEKINFFRSCSDRLEKINTHVAYFIIKYCLFVPKFTYALRCCQLWNHPLLLQQLDSIQRDTLTTILNIPFDERAWSQASLPVRFGGLGIRKISSVSLPAFLSSAFSTQNLVQDILQPSLQNFEISSLSDALESWKTACPSESLPKAPSSQRQWDGPLCVLEYKNLLDSTTSSAERARLLAVARWESGLWLHALPSRNIGNLLDKITFCLAVSLRIGAACQVPHRCNCGDNVDRLGHHGLSCIKSAGRIPRHASLNDVIRRAFVSAGVPSVLEPNGLMRDDGKRPDGMTLIPWKVGQPLVWDATCVDTMAPSHLPATSVQAGAAAAQAENLKRRKYAHLDRVYMFAPFGVETMGPWGPAAMGLYRDLARRLVEASGVQNAGFYFAQKLSIAIQRGNAASILGTFPSTNGLLV

SEQ ID NO: 8216 - protein, 1052 aa, Erannis defoliaria
MGLDGAVCNKCPPNIYLFLIIYFIAYMSAAKSALSPTDDQFHTPVEDARALSPPPPLQGRRCRRQLPLPEDLDPGCLRTSPEAPVFSLFSQRDTAVQSDSQNSKNNANVSSENLVKCNQCSQSRFFKGIRGLKIHISKSHRLAQNCPNEVRNNIQNNNFQHFGELLGNLKTNLPILKRIPRGARISVAQCLINDIKRVISCNSLQAWKHLMTFPYRILHVSKNLSDQNSLTYKIKQNCKQHSNSCPDFSFPARNEDRNASPSTSYHLVENKLSEGDIRGAVRILFSNDTLAPNTPGTLLALKDKHPPSAAEPLPLPASVSEEDVLTATIDDVLLAVASFPSGSAGGLDSLTPQHLKDLTSATCGEVGDSLLKEITLLVNLMLAGKVNDEIVDILYGANLCALLKKDGGIRPIAVGTVYRRLTAKICTKYIKETLCEEFQPLQLGFGSRGGCEAAVHALRTFLNHQGGEVLLKVDVQNAFNSVDRNTLLAQVKDKIPFIFNFIWQCYGNPSKLLYKNNVLSSEVGCQQGDPLGPAIFSLAIHPIIKKLESKFNVWYLDDGTLGGDVNTVFKDLQNLIKDFSDIGLVLNFSKCELFIPNYSTTPKQDIITLFGKIAPNIKVLENRSLRLLGSPILDESIQDYVDDKIQNFVSVSDRLQKLNSHMAYFLIRYCLFVPKFMYSLRCCQLWNHPAVLQQLDSIQRDTLTTILNTPFDDRTWRQASLPVRFGGLGIRKISSVSLPAFLSSVFSSTHLVNTILSPSLQNFEISFLSEAMESWKLACPKQTLPKAPTSQRQWDEPLCELECKNLIDSSSSSTERARLLAVTRWESGLWLHALPSKNVGNLLDNQTFRIAVSLRIGAPCQVPHRCSCSDIADRFGHHALSCVKSAGRIPRHASLNDIIRRAFVSAGIPSILEPNGLMRDDGKRPDGMTLIPWKMGRPLVWDATCVDTLAPSHLPRTNDHAGAAASNAENLKRHKYGYLDRLYMFVPFGVETLGPWGPAAHVLYRDLAKRLVEVSGDRNAGVYFGQKLSIAIQRGNAASILATFPSSTGLLV

SEQ ID NO: 8217 - protein, 1011 aa, Peribatodes rhomboidaria
MLSSSSPTSNDEFHTPEEASKHPTPPPTQLGQRCRRQLPLSSNVLPENKSDSVSTPSRDAALPNVPKIPNLHADVSLENQVKCDQCSELRFFKGVRGLKIHAAKAHQSVPNTHFPILDKPSNLWETLSKFKNNLPIVKRIPRGARISVANCLFLDISRVTSTNSVQAWEHLLTFPYRILHVPKNNLDQNSLTNKIKQNCINNSKSCPDFSFPPRPPSRSKGSVAYSLVEDKMAEGDIRGSARLLFSSDTMAPNTTETLLALKEKHPLSPASIPVLQDAPEENSLIATFEDISLALSSFPSGSAGGLDSLTPQHLKDLTGAGCGEIGDALLKELTALVNLMLSGKVDNSITAIIYGANLCALLKKDGGVRPIAVGTVYRRLTAKICCKNIKETLCKEFSPLQLGFGSRGGCEAAVHALRTFLNKQGGEVLVKVDVKNAFNSVHRTAFINEVKDKIPQIYNFIRQCYGTPSHLVYKNNLFSSEVGCQQGDPLGPALFSLAINPIIQKLVSKFNVWYLDDGTLGGDISSVLQDLKLIISGFNKLGLSLNFSKCEIYIPQSTTYSQNEILNLFEQITPNIKLLTKKSLRLLGSPILDESIADFVDEKINLFRSCSDRLGKINTHVAYFIIKYCLFVPKFTYALRCCQLWNHPLLLQQLDSIQRDTLTAILNTPFDERTWRQASLPVRFGGLGIRKISSVSLPAFLSSAFSTQHLVQDILLSSLPKIETSFLSDALESWKSACPNESLPKTPSSQRQWDGPLCVLEYKNLLHSSTSSAERARLLAVARWESGLWLHALPSKNIGNLLDKNTFRLAVSLRIGAACQVPHRCNCGDNVDRLGHHGLSCLKSAGRIPRHASLNDVIRRAFVSAGVPSVLEPNGLMRDDGKRPDGMTLIPWKVGQPLVWDATCVDTMAPSHLPGTSVRAGAAAAQAENLKRRKYALLDRVYMFAPFGVETMGPWGPAALGLFRDLARRLVEASGVQNAGFYFAQKLSIAIQRGNAASILGTFPSTNGLLV

SEQ ID NO: 8218 - protein, 1026 aa, Erannis defoliaria
MSAAKSALSPTDDQFHTPVEDARALSPPPPLQGRRCRRQLPLPEDLDPGCLRASPEAPVFSLFSQRDTAVQSDSQNSKNNANVSSENLVKCNQCSQSRFFKGIRGLKIHISKSHRLAQNCPNEVRNNIQNNNFQHFGELLGNLKTNLPILKRIPRGARISVAQCLINDIKRVISCNSLQAWKHLMTFPYRILHVSKNLSDQNSLTYKIKQNCKQHSNSCPDFSFPARNEDRNASPSTSYHLVENKLSEGDIRGAARILFSNDTLAPNTPGTLLALKDKHPPSAAEPLPLPASVSEEDVLTATIDDVLLAVASFPSGSAGGVDSLTPHHLKDLTSATCGEVGDSLLKEITLLVNLMLAGKVNDEIVDILYGANLCALLKKDGGIRPIAVGTVYRRLTAKICTKYIKETLCEEFQPLQLGFGSRGGCEAAVHALRTFLNHQGGEVLLKVDVQNAFNSVDRNTLLAQVNDKIPFIFNFIWQCYGNPSKLLYKNNVLSSEVGCQQGDPLGPAIFSLAIHPIIKKFESKFNVWYLDDGTLGGDVNTVFKDLQNLIKDFSDIGLVLNFSKCELFIPNYSTTPKQDIITLFGKIAPNIKVLENRSLRLLGSPILDESFQDYVDDKIQNFVSVSDRLQKLNSHMAYFLIRYCLFVPKFMYSLRCCQLWNHPAVLQQLDSIQRDTLTTILNTPFDDRTWRQASLPVRFGGLGIRKISSVSLPAFLSSVFSSTHLVNTILSPSLQNFEISFLSEAMESWKLACPKQTLPKAPTSQRQWDEPLCELECKNLIDSSSSSTERARLLAVTRWESGLWLHALPSKNVGNLLDNQTFRIAVSLRIGAPCQVPHRCSCSDIADRFGHHALSCVKSAGRIPRHASLNDIIRRAFVSAGIPSILEPNGLMRDDGKRPDGMTLIPWKMGRPLVWDATCVDTLAPSHLPRTNDHAGAAASNAENLKRHKYGYLDRLYMFVPFGVETLGPWGPAAHVLYRDLAKRLVEVSGDRNAGVYFGQKLSIAIQRGNAASILATFPSSTGLLV

SEQ ID NO: 8219 - protein, 1023 aa, Agriopis aurantiaria
MISSPPSPRRDDEIFHTPVEDSRLLSPPPHQQDRRCRRQLPLHEDDEDLLRPSPVVPNLSVTSRRDTATCADSQISKTGVSVSSENLVKCNQCSQPRFFKGNRGLKIHISKSHRSTQNFTNEFNVPNENIQDFGKLLSNCKTNLPVIKRIPRGARISVAKCLVDDIRNVILHNSTQAWEHLLSFPFRILHVSKNQSDQNSLTSKIKQNCKQNSSCPDISFASTNQDRSVPSSMSYRLVEDKLSEGDIRGSARLLFSSDTLAPNNLETLLALREKHPASAFNPDLPLPDGITEEDAVTATVEDLSSALASFPSGSAGGLDSLTPQHLKDLTSASCGEIGDSLLKELTSLVNLMLAGKVNDGIIEILYGANLCALLKKDGGIRPIAVGTVYRRLTAKVCVKHIKECLCKEFQPLQLGFGSRGGCEAAVHALRTYLYHQKCEVLLKVDVKNAFNSVDRNTLLAQVKDKIPSIYNFIWQCYSKPSKLMYKNNLLSSESGCQQGDPLGPAIFGLAIHPIIQKLESKFNVWYLDDGTLGGDLNTVYKDLQNLITEFNAIGLVLNFSKCELFIPNFFSSQKNETINLFEQVAPNIKVLDNRSLRLLGSPILDESIQDFIDEKIQNFQSVSDRLQKINTHMAYFIIRYCLFVPKFMYSLRCCQLWNHPLPLQQLDNIQRDTLTTILNTPFDDRTWRQASLPVRFGGLGIRKISSVSLPAFLSSVFSTQKLVNTILSPTLQNSEISYLTDALESWKIACPNQPLPKAPASQRQWDGPLCEIERQNLFDSASSSTERARLLAVTRWESGLWLHALPSKNVGNLLDNNTFRVAVSLRIGAPCQVPHRCSCSEMVDRHGHHALSCAKSAGRIPRHASLNDIIRRAFVSAGVPSVLEPNGLMRDDGKRPDGMTLIPWKMGRPVIWDATCVDTLAPSHLPGTSLQAGAAATKAENLKRHKYRFLDRVYMFVPFGVETLGPWGPAAHDLYRDLAKRLMEATCDRNAGAYFGQKISIAIQRGNAASILATFPSTEGLLD

SEQ ID NO: 8220 - protein, 963 aa, Agriopis aurantiaria
MISFTKGGDTAILNVSQIQKLNANVSLENLVKCDQCSQPRFFKGIRGLKIHVSKAHRAAPNSNTHSQITDNPSSFWETLSKFKNNLHIVKRIPRGARISVANCLFQDIRSVTSTNSVRAWEHLLTFPYRILHVSKDSLDQNSLTNKIKQNCQNNSKSCPEFSFPPRPPSRSKCPVAYSLVEDKMAEGDIRGSARLLFSSDTMAPCTPETLLALKEKHPLSPASISLLPDAPEENSLVATFEDVSQAVSSFPSGSAGGLDSLTPQHLKDLIGAGCGEIGDALLKELTALVNLMLAGKVDNNITALLYGANLCALLKKDGGIRPIAVGTVYRRLTAKICCKNIKESLCEEFSPLQVGFGSRGGCEAAVHALRTFLNHQGGEVLVKVDVKNAFNSVHRTVFLKEVKDKIPHIYNFIQQCYGTPTNLVYKNNLISSEVGCQQGDPLGPALFSLAIHPIIQKLESKFNVWYLDDGTLGGEISTVYKDLESIISGFNNLGLSLNFSKCEIYIPQSTTNSQNEILNCFEKLTPNIKLLTSKSLRLLGAPILDNSIADFVDEKIIFFRSCSDRLEKINTHVAYFIIKYCLFVPKFTYALRCCQLWNHPLLLQQLDSIQRDTLTTILNIPFDERAWSQASLPVRFGGLGIRKISSVSLPAFLSSAFSTQNLVQDILQPSLQNFEISSLSDALESWKTACPSESLPKAPSSQRQWDGPLCVLEYKNLLDSTTSSAERARLLAVARWESGLWLHALPSRNIGNLLDKITFCLAVSLRIGAACQVPHRCNCGDNVDRLGHHGLSCIKSAGRIPRHASLNDVIRRAFVSAGVPSVLEPNGLMRDDGKRPDGMTLIPWKVGQPLVWDATCVDTMAPSHLPATSVQAGAAAAQAENLKRRKYAHLDRVYMFAPFGVETMGPWGPAAMGLYRDLARRLVEASGVQNAGFYFAQKLSIAIQRGNAASILGTFPSTNGLLV

SEQ ID NO: 8221 - protein, 1026 aa, Erannis defoliaria
MSAAKSTLSPTDDQFHTPVEDARALSPPPPLQGRRCRRQLPLPEDLDPGCLRTSPEAPVFSLFSQRDTAVQSDSQNSKNNANVSSENLVKCNQCSQSRFFKGIRGLKIHISKSHRLAQNCPNEVRNNIQNNNFQHFGELLGNLKTNLPILKRIPRGARISVAQCLINDIKRVISCNSLQAWKHLMTFPYRILHVSKNLSDQNSLTYKIKQNCKQHSNSCPDFSFPARNEDRNASPSTSYHLVENKLSEGDIRGAARILFSNDTLAPNTPGTLLALKDKHPPSAAEPLPLPASVSEEDVLTATINDVLLAVASFPSGSAGGLDSLTPQHLKDLTSATCGEVGDSLLKEITLLVNLMLAGKVNDEIVDILYGANLCGLLKKDGGIRPIAVGTVYRRLTAKICTKYIKETLCEEFQPLQLGFGSRGGCEAAVHALRTFLNHQGGEVLLKVDVQNAFNSVDRNTLLAQVKDKIPFIFNFIWQCYGNPSKLLYKNNVLSSEVGCQQGDPLGPAIFSLAIHPIIKKLESKFNVWYLDDGTLGGDVNTVFKDLQNLIKDFSDIGLVLNFSKCELFIPNYSTTPKQDIITLFGKIAPNIKVLENRSLRLLGSPILDESIQDYVDDKIQNFVSVSDRLQKLNSHMAYFLIRYCLFVPKFMYSLRCCQLWNHPEVLQQLDSIQRDTLTTILNTPFDDRTWRQASLPVRFGGLGIRKISSVSLPAFLSSVFSSTHLVNTILSPSLQNFEISFLSEAMESWKLACPKQTLPKAPTSQRQWDEPLCELECKNLIDSSSSSTEHARLLAVTRWESGLWLHALPSKNVGNLLDNQTFRIAVSLRIGAPCQVPHRCSCSDIADRFGHHALSCVKSAGRIPRHASLNDIIRRAFVSAGIPSILEPNGLMRDDGKRPDGMTLIPWKMGRPLVWDATCVDTLAPSHLPRTNDHAGAAASNAENLKRHKYGYLDRLYMFVPFGVETLGPWGPAAHVLYRDLAKRLVEVSGDRNAGVYFGQKLSIAIQRGNAASILATFPSSTGLLV

SEQ ID NO: 8222 - protein, 1026 aa, Erannis defoliaria
MSAAKSALSPTDDQFHTPVEDARALSPPPPLQGRRCRRQLPLPEDLDPGCLRTSPEAPVFSLFSQRDTAVQSDSQNSKNNANVSSENLVKCNQCSQSRFFNGIRGLKIHISKSHRLAQNCPNEVRNNIQNNNFQHFGELLGNLKTNLPILKRIPRGARISVAQCLINDIKRVISCNSLQAWEHLMTFPYRILHVSKNLSDQNSLTYKIKQNCKQHSNSCPDFSFPARNEDRNASPSTSYHLVENKLSEGDIRGAARILFSNDTLAPNTPGTLLALKDKHPPSAAEPLPLPASVSEEDVLTATIDDVLLAVASFPSGSAAGLDSLTPQHLKDLTSATCGEVGDSLLKEITLLVNLMLAGKVNDEIVDILYGANLCALLKKDGGIRPIAVGTVYRRLTAKICTKYIKETLCEEFQPLQLGFGSRGGCEAAVHALRTFLNHQGGEVLLKVDVQNAFNSVDRNTLLAQVKDKIPFIFNFIWQCYGNPSKLLYKNNVLSSEVGCQQGDPLGPAIFSLAIHPIIKKFESKFNVWYLDDGTLGGDVNTVFKDLQNLIKDFSDIGLVLNFSKCELFIPNYSTTPKQDIITLFGKIAPNIKVLENRSLRLLGSPILDESIQDYVDDKIQNFVSVSDRLQKLNSHMAYFLIRYCLFVPKFMYSLRCCQLWNHPAVLQQLDSIQRDTLTTILNTPFDDRTWRQASLPVRFGGLGIRKISSVSLPAFLSSVFSSTHLVNTILSPSLQNFEISFLSEAMESWKLACPKQTLPKAPTSQRQWDEPLCELECKNLIDSSSSSTERARLLAVTRWESGLWLHALPSKNVGNLLDNQTFRIAVSLRIGAPCQVPHRCSCSDIADRFGHHALSCVKSAGRIPRHASLNDIIRRAFVSAGIPSILEPNGLMRDDGKRPDGMTLIPWKMGRPLVWDATCVDTLAPSHLPRTNDHAGAAASNAENLKRHKYGYLDRLYMFVPFGVETLGPWGPAAHVLYRDLAKRLVEVSGDRNAGVYFGQKLSIAIQRGNAASILATFPSSTGLLV

SEQ ID NO: 8223 - protein, 1023 aa, Agriopis aurantiaria
MISSPLSPRRDDEIFHTPVEDSRLLSPPPHQQDRRCRRQLPLHEDDEDLLRPSPVVPNLSVTSRRDTATCADSQISKTGVSVSSENLVKCNQCSQPRFFKGNRGLKIHISKSHRSTQNFTNEFNVPNENIQDFGKLLSNCKTNLPVIKRIPRGARISVAKCLVDDIRNVILHNSTQAWEHLLSFPFRILHVSKNQSDQNSLTSKIKQNCKQNSSCPDISFASTNQDRFVPSSTSYRLVEDKLSEGDIRGSARLLFSSDTLAPNNLETLLALREKHPASAFNPDLTLPDGITEEDAVTATVEDLSSALASFPSGSAGGLDSLTPQHLKDLTSASCGEIGDSLLKELTSLVNLMLAGKVNDGIIEILYGANLCALLKKDGGIRPIAVGTVYRRLTAKVCVKHIKECLCKEFQPSQLGFGSRGGCEAAVHALRTYLYHQKCEVLLKVDVKNAFNSVDRNTLLAQVKDKIPSIYNFIWQCYSKPSKLMYKNNLLSSESGCQQGDPLGPAIFGLAIHPIIQKLESKFNVWYLDDGTLGGDLNTVYKDLQNLITEFNAIGLVLNFSKCELFIPNSFSSQKNETVNLFEQIAPNIKVLDNRSLRLLGSPILDESIQDFIDEKIQNFQSVSDRLQKINTHMAYFIIRYCLFVPKFMYSLRCCQLWNHPLPLQQLDNIQRDTLTTILNTPFDDRTWRQASLPVRFGGLGIRKISSVSLPAFLSSVFSTQKLVNTILSPTLQNSEISYLTDALESWKIACPNQPLPKAPASQRQWDGPLCEIERQNLFDSASSSTERARLLAVTRWESGLWLHALPSKNVGNLLDNNTFRVAVSLRIGAPCQVPHRCSCSEMVDRHGHHALSCAKSAGRIPRHASLNDIIRRAFVSAGVPSVLEPNGLMRDDGKRPDGMTLIPWKMGRPVIWDATCVDTLAPSHLPGTSFQAGAAATKAENLKRHKYRFLDRVYMFVPFGVETLGPWGPAAHDLYRDLAKRLMEATCDRNAGAYFGQKISIAIQRGNAASILATFPSTEGLLD

SEQ ID NO: 8224 - protein, 1023 aa, Agriopis aurantiaria
MISSPLSPRRDDEIFHTPVEDSRLLSPPPHQQDRRCRRQLPLHEDDEDLLRPSPVVPNLSVTSRRDTATCADSQISKTGVSVSSENLVKCNQCSQPRFFKGNRGLKIHISKSHRSTQNFTNEFNVPNENIQDFGKLLSNCKTNLPVIKRIPRGARISVAKCLVDDIRNVILHNSTQAWEHLLSFPFRILHVSKNQSDQNSLTSKIKQNCKQNSSCPDISFASTNQDRFVPSSTSYRLVEDKLSEGDIRGSARLLFSSDTLAPNNLETLLALREKHPASAFNPDLPLPDGITEEDAVTATVEDLSSALASFPSGSAGGLDSLTPQHLKDLTSASCGEIGDSLLKELTSLVNLMLAGKVNYGIIEILYGANLCALLKKDGGIRPIAVGTVYRRLTAKVCVKHIKECLCKEFQPSQLGFGSRGGCEAAVHALRTYLYHQKCEVLLKVDVKNAFNSVDRNTLLAQVKDKIPSIYNFIWQCYSKPSKLMYKNNLLSSESGCQQGDPLGPAIFGLAIHPIIQKLESKFNVWYLDDGTLGGDLNTVYKDLQNLITEFNAIGLVLNFSKCELFIPNSFSSQKNETVNLFEQIAPNIKVLDNRSLRLLGSPILDESIQDFIDEKIQNFQSVSDRLQKINTHMAYFIIRYCLFVPKFMYSLRCCQLWNHPLPLQQLDNIQRDTLTTILNTPFDDRTWRQASLPVRFGGLGIRKISSVSLPAFLSSVFSTQKLVNTILSPTLQNSEISYLTDALESWKIACPNQPLPKAPASQRQWDGPLCEIERQNLFDSASSSTERARLLAVTRWESGLWLHALPSKNVGNLLDNNTFRVAVSLRIGAPCQVPHRCSCSEMVDRHGHHALSCAKSAGRIPRHASLNDIIRRAFVSAGVPSVLEPNGLMRDDGKRPDGMTLIPWKMGRPVIWDATCVDTLAPSHLPGTSFQAGAAATKAENLKRHKYRFLDRVYMFVPFGVETLGPWGPAAHDLYRDLAKRLMEATCDRNAGAYFGQKISIAIQRGNAASILATFPSTEGLLD

SEQ ID NO: 8225 - protein, 1026 aa, Erannis defoliaria
MSAAKSALSPTDDQFHTPVEDARDLSPPPPLQGRRCRRQLPLPEDLDPGCLRTSPEAPVFSLFSQRDTAVQSDSQNSKNNANVSSENLVKCNQCSQSRFFKGIRGLKIHISKSHRLAQNCPNEVRNNIQNNNFQHFGELLGNLKTNLPILKRIPRGARISVAQCLINDIKRVISCNSLQAWEHLMTFPYRILHVSKNLSDQNSLTYKIKQNCKQHSNSCPDFSFPARNEDRNASPSTSYHLVENKLSEGDIRGAARILFSNDTLAPNTPGTLLALKDKHPPSAAEPLPLPASVSEEDVLTATIDDVLLAVASFPSGSAGGLDSLTPQHLKDLTSATCGEVGDSLLKEITLLVNLMLAGKVNDEIVDILYGANLCALLKKDGGIRPIAVGTVYRRLTAKICTKYIKETLCEEFQPLQLGFGSRGGCEAAVHALRTFLNHQGGEVLLKVDVQNAFNSVDRNTLLAQVKDKIPFIFNFIWQCYGNPSKLLYKNNVLSSEVGCQQGDPLGPAIFSLAIHPIIKKLESKFNVWYLDDGTLGGDVNTVFKDLQNLIKDFSDIGLVLNFSKCELFIPNYSTTLKQDIITLFGKIAPNIKVLENRSLRLLGSPILDESIQDYVDDKIQNFVSVSDRLQKLNSHMAYFLIRYCLFVPKFMYSLRCCQLWNHPAVLQQLDSIQRDTLTTILNTPFDDRTWRQASLPVRFGGLGIRKISSVSLPAFLSSVFSSTHLVNTILSPSLQNFEISFLSEAMESWKLACPKQTLPKAPTSQRQWDEPLCELECKNLIDSSSSSTERARLLAVTRWESGLWLHALPSKNVGNLLDNQTFRIAVSLRIGAPCQVPHRCSCSDIADRFGHHALSCVKSAGRIPRHASLNDIISRAFVSAGIPSILEPNGLMRDDGKRPDGMTLIPWKMGRPLVWDATCVDTLAPSHLPRTNDHAGAAASNAENLKRHKYGYLDRLYMFVPFGVETLGPWGPAAHVLYRDLAKRLVEVSGDRNAGVYFGQKLSIAIQRGNAASILATFPSSTGLLV

SEQ ID NO: 8226 - protein, 1026 aa, Erannis defoliaria
MSAAKSALSPTDDQFHTPVEDARALSPPPPLQGRRCRRQLPLPEDLDPGCLRTSPEAPVFSLFSQRDTAVQSDSQNSKNNANVSSENLVKCNQCSQSRFFKGIRGLKIHISKSHRLAQNCPNEVRNNIQNNNFQHFGELLGNLKTNLPILKRIPRGARISVAQCLINEIKRVISCNSLQAWEHLMTFPYRILHVSKNLSDQNSLTYKIKQNCKQHSNSCPDFSFPARNEDRNASPSTSYHLVENKLSEGDIRGAARILFSNDTLAPNTPGTLLALKDKHPPSAAEPLPLPASVSEEDVLTATIDDVLLAVASFPSGSAGGLDSLTPQHLKDLTSATCGEVGDSLLKEITLLVNLMLAGKVNDEIVDILYGANLCALLKKDGGIRPIAVGTVYRRLTAKICTKYIKETLCEEFQPLQLGFGSRGGCEAAVHALRTFLNHQGGEVLLKVDVQNAFNSVDRNTLLAQVKDKIPFIFNFIWQCYGNPSKLLYKNNVLSSEVGCQQGDPLGPAIFSLAIHPIIKKLESKFNVWYLDDGTLGGDVNTVFKDLQNLIKDFSDIGLVLNFSKCELFIPNYSTTPKQDIITLFGKIAPNIKVLENRSLRLLGSPILDESIQDYVDDKIQNFVSVSDRLQKLNSHMAYFLIRYCLFVPKFMYSLRCCQLWNHPAVLQQLDSIQRDTLTTILNTPFDDRTWRQASLPVRFGGLGIRKISSVSLPAFLSSVFSSTHLVNTILSPSLQNFEISFLSEAMESWKLACPKQTLPKAPTSQRQWDEPLCELECKNLIDSSSSSTERARLLAVTRWESGLWLHALPSKNVGNLLDNQTFRIAVSLRIGAPCQVPHRCSCSDIADRFGHHALSCVKSAGRIPRHASLNDIIRRAFVSAGIPSILEPNGLMRDDGKRPDGMTLIPWKMGRPLVWDATCVDTLAPSHLPRTNDHAGAAASNAENLKRHKYGYLDRLYMFVPFGVETLGPWGPAAHVLYRDLAKRLVEVSGDRNAGVYFGQKLSIAIQRGNAASILATFPSSTGLFV

SEQ ID NO: 8227 - protein, 1014 aa, Agriopis aurantiaria
MLSPSSPTSNDEFHTPEEVARLLSPPPPQLGQRCRRQLPLPVDNALPKSESASVTSPSRDTAILNVSQIQNLNANVSLENLIKCDQCSQPRFFKGIRGLKIHVSKAHRAAPNINTHSQITDNPSSFWETLSKFKNNLPIVKRIPRGARISVANCLFQDIRSVTSTNSVRAWEHLLTFPYRILHVSKDSLDQNSLTNKIKQNCQNNSKSCPEFSFPPRPPSRSKCPVAYSLVEDKMAEGNIRGSARLLFSSDTMAPCTPETLLALKEKHPLSPASISLLPDAPEENSLVATFEDVSQAVSSFPSGSAGGLDSLTPQHLKDLIGAGCGEIGDALLKELTALVNLMLAGKVDNNITALLYGANLCALLKKDGGIRPIAVGTVYRRLTAKICCKNIKESLCEEFSPLQVGFGSRGGCEAAVHALRTFLNHQGGEVLVKVDVKNAFNSVHRTVFLKEVKDKIPHIYNFIQQCYGTPTNLVYKNNLISSEVGCQQGDPLGPALFSLAIHPIIQKLESKFNVWYLDDGTLGGEISTVYKDLESIISGFNNLGLSLNFSKCEIYIPQSTTNSQNEILNCFEKLTPNIKLLTSKSLRLLGAPILDDSIADFVDEKINLFRSCSDRLEKINTHVAYFIIKYCLFVPKFTYALRCCQLWNHPLLLQQLDSIQRDTLTTILNIPFDERAWSQASLPVRFGGLGIRKISSVSLPAFLSSAFSTQNLVQDILQPSLQNFQISSLSDALESWKTACPSESLPKAPSSQRQWDGPLCVLEYKNLLDSTTSSAERARLLAVARWESGLWLHALPSRNIGNLLDKITFCLAVSLRIGAACQVPHRCNCGDNVDRLGHHGLSCIKSAGRIPRHASLNDVIRRAFVSAGVPSVLEPNGLMRDDGKRPDGMTLIPWKMGQPLVWDATCVDTMAPSHLPGTSVQAGAAAAQAENLKRRKYAHLDRVYMFAPFGVETMGPWGPAAMGLYRDLARRLVEASGVQNAGFYFAQKLSIAIQRGNAASILGTFPSTNGLLV

SEQ ID NO: 8228 - protein, 1014 aa, Agriopis aurantiaria
MLSPSSPTSNDEFHTPEEVARLLSPPPPQLGQRCRRQLPLPVDNALPKSESASVTSPSRDTAILNVSQIQNLNANVSLENLIKCDQCSQPRFFKGIRGLKIHVSKAHRAAPNINTHSQITDNPSSFWETLSKFKNNLPIVKRIPRGARISVANCLFQDIRSVTSTNSVRAWEHLLTFPYRILHVSKDSLDQNSLTNKIKQNCQNNSKSCPEFSFPPRPPSRSKCPVAYSLVEDKMAEGDIRGSARLLFSSDTMAPCTPETLLALKEKHPLSPASISLLPDAPEENSLVATFEDVSQAVSSFPSGSAGGLDSLTPQHLKDLIGAGCGEIGDALLKELTALVNLMLAGKVDNNITALLYGANLCALLKKDGGIRPIAVGTVYRRLTAKICCKNIKESLCEEFSPLQVGFGSRGGCEAAVHALRTFLNHQGGEVLVKVDVKNAFNSVHRTVFLKEVKDKIPHIYNFIQQCYGTPTNLVYKNNLISSEVGCQQGDPLGPALFSLAIHPIIQKLESKFNVWYLDDGTLGGEISTVYKDLESIISGFNNLGLSLNFSKCEIYIPQSTTNSQNEILNCFEKLTPNIKLLTSKSLRLLGAPILDDSIADFVDEKINLFRSCSDRLEKINTHVAYFIIKYCLFVPKFTYALRCCQLWNHPLLLQQLDSIQRNTLTTILNIPFDERAWSQASLPVRFGGLGIRKISSVSLPAFLSSAFSTQNLVQDILQPSLQNFQISSLSDALESWKTACPSESLPKAPSSQRQWDGPLCVLEYKNLLDSTTSSAERARLLAVARWESGLWLHALPSRNIGNLLDKITFCLAVSLRIGAACQVPHRCNCGDNVDRLGHHGLSCIKSAGRIPRHASLNDVIRRAFVSAGVPSVLEPNGLMRDDGKRPDGMTLIPWKVGQPLVWDATCVDTMAPSHLPGTSVQAGAAAAQAENLKRRKYAHLDRVYMFAPFGVETMGPWGPAAMGLYRDLARRLVEASGVQNAGFYFAQKLSIAIQRGNAASILGTFPSTNGLLV

SEQ ID NO: 8229 - protein, 1028 aa, Erannis defoliaria
MWLIFKIDNYIIIHIQFHTPVEDARALSPPPPLQGRRCRRQLPLPEDLDPGCLRTSPEAPVFSLFSQRDTAVQSDSQNSKNNANVSSENLVKCNQCSQSRFFKGIRGLKIHISKSHRLAQNCPNEVRNNIQNNNFQHFGELLGNLKTNLPILKRIPRGARISVAQCLINDIKRVISCNSLQDWKHLMTFPYRILHVSKNLSDQNSLTYKIKQNCKQHSNSCPDFSFPARNEDRNASPSTSYHLVENKLSEGDIRGAARILFSNDTLAPNTPGTLLALKDKHPPSAAEPLPLPASVSEEDVLTATIDDVLLAVASFPSGSAGGLDSLTPQHLKDLTSATCGEVGDSLLKEITLLVNLMLAGKVNDEIVDILYGANLCALLKKDGGIRPIAVGTVYRRLTAKICTKYIKETLCEEFQPLQLGFGSRGGCEAAVHALRTFLNHQGGEVLLKVDVQNAFNSVDRNTLLAQVKDTIPFIFNFIWQCYGNPSKLLYKNNVLSSEVGCQQGDPLGPAIFSLAIHPIIKKLESKFNVWYLDDGTLGGDVNTVFKDLQNLIKDFSDIGLVLNFSKCELFIPNYSTTPNQDIITLFGKIAPNIKVLENRSLRLLGSPILDESIQDYVDDKIQNFVSVSDRLQKLNSHMAYFLIRYCLFVPKFMYSLRCCQLWNHPAVLQQLDSIQRDTLTTILNTPFDDRTWRQASLPVRFGGLGIRKISSVSLPAFLSSVFSSTHLVNTILSPSLQNFEISFLSEAMESWKLACPKQTLPKAPTSQRQWDEPLCELECKNLIDSSSSSTERARLLAVTRWESGLWLHALPSKNVGNLLDNQTFRIAVSLRIGAPCQVPHRCSCSDIADRFGHHALSCVKSAGRIPRHASLNDIIRRAFVSAGIPSILEPNGLMRDDGKRPDGMTLIPWKMGRPLVWDATCVDTLAPSHLPRTNDHAGAAASNAENLKRHKYGYLDRLYMFVPFGVETLGPWGPAAHVLYRDLAKRLVEVSGDRNAGVYFGQKLSIAIQRGNAASILATFPSSTGLLV

SEQ ID NO: 8230 - protein, 1015 aa, Erannis defoliaria
MTNFIPPSKTPELCRLRRLYRVGVVGDNCLFLKTLILDALEHHQKPQFSLYYHKGNTAVQSDSQNSKNNANVSSENLVKCNQCSQSRFFKGIRGLKIHISKSHRLAQNCPNEVRNNIQNNNFQHFGELLGNLKTNLPILKRIPRGARISVAQCLINDIKRVISCNSLQAWEHLMTFPYRILHVSKNLSDQNSLTYKIKQNCKQHSNSCPDFSFPARNEDRNASPSTSYHLVENKLSEGDIRGAARILFSNDTLAPNTPGTLLALKDKHPPSAAEPLPLPASVSEEDVLTATIDDVLLAVAFFPSGSAGGLDSLTPQHLKDLTSATCGEVGDSLLKEITLLVNFMLAGKVNDEIVDILYGANLCALLKKDGGIRSIAVGTVYRRLTAKICTKYIKETLCEEFQPLQLGFGSRGGCEAAVHALRTFLNHQGGEVLLKVDVQNAFNSVDRNTLLAQVKDKIPFIFNFIWQCYGNPSKLLYKNNVLSSEVGCQQGDPLGPAIFSLAIHPIIKKLESKFNVWYLDDGTLGGDVNTVFKDLQNLIKDFSDIGLVLNFSKCELFIPNYSTTPKQDIITLFGKIAPNIKVLENRSLRLLGSPILDESIQDYVDDKIQNFVSVSDRLQKLNSHKAYFLIRYCLFVPKFMYSLRCCQLWNHPAVLQQLDSIQRDTLTTILNTPFDDRTWRQASLPVRFGGLGIRKISSVSLPAFLSSVFSSTDLVNTILSSSLQNFEISFLSEAMESWKLACPKQTLPEAPTSQRQWDEPLCELECKYLIDSSSSSTERARLLAVTRWESGLWLHALPSKNVGNLLDNQTFRIAVSLRIGAPCQVPHRCSCSDIADRFGHHALSCVKSAGRIPRHASLNDIIRRAFVSAGIPSILEPNGLMRDDGKRPDGMALIPWKMGRPLVWDATCVDTLAPSHLPRTNDHAGAAASNAENLKRHKYGYLDRLYMFVPFGVETLGPWGPAAHLLYRDLAKRLVEVSGDRNAGVYFGQKLSIAIQRGNAASILATFPSSTGLLV

SEQ ID NO: 8231 - protein, 1011 aa, Peribatodes rhomboidaria
MLSSSSPTSNDEFHTPEEASKHPTPPPTQLGQRCRRQLPLSSNVLPENKSDSVSSSSRDAALPNVPKIPNLHADVSLENQVKCDQCSELRFFKGVRGLKIHAAKAHRSVPNTHFPILDKPSNLWETLSKFKNNLPIVKRIPRGARISVANCLFLDISRVTSTNSVQAWEHLLTFPYRILHVPKNNLDQNSLTNKIKQNCINNSKSCPDFSFPPRPPSRSKSSVAYSLVEDKMAEGDIRGSARLLFSSDTMAPNTTETLLALKEKHPLSPASIPVHQDAPEENSLITTFEDISLALSSFPSGSAGGLDSLTPQHLKDLTGAGCGEIGDALLKELTALVNLMLSGKVDNSITAIIYGANLCALLKKDGGVRPIAVGTVYRRLTAKICCKNIKETLCKEFSPLQLGFGSRGGCEAAVHALRTFLNKQGGEVLVKVDVKNAFNSVHRTAFINEVKDKIPQIYNFIRQCYGTPSHLVYKNNLISSEVGCQQGDPLGPALFSLAINPIIQKLVSKFNVWYLDDGTLGGDISSVLQDLKLIIFGFNKLGLSLNFSKCEIYIPQSTTYSQNEILNLFEQITPNIKLLTKKSLRLLGSPILDESIADFVDEKINLFRSCSDRLGKINTHVAYFIIKYCLFVPKFTYALRCCQLWNHPLLLQQLDSIQRDTLTAILNTPFDERTWRQASLPVRFGGLGIRKISSVSLPAFLSSAFSTQHLVQDILLSSLPKIEISFLSDALESWKSACPNESLPKTPSSQRQWDGPLCVLEYKNLLHSSTSSAERARLLAVARWESGLWLHALPSKNIGNLLDKNTFRLAVSLRIGAACQVPHRCNCGDNVDRLGHHGLSCLKSAGRIPRHASLNDVIRRAFVSAGVPSVLEPNELMRDDGKRPDGMTLIPWKVGQPLVWDATCVDTMAPSHLPGTSVQAGAAAAQAENLKRRKYAHLDRVYMFAPFGVETMGPWGPAALGLFRDLARRLVEASGVQNAGFYFAQKLSIAIQRGNAASILGTFPSTNGLLV

SEQ ID NO: 8232 - protein, 1011 aa, Peribatodes rhomboidaria
MLSSSSPTSNDEFHTPEEASKHPTPPPTQLGQRCRRQLPLSSNVLPENKSDSVSSPSRDAALPNVPKIPNLHADVSLENQVKCDQCSELRFFKGVRGLKIHAAKAHRSVPNTHFPILDKPSNLWETLSKFKNNLPIVKRIPRGARISVANCLFLDISRVTSTNSVQAWEHLLTFPYRILYVPKNNLDQNSLTNKIKQNCINNSKSCPDFSFPPRPPSRSKSSVAYSLVEDKMAEGDIRGSARLLFSSDTMAPNTTETLLALKEKHPLSPASIPVLQDAPEENSLIATFEDISLALSSFPSGSAGGLDSLTPQHLKDLTGAGCGEIGDALLKELTALVNLMLSGKVDNSITAIIYGANLCALLKKDGGVRPIAVGTVYRRLTAKICCKNIKETLCKEFSPLQLGFGSRGGCEAAVHALRTFLNKQGGEVLVKVDVKNDFNSVHRTAFINEVKDKIPQIYNFIRQCYGTPSHLVYKNNLISSEVGCQQGDPLGPALFSLAINPIIQKLVSKFNVWYLDDGTLGGDISSVLQDLKLIISGFNKLGLSLNFSKCEIYIPQSTTYSQNEILNLFEQITPNIKLLTKKSLRLLGSPILDESIADFVDEKINLFRSCSDRLGKINTHVAYFIIKYCLFVPKFTYALRCCQLWNHPLLLQQLDSIQRDTLTAILNTPFDERTWRQASLPVRFGGLGIRKISSVSLPAFLSSAFSTQHLVQDILLSSLPKIEISFLSDALESWKSACPNESLPKTPSSQRQWDGPLCVLEYKNLLHSSTSSAERARLLAVARWESGLWLHVLPSKNIGNLLDKNTFRLAVSLRIGAACQVPHRCNCGDNVDRLGHHGLSCLKSAGRIPRHASLNDVIRRAFVSAGVPSVLEPNGLMRDDGKRPDGMTLIPWKVGQPLVWDATCVDTMAPSHLPGTSVQAGAAAAQAENLKRRKYAHLDRVYMFAPFGVETMGPWGPAALGLFRDLARRLVEASGVQNAGFYFAQKLSIAIQRGNAASILGTFPSTNGLLV

SEQ ID NO: 8233 - protein, 1023 aa, Agriopis aurantiaria
MISSPPSPRRDDEIFHTPVEDSRLLSPPPHQQDRRCRRQLPLHEDDEDLLRPSPVVPNLSVTSRRDTATCADSQISKTGVSVSSENLVKCNQCSQPRFFKGNRGLKIHISKSHRSTQNFTNEFNVPNENIQDFGKLLSNCKTNLPVIKRIPRGARISVAKCLVDDIRNVILHNSTQAWEHLLSFPFRILHVSKNQSDQNSLTSKIKQNCKQNSSCPDISFASTNQDRSVPSSMSYRLVEDKLSEGDIRGSARLLFSSDTLAPNNLETLLALREKHPASAFNPDLPLPDGITEEDAVTATVEDLSSALASFPSGSAGGLDSLTPQHLKDLTSASCGEIGDSLLKELTSLVNLMLAGKVNDGIIEILYGANLCALLKKDGGIRPIAVGTVYRRLTAKVCVKHIKECLCKEFQPLQLGFGSRGGCEAAVHALRTYLYHQKCEVLLKVDVKNAFNSVDRNTLLAQVKDKIPFIYNFIWQCYSKPSKLMYKNNLLSSESGCQQGDPLGPAIFGLAIHPIIQKLESKFNVWYLDDGTLGGDLNTVYKDLQNLITEFNAIGLVLNFSKCELFIPNSFSSQKNETINLFEQVAPNIKVLDNRSLRLLGSPILDESIQDFIDEKIQNFQSVSDRLQKINTHMAYFIIRYCLFVPKFMYSLRCCQLWNHPLPLQQLDNIQRDTLTTILNTPFDDRTWRQASLPVRFGGLGIRKISSVSLPAFLSSVFSTQKLVNTILSPTLQNSEISYLTDALESWKIACPNQPLPKAPASQRQWDGPLCEIERQNLFDSASSSTERARLLAVTRWESGLWLHALPSKNVGNLLDNNTFRVAVSLRIGAPCQVPHRCSCSEMVDRHGHHALSCAKSAGRIPRHASLNDIIRRAFVSAGVPSVLEPNGLMRDDGKRPDGMTLIPWKMGRPVIWDATCVDTLAPSHLPGTSLQAGAAATKAENLKRHKYRFLDRVYMFVPFGVETLGPWGPAAHDLYRDLAKRLMEATCDRNAGAYFGQKISIAIQRGNAASILATFPSTEGLLD

SEQ ID NO: 8234 - protein, 1028 aa, Erannis defoliaria
MSAAKSALSPTDDQFHTPVEDARALSPPPPLQGRRCRRQLPLPEDLDPGCLRTSPEAPVFSLLSQRAVKKAVQSDSQNSKNNANVSSENLVKCNQCSQSRFFKGIRGLKIHISKSHRLAQNCPNEVRNNIQNNNFQLFGELLGNLKTNLPILIRIPRGARISVAQCLINDIKRVISCNSLQAWEHLMTFPYRILHVSKNLSDQNSLTYKIKQNCKQHSNSCPDFSFPARNEDRNASPSTSYHLVENKLSEGDIRGAARILFSNDTLAPNTPGTLLALKDKHPPSAAEPLPLPVSVSEEDVLTATIDDVLLAVASFPSGSAGGLDSLTPQHLKYLTSATCGEVGDSLLKEITLLVNFMLAGKVNDEIVDILYGANLSALLKKDGGIRPIAVGTVYRRLTAKICTKYIKETLCEEFQPLQLGFGSRGGCEAAVHALRTFLNHQGGEVLLKVDVQNAFNSVDRNTLLAQVKDKIPFIFNFIWQCYGNPSKLLYKNNVLSSEVGCQQGDPLGPAIFSLAIHPIIKKLESKFNVWYLDDGTLGGDVNTVFKDLQNLIKDFSDIGLVLNFSKCELFIPNYSTTPKQDIITLFGKIAPNIKVLENRSLRLLGSPILDESIQDYVDDKIQNFVSVSDRLQKLNSHMAYFLIRYCLFVPKFMYSLRCCQLWNHPAVLQQLDSIQRDTLTTILNTPFDDRTWRQASLPVRFGGLGIRKISSVSLPAFLSSVFSSTHLVNTILSSSLQNFEISFLSEAMESWKLACPKQTLPKAPTSQRQWDEPLCELECKNLIDSSSSSTERARLLAVTRWESGLWLHALPSKNVGNLLDNQTFRIAVSLRIGAPCQVPHRCSCSDIADRFGHHALSCVKSAGRIPRHASLNDIIRRAFVSAGIPSILEPNGLMRDDGKRPDGMTLIPWKMRRPLVWDATCVDTLAPSHLPRTNDHAGAAASNAENLERHKYGYLDRLYMFVPFGVETLGPWGPAAHLLYRDLAKRLVEVSGDRNAGVYFGQKLSIAIQRGNAASILATFPSSTGLLV

SEQ ID NO: 8235 - protein, 1026 aa, Erannis defoliaria
MSAAKSALSPTDDQFHTPVEDARALSPPPPLQGRRCRRQLPLPEDLDPGCLRTSPEAPVFSLLSQRDTAVQSDSQNSKNNANVSSENLVKCNQCSQSRFFKGIRGLKIHISKSHRLAQNCPNEVRNNIQNNNFQHFGELLGNLKTNLPILKRIPRGARISVAQCLINDIKRVISCNSLQAWEHLMTFPYRILHVSKNLSDQNSLTYKIKQNCKQHSNSCPDFSFPARNEDRNASPSTSYHLVENKLSEGDIRGAARILFSNDTLAPNTPGTLLALKDKHPPSAAEPLPLPASVSEEDVLTATIDDVLLAVASFPSGSAGGLDSLTPQHLKDLTSATCGEVGDSLLKEITLLVNLMLAGKVNDEIVDILYGAKLCALLKKDGGIRPIAVGTVYRRLTAKICTKYIKETLCEEFQPLQLGFGSRGGCEAAVHALRTFLNHQGGEVLLKVDVQNAFNSVDRNTLLAQVKDKIPFIFNFIWQCYGNPSKLLYKNNVLSSEVGCQQGDPLGPAIFSLAIHPIIKKLESKFNVWYLDDGTLGGDVNTVFKDLQNLIKDFSDIGLVLNFSKCELFIPNYSTTPKQDIITLFGKIAPNIKVLENRSLRLLGSPILDESIQDYVDDKIQNFVSVSDRLQKLNSHMAYFLIRYCLFVPKFMYSLRCCQLWNHPAVLQQLDSIQRDTLTTILNTPFDDRTWRQASLPVRFGGLGIRKISSVSLPAFLSSVFSSTHLVNTILSPSLQNFEISFLSEAMESWKLACPKQTLPKAPTSQRQWDEPLCELECKNLIDSSSSSTERARLLAVTRWESGLWLHALPSKNVGNLLDNQTFRIAVSLRIGAPCQVPHRCSCSDIADRFGHHALSCVKSAGRIPRHASLNDIIRRAFVSAGIPSILEPNGLMRDDGKRPDGMTLIPWKMGRPLVWDATCVDTLAPSHLPRTNGHAGAAASNAENLKRHKYGYLDRLYMFVPFGVETLGPWGPAAHLLYRDLAKRLVEVSGDRNAGVYFGQKLSIAIQRGNAASILATFPSSTGLLV

SEQ ID NO: 8236 - protein, 1023 aa, Erannis defoliaria
MSAAKSALSPTDDQFHTPVEDARALSPPPPLQGRRCRRQLPLPEDLDPGCLRTSPEAPVFSLFSQRDTAVQSDSQNSKNNANVSSENLVKCSQSRFFKGIRGLKIHISKSHRLAQNCPNEVRNNIQNNNFQHFGELLGNLKTNLPILKRIPRGARISVAQCLINDIKRVISCNSLQAWKHLMTFPYRILHVSKNLSDQNSLTYKIKQNCKQHSNSCPDFSFPARNEDRNASPSTSYHLVENKLSEGDIRGAARILFSNDTLAPNTPGTLLALKDKHPPSAAEPLPLPASVSEEDVLTATIDDVLLAVASFPSGSAGGLDSLTPQHLKDLSSATCGEVGDSLLKEITLLVNLMLAGKVNDEIVDILYGANLCALLKKDGGIRPIAVGTVYRRLTAKICTKYIKETLCEEFQPLQLGFGSRGGCEAAVHALRTFLNHQGGEVLLKVDVQNAFNSVDRNTLLAQVKDKIPFIFNFIWQCYGNPSKLLYKNNVLSSEVGCQQGDPLGPAIFSLAIHPIIKKLESKFNVWYLDDGTLGGDVNTVFKDLQNLIKDFSDIGLVLNFSKCELFIPNYSTTPKQDIITLFGKIAPNIKVLENRSLRLLGSPILDESIQDYVDDKIQNFVSVSDRLQKLNSHMAYFLIRYCLFVPKFMYSLRCCQLWNHPAVLQQLDSIQRDTLTTILNTPFDDRTWRQASLPVRFGGLGIRKISSVSLPAFLSSVFSSTHLVNTILSPSLQNFEISFLSEAMESWKLACPKQTLPKAPTSQRQWDEPLCELECKSLIDSSSSSTERARLLAVTRWKSGLWLHALPSKNVGNLLDNQTFRIAVSLRIGAPCQVPHRCSCSDIADRFGHHALSCVKSAGRISRHASLNDIIRRAFVSAGITSILEPNGLMRDDGKRPDGMTLIPWKMGRPLVWDATCVDTLAPSHLPRTNDHAGAAASNAENLKRHKYGYLDRLYMFVPFGVETLGPWGPAAHVLYRDLAKRLVEVSGDRNAGVYFGQKLSIAIQRGNAASILATFPSSTGLLV

SEQ ID NO: 8237 - protein, 842 aa, Erannis defoliaria
MTFPYRILHVSKNLSDQNSLTYKIKQNCKQHSNSCPDFSFPARNEDRNASPSTSYHLVENKLSEGDIRGAARILFSNDTLAPNTPGTLLALKDKHPPSAAEPLPLPASVPEEDVLTATIDDVLLAVASFPSGSAGGLDSLTPQHLKDLTSATCGEVGDSLLKEITLLVNLMLAGKVNDEIVDILYGANLCALLKKDGGIRPIAVGTVYRRLTAKICTKYIKETLCEEFQPLQLGFGSRGGCEAAVYALRTFLNHQGGEVLLKVDVQNAFNSVDRNTLLAQVKDKIPFIFNFIWQCYGNPSKLLYKNNVVSSEVGCQQGDPLGPAIFSLAIHPIIKKLESKFNVWYLDDGTLGGDVNTVFKDLQNLIKDFSDIGLVLNFSKCELFIPNYSTTPKQDIITLFGKIAPNIKVLENRSLRLLGSPILDESIQDYVDDKIQNFVSVSDRLQKLNSHMAYFLIRYCLFVPKFMYSLRCCQLWNHPAVLQQLDSIQRDTLTTILNTPFDDRTWRQASLPVRFGGLGIRKISSVSLPAFLSSVFSSTHLVNTILSPSLQNFEISFLSEAMESWKLACPNQTLPKAPTSQRQWDEPLCELECKNLIDSSSSSTERARLLAVTRWESGLWLHALPSKNVGNLLDNQTFRIAVSLRIGAPCQVPHRCSCSDIADRFGHHALSCVKSAGRIPRHASLNDIIRRAFVSAGIPSILEPNGLMRDDGKRPDGMTLIPWKMGRPLVWDATCVDTLAPSHLPRTNGHAGAAASNAENLKRHKYGYLDRLYMFVPFGVETLGPWGPAAHVLYRDLAKRLVEVSGDRNAGVYFGQKLSIAIQRGNAASILATFPSSTGLLV

SEQ ID NO: 8238 - protein, 672 aa, Agriopis aurantiaria
MLAGKVNDGIIEILYGANLCALLKKDGGIRPIAVGTVYRRLTAKVCVKHIKECLCKEFQPSQLGFGSRGGCEAAVHALRTYLYHQKCEVLLKVDVKNAFNSVDRNTLLAQVKDKIPSIYNFIWQCYSKPSKLMYKNNLLSSESGCQQGDPLGPAIFGLAIHPIIQKLESKFNVWYLDDGTLGGDLNTVYKDLQNLITEFNAIGLVLNFSKCELFIPNSFSSQKNETVNLFEQIAPNIKVLDNRSLRLLGSPILDESIQDFIDEKIQNFQSVSDRLQKINTHMAYFIIRYCLFVPKFMYSLRCCQLWNHPLPLQQLDNIQRDTLTTILNTPFDDRTWRQASLPVRFGGLGIRKISSVSLPAFLSSVFSTQKLVNTILSPTLQNSEISYLTDALESWKIACPNQPLPKAPASQRQWDGPLCEIERQNLFDSASSSTERARLLAVTRWESGLWLHALPSKNVGNLLDNNTFRVAVSLRIGAPCQVPHRCSCSEMVDRHGHHALSCAKSAGRIPRHASLNDIIRRAFVSAGVPSVLEPNGLMRDDGKRPDGMTLIPWKMGRPVIWDATCVDTLAPSHLPGTSFQAGAAATKAENLKRHKYRFLDRVYMFVPFGVETLGPWGPAAHDLYRDLAKRLMEATCDRNAGAYFGQKISIAIQRGNAASILATFPSTEGLLD

SEQ ID NO: 8239 - protein, 1026 aa, Erannis defoliaria
MSAAKSALSPTDDQFHTPVEDARALSPPPPLQGRRCRRQLPLPEDLDPGCLRTSPEAPVFSLFSQRDTAVQSDSQNSKNNANVSSENLVKCNQCSQSRFFKGIRGLKIHISKSHRLAQNCPNEVRNNIQNNNFQHFGELLGNLKTNLPILKRIPRGARISVAQCLINDIKRVISCNSLQDWKHLMTFPYRILHVSKNLSDQNSLTYKIKQNCKQHSNSCPDFSFPARNEDRNASPSTSYHLVENKLSEGDIRGAARILFSNDTLAPNTPGTLLALKDKHPPSAAEPLPLPASVSEEDVLTATIDDVLLAVASFPSGSAGGLDSLTPQHLKDLTSATCGEVGDSLLKEITLLVNLMLAGKVNDEIVDILYGANLCALLKKDGGIRPIAVGTVYRRLTAKICTKYIKETLCEEFQPLQLGFGSRGGCEAAVHALRTFLNHQGGEVLLKVDVQNAFNSVDRNTLLAQVKDKIPFIFNFIWQCYGNPSKLLYKNNVLSSEVGCQQGDPLGPAIFSLAIHPIIKKLESKFNVWYLDDGTLGGDVNTVFKDLQNLIKDFSDIGLVLNFSKCELFIPYYSTTPNQDIITLFGKIAPNIKVLENRSLRLLGSPILDESIQDYVDDKIQNFVSVSDRLQKLNSHMAYFLIRYCLFVPKFMYSLRCCQLWNHPAVLQQLDSIQRDTLTTILNTPFDDRTWRQASLPVRFGGLGIRKISSVSLPAFLSSVFSSTHLVNTILSPSLQNFEISFLSEAMESWKLACPKQTLPKAPTSQRQWDEPLCELECKNLIDSSSSSTERARLLAVTRWESGLWLHALPSKNVGNLLDNQTFRIAVSLRIGAPCQVPHRCSCSDIADRFGHHALSCVKSAGRIPRHASLNDIIRRAFVSAGIPSILEPNGLMRDDGKRPDGMTLIPWKMGRPLVWDATCVDTLAPSHLPRTNDHAGAAASNAENLKRHKYGYLDRLYMFVPFGVETLGPWGPAAHVLYRDLAKRLVEVSGDRNAGVYFGQKLSIAIQRGNAASILATFPSSTGLLV

SEQ ID NO: 8240 - protein, 1012 aa, Peribatodes rhomboidaria
MLSSHSSPNDEFHTPEDAAGHVSPPPTHLGQRCRPQLPLLPDPRPFPSSIDSVPLSTSSQVAATQNHLQITNVSMENQVKCEQCSQPRFFKGYRGLKIHTSKVHRSAPPILDQGETVSVSTFWETLSQLKNNLPVLKRIPRGARLSVASCLVDDIKKAVSSDISNSVVAWEHLLTFPYRILHVPKNPSDSTSLTNKIKHNCIQNSKSCPVFSFPSSGPFRRKCSTPYSLVEDKMAEGDIRGSARLLFSTDTLAPDTPETLLALKEKHPTSPAEPIILDEPDVNPLVATPLDVISALSSFPSGSAGGLDGLTPQHLKDLIGAGCGEIGDALVKELTALVNLMLSGKVNDKITNILYGANLCALLKKDGGIRPIAVGTVYRRLAAKVCCKHIKESLCKEFQPLQLGYGSRGGCEAAIHALRSYLSHQTCEVLVKIDVKNAFNTVNRTILLYEVHNKIPHIYNFIRQCYGKPSNLVYKNSFISSEVGCQQGDPLGPALFSLTIHPIIKNLGSKFNVWYLDDGTLAGDVTSVYEDLKYLTTEFETIGLSLNFSKCEIFIPSFSTISKNNTLNLFEQVAPKIKLLDNTSLRLLGSPILDESLAGFVEEKINLFNICSDRLPKINSHVAFYIILYCLFVPKFMYSLRCCQFWNHTLLLQKLDNIQRNTLTTILNIAFDDHTWRQASLPVRFGGLGIRKISSVSLPAFLSSAHSTHQLVTDILASSLPNYQFSFIAEALESWQKACPDGSLPKDPSSQRQWDEPLCKLEFDNLVSSSNSPVEHARLLAAARWESGLWLHALPSRNIGTLLDNNSFRLAASLRVGAICQVPHRCVCGDMADQLGHHGLSCARSAGRIPRHAELNGIIRRAFVTAGVPSVLEPSGLMRDDGKRPDGMTLIPWKVGRPLVWDATCVDTLAPSHLPGTTVQAGATAAKAENLKRHKYSCLDRVYMFVPFAVETLGPWGPAALSLYRDLAKRLVEASGVQNAGIYFGQKLSIAIQRGNAASILGTFPSANGLLD

SEQ ID NO: 8241 - protein, 842 aa, Erannis defoliaria
MTFPYRILHVSKNLSDQNSLTYKIKQNCKQHSNSCPDFSFPARNEDRNASPSTSYHLVENKLSEGDIRGAARILFSNDTLAPNTPGTLLALKDKHPPSAAEPLPLPASVSEEDVLTATIDDVLLAVASFPSGSAGGLDSLTPQHLKDLTSATCGEVGDSLLKEITLLVNFMLAGKVNDEIVDILYGANLCALLKKDGGIRPIAVGTVYRRLTAKICTKYIKETLCEEFQPLQLGFGSRGGYEAAVHALRTFLNHQGGEVLLKVDVQNAFNSVDRNTLLAQVKDKIPFIFNFIWQCYGNPSKLLYKNNVLSSEVGCQQGDPLGPAIFSLAIHPIIKKLESKFNVWYLDDGTLGGDVNTVFKDLQNLIKDFSDIGLVLNFSKCELFIPNYFTTPKQDIITLFGKIAPNIKVLENRSLRLLGSPILDESIQDYVDDKIQNFVSVSDRLQKLNSHMAYFLIRYCLFVPKFMYSLRCCQLWNHPAVLQQLDSIQRDTLTTILNTPFDDRTWRQASLPVRFGGLGIRKISSVSLPAFLSSVFSSTHLVNTILSPSLQNFEISFLSEAMESWKLACPKQTLPKAPTSQRQWDEPLCELECKNLIDSSSSSTERARLLAVTRWESGLWLHALPSKNVGNLLDNQTFRIAVSLRIGAPCQVPHRCSCSDIADRFGHHALSCVKSAGRIPRHASLNDIIRRAFVSAGIPSILEPNGLMRDDGKRPDGMTLIPWKMGRPLVWDATCVDTLAPSHLPRTNDHAGAAASNAENLKRHKYGYLDRLYMFVPFGVETLGPWGPAAHVLYRDLAKRLVEVSGDRNAGVYFGQKLSIAIQRGNAASILATFPSSTGLLV

SEQ ID NO: 8242 - protein, 1012 aa, Peribatodes rhomboidaria
MLSSHSSPNDEFHTPEDAAGHVSPPPTHLGQRCRRQLPLLPDPRPFPSSIDSVPLSTSSQVAATQNHLQITNVSMENQVKCEQCSQPRFFKGYRGLKIHTSKVHRSAPPILDQGETVSVSTFWETLSQFKNNLPVLKRIPRGARLSVASCLVDDIKKAVSSDISNSVVAWEHLLTFPYRILHVPKNPSDSTSLTNKIKHNCIQNSKSCPVFSFPSSGPFRRKCSTPYSLVEDKMVEGDIRGSARLLFSTDTLAPDTPETLLALKEKHPTSPAEPIILDEPDVNPLVATPLDVISALSSFPSGSAGGLDGLTPQHLKDLIGAGCGEIGDALVKELTALVNLMLSGKVNDKITNILYGANLCALLKKDGGIRPIAVGTVYRRLAAKVCCKHIKESLCKEFQPLQLGYGSRGGCEAAIHALRSYLSHQTCEVLVKIDVKNAFNTVNRTILLNEVHNKIPHIYNFIRQCYGKPSNLVYKNSFISSEVGCQQGDPLGPALFSLTIHPIIKNLGSKFNVWYLDDGTLAGDVTSVYEDLKYLTTEFETIGLSLNFSKCEIFIPSFSTISKNNTLNLFEQVAPKIKLLDNTSLRLLGSPILDESLAGFVEEKINLFNICSDRLQKINSHVAFYIILYCLFVPKFMYSLRCCQFWNHTLLLQKLDNIQRNTLTTILNIAFDDHTWRQASLPVRFGGLGIRKISSVSLPAFLSSAHSTHQLVTDILASSLPNYQFSFIAEALESWQRACPDGSLPKDPSSQRQWDEPLCKLEFDNLVSSSNSPVEHARLLAAARWESGLWLHALPSRNIGTLLDNNSFRLAASLRVGAICQVPHRCVCGDMADQLGHHGLSCARSAGRIPRHAELNGIIRRAFVTAGVPSVLEPSGLMRDDGKRPDGMTLIPWKVGRPLVWDATCVDTLAPSHLPGTTVQAGAAAAKAENLKRHKYSRLDRVYMFVPFAVETLGPWGPAALSLYRDLAKRLVEASGVQNAGIYFGQKLSIAIQRGNAASILGTFPSANGLLD

SEQ ID NO: 8243 - protein, 1012 aa, Peribatodes rhomboidaria
MLSSHSSPNDEFHTPEDAAGHVSPPPTHLGQRCRRQLPLLPDPRPFPSSIDSVPLSTSSQVAATQNHLQITNVSMENQVKCEQCSQPRFFKGYRGLKIHTSKVHRSAPPILDQGETVSVSTFWETLSQFKNNLPVLKRIPRGARLSVASCLVDDIKKAVSSDISNSVVAWEHLLTFPYRILHVPKNPSDSTSLTNKIKHNCIQNSKSCPVFSFPSSGPFRRKCSTPYSLVEDKMAEGDIRGSARLLFSTDTLAPDTPETLLALKEKHPTSPAEPIILDEPDVNPLVATPLDVISALSSFPSGSAGGLDGLTPQHLKDLIGAGCGEIGDALVKELTALVNLMLSGKVNDKITNILYGANLCALLKKDGGIRPIAVGTVYRRLAAKVCCKHIKESLCKEFQPLQLGYGSRGGCEAAIHALRSYLSHQTCEVLVKIDVKNAFNTVNRTILLNEVHNKIPHIYNFIRQCYGKPSNLVYKNSFISSEVGCQQGDPLGPALFSLTIHPIIKNLGSKFNVWYLDDGTLAGDVTSVYEDLKYLTTEFETIGLSLNFSKCEIFIPSFSTISKNNTLNLFEQVAPKIKLLDNTSLRLLGSPILDESLAGFVEEKINLFNICSDRLQKINSHVAFYIILYCLFVPKFMYSLRCCQFWNHTLLLQKLDNIQRNTLTTILNIAFDDHTWRQASLPVRFGGLGIRKISSVSLPAFLSSAHSTHQLVTDILASSLPNYQFSFIAEALESWQRACPDGSLPKDPSSQRQWDEPLCKLEFDNLVSSSNSPVEHARLLAAARWESGLWLHALPSRNIGTLLDNNSFRLAASLRVGAICQVPHRCVCGDMADQLGHHGLSCARSAGRIPRHAELNGIIRRAFVTAGVPSVLEPSGLMRDDGKRPDGMTLIPWKVGRPLVWDATCVDTLAPSHLPGTTVQAGAAAAKAENLKRHKYSRLDRVYMFVPFAVETLGPWGPAALSLYRDLAKRLVEASGVQNAGIYFGQKLSIAIQRGNAASILGTFPSANGLLD

SEQ ID NO: 8244 - protein, 1026 aa, Erannis defoliaria
MSAAKSALSPTDDQFHTPVEDARALSPPPPLQGRRCRRQLPLPEDLDPGCLRTSPEAPVFSLFSQRDTAVQSDSQNSKNNANVSSENLVKCNQCSQSRFFKGIRGLKIHISKSHRLAQNCPNEVRNNIQNNNFQHFGELLGNLKTNLPILKRIPRGARISVAQCLINDIKRVISCNSLQAWEHLMTFPYRILHVSKNLSDQNSLTYKIKQNCKQHSNSCPDFSFPARSEDRNASPSTSYHLVENKLSEGDIRGAARILFSNDTLAPNTPGTLLALKDKHPPSAAEPLPLPASVSEEDVLTATIDDVLLAVASFPSGSAGGLDSLTPQHLKDLTSATCGEVGDSLLKEITLLVNLMLAGKVNDEIVDILYGANLCALLKKDGGIRPIAVGTVYRRLTAKICTKYIKETLCEEFQPLQLGFGSRGGCEAAVHALRTFLNHQGGEVLLKVDVQNAFNSVDRNTLLAQVKDKIPFIFNFIWQCYGNPSKLLYKNNVLSSEVGCQQGDPLGPAIFSLAIHPIIKKLESKFNVWYLDDGTLGGDVNTVFKDLQNLIKDFSDIGLVLNFSKCELFIPNYSTTPKQDIITLFGKIAPNIKVLENRSLRLLGSPILDESIQDYVDDKIQNFVSVSDRLQKLNSHMAYFLIRYCLFVPKFMYSLRCCQLWNHPAVLQQLDSIQRDTLTTILNTPFDDRTWRQASLPVRFGGLGIRKISSVSLPAFLSSVFSSTHLVNTILSPSLQNFEISFLSEAMESWKLACPKQTLPKAPTSQRQWDEPLCELECKNLIDSSSSSTERARLLAVTRWESGLWLHALPSKNVGNLLDNQTFRIAVSLRIGAPCQVPHRCSCSDIADRFGHHALSCVKSAGRIPRHASLNDIIRRAFVSAGIPSILEPNGLMRDDGKRPDGMTLIPWKMGRPLVWDATCVDTLAPSHLPRTNDHAGAAASNAENLKRHKYGYLDRLYMFVPFGVETLGPWGPAAHVLYRDLAKRLVEVSGDRNAGVYFGQKLSIAIQRGNAASILATFPSSTGLLV

SEQ ID NO: 8245 - protein, 1012 aa, Peribatodes rhomboidaria
MLSSHSSPNDEFHTPEDAAGHVSPPPTHLGQRCRRQLPLLPDPRPFPSSIDSVPLSTSSQVAATQNHLQITNVSMENQVKCEQCSQPRFFKGYRGLKIHTSKVHRSAPPILDQGETVSVSTFWETLSQFKNNLPVLKIIPRGARLSVASCLVDDIKKAVSSDISNSVVAWEHLLTFPYRILHVPKNPSDSTSLTNKIKHNCIQNSKSCPVFSFPSSGPFRRKCSTPYSLVEDKMAEGDIRGSARLLFSTDTLAPDTPETLLALKEKHPTSPAEPIILDEPDVNPLVATPLDVISALSSFPSGSAGGLDGLTPQHLKDLIGAGCGEIGDALVKELTALVNLMLSGKVNDKITNILYGANLCALLKKDGGIRPIAVGTVYRRLAAKVCCKHIKESLCKEFQPLQLGYGSRGGCEAAIHALRSYLSHQTCEVLVKIDVKNAFNTVNRTILLNEVHNKIPHIYNFIRQCYGKPSNLVYKNSFISSEVGCQQGDPLGPALFSLTIHPIIKNLGSKFNVWYLDDGTLAGDVTSVYEDLKYLTTEFETIGLSLNFSKCEIFIPSFSTISKNNTLNLFEQVAPKIKLLDNTSLRLLGSPILDESLAGFVEEKINLFNICSDRLQKINSHVAFYIILYCLFVPKFMYSLRCCQFWNHTLLLQKLDNIQRNTLTTILNIAFDDHTWRQASLPVRFGGLGIRKISSVSLPAFLSSAHSTHQLVTDILASSLPNYQFSFIAEALESWQRACPDGSLPKDPSSQRQWDEPLCKLEFDNLVSSSNSPVEHARLLAAARWESGLWLHALPSRNIGTLLDNNSFRLAASLRVGAICQVPHRCVCGDMADQLGHHGLSCARSAGRIPRHAELNGIIRRAFVTAGVPSVLEPSGLMRDDGKRPDGMTLIPWKVGRPLVWDATCVDTLAPSHLPGTTVQAGAAAAKAENLKRHKYSRLDRVYMFVPFAVETLGPWGPAALSLYRDLAKRLVEASGVQNAGIYFGQKLSIAIQRGNAASILGTFPSANGLLD

SEQ ID NO: 8246 - protein, 672 aa, Agriopis aurantiaria
MLAGKVNDGIIEILYGANLCALLKKDGGIRPIAVGTVYRRLTAKVCVKHIKECLCKEFQPSQLGFGSRGGCEAAVHALRTYLYHQKCEVLLKVDVKNAFNSVDRNTLLAQVKVKIPSIYNFIWQCYSKPSKLMYKNNLLSSESGCQQGDPLGPAIFGLAIHPIIQKLESKFNVWYLDDGTLGGDLNTVYKDLQNLITEFNAIGLVLNFSKCELFIPNSFSSQKNETINLFEQIAPNIKVLDNRSLRLLGSPILDESIQDFIDEKIQNFQSVSDRLQKINTHMAYFIIRYCLFVPKFMYSLRCCQLWNHPLPLQQLDNIQRDTLTTILNTPFDDRTWRQASLPVRFGGLGIRKISSVSLPAFLSSVFSTQKLVNTILSPTLQNSEISYLTDALESWKIACPNQPLPKAPASQRQWDGPLCEIERQNLFDSASSSTERARLLAVTRWESGLWLHALPSKNVGNLLDNNTFRVAVSLRIGAPCQVPHRYSCSEMVDRHGHHALSCAKSAGRIPRHASLNDIIRRAFVSAGVPSVLEPNGLMRDDGKRPDGMTLIPWKMGRPVIWDATCVDTLAPSHLPGTSFQAGAAATKAENLKRHKYRFLNRVYMFVPFGVETLGPWGPAAHDLYRDLAKRLMEATCDRNAGAYFGQKISIAIQRGNAASILATFPSTEGLLD

SEQ ID NO: 8247 - protein, 956 aa, Tinea semifulvella
MEGDSVTTSQVNLLQCPKCSQVRFFKGKKGLNIHLGRAHKENLSASCPLTSAPTSNNPNFSIPFYKLLSNLKHSTPILKRIPRGARIAVANALSNSIRRTVNENSIEAWEQLLTFPYRILHAKKETNSTAKLTLTNQIKQNCYSPHNIQNLDLHNVKNLKKSNFNVYKQVESKVSEGDLKGAAGLLFSSDVIAPDTPDTVAALASKHPSPLINDLLPDPPSTSDLTLQVTSDQIYQAILSFRSGSAGGLDALTPQHLKDLLCFSVGDTGEKLLEDLTALANLMLAGKVNAEITDILYGANLCALLKKDGGIRPIAIGTTYRRLVAKIAAKKISEYLKSFFQPFQLGFGSKGGCEAIVHSLRTFLLNNGGEVLLKVDIKNAFNSVDRNAMLTEVKSHIPSVFNFLWQCYSSPSKLLYKNHLISSSVGCQQGDPLGPAIFSLAIHSIIQNLKSKFNVWYLDDGALGGDIHTVLDDLSTLIDSFKKIGLSLNFSKCEIFVSAPDTLKISTIEKFNNIAPNISVLDKTSLHILGSPVFENSFPSFIDKTIAKFNLCSDRLLKINSHMAYYIIRHCLFVPKFTYILRCHIWNVPHLLLILDNIVKKTLSSIINISFEDRSWCQASLPIRFGGIGVRQISSVALPAFLSSVHSTESLINKILVKCFTSYNISYMAESVSAWKLACPNTSVPTLTTSQRRWDEPLCRLVRDQLLNTSTNMAERARLLAVSKWESGLWLQALPSSFVGTLFDNKCFSTITSLRLGAPCTFPHRCQCGDNVGALGHHGLSCSKSTGRIPRHACLNDVIRRALVSVGSPAILEPSGMARDDGKRPDGMTLVPWRIGLPLVWDATCVDTLAPSHLSLTSKDPGAAALKAENLKRRKYTQLIGRCVFAPFGVETLGPWGPSAHESFKALSKQVVNTSGDKRAGQYLGQRISIAIQRGNAASIHGTLPIGSDLEQIYYL

SEQ ID NO: 8248 - protein, 957 aa, Tinea semifulvella
MEGDSVTTSQVNLLQCPKCSQVRFFKGKKGLNIHLGRAHKENLSASCPLTSAPTSNNPNFSIPFYKLLSNLKHSTPILKRIPRGARIAVANALSNSIRRTVNENSIEAWEQLLTFPYRILHAKKETNSTAKLTLTNQIKQNCYSPHNIQNLDLHNVKNLKKSNFNVYKQVESKVSEGDLKGAAGLLFSSDVIAPDTPDTVAALASKHPSPLINDLLPDPPSTSDLTLQVTSDQIYQAILSFRSGSAGGLDALTPQHLKDLLCFSVGDTGEKLLEDLTALANLMLAGKVNAEITDILYGANLCALLKKDGGIRPIAIGTTYRRLVAKIAAKKISEYLKSFFQPFQLGFGSKGGCEAIVHSLRTFLLNNGGEVLLKVDIKNAFNSVDRNAMLTEVKSHIPSVFNFLWQCYSSPSKLLYKNHLISSSVGCQQGDPLGPAIFSLAIHSIIQNLKSKFNVWYLDDGALGGDIHTVLDDLSTLIDSFKKIGLSLNFSKCEIFVSAPDTLKISTIEKFNNIAPNISVLDKTSLHILGSPVFENSFPSFIDKTIAKFNLCSDRLLKINSHMAYYIIRHCLFVPKFTYILRCCHIWNVPHLLLILDNIVKKTLSSIINISFEDRSWCQASLPIRFGGIGVRQISSVALPAFLSSVHSTESLINKILVKCFTSYNISYMAESVSAWKLACPNTSVPTLTTSQRRWDEPLCRLVRDQLLNTSTNMAERARLLAVSKWESGLWLQALPSSFVGTLFDNKCFSTITSLRLGAPCTFPHRCQCGDNVGALGHHGLSCSKSTGRIPRHACLNDVIRRALVSVGSPAILEPSGMARDDGKRPDGMTLVPWRIGLPLVWDATCVDTLAPSHLSLTSKDPGAAALKAENLKRRKYTQLIGRCVFAPFGVETLGPWGPSAHEIFKALSKQLVNTSGDKRAGQYLGQRISIAIQRGNAASILGTLPIGSDLEQIYYL

SEQ ID NO: 8249 - protein, 957 aa, Tinea semifulvella
MEGDSVTTSQVNLLQCPKCSQARFFKGKKGLNIHLGRAHKENLSASCPLTSAPTSNNPNFSIPFYKLLSNLKHSTPILKRIPRGARIAVANALSNSIRRTVNENSIEAWEQLLTFPYRILHAKKETNSTAKLTLTTQIKQNCNSPHNIQNLDLHNVKNLKKSNFNVYKQVESKVSEGDLKGAAGLLFSSDVIAPDTPDTVAALASKHPSPLINDLLPDPPSTSDLTLQVTSDQIYQAILSFRSGSAGGLDALTPQHLKDLLCFSVGDTGEKLLEDLTALANLMLAGKVNVEITDILYGANLCALLKKDGGIRPIAIGTTYRRLVAKIAAKKISEYLKSFFQPFQLGFGSKGGCEAIVHSLRTFLLNNGGEVLLKVDIKNAFNSVDRNAMLTEVKSHIPSVFNFLWQCYSSPSKLLYKNHLISSSVGCQQGDPLGPAIFSLAIHSIIQNLKSKFNVWYLDDGALGGDIHTVLDDLSTLIDSFKKIGLSLNFSKCEIFVSAPDTLKISAIEKFNNIAPNISVLDKTSLHILGSPVFENSFPSFIDKTIAKFNLCSDRLLKINSHMAYYIIRHCLFVPKFTYILRCCHIWNVPHLLLILDNIVKKTLSSIMNIFFEDRSWCQASLPIRFGGIGVRQISSVALPAFLSSVHSTESLINKILVKCFTSYNISYMAESVSAWKLACPNTSVPTLTTSQRRWDEPLCRLVRDQLLNTSTNMAERARLLAVSKWESGLWLQALPSSFVGTLFDNKCFSTITSLRLGAPCTFPHRCQCGDNVGALGHHGLSCSKSTGRIPRHACLNDVIRRALVSVGSPAILEPSGMARDDGKRPDGMTLVPWRIGLPLVWDATCVDTLAPSHLSLTSKDPGAAALKAENLKRRKYTQLIGRCVFAPFGVETLGPWGPSAHEIFKALSKQLVNTSGDKRAGQYLGQRISIAIQRGNAASILGTLPIGSDLEQMYYL

SEQ ID NO: 8250 - protein, 957 aa, Tinea semifulvella
MEGDSVTTSQVNLLQCPKCSQARFFKGKKGLNIHLGRAHKENLSASCPLTSAPTSNNPNFSIPFYKLLSNLKHSTPILKRIPRGARIAVANALSNSIRRTVNENSIEAWEQLLTFPYRILHAKKETNSTAKLTLTNQIKQNCNSPHNIQNLDLHNVKNLKKSNFNVYKQVESKVSEGDLKGAAGLLFSSDVIAPDTPDTVAALASKHPSPLINDLLPDPPSTSDLTLQVTSDQIYQAILSFRSGSAGGLDALTPQHLKDLLCFSVGDTGEKLLEDLTALANLMLAGKVNAEITDILYGANLCALLKKDGGIRPIAIGTTYRRLVAKIAAKKISEYLKSFFQPFQLGFGSKGGCEAIVHSLRTFLLNNGGEVLLKVDIKNAFNSVDRNAMLTEVKSHIPSVFNFLWQCYSSPSKLLYKNHLISSSVGCQQGDPLGPAIFSLAIHSIIQNLKSKFNVWYLDDGALGGDIHTVLDDLSTLIDSFKKIGLSLNFSKCEIFVSAPDTLKISAIEKFNNIAPNISVLDKTSLHILGSPVFENSFPSFIDKTIAKFNLCSDRLLKINSHMAYYIIRHCLFVPKFTYILRCCHIWNVPHLLLILDNIVKKTLSSIINNFFEDRSWCQASLPIRFGGIGVRQISSVALPAFLSSVHSTESLINKILVKCFTSYNISYMAESVSAWKLACPNTSVPTLTTSQRRWDEPLCRLVRDQLLNTSTNMAERARLLAVSKWESGLWLQALPSSFVGTLFDNKCFSTITSLRLGAPCTFPHRCQCGDNVGALGHHGLSCSKSTGRIPRHACLNDVIRRALVSVGSPAILEPSGMARDDGKRPDGMTLVPWRIGLPLVWDATCVDTLAPSHLSLTSKDPGAAALKAENLKRRKYTQLIGRCVFAPFGVETLGPWGPSAHEIFKALSKQLVNTSGDKRAGQYLGQRISIAIQRGNAASILGTLPIGSDLEQMYYL

SEQ ID NO: 8251 - protein, 675 aa, Tinea semifulvella
MLAGKVNAEITDILYGANLCALLKKDGGIRPIAIGTTYRRLVAKIAAKKISEYLKSFFQPFQLGFGSKGGCEAIVHSLRTFLLNNGGEVLLKVDIKNAFNSVDRNAMLTEVKSHIPSVFNFLWQCYSSPSKLLYKNHLISSSVGCQQGDPLGPAIFSLAIHSIIQNLKSKFNVWYLDDGALGGDIHTVLDDLSTLIDSFKKIGLSLNFSKCEIFVSAPDTLKISAIEKFNNIAPNISVLDKTSLHILGSPVFENSFPSFIDKTIAKFNLCSDRLLKINSHMAYYIISHCLFVPKFTYILRCCHIWNVPHLLLILDNIVKKTLSSIINIFFEDRSWCQASLPIRFGGIGVRQISSVALPAFLSSVHSTESLINKILVKCFTSYNISYMAESVSAWKLACPNTSVPTLTTSQRRWDEPLCRLVRDQLLNTSTNMAERARLLAVSKWESGLWLQALPSSFVGTLFDNKCFSTITSLRLGAPCTFPHRCQCGDNVGALGHHGLSCSKSTGRIPRHACLNDVIRRALVSVGSPAILEPSGMARDDGKRPDGMTLVPWRIGLPLVWDATCVDTLAPSHLSLTSKDPGAAALKAENLKRRKYTQLIGRCVFAPFGVETLGPWGPSAHEIFKALSKQLVNTSGDKRAGQYLGQRISIAIQRGNAASILGTLPIGSDLEQMYYL

SEQ ID NO: 8252 - protein, 957 aa, Tinea semifulvella
MEGDSVTTSQVNLLQCPKCSQARFFKGKKGLNIHLGRAHKENLSASCPLTSAPTSNNPIFSIPFYKLLSNLKHSTPILKRIPRGARIAVANALSNSIRRTVNENSIEAWEQLLTFPYRILHAKKETNSTAKLTLTNQIKQNCNSPHNIQNLDLHNVKNLKKSNFNVYKQVESKVSEGDLKGAAGLLFSSDVIAPDTPDTVAALASKHPSPLINDLLPDPPSTSDLTLQVTSDQIYQAILSFRSGSAGGLDALTPQHLKDLLCFSVGDTGEKLLEDLTALANLMLAGKVNAEITDILYGANLCALLKKDGGIRPIAIGTTYRRLVAKIAAKKISEYLKSFFQPFQLGFGSKGGCEAIVHSLRTFLLNNGGEVLLKVDIKNAFNSVDRNAMLTEVKSHIPSVFNFLWQCYSSPSKLLYKNHLISSSVGCQQGDPLGPAIFSLAIHSIIQNLKSKFNVWYLDDGALGGDIHTVLDDLSTLIDSFKKIGLSLNFSKCEIFVSAPDTLKISAIEKFNNIAPNISVLDKTSLHILGSPVFENSFPSFIDKTIAKFNLCSDRLLKINSHMAYYIIRHCLFVPKFTYILRCCHIWNVPHLLLILDNIVKKTLSSIINIFFEDRSWCQASLPIRFGGIGVRQISSVALPAFLSSVHSTESLINKILVKCFTSYNISYMAESVSAWKLACPNTSVPTLTTSQRRWDEPLCRLVRDQLLNTSTNMAERARLLAVSKWESGLWLQALPSSFVGTLFDNKCFSTITSLRLGAPCTFPHRCQCGDNVGALGHHGLSCSKSTGRIPRHACLNDVIRRALVSVGSPAILEPSGMARDDGKRPDGMTLVPWRIGLPLVWDATCVDTLAPSHLSLTSKDPGAAALKAENLKRRKYTQLIGRCVFAPFGVETLGPWGPSAHEIFKALSKQLVNTSGDKRAGQYLGQRISIAIQRGNAASILGTLPIGSDLEQMYYL

SEQ ID NO: 8253 - protein, 957 aa, Tinea semifulvella
MEGDSVTTSQVNLLQCPKCSQARFFKGKKGLNIHLGRAHKENLSASCPLTSAPTSNNPNFSIPFYKLLSNLKHSTPILKRIPRGARIAVANALSNSIRRTVNENSIEAWEQLLTFPYRILHAKKETNSTAKLTLTNQIKQNCNSPHNIQNLDLHNVKNLKKSNFNVYKQVESKVSEGDLKGAAGLLFSSDVIAPDTPDTVAALASKHPSPLINDLLPDPPSTSDLTLQVTSDQIYQAILSFRSGSAGGLDALTPQHLKDLLCFSVGDTGEKLLEDLTALANLMLAGKVNAEITDILYGANLCALLKKDGGIRPIAIGTTYRRLVAKIAAKKISEYLKSFFQPFQLGFGSKGGCEAIVHSLRTFLLNNGGEVLLKVDIKNAFNSVDRNAMLTEVKSHIPSVLNFLWQCYSSPSKLLYKNHLISSSVGCQQGDPLGPAIFSLAIHSIIQNLKSKFNVWYLDDGALGGDIHTVLDDLSTLIDSFKKIGLSLNFSKCEIFVSAPDTLKISAIEKFYNIAPNISVLDKTSLHILGSPVFENSFPSFIDKTIAKFNLCSDRLLKINSHMAYYIIRHCLFVPKFTYILRCCHIWNVPHLLLILDNIVKKTLSSIINIFFEDRSWCQASLPIRFGGIGVRQISSVALPAFLSSVHSTESLINKILVKCFTSYNISYMAESVSAWKLACPNTSVPTLTTSQRRWDEPLCRLVRDQLLNTSTNMAERARLLAVSKWESGLWLQALPSSFVGTLFDNKCFSTITSLRLGAPCTFPHRCQCGDNVGALGHHGLSCSKSTGRIPRHACLNDVIRRALVSVGSPAILEPSGMARDDGKRPDGMTLVPWRIGLPLVWDATCVDTLAPSHLSLTSKGPGAAALKAENLKRRKYTQLIGRCVFAPFGVETLGPWGPSAHEIFKALSKQLVNTSGDKRAGQYLGQRISIAIQRGNAASILGTLPIGSDLEQMYYL

SEQ ID NO: 8254 - protein, 957 aa, Tinea semifulvella
MEGDSVTTSQVNLLQCPKCTQARFFKGKKGLNIHLGRAHKENLSASCPLTSAPTSNNPNFSIPFYKLLSNLKHSTPILKRIPRGARIAVANALSNSIRRTVNENSIEAWEQLLTFPYRILHAKKETNSTAKLTLTTQIKQNCNSPHNIQNLDLHNVKNLKKSNFNVYKQVESKVSEGDLKGAAGLLFSSDVIAPDTPDTVAALASKHPSPLINDLLPDPPSTSDLTLQVTSDQIYQAILSFRSGSAGGLDALTPQHLKDLLCFSVGDTGEKLLEDLTALANLMLAGKVNVEITDILYGANLCALLKKDGGIRPIAIGTTYRRLVAKIAAKKISEYLKSFFQPFQLGFGSKGGCEAIVHSLRTFLLNNGGEVLLKVDIKNAFNSVDRNAMLTEVKSHIPSVFNFLWQCYSSPSKLLYKNHLISSSVGCQQGDPLGPAIFSLAIHSIIQNLKSKFNVWYLDDGALGGDIHTVLDDLSTLIDSFKKIGLSLNFSKCEIFVSAPDTLKISAIEKFNNIAPNISVLDKTSLHILGSPVFENSFPSFIDKTIAKFNLCSDRLLKINSHMAYYIIRHCLFVPKFTYILRCCHIWNVPHLLLILDNIVKKTLSSIMNIFFEDRSWCQASLPIRFGGIGVRQISSVALPAFLSSVHSTESLINKILVKCFTSYNISYMAESVSAWKLACPNTSVPTLTTSQRRWDEPLCRLVRDQLLNTSTNMAERARLLAVSKWESGLWLQALPSSFVGTLFDNKCFSTITSLRLGAPCTFPHRCQCGDNVGALGHHGLSCSKSTGRIPRHACLNDVIRRALVSVGSPAILEPSGMARDDGKRPDGMTLVPWRIGLPLVWDATCVDTLAPSHLSLTSKDPGAAALKAENLKRRKYTQLIGRCVFAPFGVETLGPWGPSAHEIFKALSKQLVNTSGDKRAGQYLGQRISIAIQRGNAASILGTLPIGSDLEQMYYL

SEQ ID NO: 8255 - protein, 957 aa, Tinea semifulvella
MEGDSVTTSQVNLLQCPKCSQARFFKGKKGLNIHLGRAHKENLSASCPLTSAPTSNNPNFSIPFYKLLSNLKHSTPILKRIPRGARIAVANALSNSIRRTVNENSIEAWEQLLTFPYRILHAKKETNSTAKLTLTNQIKQNCNSPHNIQNLDLHNVKNLKKSNFNVYKQVESKVSEGDLKGAAGLLFSSDVIAPDTPDTVAALASKHPSPLINDLLPDPPSTSDLTLQVTSDQIYQAILSFRSGSAGGLDALTPQHLKDLLCFSVGDTGEKLLEDLTALANLMLAGKVNAEITDILYGANLCALLKKDGGIRPIAIGTTYRRLVAKIAAKKISEYLKSFFQPFQLGFGSKGGCEAIVHSLRTFLLNNGGEVLLKVDIKNAFNSVDRNAMLTEVKSHIPSVLNFLWQCYSSPSKLLYKNHLISSSVGCQQGDPLGPAIFSLAIHSIIQNLKSKFNVWYLDDGALGGDIHTVLDDLSTLIDSFKKIGLSLNFSKCEIFVSAPDTLKISGIEKFNNIAPNISVLDKTSLHILGSPVFENSFPSFIDKTIAKFNLCSDRLLKINSHMAYYIIRHCLFVPKFTYILRCCHIWNVPHLLLILDNIVKKTLSSIINISFEDRSWCQASLPIRFGGIGVRQISSVALPAFLSSVHSTESLINKILVKCFTSYNISYMAESVSAWKLACPNTSVPTLTTSQRRWDEPLCRLVRDQLLNTSTNMAERARLLAVSKWESGLWLQALPSSFVGTLFDNKCFSTITSLRLGAPCTFPHRCQCGDNVGALGHHGLSCSKSTGRIPRHACLNDVIRRALVSVGSPAILEPSGMARDDGKRPDGMTLVPWRIGLPLVWDATCVDTLAPSHLSLTSKDPGAAALKAENLKRRKYTQLIGRCVFAPFGVETLGPWGPSAHEIFKALSKQLVNTSGDKRAGQYLGQRISIAIQRGNAASILGTLPIGSDLEQIYYL

SEQ ID NO: 8256 - protein, 957 aa, Tinea semifulvella
MEGDSVTTSQVNLLQCPKCSQARFFKGKKGLNIHLGRAHKENLSASCPLTSAPTSNNPIFSIPFYKLLSNLKHSTPILKRIPRGARIAVANALSNSIRRTVNENSIEAWEQLLTFPYRILHAKKETNSTAKLTLTNQIKQNCNSPHNIQNLDLHNVKNLKKSNFNVYKQVESKVSEGDLKGAAGLLFSSDVIAPDTPDTVAALASKHPSPLINDLLPDPPSTSDLTLQVTSDQIYQAILSFRSGSAGGLDALTPQHLKDLLCFSVGDTGEKLLEDLTALANLMLAGKVNVEITDILYGANLCALLKKDGGIRPIAIGTTYRRLVAKIAAKKISEYLKSFFQPFQLGFGSKGGCEAIVHSLRTFLLNNGGEVLLKVDIKNAFNSVDRNAMLTEVKSHIPSVFNFLWQCYSSPSKLLYKNHLISSSVGCQQGDPLGPAIFSLAIHSIIQNLKSKFNVWYLDDGALGGDIHTVLDDLSTLIDSFKKIGLSLNFSKCEIFVSAPDTLKISAIEKFNNIAPNISVLDKTSLHILGSPVFENSFPSFIDKTIAKFNLCSDRLLKINSHMAYYIIRHCLFVPKFTYILRCCHIWNVPHLLLILDNIVKKTLSSIINIFFEDRSWCQASLPIRFGGIGVRQISSVALPAFLSSVHSTESLINKILVKCFTSYNISYMAESVSAWKLACPNTSVPTLTTSQRRWDEPLCRLVRDQLLNTSTNMAERARLLAVSKWESGLWLQALPSSFVGTLFDNKCFSTITSLRLGAPCTFPHRCQCGDNVGALGHHGLSCSKSTGRIPRHACLNDVIRRALVSVGSPAILEPSGMARDDGKRPDGMTLVPWRIGLPLVWDATCVDTLAPSHLSLTSKDPGAAALKAENLKRRKYTQLIGRCVFAPFGVETLGPWGPSAHEIFKALSKQLVNTSGDKRAGQYLGQRISIAIQRGNAASILGTLPIGSDLEQMYYL

SEQ ID NO: 8257 - protein, 957 aa, Tinea semifulvella
MEGDSVTTSQVNLLQCPKCSQARFFKGKKGLNIHLGRAHKENLSASCPLTSAPTSNNPNFSIPFYKLLSNLKHSTPILKRIPRGARIAVANALSNSIRRTVNENSIEAWEQLLTFPYRILHAKKETNSTAKLTLTNQIKQNCNSPHNIQNLDLHNVKNLKKSNFNVYKQVESKVSEGDLKGAAGLLFSSDVIAPDTPDTVAALASKHPSPLINDLLPDPPSTSDLTLQVTSDQIYQAILSFRSGSAGGLDALTPQHLKDLLCFSVGDTGEKLLEDLTALANLMLAGKVNVEITDILYGANLCALLKKDGGISPIAIGTTYRRLVAKIAAKKISEYLKSFFQPFQLGFGSKGGCEAIVHSLRTFLLNNGGEVLLKVDIKNAFNSVDRNAMLTEVKSHIPSVFNFLWQCYSSPSKLLYKNHLISSSVGCQQGDPLGPAIFSLAIHSIIQNLKSKFNVWYLDDGALGGDIHTVLDDLSTLIDSFKKIGLSLNFSKCEIFVSAPDTLKISAIEKFNNIAPNISVLDKTSLHILGSPVFENSFPSFIDKTIAKFNLCSDRLLKINSHMAYYIIRHCLFVPKFTYILRCCHIWNVPHLLLILDNIVKKTLSSIMNIFFEDRSWCQASLPIRFGGIGVRQISSVALPAFLSSVHSTESLINKILVKCFTSYNISYMAESVSAWKLACPNTSVPTLTTSQRRWDEPLCRLVRDQLLNTSTNMAERARLLAVSKWESGLWLQALPSSFVGTLFDNKCFSTITSLRLGAPCTFPHRCQCGDNVGALGHHGLSCSKSTGRIPRHACLNDVIRRALVSVGSPAILEPSGMARDDGKRPDGMTLVPWRIGLPLVWDATCVDTLAPSHLSLTSKDPGAAALKAENLKRRKYTQLIGRCVFAPFGVETLGPWGPSAHEIFKALSKQLVNTSGDKRAGQYLGQRISIAIQRGNAASILGTLPIGSDLEQMYYL

SEQ ID NO: 8258 - protein, 1614 aa, Andrena haemorrhoa
MASPAPTREVAVELPATDGLTCPECVNKKCSKSNSFRYRGYVEFAQHVKRTHVGWKLIPTCRYCGHVGKGKYPVKDVNAHVAKFHPTAESAGPAPRAPCTERVRRSGGSTSGGGDPPQSRPSGSATATVPPALRTITPPVRHSTTPPVPSKTTPPVTRRATLNATTTAVAKRPSTERASAAAKPPPTTTRSTRATPAATLSIRSKGTAATTSAIRPPPPTTTTKAFGTATTAVRCSPPPTTYAEAAARNQGPPTTSSRGSSSASGHNSTRGSLEKPPLKKRSLGTPPSPVTRRMTRASSLPPRSTVATRPTTSSTTIRKGAGRPKKDPAPPVGQRATTTTIKRGPGRPRKPSAPEETSEARTPPPGPSTSATTTGQVQEARPSTERAASTSPNWPATPPVRTGCAVLTPLAVATSSAGATLTTSTVTTTSRGGPIMTSCIYTGPAVRIVTAQPLVLRPLVSIEEEGGLEAPQNTTTTTPLRTEEPWEAAPKKRTRRRIASSSSSSESDEERGGSGAGFRRTPGRGRILSPTTSTPAPSSPPQPLPSPSSPPAPTPTPTNPPRSRLPSQPPPEPHLTTASGRRGAPRSAAAGASAETRVSAPSTRSRRGQPRGHQNIRTTPPPHTGRGHEPALSPPATSNPPRHPGRDARRAEAELRKALISRAEGVETIQSLEEVANDLTTYFQARSAKGGVGQTPRNRQHGRPRAPEQQGQEHVKKATRLQRLYRENRRRAMEEVLTGPSPHCQVGVEEVSQYFREMYSATAPPVGEPYVWPEWPTDEEGELRDALVRPFSASEVEARLKRTHKSAPGPDGVTYDELRKADPGCPVLASVFNACLRTEAIPGSWKSSTTVLTYKKGDRSDLSNWRPLALGDTVAKLFAAVLADRLMDFAVKGKRLSHPQKGFLKHEGCHEHNFMLQEILEDSRREGRQAVVAWLDLTNAFGSIPHVTLFDAFEGAKLPLNIQKVMLSMNTGCTSKVRTSQGFTENIPMLAGVKQGCPCSPMTFNLAIERVIRSIESLPIGYGLGEDLHRAFAYADDIGLVAASPEEMQLLLDEIQRAAAAAGLKFNPKKCATVHLRGKGSAQKSQPTVFVLDGEELKALGEGEAYEYLGIPVGSRVSQTPTATIIRMMEDANAIDSSLLAPWQKMDALKVFILPRLDYILRGGAVEKTPLKAFDRFVKRLVKGWMNLPQRASAEVVYLPTWRGGAGLIPMADLADVLTIAHAFRLLSCKDGAVAERARTSLRNAVRRRTSIQPTQEQVAAFLTGSLEGPFACDLQGDPGLWTRVRMASRRQVKRLHLAWRYDPLTKEILLECRGSEGRRTIIPPGATSQVIRRLRIAVQESYLCSLLAKPDQGKVYQVSSRSGVSNAFLRDGRYARFAEWRFIHRARLDVLPLNGARRWGAGDKRCRQCGYPSETLPHVICHCLPHSAALQLRHDAVMARVAKACRAKGAIRLNQRVEGVNGDLAALRPDIVVRDEAAKRVHIIDVTVAFENQRKAMEDARRSKIVKYTPLAAALHASGYSVDVDAIVVGALGTWDQGNEPVLKRLGVSPRYAALMRRLIVTDTIRWSRDIYVEHVSRVRQYRVPSDAPAVTPVLGPPAGRSSMGLLPDQFLT

SEQ ID NO: 8259 - protein, 1320 aa, Andrena haemorrhoa
MTRASSLPPRSTVATRPTTSSTTIRKGAGRPKKDSAPPVGQGATTTTIKRGPGRPRKPSAPEETSEARTPPPGPSTSATTIGHVQEARPSTERAASTSPNWPATPPVRTSCAVLTPLAVATSSAGATLTTSTVTTTTRGGPVMTSCIYTGPAVRVVTAQPLVLRPLVSIEEEGGLEAPQNITTTTPLRTEEPWKAAPKKRTRRRIASSSSSSESEEEKGGSSAGFRRTPGRGRIPSPTPSSPAPSPPPQPLPSPRSPPVPPPPPTIRSRLPSQPPPEPHLTTASGRRGAPRSAAAGASAGTRVSAPSTRSRRGQPRGRPNHRTTPYPHTGRGHEPALSPPVTSNPPRHPGRDARRADAELRKALISRAEGVETIQSLEEVANDLTTYFQARSAKGGVGQTPRNRQHGRPRAPEQQGPEDHVKKATRLQRLYRENRRRAMEEVLTGPSSHCQVGVEEVSQYFREMYSATAPPVGEPYVWPEWPTDEEGELRDALVRPFSASEVEARLKRTHKSAPGPDGVTYDELRKADPGCSVLASVFNACLRTEAIPGPWKSSTTVLTYKKGDRSDLSNWRPLALGDTVAKLFAAVLADRLMDFAVKGKRLSHPQKGFLKHEGCHEHNFMLQEILEDSRREGRQAVVAWLDLTNAFGSIPHVTLFDAFEGAKLPLNIQKVMLSMNTGCTTKVRTSQGFTENIPMLAGVKQGCPCSPMTFNLAIERVIRSVESLPIGYRLGEDLHRAFAYADDIGLVAASPEEMQLLLDEIQRAAAAAGLKFNPKKCATVHLRGKGSAQKSQPTVFVLDGEELKALGEGEAYEYLGIPVGSRVSQTPTATIIRMMEDANAIDSSLLAPWQKMDALKVFILPRLDYILRGGAVEKTPLTTFDKFVKRLVKGWMNLPQRASAEVVYLPTWRGGAGLIPMADLADVLTIAHAFRLLSCKDGAVAERARTSLMNAVRRRTSIQPTQEQVAAFLTGSLEGPFACDLQGDPGLWTRVRMASRRQVKRLHLAWRYDPLTKEILLECRGSEGRRTIIPPGATSQVIRRLRIAVQESYLCSLLAKPDQGKVYQVSSRSGVSNAFLRDGRYARFAEWRFIHRARLDVLPLNGARRWGAGDKRCRRCGYPSETLPHVICHCLPHSAALQLRHDAVMARVAKACRAKGAIRLNQRVEGVNGDLAALRPDIVVRDEAAKRVHIIDVTVAFENQRKAMEDARRSKIVKYTPLAAALHASGYSVDVDAIVVGALGTWDQGNEPVLKRLDVSPRYAALMRRLIVTDTIRWSRDIYVEHVSKVRQYRDPFGAPAATPLLGPPADRSTQGLLTDQILT

SEQ ID NO: 8260 - protein, 1613 aa, Andrena haemorrhoa
MAPPAPTTEVTVELPVTNGLTCPECVNKKCSKSNSFRYRGYVEFAQHVKRTHVGWTLTPTCRYCGHVGKGKYPVKDVNAHVAKFHPAAESAGPAPRAPCAERARSSVGSTSSGGDPPQGRPSGSVTATVSPALRTLTPPVRQSTTPPVPHKTTPPITRKSTANATTTAVARRPSTGRATVAARPLPPTTKAPRATATATLSTLRSKGAAAPTTAARPSPPTTTTKATGTATTTVRCSAPPTTYAEAAARNQGPSTTISRGSSTSSGHNSTRGSLEKPPLKKRSLGTPPSPVTRRMTRASSLPPRSTVATRPTTSSTTIRKGAGRPKKDPAPPVGQGATTTTIKRGPGRPRKPSAPEETSEARTPPPGPSTSATTIGHVQEARPTERAASTSPNWPATPPVRTSCAVLTPLAVATSSAGATLTTSTVTTTTRGGPVMTSCIYTGPAVRVVTAQPLVLRPLVSIEEEGGLEAPQNITTTTPLRTEEPWKAAPKKRTRRRIASSSSSSESEEEKGGSSAGFRRTPGRGRIPSPTPSSPAPSPPPQPLPSPRSPPVPTPTPTIRSRLPSQPPPEPHLTTASGRRGAPRSAAAGASAGTRVSAPSTRSRRGQPRGRPNHRTTPHPQSGRGHEPALSPPATSNPPRHPGRDARRAEAELRKALISRAEGVETIQSLEEVANDLTTYFQARSAKGGVGQTPRNRQHGRPRAPEQQGPEDHVKKATRLQRLYRENRRRAMEEVLTGPSPHCQVGVEEVSQYFREMYSATAPPVGEPYVWPEWPTDEEGELRGALVRPFSASEVEARLKRTHKSAPGPDGVTYDELRKADPGCSVLASVFNACLRTEAIPGSWKSSTTVLTYKKGDRSDLSNWRPLALGDTVAKLFAAVLADRLMDFAVKGKRLSHPQKGFLKHEGCHEHNFVLQEILEDSRREGRQAVVAWLDLTNAFGSIPHVTLFDAFEGAKLPLNIQKVMLSMNTGCTTKVRTSRGFTENIPMLAGVKQGCPCSPMTFNLAIERVIRSVESLPIGYRLGEDLHRAFAYADDIGLVAASPEEMQLLLDEIQRAAAAAGLKFNPKKCATVHLRGKGSARKSQPTVFVLDGEELKALGEGEAYEYLGIPVGSRVSQTPTATIIRMMEDANAIDASLLAPWQKMDALKVFILPRLDYILRGGAVEKTPLTTFDKFVKRLVKGWMNLPQRASAEVVYLPTWRGGAGLIPMADLADVLTIAHAFRLLSCKDGAVAERARTSLTNAVRRRTSIQPTQEQVAAFLSGSLEGPFACDLQGDPGLWTRVRMASRRQVKRLHLAWRYDPLTKEILLECRGSEGRRTIIPPGATSQVIRRLRIAVQESYLCSLLAKPDQGKVYQVSSRSGVSNAFLRDGRYARFAEWRFIHRARLDVLPLNGARRWGAGDKRCRQCGYPSETLPHVICHCLPHSTALQLRHDAVMARVAKACRAKGAIRLNQRVEGVNGDLAALRPDIVVRDEAAKRIHIIDVTVAFENQCKAMEDARRSKIVKYTPLATALHAAGYSVDVDAIVVGALGTWDQGNEPVLKRLGVSPRYAALMRRLIVTDTIRWSRDIYVEHVSRVRQYRVPFGAPAATPLLGPLAGRSTQGLLTDQFST

SEQ ID NO: 8261 - protein, 1615 aa, Andrena haemorrhoa
MASPAPTREVAVELPATDGLTCPECVNKKCSKSNSFRYRGYVEFARHVKRTHVGWKLIPTCRYCGHVGKGKYPVKDVNAHVAKFHPTAESAGPAPREPCTERVRRSGGSTSGGGDPPQSRPSGSATATVPPALRTITPPVRHSTTPPVPSKTTPPVTRRATLNATTTAVAKRPSTERASAAAKPPPTTTRSTRATPAATLSIRSKGTAATTSAIRPPPPTTTTKAFGTATTAVRCSPPPTTYAEAAARNQGPPTTSSRGSSSASGHNSTRGSLEKPPLKKRSLGTPPSPVTRRMTRASSLPPRSTVATRPTTSSTTIRKGAGRPKKDPAPPVGQRATTTTIKRGPGRPRKPSAPEETSEARTPPPGPSTSATTTGQVQEARPSTERAASTSPNWPATPPVRTGCAVLTPLAVATSSAGATLTTSTVTTTSRGGPIMTSCIYTGPAVRIVTAQPLVLRPLVSIEEEGGLEAPQNTTTTTPLRTEEPWEAAPKKRTRRRIASSSSSSESDEERGGSGAGFRRTPGRGRILSPTTSTPAPSSPPQPLPSPSSPPAPTPTPTNPPRSRLPSQPPPEPHLTTASGRRGAPRSAAAGASAETRVSAPSTRSRRGQPRGHQNIRTTPPPHTGRGHEPALSPPATSNPPRHPGRDARRAEAELRKALISRAEGVETIQSLEEVANDLTTYFQARSAKGGVGQTPRNRQHGRPRAPEQQGPEDHVKKATRLQRLYRGNRRRAMEEVLTGPSPHCQVGVEEVSQYFREMYSATAPPVGEPYVWPEWPTDEEGELRDALVRPFSASEVEARLKRTHKSAPGPDGVTYDELRKADPGCPVLASVFNACLRTEAIPGSWKSSTTVLTYKKGDRSDLSNWRPLALGDTVAKLFAAVLADRLMDFAVKGKRLSHPQKGFLKHEGCHEHNFMLQEILEDSRREGRQAVVAWLDLTNAFGSIPHVTLFDAFEGAKLPLNIQKVMLSMNTGCTTKVRTSQGFTENIPMLAGVKQGCPCSPMTFNLAIERVIRSIESLPIGYRLGEDLHRAFAYADDIGLVAASPEEMQLLLDEIQRAAAAAGLKFNPKKCATVHLRGKGSAQKSQPTVFVLDGEELKALGEGEAYEYLGIPVGSRVSQTPTATIIRMMEDANAIDSSLLAPWQKMDALKVFILPRLDYILRGGAVEKTPLKAFDRFVKRLVKGWMNLPQRASAEVVYLPTWRGGAGLIPMADLADVLTIAHAFRLLSCKDGAVAERARTSLRNAVRRRTSIQPTQEQVAAFLTGSLEGPFACDLQGDPGLWTRVRMASRRQVKRLHLAWRYDPLTKEILLECRGSEGRRTIIPPGATSQVIRRLRIAVQESYLCSLLAKPDQGKVYQVSSRSGVSNAFLRDGRYARFAEWRFIHRARLDVLPLNGARRWGAGDKRCRQCGYPSETLPHVICHCLPHSAALQLRHDAVMARVAKACRAKGAIRLNQRVEGVSGDLAALRPDIVVRDEAAKRVHIIDVTVAFENQRKAMEDARRSKIVKYTPLAAALHASGYSVDVDAIVVGALGTWDQGNEPVLKRLGVSPRYAALMRRLIVTDTIRWSRDIYVEHVSRVRQYRVPSGAPAVTPVLGPPAGRSSMGLLPDQFLT

SEQ ID NO: 8262 - protein, 1605 aa, Andrena haemorrhoa
MASPVPTREVAVELPATDGLTCPECYSKKSSKSNSFRYRGYVEFAQHVKRTHAGWILKPTCRYCGHVGKGKYPTKDVNAHVAKFHPAAESAGPAPRAPCTERVRSLGGSTSSGGDPPQSRPSGSGTATVSPALRTLPPPVRRSTTPPTRKITPNATTTAVAKRPSTERASAAAKPPPTTTRSMRATPAATLSTLRSKGAAAPTTAARPSPPTTTTKATGTATTTVRCSPPPTTYAEAAARNQGPSTTISRGSSTSSGHNSTRGSLEKPPLKKRSLGTPPSPVTRRMTRASSLPPRSTVATRPTTSSTTIRKGAGRPKKDPAPPVGQGATTTTIKRGPGRPRKPSAPEETSEARTPPPGPSTSATTIGHVQEARPSTERAASTSPNWPATPPVRTSCAVLTPLAVATSSAGATLTTSTVTTTTRGGPVMTSCIYTGPAVRVVTAQPLVLRPLVSIEEEGGLEAPQNITTTTPLRTEEPWKAAPKKRTRRRIASSSSSSESEEEKGGSSAEFRRTPGRGRATPPTASTPAPSSSPQPLPSPSSPPAPTPTPTNRSRLPSQPPPEPHLTTASGRRGAPRSAAAGASAGTRVSAPSTRSRRGQPRGRPNHRTTPYPHTGRGHEPALSPPATSNPPRHPGRDARRADAELRKALISRAEGVETIQSLEEVANDLTTYFQARSAKGGVGQTPRNRQHGRPRAPEQQGPEDHVKKATRLQRLYRENRRRAMEEVLTGPSPHCQVGVEEVSQYFREMYSATAPPVGEPYVWPEWPTDEEGELRDALVRPFSASEVEARLKRTHKSAPGPDGVTYDELRKADPGCSVLASVYNACLRTEAIPGSWKSSTTVLTYKKGDRSDLSNWRPLALGDTVAKLFAAVLADRLMDFAVKGKRLSHPQKGFLKHEGCHEHNFMLQEILEDSRREGRQAVVAWLDLTNAFGSIPHVTLFDAFEGAKLPLNIQKVMLSMNTGCTTKVRTSRGFTENIPMLAGVKQGCPCSPMTFNLAIERVIRSVESLPIGYRLGEDLHRAFAYADDIGLVAASPEEMQLLLDEIQRSAAAAGLKFNPKKCATVHLRGKGSARKSQPTVFVLDGEELKALGEGEAYEYLGIPVGSRVSQTPTATIIRMMEDANAIDSSLLAPWQKMDALKVFILPRLDYILRGGAVEKTPLTTFDKFVKRLVKGWMNLPQRASAEVVYLPTWRGGAGLIPMADLADVLTIAHAFRLLSCKDGAVAERARTSLTNAVRRRTSIQPTQEQVAAFLSGSLEGPFACDLQGDPGLWTRVRMASRRQVKRLHLAWRYDPLTKEILLECRGSEGRRTIIPPGATSQVIRRLRIAVQESYLCSLLAKPDQGKVYQVSSRSGVSNAFLRDGRYARFAEWRFIHRARLDVLPLNGARRWGAGDKRCRQCGYPSETLPHVICHCLPHSAALQLRHDAVMARVAKACRAKGAIRLNQRVEGVNGDLAALRPDIVVRDEAAKRVHIIDVTVAFENQRKAMEDARRSKIVKYTPLAAALHASGYSVDVDAIVVGALGTWDQGNEPVLKRLDVSPRYAALMRRLIVTDTIRWSRDIYVEHVSKVRQYRDPFGAPAATPLLGPPADRSTQGLLTDQILT

SEQ ID NO: 8263 - protein, 1587 aa, Andrena haemorrhoa
MASPTPTREVAIELPATDGLTCPECTNKKCSKSNSFRYRGYVEFAQHVKRTHVGWKLIPTCRYCGHVGKGKYPVKDVNAHVAKFHPAAESAGPAPRAPCTERVRSLGGSTSSGGDPPQSRPSGSGTATVSPALRTLTPPVRRSTTPPTRKITPNATTTAVAKRPSTERASAAAKPPPTTTRSMRATPAATLSTLRSKGAAAPTTAARPSPPTTTTKATGTATTAVRCSPPPTTYAEAAARNQGPSTTSSRGSSSASGHNSTRGSLEKPPLKKRSLGTPPSPVTRRMTRASSLPPRSTVATRPTTSSTTIRKGAGRPKKDPAPPVGQGATTTTIKRGPGRPRKPSAPEETSEARTPPPGPSTSATNTGQVQEARPSTERAASTSPNWPATPPVRTGCAVLTPLAVATSSAGATLTTSTVTTTTRGGPIMTSCIYTGPAVRVVTAQPLVLRPLVSIEEEGGLEAPQNITTTTPLRTEEPWKAAPKKRTRRWIASSSSSSESEEEKGGSSAGFRRTPGRGRIPSPTPSSPAPLPPPQPLPSPRSSPTPTPIPTNPPRSRSPSQPPPEPHFTTASGRRGDLQTAAAGASAGTRVSAPSTRSRRGQPRGRPNSRTTPYPHTGRGHEPALSPPATSNPPRHPGRDARRADAELRKALISRAEGVETIQPLEEVANDLTTYFQARSAKGGVGQTPRNRQHGRPRAPEQQGPEDHVKKATRLQRLYRENRRRAMEEVLTGPSPHCQVGVEEVSQYFREMYSATAPPVGEPYVWPEWPTDEEGELRDALVRPFSASEVEARLRRTHKSAPGPDGVTYDELRKADPGCSVLASVFNACLRTEAIPGSWKSSTTVLTYKKGDRSDLSNWRPLALGDTVAKLFAAVLADRLMDFAVKGKRLSHPQKGFLKHEGCHEHNFMLQEILEDSRREGRQAVVAWLDLTNAFGSIPHVTLFDAFEGAKLPLNIQKVMLSMNTGCTTKVRTSQGFTENIPMLAGVKQGCPCSPMTFNLAIERVIRSIESLPIGYRLGEDLHRAFAYADDIGLVAASPEEMQLLLDEIQRAAAAAGLKFNPKKCATVHLRGKGSAQKSQPTVFVLDGEELKALGEGEAYEYLGIPVGSRVSQTPTATIIRMMEDANAIDSSLLAPWQKMDALKVFILPRLDYILRGGAVEKTPLKAFDRFVKRLVKGWMNLPQRASAEVVYLPTWRGGAGLIPMADLADVLTIAHAFRLLSCKDGAVAERARTSLRNAVRRRTSIQPTQEQVAAFLTGSFEGPFARDLQGDPGLWTRVRMASRRQVKHLNLAWRYDPLTKEILLECRGSEGRRTIIPPGATSQVIRRLRIAVQESYLCSLLAKPDQGKVFQVSSRSGVSNAFLRDGRYARFAEWRFIHRARLDVLPLNGARRWGAGDKRCRLCGYPSETLPHVICHCLPHSAALQLRHDAIVARIAKACRAKGAIHINRRVEGVDGDLAALRPDIVVRDEAAKRVHIIDVTVAFENQRKAMEDARRSKIVKYTPLAAALHASGYSVDVDAIVVGALGTWDQGNEPVLRRLDVSPHYAALMRRLIVTDTMRWSRDIYVEHVSRVRQYRVPFGAPAATP

SEQ ID NO: 8264 - protein, 1615 aa, Andrena haemorrhoa
MASPVPTGEVAVELPATDGLTCPECYNKISSKSNSFRYRGYVEFAQHVKRTHVGWKLIPTCRYCGHVGKGKYPVKDVNAHVAKFHPTAESAGPAPRAPCTEGVRRSGGSTSGGGDPPRSRPSGSATATVPPALRTITPPVRHSTTPPVPSKTTPPVTRRATLNATTTAVAKRPSTERASAAAKPPPTTTRSTRATPAATLSIRSKGTAAATSAIRPPPPTTTTKAIGTATTAVRCSPPPTTYAEAAARNQGPSTTSSRGSTSASGHNSTRGSLEKPPLKKRSLGTPPSPVTRRMTRASSLPPRSTVATRSTTSSTTIKRGVGRPKKDLAPPVDQGATTTTTKKGPGRPRKTPAPEETSEARTPPPGPSTSATTIGQVQEARPSTERAASTSPNWPATPPVRTSCAVLTPLAVATSSAGATLTTSTVTTTSRGGPIMTSCIYTGPAVRIVTAQPLVLRPLVSIEEEGGLEAPQNTTTTTPLRTEEPWEAAPKKRTRRRIASSSSSSESDEERGGSGAGFRRTPGRGRILSPTTSTPAPSSPPQPLPSPSSPPAPTPTPTNPPRSRLPSQPPPEPHLTTASGRRGAPRSAAAGASAETRVSAPSTRSRRGQPRGHPNIRTTPPPHTGRGHEPALSPPATSNPPRHPGRDARRAEAELRKALISRAEGVETIQSLEEVANDLTTYFQARSAKGGVGQTPRNRQHGRPRAPEQQGPEDHVKKATRLQRLYRENRRRAMEEVLTGPSPHCQVGVEEVSQYFREMYSATAPPVGEPYVWPEWPTDEEGELRDALVRPFSASEVEARLKRTHKSAPGPDGVTYDELRKADPGCPVLASVFNACLRTEAIPGSWKSSTTVLTYKKGDRSDLSNWRPLALGDTVAKLFAAVLADRLMDFAVKGKRLSHPQKGFLKHEGCHEHNFMLQEILEDSRREGRQAVVAWLDLTNAFGSIPHVTLFDAFEGAKLPLNIQKVMLSMNTGCTTKVRTSQGFTENIPMLAGVKQGCPCSPMTFNLAIERVIRSIESLPIGYRLGEDLHRAFAYADDIGLVAASPEEMQLLLDEIQRAAAAAGLKFNPKKCATVHLRGKGSAQKSQPTVFVLDGEELKALGEGEAYEYLGIPVGSRVSQTPTATIIRMMEDANAIDASLLAPWQKMDALKVFILPRLDYILRGGAVEKTPLKAFDRFAKRLVKGWMNLPQRASAEVVYLPTWRGGAGLIPMADLADVLTIAHAFRLLSCKDGAVAERARTSLRNAVRRRTSIQPTQEQVAAFLTGSLEGPFACDLQGDPGLWTRVRLASRRQVKRLHLAWRYDSLTKEILLECRGSEGRRTIIPPGATSQVIRRLRIAVQESYLCSLLAKPDQGKVYQVSSRSGVSNAFLRDGRYARFAEWRFIHRARLDVLPLNGARRWGAGDKRCRQCGYPSETLPHVICHCLPHSAALQLRHDAVMARVAKACRAKGAIRLNQRVEGVNGDLAALRPDIVVRDEAAKRVHIIDDTVAFENQCKAMEDARRSKIVKYTPLATALHASGYSVDVDAIVVGALGTWDQGNEPVLKRLGVSPRYAALMRRLIVTDTMRWSRDIYVEHVSRVRQYRVPSDAPAVTPVLGPPAGRSSMGLLPDQFLT

SEQ ID NO: 8265 - protein, 1605 aa, Andrena haemorrhoa
MASPVPTREVAVELPATDGLTCPECYSKKSSKSNSFRYRGYVEFAQHVKRTHAGWILKPTCRYCGHVGKGKYPTKDVNAHVAKFHPAAESAGPAPRAPCTERVRSLGGSTSSGGDPPQSRPSGSGTATVSPALRTLTPPVRRSTTPPTRKITPNATTTAVAKRPSTERASAAAKPPPTTTRSMRATPAATLSTLRSKGAAAPTTAARPSPPTTTTKATGTATTTVRCSPPPTTYAEAAARNQGPSTTISRGSSTSSGHNSTRGSLEKPPLKKRSLGTPPSPVTRRMTRASSLPPRSTVATRPTTSSTTIRKGAGRPKKDPAPPVGQGATTTTIKRGPGRPRKPSAPEETSEARTPPPGPSTSATTIGHVQEARPSTERAASTSPNWPATPPVRTSCAVLTPLAVATSSAGATLTTSTVTTTTRGGPVMTSCIYTGPAVRVVTAQPLVLRPLVSIEEEGGLEAPQNITTTTPLRTEEPWKAAPKKRTRRRIASSSSSSESEEEKGGSSAEFRRTPGRGRATPPTASTPAPSSSPQPLPSPSSPPAPTPTPTNRSRLPSQPPPEPHLTTASGRRGAPRSAAAGASAGTRVSAPSTRSRRGQPRGRPNHRTTPYPHTGRGHEPALSPPATSNPPRHPGRDARRADAELRKALISRAEGVETIQSLEEVANDLTTYFQARSAKGGVGQTPRNRQHGRPRAPEQQGPEDHVKKATRLQRLYRENRRRAMEEVLTGPSPHCQVGVEEVSQYFREMYSATAPPVGEPYVWPEWPTDEEGELRDALVRPFSASEVEARLKRTHKSAPGPDGVTYDELRKADPGCSVLASVYNACLRTEAIPGSWKSSTTVLTYKKGDRSDLSNWRPLALGDTVAKLFAAVLADRLMDFAVKGKRLSHPQKGFLKHEGCHEHNFMLQEILEDSRREGRQAVVAWLDLTNAFGSIPHVTLFDAFEGAKLPLNIQKVMLSMNTGCTTKVRTSRGFTENIPMLAGVKQGCPCSPMTFNLAIERVIRSVESLPIGYRLGEDLHRAFAYADDIGLVAASPEEMQLLLDEIQRSAAAAGLKFNPKKCATVHLRGKGSARKSQPTVFVLDGEELKALGEGEAYEYLGIPVGSRVSQTPTATIIRMMEDANAIDSSLLAPWQKMDALKVFILPRLDYILRGGAVEKTPLTTFDKFVKRLVKGWMNLPQRASAEVVYLPTWRGGAGLIPMADLADVLTIAHAFRLLSCKDGAVAERARTSLTNAVRRRTSIQPTQEQVAAFLSGSLEGPFACDLQGDPGLWTRVRMASRRQVKRLHLAWRYDPLTKEILLECRGSEGRRTIIPPGATSQVIRRLRIAVQESYLCSLLAKPDQGKVYQVSSRSGVSNAFLRDGRYARFAEWRFIHRARLDVLPLNGARRWGAGDKRCRQCGYPSETLPHVICHCLPHSAALQLRHDAVMARVAKACRAKGAIRLNQRVEGVNGDLAALRPDIVVRDEAAKRVHIIDVTVAFENQRKAMEDARRSKIVKYTPLAAALHASGYSVDVDAIVVGALGTWDQGNEPVLKRLDVSPRYAALMRRLIVTDTIRWSRDIYVEHVSKVRQYRDPFGAPAATPLLGPPADRSTQGLLTDQILT

SEQ ID NO: 8266 - protein, 941 aa, Vanessa cardui
MLYIVAALPLLYVMDIKLVITNLYTGRPTPKWQKRLEDKVAALRIKIGRLTEYINGNTSRKIKLEVDKIKEAYKIHSRHENANTELTHFLDTLKQKLTALCNRLRRYKETTLRKQQNGLFNNNEKLFYRNLNSNIQDSNVVTVTDMPEAKKLHQFWSNIWSNPKTHHETDWIKRDRELLVDLPEMKFDEINIDILKQVINKTHNWKATGSDKIHNYWYKKFTYLHPFLLCHINAFIKKPEIMPHYVTLGSTYMISKDRTDLKNPAKYRPITCLQSIYKIITSCLSQLIYIHVISQNILAEQQKGCRKGSLGCKEQLTIDAVVSKQAITKKRNIYTMYIDYKKAFDSVPHSWLIYILEHYKIHPHIIEFLKNTMLHWRTILKMFNGNHSLETEIIEIRRGIFQGDALSPLWFCLALNPLSTLLNNSNMGYRLTYNSEAYTLSHLLYMDDIKLYGNSLSEINNLADLTENFSTDIHMEFGIDKCSIQSINKGKIEQNSYRLQTGEIIEPVDEVSGYKSLGFNQTKQIHEKQIKKILEKQFKSRLHKILKTHLNARNTIKAINTFVIPTLTYSFGIIHWSKSNLIKFQRLINTTLTKYRKHHPRSCIERLTLPTQEGGRGLIDIKNLHNSQVTSIRAFFHHQATKIPLHCAVVHADVKLTPLNLKDNTKQKNEAVFSAQEKINIWLQKSLHGRHRRDLMNPIVDKIASNTWLKRGDLFPETEGFMMAIQDQIIHTRNYRKHIIKDHTLQSDLCRHCHNSSETIQHITGACSTLTQTDYKHRHDQIAAIVHQYLAFKYKLVNDKTAYYKYKPDIILESREFKLYWDRTVITDKTVHFNRPDIMLHDKKKETVYLIDIAVPNTHNIASTFTEKIAKYTDLSIEIKSQWKVKNVKTIPIIISSTGVIPHSLFSSLQALGIHKLTFILLQKAVILNTCRIVRKFLSSD

SEQ ID NO: 8267 - protein, 1349 aa, Vanessa cardui
MNNNPLNKPLVPGSSMGDADDSRLLTRGARGKMNLRVGILNYQTTAASLSDSDTTESISSLLATDVVQKASAETSAPAKASKRARRKWTEAMNIFILRTYFILTSMETNTRSYLPELHSRFTEKFPDMQASRQHVGGQRRAIVRNNLLTTEQIQMIREEAGDYLKKHSGPIRNNVSGSQRMRWDNDLNEFIMRSYYRITKVETNKTAYRRLLHQCFILEYPNLSHVSEQRIADQRRIIVNNKLINTDRLKELKDEIAIELASHINNNTNISERNTPVQISQLQNFALDNTQIATAATPNNLLTLNPISPPIISENTQLLHVASHNTVQDSEHSNNLQHLPNLTSDMQNQIKDTFLLLLNKYKNLDPTTRPSIPKQKTSKKFASIVQYINLSVLPAHISPESDFSEIQNAIYCGGVTASICNGCNISDHQPIHRTRPTPKWQKRLEDKVAALRIKIGRLTEYINGNTSRKIKLEVDKIKEAYKIHSRHENANTELTHFLDTLKQKLTALCNRLRRYKETTLRKQQNGLFNNNEKLFYRNLNSNIQDSNVVTVTDMPEAKKLHQFWSNIWSNPKTHHETDWIKRDRELLVDLPQMKFDEINIDILKQVINKTHNWKATGSDKIHNYWYKKFTYLHPFLLCHINAFIKKPEIMPHYVTLGSTYMISKDRTDLKNPAKYRPITCLQSIYKIITSCLSQLIYSHVISQNILAEQQKGCRKGSLGCKEQLTIDAVVSKQAITKKRNIYTMYIDYKKAFDSVPHSWLIYILEHYKIHPHIIEFLKNTMLHWRTILKMFNGNHSLETEIIEIRRGIFQGDALSPLWFCLALNPLSTLLNNSNMGYRLTYNSEAYTLSHLLYMDDIKLYGNSLSEINNLADLTENFSTDIHMEFGIDKCSIQSINKGKIEQNSYRLQTGEIIEPVDEVSGYKYLGFNQTKQIHEKQIKKILEKQFKSRLHKILKTHLNARNTIKAINTFVIPTLTYSFGIIHWSKSNLIKFQRLINTTLTKYRKHHPRSCIERLTLPTQEGGRGLIDIKNLHNSQVTSIRAFFHHQATKIPLHCAVVHADVKLTPLNLKDNTKQKNEAVFSAQEKINIWLQKSLHGRHRRDLMNPIVDKIASNTWLKRGDLFPETEGFMMAIQDQIIHTRNYRKHIIKDHTLQSDLCRHCHNSSETIQHITGACSTLTQTDYKHRHDQIAAIVHQYLAFKYKLVNDKTAYYKYKPDIILESREFKLYWDRTVITDKTVHFNRPDIMLHDKKKETVYLIDIAVPNTHNIASTFTEKIAKYTDLSIEIKSQWKVKNVKTIPIIISSTGVIPHSLFSSLQALGIHKLTFILLQKAVILNTCRIVRKFLSSD

SEQ ID NO: 8268 - protein, 1008 aa, Biston betularia
MKHNIEDMFLSTVAKYKNVDPTHRPSIPKQKTSKKFAGIVQYLNLTVLPKYVSTNTDFNTTQNAIYSGAYTAASFNGCKIDNPAKHNNTRTSNIPKWQKRLENKITDLRARIGRLTEFINGNTSPTLKRQIDKIKSAYKIHSRHENENTDLIHFLDTLKQKLSALSNRLRRYKETSIRKQQNSQFNNNEKLFYRNLTSPQSVQVNTNTQTPEPEALHQYWSNIWSNPKTHVDSEWIRQDRELLSEIPNMTFEEIDIETLQFVINKTHNWKATGSDKIHNYWYKKFTYIHTVLLTHINSFIKSPNTIPDYIAVGTTYMLPKDKSDSKNPAKYRPITCLQNVYKIITSCVGQLVYKHVTLHNLLAEQQKGCRKNSLGCKEQLTIDAVVSRQALKKKRNIFTMYIDYKKAFDSVPHSWLLYILDHYKIHPQITDFLRNVMQKWKTKLKIFNEGSCLETDSIAIRRGIFQGDAFSPLWFCMALNPLSNLLNKSTNGYKITYDNTYFTVSHLLYMDDIKLYGSSLQEIHNLADITESFSSDIQMEFGIDKCKIQSICNGKVEKNSYPLQTGEVVEPLDEFSGYKYLGFIQTQQIHQKHTKKALEEQFISRLHKILNTQLNARNTIKAINTYAIPILTYSFGIIQWSKTNLVKLQRLINTNMTKHRKHHPRSCVERLTLPKVEGGRGIIDIHNLHNSQIVSIRKFFHQEASRTLLHDAIVKADIKLTPLNLKSQTKQKNETIVSAEEKINCWLQKSLHGRHRRDLINPIVDKIASNMWLKRGELFPETEGFMLAIQDQTIHTLNYRKHIIKDHSLLSDLCRHCHHSPETIQHITGACSSITQTDYKHRHDQIAAVIHQYLAFKYKLINEKVAYYKYKPKIILDSREYKLYWDRTILTDKTVHFNRPDITLHDKKNDTVYLIDIAVPNTHNISSTYTEKIAKYTDLTLEIKSQWKVKTVKTIPIVISTTGVVPHSLLTSLETLNIHKLTFILLQKAAILNTCRIVRKFLSSDQHN

SEQ ID NO: 8269 - protein, 1346 aa, Biston betularia
MNTNPQNLPQVPGGSTGDADDSRQVPRGARGQMNLRARVFNYRTTRASNTDSDTSESISVTSSAEDVVREASADNPAPAKARSARRKWTEDMNIFILRTYLILTKMESNVRSYLPELHSKFVQKYPDMDVSRQRVGDQRRAIIRNNLLTTNQIQAIRYEANSQLNNTSNDPTQCVTSTDGSQRMRWDNNLNEFIIKSYYRITKVETNKTAYRQPLHQSFITQYPHLTHISEQRVADQRRVIVNNKLINSARLQELRDEVAIELALEHTHNSSCNSEPVLPSVNTQMENSVTQNSHSLANYTPQTHEHTPNSRDLSPSNNTIIERQNSTHTYLQELSTEMKHNIEDMFLSTVAKYKNVDPTHRPSIPKQKTSKKFAGIVQYLNLTVLPKYVSTNTDFNTTQNAIYSGAYTAASFNGCKIDNPAKHNNTRTSNIPKWQKRLENKITDLRARIGRLTEFINGNTSPTLKRQIDKIKSAYKIHSRHENENTDLIHFLDTLKQKLRALSNRLRRYKETSIRKQQNSQFNNNEKLFYRNLTSPQSVQVNTNTQTPEPEALHQYWSNIWSNPKTHVDSEWIRQDRELLSEIPNMTFEEIDIETLQFVINKTHNWKATGSDKIHNYWYKKFTYIHTVLLTHINSFIKSPNTIPDYIAVGTTYMLPKDKSDSKNPAKYRPITCLQNVYKIITSCVGQLVYKHVTLHNLLAEQQKGCRKNSLGCKEQLTIDAVVSRQALKKKRNIFTMYIDYKKAFDSVPHSWLLYILDHYKIHPQITDFLRNVMQKWKTKLKIFNEGSCLETDSIAIRRGIFQGDAFSPLWFCMALNPLSNLLNKSTNGYKITYDNTYFTVSHLLYMDDIKLYGSSLQEIHNLADITESFSSDIQMEFGIDKCKIQSICNGKVEKNSYPLQTGEVVEPLDEFSGYKYLGFIQTQQIHQKHTKKALEEQFISRLHKILNTQLNARNTIKAINTYAIPILTYSFGIIQWSKTNLVKLQRLINTNMTKHRKHHPRSCVERLTLPKVEGGRGIIDIHNLHNSQIVSIRKFFHQEASRTLLHDAIVKADIKSTPLNLKSQTKQKNETIVSAEEKINCWLQKSLHGRHRRDLISPIVDKIASNMWLKRGELFPETEGFMLAIQDQTIHTLNYRKHIIKDHSLLSDLCRHCHHSPETIQHITGACSSITQTDYKHRHDQIAAVIHQYLAFKYKLINEKVAYYKYKPKIILDSREYKLYWDRTILTDKTVHFNRPDITLHDKKNDTVYLIDIAVPNTHNISSTYTEKIAKYIDLTLEIKSQWKVKTVKTIPIVISTTGVVPHSLLTSLETLNIHKLTFILLQKAAILNTCRIVRKFLSSDQHN

SEQ ID NO: 8270 - protein, 1346 aa, Biston betularia
MNTNPQNLPQVPGGSTGDADDSRQVPRGARGQMNLRARVFNYRTTRASNTDSDTSESISVTSSAEDVVREASADNPAPAKARSARRKWTEDMNIFILRTYLILTKMESNVRSYLPELHSKFVQKYPDMDVSRQRVGDQRRAIIRNNLLTTNQIQAIRYEANSQLNNTSNDPTQCVTSTDGSQRMRWDNNLNEFIIKSYYRITKVETNKTAYRQPLHQSFITQYPHLTHISEQRVADQRRVIVNNKLINSARLQELRDEVAIELALEHTHNSSCNSEPVSPSVNTQMENSVTQNSHSLANYTPQTHEHTPNSRDLSPSNNTIIERQNSTHTYLQELSTEMKHNIEDMFLSTVAKYKNVDPTHRPSIPKQKTSKKFAGIVQYLNLTVLPKYVSTNTDFNTTQNAIYSGAYTAASFNGCKIDNPAKHNNTRTSNIPKWQKRLENKITDLRARIGRLTEFINGNTSPTLKRQIDKIKSAYKIHSRHENENTDLIHFLDTLKQKLSALSNRLRRYKETSIRKQQNSQFNNNEKLFYRNLTSPQSVQVNTNTQTPEPEALHQYWSNIWSNPKTHVDSEWIRQDRELLSEIPNMTFEEIDIETLQFVINKTHNWKATGSDKIHNYWYKKFTYIHTVLLTHINSFIKSPNTIPDYIAVGTTYMLPKDKSDSKNPAKYRPITCLQNVYKIITSCVGQLVYKHVTLHNLLAEQQKGCRKNSLGCKEQLTIDAVVSRQALKKKRNIFTMYIDYKKAFDSVPHSWLLYILDHYKIHPQITDFLRNVMQKWKTKLKIFNEGSCLETDSIAIRRGIFQGDAFSPLWFCMALNPLSNLLNKSTNGYKITYDNTYFTVSHLLYMDDIKLYGSSLQEIHNLADITESFSSDIQMEFGIDKCKIQSICNGKVEKNSYPLQTGEVVEPLDEFSGYKYLGFIQTQQIHQKHTKKALEEQFISRLHKILNTQLNARNTIKAINTYAIPILTYSFGIIQWSKTNLVKLQRLINTNMTKHRKHHPRSCVERLTLPKVEGGRGIIDIHNLHNSQIVSIRKFFHQEASRTLLHDAIVKADIKLTPLNLKSQTKQKNETIVSAEEKINCWLQKSLHGRHRRDLINPIVDKIASNMWLKRGELFPETEGFMLAIQDQTIHTLNYRKHIIKDHSLLSDLCRHCHHSPETIQHITGACSSITQTDYKHRHDQIAAVIHQYLAFKYKLINEKVAYYKYKPKIILDSREYKLYWDRTILTDKTVHFNRPDITLHDKKNDTVYLIDIAVPNTHNISSTYTEKIAKYTDLTLEIKSQWKVKTVKTIPIVISTTGVVPHSLLTSLETLNIHKLTFILLQKAAILNTCRIVRKFLSSDQHN

SEQ ID NO: 8271 - protein, 760 aa, Biston betularia
MTFEEIDIETLQFVINKTHNWKATGSDKIHNYWYKKFTYIHTVLLTHINSFIKSPNTIPDYIAVGTTYMLPKDKSDSKNPAKYRPITCLQNVYKIITSCVGQLVYKHVTLHNLLAEQQKGCRKNSLGCKEQLTIDAVVSRQALKKKRNIFTMYIDYKKAFDSVPHSWLLYILDHYKIHPQITDFLRNVMQKWKTKLKIFNEGSCLETDSIAIRRGIFQGDAFSPLWFCMALNPLSNLLNKSTNGYKITYDNTYFTVSHLLYMDDIKLYGSSLQEIHNLADITESFSSDIQMEFGIDKCKIQSICNGKVEKNSYPLQTGEVVEPLDEFSGYKYLGFIQTQQIHQKHTKKALEEQFISRLHKILNTQLNARNTIKAINTYAIPILTYSFGIIQWSKTNLVKLQRLINTNMTKHRKHHPRSCVERLTLPKVEGGRGIIDIHNLHNSQIVSIRKFFHQEASRTLLHDAIVKADIKLTPLNLKSQTKQKNETIVSAEEKINCWLQKSLHGRHRRDLINPIVDKIASNMWLKRGELFPETEGFMLAIQDQTIHTLNYRKHIIKDHSLLSDLCRHCHHSPETIQHITGACSSITQTDYKHRHDQIAAVIHQYLAFKYRLINEKVAYYKYKPKIILDSREYKLYWDRTILTDKTVHFNRPDITLHDKKNDTVYLIDIAVPNTHNISSTYTEKIAKYTDLTLEIKSQWKVKTVKTIPIVISTTGVVPHSLLTSLETLNIHKLTFILLQKAAILNTCRIVRKFLSSDQHN

SEQ ID NO: 8272 - protein, 1352 aa, Biston betularia
MNMNPKNLPQVPGGSTRDADDSRQVPRGTRGQMNLRARVFNYRTTRASNTDSDTSESISVASSAEDVVREASADNPAPAKARSARRKWTEDMNIFILRTYLILTNMETNVGSYLAELHSRFLQEFPSMDVSRQRVGDQRRAIIRNNLLTTEQIQAVHREVNAQLNNNTNELTQSFVNIGGSQRMRWDNDLNEFIIKSYYRITEVDTNKTAYRRPLHQSFITQYPHLSHISEQRVADQRRVIVNNKLISDARLQELRDEIAIELVTNRNYTPVNSETVSPPYNTLIENHDSVISQSLSDMLITPQTPENIPNPTDSSPITNTNVEQNEVDHSQINRQDLPKELERRIEDMFLTAITKFRYVDPTSRPSIPKQKTSKKLASIVQYINLTVLPRYILSGADFNATQNAIYSGAYAAAICNGCKIDESTNHNTIRPKSTPKWQKRLENRVTDIRAKIGRLTEYINGNTSPALKRQVDKIKLAYKIHSRHENENTNLSHFLDTLKQKLSALSNRLRRYKETSTRKKQNTLFNNNEKLFYRNLTSPQTNIQGNTTENTQTPEPEALHQYWSNIWSNPKTHNESEWMKQDREALSETPEMTFEEIDIDTLQFVINKTHNWKATGSDKIHNYWYKKFTNIHPLLLTHINNFIKFPTNIPDYVTVGTTYMIPKDITDPKNPAKYRPITCLQNIYKIITSCIGQLIYRHVTTHNLLAEQQKGCRKGSLGCKEQLTIDAVVSKQALKKKRDIFTMFIDYKKAFDSVPHSWLLYILDHYKIHPKIIDFLREAMLKWKTTLKAFNEGSCLETDPIAIRRGIFQGDALSPLWFCMALNPLSTLLNKSNSGYKITHDNTYYTLSHLLYMDDIKLYGSSLQEIHNLADITETFSSDIQMEFGIDKCKIQSTRDGKVENNSYSLRTGEVVEPLDEYAGYKYLGFSQTQQIHQKHTKKVLEEQFKSRLHRILNTQLNARNTIKATNTYAIPILTYSFGIIKWSKTDLIKLQRLINTTMTKYRKHHPRACVERLTLPKIEGGRGIIDIQNLHNSQITSIRRFFHQQAGKTSLHNAIVNADTKFTPLNLKSQAIQKNEIIVLADEKINRWLQKSLHGRHRRDLINPIVDKVASNMWLKRGELFPETEGFMLAIQDQTIHTLNYRKHIIKDHSLLSDLCRHCHHSPETIQHITGACSSIAQNDYKHRHDQIAAVIHQYLAFKYKLINQKMAYYKYKPEIILDSKDYKLYWDRTIITDKTVHFNRPDITLHDKKNNTVYLIDIAVPNTHNISSTYTEKIAKYTDLTIEIKSQWKVNIVKTIPIVISTTGVVPHSLLTSLETLNIHKLTFILLQKAAILNTCRIVRKFMSLDSLN

SEQ ID NO: 8273 - protein, 1346 aa, Biston betularia
MNTNPQNLPQVPGGSTGDADDSRQVPRGARGQMNLRARVFNYRTTRASNTDSDTSESISVTSSAEDVVREASADNPAPAKARSARRKWTEDMNIFILRTYLILTKMESNVRSYLPELHSKFVQKYPDMDVSRQRVGDQRRAIIRNNLLTTNQIQAIRYEANSQLNNTSNDPTQCVTSTDGSQRMRWDNNLNEFIIKSYYRITKVETNKTAYRQPLHQSFITQYPHLTHISEQRVADQRRVIVNNKLINSARLQELRDEVAIELALEHTHNSSCNSEPVSPSVNTQMENSVTQNSHSLANYTPQTHEHTPNSRDLSPSNNTIIERQNSTHTYLQELSTEMKHNIEDMFLSTVAKYKNVDPTHRPSIPKQKTSKKFAGIVQYLNLTVLPKYVSTNTDFNTTQNAIYSGAYTAASFNGCKIDNPAKHNNTRTSNIPKWQKRLENKITDLRARIGRLTEFINGNTSPTLKRQIDKIKNAYKIHSRHENENTDLIHFLDTLKQKLSALSNRLRRYKETSIRKQQNSQFNNNEKLFYRNLTSPQSVQVNTNTQTPEPEALHQYWSNIWSNPKTHVDSEWIRQDRELLSEIPNMTFEEIDIETLQFVINKTHNWKATGSDKIHNYWYKKFTYIHTVLLTHINSFIKSPNTIPDYIAVGTTYMLPKDKSDSKNPAKYRPITCLQNVYKIITSCVGQLVYKHVTLHNLLAEQQKGCRKNSLGCKEQLTIDAVVSRQALKKKRNIFTMYIDYKKAFDSVPHSWLLYILDHYKIHPQITDFLRNVMQKWKTKLKIFNEGSCLETDSIAIRRGIFQGDAFSPLWFCMALNPLSNLLNKSTNGYKITYDNTYFTVSHLLYMDDIKLYGSSLQEIHNLADITESFSSDIQMEFGIDKCKIQSICNGKVEKNSYPLQTGEVVEPLDEFSGYKYLGFIQTQQIHQKHTKKALEEQFISRLHKILNTQLNARNTIKAINTYAIPILTYSFGIIQWSKTNLVKLQRLINTNMTKHRKHHPRSCVERLTLPKVEGGRGIIDIHNLHNSQIVSIRKFFHQEASRTLLHDAIVKADIKLTPLNLKSQTKQKNETIVSAEEKINCWLQKSLHGRHRRDLINPIVDKIASNMWLKRGELFPETEGFMLAIQDQTIHTLNYRKHIIKDHSLLSDLCRHCHHSPETIQHITGACSSITQTDYKHRHDQIAAVIHQYLAFKYKLINEKVAYYKYKPKIILDSREYKLYWDRTILTDKTVHFNRPDITLHDKKNDTVYLIDIAVPNTHNISSTYTEKIAKYTDLTLEIKSQWKVKTVKTIPIVISTTGVVPHSLLTSLETLNIHKLTFILLQKAAILNTCRIVRKFLSSDQHN

SEQ ID NO: 8274 - protein, 1340 aa, Biston betularia
MNTNPQNLPQVPGGSTGDADDSRQVPRGARGQMNLRARVFNYRTTRASNTDSDTSESISVTSSAEDVVREASADNPAPAKARSARRKWTEDMNIFILRTYLILTKMESNVRSYLPELHSKFVQKYPDMDVSRQRVGDQRRAIIRNNLLTTNQIQAIRYEANSQLNNTSNDPTQCVTSTDGSQRMRWDNNLNEFIIKSYYRITKVETNKTAYRQPLHQSFITQYPHLTHISEQRVADPRRVIVNNKLINSARLQELRDEVAIELALEHTHNSSCNSEPVSPSVNTQMENSVTQNSHSLANYTPQTHEHTPNSRDLSPSNNAIIERQNSTHTYLQELSTEMKHNIEDMFLSTVAKYKNVDPTHRPSIPKQKTSKKFAGIVQYLNLTVLPKYVSTNTDFNTTQNAIYSGAYTAASFNGCKIDNPAKHNNTRTSNIPKWQKRLENKITDLRARIGRLTEFINGNTSPTLCGKSAYKIHSRHENENTDLIHFLDTLKQKLSALSNRLRRYKETSIRKQQNSQFNNNEKLFYRNLTSPQSVQVNTNTQTPEPEALHQYWSNIWSNPKTHVDSEWIRQDRELLSEIPNMTFEEIDIETLQFVINKTHNWKATGSDKIHNYWYKKFTYIHTVLLTHINSFIKSPNTIPDYIAVGTTYMLPKDKSDSKNPAKYRPITCLQNVYKIITSCVGQLVYKHVTLHNLLAEQQKGCRKNSLGCKEQLTIDAVVSRQALKKKRNIFTMYIDYKKAFDSVPHSWLLYILDHYKIHPQITDFLRNVMQKWKTKLKIFNEGSCLETDSIAIRRGIFQGDAFSPLWFCMALNPLSNLLNKSTNGYKITYDNTYFTVSHLLYMDDIKLYGSSLQEIHNLADITESFSSDIQMEFGIDKCKIQSICNGKVEKNSYPLQTGEVVEPLDEFSGYKYLGFIQTQQIHQKHTKKALEEQFISRLHKILNTQLNARNTIKAINTYAIPILTYSFGIIQWSKTNLVKLQRLINTNMTKHRKHHPRSCVERLTLPKVEGGRGIIDIHNLHNSQIVSICKFFHQEASRTLLHDAIVKADIMLTPLNLKSQTKQKNETIVSAEEKINCWLKSLHGRHRRDLINPIVDKIASNMWLKRGELFPETEGFMLAIQDQTIHTLNYRKHIIKDHSLLSDLCRHCHHSPETIQHITGACSSITQTDYKHRHDQIAAVIHQYLAFKYKLINEKVAYYKYKPKIILDSREHKLYWDRTILTDKTVHFNRPDITLHDKKNDTVYLIDIAVPNTHNISSTYTEKIAKYTDLTLEIKSQWKVKTVKTIPIVITTTGVVPHSLLTSLETLNIHKLTFILLQKAAILNTCRIVRKFLSSDQHN

SEQ ID NO: 8275 - protein, 1392 aa, Biston betularia
MNMNPKNCPQVPGGSKGDADGSKRRPLRARGEKNLRARVFNCPTTKASHTDKNINEHDDKSSHVDSTIGNHDDPACQTDTEIINSISINAKSIGTLPTTENVVQETSVNNLAPAEVVTRARKKWTQDMNIFILRTYFLLTSLEADTKSYLTDLHTKFIEKFPSMVVSKQRVGDQRRAIIRNNLLTPDQIRELRAEVETELKNSNSQNNTTQTMQNTNGTQRMRWKNEINETIIRNYYRITQLETNKSAYRQLLHKAVTEQHPEISHVSEQRIADQRRVIANNKLINSERLQQIRDEVSIELGTPIQPNNMTPMISTQNIPQTTTISEANPTYDESQFLITGTDLNTLLSQQSATETDLITNMRDKDNSSQDNPNQPYTTTELISSEMQTQIEDIMTTTMTKYNEIDPTKRPAIPRQKQGRKLTMITHYINEHLLKKYITNDADFQTVQNIIFSAAYAATIANGGKITDSLNVHQKNKNQKPRWQKRLEIRIQELRTKIGRLTEFIKGNTSPRLKKYIERIMQNHKIHSQHEAENTELAHFLDTLKQKLNALSSRLRRYIATTKRKTQNKLFNTKEGVFYRTLTEGGTDNSSVTDLPHPETLHRFWYEIWSIPQVHNIDSDWIKEDLKTMHDTPAMLYDDIHIDTFQKIIKKTHNWKATGSDKIHNYWYKHFTFAHPYILNHINSFIQSPETMPSYLTLGITYMLPKDKTDLKNPSKYRPITCLQNIYKIITACINELIYKHTQTNNLLAEQQKGCRRHSQGCKEQLIIDAIVSKQAITKKRDIFTMYIDYKKAFDSVPHTWLVYILEHYKVHPSLVNFLKTAMLHWKTVLKLNLGDNSVETERIPIRRGIFQGDALSPLWFCLSLNPLSNLLNNSCNGYNITYERTSYTLSHLLYMDDIKLFGNNLQEIHHLADITHSFSKDIQMEFGIDKCKILSVHNGQIEQNIHELTDGQQIDPVDEISGYKYLGYFQTQQIHQKQTKETIEQKFKNRLHKILNTQLNARNTIKAINSYAIPILTYSFGIINWSQSHLIRFQRIINTMMTKYRKHHPRSCTERLTLPKIEGGRALIDIKNLHNTQVTRLRKFFHEKANASLMHSAIITADRKYTPLNLHNHTKQTNEIIIGPEQKQQNWLQKSLHGRHRRDLLNPNVDKILSNAWLKRGELFPETEGFMLAIQDQVIDTRNYRKYIIKDRSTSDLCRHCRSASETIQHITGACRSITQTDYKHRHDQVASIVHQYLAYKYKLITEKVAYYKYAPEVVLESAEYKIYWDRTIITDKTIHHNRPDITVYDKKQKTVFLIDIAVPNTHNLTPTFTEKLTKYADLAIELKTQWRAQTVKTVPIILSSTGVIPRTLPTSLTTLGIHRLTIILLQKAVILNTCRIVRKFLSLDEQ

SEQ ID NO: 8276 - protein, 1392 aa, Erannis defoliaria
MKMNPKNCPQVSGGSRGDADGSRRRPLRARGEKNLRARVLNCPTTNANHKDNEIRNFDDTAFHTGDEISNYDDLATHTDTEIINTISANSKTTNIAPAAEEVVQETLVNNPVPATVVKRARKKWTQDMNIFILRTYLILTALETDTKSYLTDLHTKFSKRFPDMEVSKQRVGDQRRAIIRSNLLTPEQINEIRNEVATELNNPISQNITQLQNVSQNSGGTQRMRWRNDINETIMRNYYRITQLETNKSAYRQLLHKAVIEQLPEISHVSEQRIADQRRVIVNNKLIRYERLQQIQDEISIELGASSQTQTVTTNTTLLNSTQQTLIMPQATPINEDFCNEDQHSTTETDLNTPEAEQNDTDTDSGTIIRNTDNLYEEDEPNNSQIPIEMQTLIETTLAETIEKYKHVDPITRPSIPKQKQSKTLSMITHYINKHLLKKYTTTDCDYPVVQTAIYCAAYTAVIANGGKIKDTPNIQKSTNLKPRWQKRLESRIQDLRIKIGRLTEYIRGNTSPRLKKYIDQIKQNHKIHSQHEAENTELSHFLDTLKQKLNALSSRLRRYVATTKRKTQNKLFNMNEKVFYRTLTDGQTDNTTAAEPPHPETLHKFWYEIWSIPQEHNKDSDWIKQDAKLVQNIPTMAFENISIDTFKQIVKKTHNWKATGSDKIHNYWYKHFTFTHPCLLRHINTFIQSPETMPPYLTLGTTYMLPKDKTDLKNPSKYRPITCLQNIYKIITSCISELIYKHTQINGILAEQQKGCRRHSQGCKEQLIIDTIASKQASTKKRDIFTMYVDYKKAFDSVPHTWLIYILEHYKVHPILINFLKTAMTHWKTIIKLNTGDTPIETEAIPIRRGIFQGDAFSPLWFCLSLNPLSNLLNNSNYGYNITYNDTAYTLSHLLYMDDIKLFGSKLHEIHDLADITHSFSKDIHMEFGIDKCKILSVHEGQIEQNIYELTDGQQIDPVDEISGYKYLGYFQTQQIHQKQSKNTIEQNFKSRLHKILNTQLNAKNMIKAINSFAIPILTYSFGIINWPQTHLIKLQRVINTLMTKYRKHHPRSCIERLTLPNIEGGRALIDIKNLHNTQITRLRAFFHERSKETTMHNAIVNADRKYTPLNLYNRTQQNNETIVSPEQKQFNWLQKSLHGRHRRDLLNPNVDKIASNMWLKRGELFPETEGFMLAIQDQVIDTRNYRKYIIKDSTSDLCRHCHSASETIQHITGACRSITQTDYKHRHDQVAAIIHQYLAYKHRLISEKTAYYKYSPEVVLESADYKMYWDRTIITDKTIHHNRPDITVLDKKGKIVFLIDVAIPNTHNITSTYTEKLSKYTDLTIDLKTQWRVQTVKTIPIILSSTGVIPHTLKTSLDSLDIHQLTSILLQKAVILNTCRIVRKFLSLEE

SEQ ID NO: 8277 - protein, 1392 aa, Erannis defoliaria
MKMNPKNCPQVPGGSRGDADGSRRRPLRARGEKNLRVRVLNCPTTNANHKDNEIRNFGDTAFHTGDEISNHDDLATHTDTEIINTIRANSKTTNIAPAAEDVVQETLVNNPVPATVVKRARKKWTQDMNIFILRTYLILTALETDTKSYLTDLHTKFSKRFPDMEVSKQRVGDQRRAIIRSNLLTPEQINEIRNEVATELNNPISQNITQLQNVSQNSGGTQRMRWRNDINETIMRNYYRITQLETNKSAYRQLLHKAVIEQHPEISHVSEQRIADQRRVIVNNKLIGYERLQQIQDEISIELGASSQTQTVTTNTTPLNSTQQTLIMPQATPINEDFCNEDQHSTTETDLNTPEAEQNDTDTDSGTIIRNTDNLYEEDEPNNSQIPIEMQTLIETTLAETIEKYKHVDPITRPSIPKQKQSKTLSMITHYINKHLLKKYTTTDCDFPVVQTAIYCAAYTAVIANGGKIKDTPNIQKSTNQKPRWQKRLESRIQDLRIKIGRLTEYIRGNTSPRLKKYIDQIKQNHKIHSQHEAENTELSHFLDTLKQKLNALSSRLRRYVATTKRKTQNKLFNMNEKVFYRTLTDGQTDNTTAAEPPHPETLHKFWYEIWSIPQEHNKDSDWIKQDAKLVQNIPTMAFENISIDTFKQIVKKTHNWKATGSDKIHNYWYKHFTFTHPCLLRHINTFIQSPETMPPYLTLGTTYMLPKDKTDLKNPSKYRPITCLQNIYKIITSCLSELIYKHTQINGILAEQQKGCRRHSQGCKEQLIIDTIASKQASTKKRDIFTMYVDYKKAFDSVPHTWLIYILEHYKVHPILINFLKTAMTHWKTIIKLNTGDNPIETEAIPIRRGIFQGDAFSPLWFCLSLNPLSNLLNSSNYGYNITYNDTSYTLSHLLYMDDIKLFGSKLHEIYDLADITHSFSKDIHMEFGIDKCKILSVHEGQIEQNIYELTDGQQIDPVDEISGYKYLGYFQTQQIHQKQSKNTIEQKFKSRLHKILNTQLNAKNMIKAINSFAIPILTYSFGIINWPQTHLIKLQRVINTLMTKYRKHHPRSCIERLTLPNIEGGRALIDIKNLHNTQITRLRAFFHERSNETTMHNAIVNADRKYTPLNLYNRTQQNNETIVSPEQKQFNWLQKSLHGRHRRDLLNPNVDKIASNMWLKRGELFPETEGFMLAIQDQVIDTRNYRKYIIKDSTSDLCRHCHSASETIQHITGACRSITQTDYKHRHDQVAAIIHQYLAYKHRLISEKTAYYKYSPEVVLESADYKMYWDRTIITDKTIHHNRPDITVLDKKRKIVFLIDVAIPNTHNITSTYTEKLSKYTDLTIELKTQWRVQTVKTIPIILSSTGVIPHTLKTSLDSLDIHQLTSILLQKAVILNTCRIVRKFLSLEE

SEQ ID NO: 8278 - protein, 1392 aa, Erannis defoliaria
MKMNPKNCPQVPGGSRGDADGSRRRPLRARGEKNLRARVLNCPTTNANHKDNEIRNFGDTAFHTGDEISNHDDLATHTDTEIINTIRANSKTTNIAPAAEDVVQETLVNNPVPATVVKRARKKWTQDMNIFILRTYLILTVLETDTKSYLTDLHTKFSKRFPDMEVSKQRVGDQRRAIIRSNLLTPEQINEIRNEVATELNNPISQNITQLQNVSQNSGGTQRMRWRNDINETIMRNYYRITQLETNKSAYRQLLHKAVIEQHPEISHVSEQRIADQRRVIVNNKLIGYERLQQIQDEISIELGASSQTQTVTTNTTPLNSTQQTLIMPQATPINEDFCNEDQHSTTETDLNTPEAEQNDTDTDSGTIIRNTDNLYEEDEPNNSQIPIEMQTLIETTLAETIEKYKHVDPITRPSIPKQKQSKTLSMITHYINKHLLKKYTTTDCDFPVVQTAIYCAAYTAVIANGGKIKDTPNIQKSTNQKPRWQKRLESRIQDLRIKIGRLTEYIRGNTSPRLKKYIDQIKQNHKIHSQHEAENTELSHFLDTLKQKLNALSSRLRRYVATTKRKTQNKLFNMDEKVFYRTLTDGQTDNTTAAEPPHPETLHKFWYEIWSIPQEHNKDSDWIKQDAKLVQNIPTMAFENISIDTFKQIVKKTHNWKATGSDKIHNYWYKHFTFTHPCHLRHINTFIQSPETMPPYLTLGTTYMLPKDKTDLKNPSKYRPITCLQNIYKIITSCLSELIYKHTQINGILAEQQKGCRRHSQGCKEQLIIDTIASKQASTKKRDIFTMYVDYKKAFDSVPHTWLIYILEHYKVHPILINFLKTAMTHWKTIIKLNTGDNPIETEAIPIRRGIFQGDAFSPLWFCLSLNPLSNLLNSSNYGYNITYNDTSYTLSHLLYMDDIKLFGSKLHEIYDLADITHSFSKDIHMEFGIDKCKILSVHEGQIEQNIYELTDGQQIDPVDEISGYKYLGYFQTQQIHQKQSKNTIEQKFKSRLHKILNTQLNAKNMIKAINSFAIPILTYSFGIINWPQTHLIKLQRVINTLMTKYRKHHPRSCIERLTLPNIEGGRALIDIKNLHNTQITRLRAFFHERSNETTMHNAIVNADRKYTPLNLYNRTQQNNETIVSPEQKQFNWLQKSLHGRHRRDLLNPNVDKIASNMWLKRGELFPETEGFMLAIQDQVIDTRNYRKYIIKDSTSDLCRHCHSASETIQHITGACRSITQTDYKHRHDQVAAIIHQYLAYKHRLISEKTAYYKYSPEVVLESADYKMYWDRTIITDKTIHHNRPDITVLDKKRKIVFLIDVAIPNTHNITSTYTEKLSKYTDLTIELKTQWRVQTVKTIPIILSSTGVIPHTLKTSLDSLDIHQLTSILLQKAVILNTCRIVRKFLSLEE

SEQ ID NO: 8279 - protein, 1392 aa, Erannis defoliaria
MKMNPKNCPQVPGGSRGDADGSRRRPLRARGEKNLRARVLNCPTTNANHKDNEIRNFDDTAFHTGDEISNYDDLATHTDTEIINTISANSKTTNIAPAAEDVVQETLVNNPVPATVVKRARKKWTQDMNIFILRTYLILTALETDTKSYLTDLHTKFSKRFPDMEVSKQRVGDQRRAIIRSNLLTPEQINEIRNEVATELNNPISQNITQLQNVSQNSGGTQRMRWRNDINETIMRNYYRITQLETNKSAYRQLLHKAVIEQHPEISHVSEQRIADQRRVIVNNKLIRYERLQQIQDEISIELGASSQTQTVTTNTTPLNSTQQTLIMPQATPINEDFCNEDQHSTTETDLNTPEAEQNDTDTDSGTIIRNTDNLYEEDEPNNSQIPIEMQTLIETTLAETIEKYKHVDPITRPSIPKQKQSKTLSMITHYINKHLLKKYTTTDCDYPVVQTAIYCAAYTAVIANGGKIKDTPNIQKSTNLKPRWQKRLESRIQDLRIKIGRLTEYIRGNTSPRLKKYINQIKQNHKIHSQHEAENTELSHFLDTLKQKLNALSSRLRRYVATTKRKTQNKLFNMNEKVFYRTLTDGQTDNTTAAEPPHPETLHKFWYEIWSIPQEHNKDSDWIKQDAKLVQNIPTMAFENISIDTFKQIVKKTHNWKATGSDKIHNYWYKHFTLTHPCLLRHINTFIQSPETMPPYLTLGTTYMLPKDKTDLKNPSKYRPITCLQNIYKIITSCISELIYKHTQINGILAEQQKGCRRHSQGCKEQLIIDTIASKQASTKKRDIFTMYVDYKKAFDSVPHTWLIYILEHYKVHPILINFLKTAMTHWKTIIKLNTGDTPIETEAIPIRRGIFQGDAFSPLWFCLSLNPLSNLLNNSNYGYNITYNDTSYTLSHLLYMDDIKLFGSKLHEIHDLADITHSFSKDIHMEFGIDKCKILSVHEGQIEQNIYELTDGQQIDPVDEISGYKYLGYFQTQQIHQKQSKNTIEQNFKSRLHKILNTQLNAKNMIKAINSFAIPILTYSFGIINWPQTHLIKLQRVINTLMTKYRKHHPRSCIERLTLPNIEGGRALIDIKNLHNTQITRLRAFFHERSKETTMHNAIVNADRKYTPLNLYNRTQQNNETIVSPEQKQFNWLQKSLHGRHRRDLLNPNVDKIASNMWLKRGELFPETEGFMLAIQDQVIDTRNYRKYIIKDSTSDLCRHCHSASETIQHITGACRSITQTDYKHRHDQVAAIIHQYLAYKHRLISEKTAYYKYSPEVVLESADYKMYWDKTIITDKTIHHNRPDITVLDKKRKIVFLIDVAIPNTHNITSTYTEKLSKYTDLTIDLKTQWRVQTVKTIPIILSSTGVIPHTLKTSLDSLDIHQLTSILLQKAVILNTCRIVRKFLSLEE

SEQ ID NO: 8280 - protein, 1350 aa, Ennomos fuscantarius
MMVKKKICPQVPGDSRGNADDSRHRSPRVRGQVNLRVGVLSCQTTNASHMDNEIDSLSEKNNETIAVTSLPTEDVVQETSVNEPAPAKVVTRARKKWTQDMNIFILRTYFVLTSLETNTRSYLTDLHIKFTERFPDMEVSKQRLGDQRRAIMRNKLLSTDVIDETRREAETQINSNISQSNSTTQNLITEKINTSQRIRWTCELNETIMRYYFRITQLETNKTAYRQPLHAAVITEHPEIAHVSEQRIADQRRVIINNKLINCNRLQQLRDEISRELSISQLENETTTEHLHCTQLTPINHVISTHNQITDNIVQPPSTSMSETDITTPSMHPASDELNTQRHEIQISTEMQEYIEDTLIRAIELYKKTDPTHRPAIPKQKPSRKLASITQHINQHLLPKYISSESDFTTVQTVIYCAAYTAVTQNGCKIRDRPIQRDNNRKLRWHKRLESRISELRVKIGKLTEFIRGNNSPRIKKYVDMIKENHKIHSQHEAENTQLTHFLDTLKQKLNALSNRLRRYITTTKRKSQNTLFNNNEKSFYRTLTKDQPDNDTTELPNPEELHKFWCDIWSVPKEHKDSDWIKNDAQNLNSIPSMEFEQISIDTLQHIIKKTHNWKAPGSDKIHNFWYKKFTFLHPFILNHINSFIKSPDTMPAYITLGTTYMLPKDNTDTKNPSKYRPITCLQNIYKIITSCISELVYTHTQTHKILAEQQKGCRKHSQGCKEQLTIDTIASKQAFTKKRNIFAMYIDYKKAFDSVPHSWLIYILEHYKIHPILINFLKTAMLSWKTKLKLSIGDSPIQTETISIRRGIFQGDSLSPLWFCLALNPLSNLLNNSNDGFKIKYENTSHTLSHLMYMDDIKLFGSTLQGIHNLANITQSFSSDIQMEFGIDKCKILSVRRGKIEQNLYELTDGQSIDPVDQVSGYKYLGYFQTQQIHQKQSKDTIEKKFKTRLHKILNTQLNAKNTVKAINSFAIPILTYSFGIIHWSQSHLTKLQRLINTHMTKYRKHHPRSCIERLTLPHREGGRGLIDIKNLHNSQITALRSFFHQQANHSPLHNAVTKADHKYTPLNLKDRSPQSNEILTTHEQKLQIWLQKSLHGRHRRDLLNPNIDKVSSNSWLKRGELFPETEGFMLAIQDQIIDTRNYRKHIIKDGTSDHCRHCHSASETIQHITGACRSITQTDYKHRHDQVAAIVHQYLAYKYKLIKEKTAYYKYKPEVILESDDYKLYWDRTIITDKTIHHNRPDITIYNKKIKSVYLVDIAIPNTHNIASTYTDKLAKYTDLAIELKTQWRVHTVKTVPIILSSTGIIPRTLHTSLQTLNIHQLTFILLQKAVILNSCRIVRKFLALED

SEQ ID NO: 8281 - protein, 1350 aa, Ennomos fuscantarius
MMVKKKICPQVPGDSRGNADDSRHRSPRVRGQVNLRVGVLNCQTTNASHMDNEIDSLSEKNNETIAVTSLPTEDVVQETSVNEPAPAKVVTRARKKWTQDMNIFILRTYFVLTSLETNTRSYLTDLHIKFTERFPDMEVSKQRLGDQRRAIMRNKLLSTDVIDETRREAETQINSNISQSNSTTQNLITEKINTSQRIRWTCELNETIMRYYFRITQLETNKTAYRQPLHAAVITEHPEIAHVSEQRIADQRRVIINNKLINCNRLQQLRDEISRELSISQLENETTTEHLHCTQLTPINHVISTHNQITDNIVQPPSTSMSETDITTPSMHPASDELNTQRHEIQISTEMQEYIEDTLIRAIELYKKTDPTHRPAIPKQKPSRKLASITQHINQHLLPKYISSESDFTTVQTVIYCAAYTAVTQNGCKIRDRPIQRDNNRKPRWHKRLESRISELRVKIGKLTEFIRGNNSPRIKKYVDMIKENHKIHSQHEAENTQLTHFLDTLKQKLNALSNRLRRYITTTKRKSQNTLFNNNEKSFYRTLTKDQPDNDTTELPNPEELHKFWCDIWSVPKEHKDSDWIKNDAQNLNSIPSMEFEQISIDTLQHIIKKTHNWKAPGSDKIHNFWYKKFTFLHPFILNHINSFIKSPDTMPAYITLGTTYMLPKDNTDTKNPSKYRPITCLQNIYKIITSCISELVYTHTQTHKILAEQQKGCRKHSQGCKEQLTIDTIASKQAFTKKRNIFAMYIDYKKAFDSVPHSWLIYILEHYKIHPILINFLKTAMLSWKTKLKLSIGDSPIQTETISIRRGIFQGDSLSPLWFCLALNPLSNLLNNSNDGFKIKYENTSHTLSHLMYMDDIKLFGSTLQGIHNLANITQSFSSDIQMEFGIDKCKILSVRRGKIEQNLYELTDGQSIDPVDQVSGYKYLGYFQTQQIHQKQSKDTIEKKFKTRLHKILNTQLNAKNTVKAINSFAIPILTYSFGIIHWSQSHLTKLQRLINTHMTKYRKHHPRSCIERLTLPHREGGRGLIDIKNLHNSQITALRSFFHQQANHSPLHNAVTKADHKYTPLNLKDRSPQSNEILTTHEQKLQIWLQKSLHGRHRRDLLNPNIDKVSSNSWLKRGELFPETEGFMLAIQDQIIDTRNYRKHIIKDGTSDHCRHCHSASETIQHITGACRSITQTDYKHRHDQVAAIVHQYLAYKYKLIKEKTAYYKYKPEVILESDDYKLYWDRTIITDKTIHHNRPDITIYNKKIKSVYLVDIAIPNTHNIASTYTDKLAKYTDLAIELKTQWRVHTVKTVPIILSSTGIIPRTLHTSLQTLNIHQLTFILLQKAVILNSCRIVRKFLALED

SEQ ID NO: 8282 - protein, 1272 aa, Thyatira batis
MSNNKYNLRSLPGGRRGTSGAGAGCSSMRTIGDEELIRRAPIEENTTAEEEPYPKSPSSLFSSLPSSPASYLNLPSPSIDTNPSSPCSPTEDVMQKATTADRPASASSGHRARKKWSKEMNSYILRTYFILTSMETETRSYLTELHKKFTEHFPEMEVSKQRLGDQRRAIIRNRFLSNDEISQIHKEAEELLNSQHTTSVVSPTPTSQHSTPRMRWTNEDNETIIRNYYRITNLERNITAYRQPLHTTTISQLPHLSHISEQRIADQRRAIINNRFISTERLQLIRDEVAIELNIQNTHTEMATHEPTLPELTPQYHQITQHFEQIEEEVGIESQEQQTFNISQEVKDQVENTFLETIESYKNIQPTTRPYIPKQRLSKKFAELINFINNLIEKHLNPESNFDTVQTFIYCGAYTAAIHNGSKINNNHAHQKRKQHIPAWQKRLQDRIDVLRVKIGRLTEFIKGNNSPDLKKHIDNIILNHKIHSQHENENSELPHFLDTLKQKLNALTSRLRRYKLTTKRKTQNKQFYSNEKLFYRTLSNEPITNNNDTTELPEPTNMHEFWANIWSNPVEHNNSEWISNDKHNLTDLPDMKYDHITLDLLQRIINKTHNWKATGSDKIHNYWYKKFTNIHPHLLKHINTFIQSPDTMPLYITQGTTYMLPKDKLDTKNPAKYRPITCLQNIYKIITSCITELIYRHTDTNNILAEQQKGCRRKSQGCKEQLIIDSVASKQALSKKRNIFTMYIDNKKAFDSVPHSWLIYILEHYKIHPTLIKFLKNSMLNWNTILKINNSDSCVETEAIPIRRGIFQGDSLSPLWFCLALNPLSNLLNNTNHGFQIRSENNNHTLSHLMYMDDIKLYGSTLSEINKLTDITQTFSSDIHMQFGIDKCKIQSVRKGKIEQNTYQLNNGDTIEPVDSDGYKYLGYQQSQQIHQNLTKKSLETKFKERLHKILNTHLNARNTIKAINTFAIPILTYSFGVIKWSQTNLKKHQRTINTLLTKYRKHHPRSCYERLTLPKREGGRGLIDTFFHNQTHRSSLHSATVVADTNLTPLNLKERDTQKNERLISVQDKLNTWLLKSLHGRHRRDLTDPNVDKNASNEWLRRGELFPETEGFMLAIQDQIIDTRNYRKHIIKDRTLPTDSCRHCHSNSETIQHITGACKSIAQTDYKHRHDQVAAIVHQYLAFKYSLITQKTAYYKYSPQIVLESPDYKLYWDRTIITDKTIHCNRPDITLHDKKNKTVYLIDIAIPNTHNLKSTHTEKNIQIHRPFHRA

SEQ ID NO: 8283 - protein, 1347 aa, Thyatira batis
MSNNKYNLRSLPGGRRGTSGAGAGCSSMRTIGDEELIRRAPIEENTTAEEEPYPKSPSSLFSSLPSSPASYLNLPSPSIDTNPSSPCSPTEDVMQKATTADRPASATSGHRARKKWSKEMNSYILRTYFILTSMETETRSYLTELHKKFTEHFPEMEVSKQRLGDQRRAIIRNRFLSNDEISQIRKEAEELLNSQHTTSVVSPTPTSQHSTPRMRWTNEDNETIIRNYYRITNLERNITAYRQPLHTTTISQLPHLSHISEQRIADQRRAIINNRFISTERLQLIRDEVAIELNIQNTHTEMATHEPTLPELTPQYHQITQHFEQIEEDVGIESQEQQTFNISQEVKDQVENTFLETIESYKNIQPTTRPYIPKQRLSKKFAELINFINNLIEKHLNPESNFDTVQTFIYCGAYTAAIHNGSKINNNHAHQKRKQQIPAWQKRLQDRIDVLRVKIGRLTEFIKGNNSPDLKKHIDNIILNHKIHSQHENENSELPHFLDTLKQKLNALTSRLRRYKLTTKRKTQNKQFYSNEKLFYRTLSNEPITNNNDTTELPEPTNMHEFWANIWSNPVEHNNSEWISNDKHNLTDLPDMKYDHITLDLLQRIINKTHNWKATGSDKIHNYWYKKFTNIHPHLLKHINTFIQSPDTMPLYITQGTTYMLPKDKLDTKNPAKYRPITCLQNIYKIITSCITELIYRHTDTNNILAEQQKGCRRKSQGCKEQLIIDSVASKQALSKKRNIFTMYIDYKKAFDSVPHSWLIYILEHYKIHPTLIKFLKNSMLNWNTILKINNSDSCVETEAIPIRRGIFQGDSLSPLWFCLALNPLSNLLNNTNHGFQIRSENNNHTLSHLMYMDDIKLYGSTLSEINKLTDITQTFSSDIHMQFGIDKCKIQSVRKGKIEQNTYQLNNGDTIEPVDSDGYKYLGYQQSQQIHQNLTKKSLETKFKERLHKILNTHLNARNTIKAINTFAIPILTYSFGVIKWSQTNLKKHQRTINTLLTKYRKHHPRSCYERLTLPKREGGRGLIDIQNLHNSQITTLRTFFHNQTHRSSLHSATVVADTNLTPLNLKERDTQKNERLISVQDKLNTWLLKSLHGRHRRDLTDPNVDKNASNEWLRRGELFPETEGFMLAIQDQIIDTRNYRKHIIKDRTLPTDSCRHCHSNSETIQHITGACKSIAQTDYKHRHDQVAAIVHQYLAFKYSLITQKTAYYKYSPQIVLESPDYKLYWDRTIITDKTIHCNRPDITLHDKKNKTVYLIDIAIPNTHNLKSTHTEKISKYTDLSIELKTQWRVSTVKTVPIVISSTGIIPRTLHASLNSLGIHKNIYTQLQKAVILNTCRIVRKFLSLD

SEQ ID NO: 8284 - protein, 1347 aa, Thyatira batis
MSNNKYNLRSLPGGRRGTSGAGAGCSSMRTIGDEELIRRAPIEENTTAEEEPYPKSPSSLFSSLPSSPASYLNLPSPSIDTNPSSPCSPTEDVMQKATTADRPASASSGHRARKKWSKEMNSYILRTYFILTSMETETRSYLTELHKKFTEHFPEMEVSKQRLGDQRRAIIRNRFLSNDEISQIRKEAEELLNSQHTTSVVSPTPTSQHSTPRMRWTNEDNETIIRNYYRITNLERNITAYRQPLHTTTISQLPHLSHISEQRIADQRRAIINNRFISTERLQLIRDEVAIELNIQNTHTEMATHEPTLPELTPQYHQITQHFEQIEEEVGIESQEQQTFNISQEVKDQVENTFLETIESYKNIQPTTRPYIPKQRLSKKFAELINFINNLIEKHLNPESNFDTVQTFIYCGAYTAAIHNGSKINNNHAHQKRKQQIPAWQKRLQDRIDVLRVKIGRLTEFTKGNNSPDLKKHIDNIILNHKIHSQHENENSELPHFLDTLKQKLNALTSRLRRYKLTTKRKTQNKQFYSNEKLFYRTLSNEPITNNNDTTELPEPTNMHEFWANIWSNPVEHNNSEWISNDKHNLTDLPDMKYDHITLDLLQRIINKTHNWKATGSDKIHNYWYKKFTNIHPHLLKHINTFIQSPDTMPLYITQGTTYMLPKDKLDTKNPAKYRPITCLQNIYKIITSCITELIYRHTDTNNILAEQQKGCRRKSQGCKEQLIIDSVASKQALSKKRNIFTMYIDYKKAFDSVPHSWLIYILEHYKIHPTLIKFLKNSMLNWNTILKINNSDSCVETEAIPIRRGIFQGDSLSPLWFCLALNPLSNLLNNTNHGFQIRSENNNHTLSHLMYMDDIKLYGSTLSEINKLADITQTFSSDIHMQFGIDKCKIQSVRKGKIEQNTYQLNNGDTIEPVDSDGYKYLGYQQSQQIHQNLTKKSLETKFKERLHKILNTHLNSRNTIKAINTFAIPILTYSFGVIKWSQTNLKKHQRIINTLLTKYRKHHPRSCYERLTLPKREGGRGLIDIQNLHNSQITTLRTFFHNQTHRSSLHSATVVADTNLTPLNLKERDTQKNERLISVQDKLNTWLLKSLHGRHRRDLTDPNVDKNASNEWLRRGELFPETEGFMLAIQDQIIDTRNYRKHIIKDRTPPTDSCRHCHSNSETIQHITGACKSIAQTDYKHRHDQVAAIVHQYLAFKYSLITQKTAYYKYSPQIVLESPDYKLYWDRTIITDKTIHCNRPDITLHDKKNKTVYLIDIAIPNTHNLKSTHTEKISKYTDLSIELKTQWRVSTVKTVPIVISSTGIIPRTLHASLNSLGIHKNIYTQLQKAVILNTCRIVRKFLSLD

SEQ ID NO: 8285 - protein, 1347 aa, Thyatira batis
MSNNKYNLRSLPGGRRGTSGAGAGCSSMRTIGDEELIRRAPIEENTTAEEEPYPKSPSSLFSSLPSSPASYLNLPSPSIDTNPSSPCSPTEDVMQKATTADRPASASSGHRARKKWSKEMNSYILRTYFILTSMETETRSYLTELHKKFTEHFPEMEVSKQRLGDQRRAIIRNRFLSNDEISQIRKEAEELLNSQHTTSVVSPTPTSQHSTPRMRWTNEDNETIIRNYYRITNLERNITAYRQPLHTTTISQLPHLSHISEQRIADQRRAIINNRFISTERLQLIRDEVAIELNIQNTHTEMATHEPTLPELTPQYHQITQHFEQIEEEVGIESQEQQTFNISQEVKDQVEKTFLETIESYKNIQPTTRPYIPKQRLSKKFAELINFINNLIEKHLNPESNFDTVQTFIYCGAYTAAIHNGSKINNNHAHQKRKQQIPAWQKRLQDRIDVLRVKIGRLTEFIKGNNSPDLKKHIVNIILNHKIHSQHENENSELPHFLDTLKQKLNALTSRLRRYKLTTKRKTQNKQFYSNEKLFYRTLSNEPITNNNDTTELPEPTNMHEFWANIWSNPVEHNNSEWISNDKHNLTDLPDMKYDHITLDLLQRIINKTHNWKATGSDKIHNYWYKKFTNIHPHLLKYINTFIQSPDTMPLYITQGTTYMLPKDKLDTKNPAKYRPITCLQNIYKIITSCITELIYRHTDTNNILAEQQKGCRRKSQGCKEQLIIDSVASKQALSKKRNIFTMYIDYKKAFDSVPHSWLIYILEHYKIHPTLIKFLKNSMLNWNTILKINNSDSCVETEAIPIRRGIFQGDSLSPLWFCLALNPLSNLLNNTNHGFQIRSENNNHTLSHLMYMDDIKLYGSTLSEINKLTDITQTFSSDIHMQFGIDKCKIQSVRKGKIEQNTYQLNNGDTIEPVDSDGYKYLGYQQSQQIHQNLTKKSLETKFKERLHKILNTHLNARNTIKAINTFAIPILTYSFGVIKWSQTNLKKHQRTINTLLTKYRKHHPRSCYERLTLPKREGGRGLIDIQNLHNSQITTLRTFFHNQTHRSSLHSATVVADINLTPLNLKERDTQKNERLISVQDKLNTWLLKSLHGRHRRDLTDPNVDKNASNEWLRRGELFPETEGFMLAIQDQIIDTRNYRKHIIKDRTLPTDSCRHCHSNSETIQHITGACKSIAQTDYKHRHDQVAAIVHQYLAFKYSLITQKTAYYKYSPQIVLESPDYKLYWDRTIITDKTIHCNRPDITLHDKKNKTVYLIDIAIPNTHNLKSTHTEKISKYTDLSIELKTQWRVSTVKTVPIVISSTGIIPRTLHASLNSLGIHKNIYTQLQKAVILNTCRIVRKFLSLD

SEQ ID NO: 8286 - protein, 1348 aa, Erannis defoliaria
MSMNPKNLPQVPGGSTGDADDSRQVPRGTRGQMNLRARVLNYRTTRASNTDSDTSESISVSSAAEDVVWEASAANPTPAKASRSARRKWTEDMNIFILRTYLILTNMESNVRSYLPELHSKFVQKFPTMDVSKQRVGDQRRAIVRSNLLTTEQIQAIHNEANAQLHNTNNEPTQCTNLSSSQRMRWDNDLNEFILKSYYRITEVETNKTAYRRPLHQSFINEYPHLAHISEQRVADQRRVIVNNKLINSARLQELRDEIAIELASHRNDTSCNSESETQNILIADCDTQNPQTETNPFVTSQMPIPSSQDSSPINNANIEQADENSTQTNNLHDLPSEMKHQIEDIFVTTLAKYKNVEPTSRPSIPKQKTSKKLASIVNYINLTVLPKYLLTDADFDTTQNAIYSGAYTAAICNGCRIDDSSNHNTTRTKSIPKWQKRLENKITDLRAKIGRLTEFINGNTSLVLKRQVNKIKIAYKIHSRHENENTELAHFLDTLKQKLSALSNRLRRYKQTSIRKHQNSLFNNNEKLFYRNLKNNVQGNTTENTEMPELGALHQYWSNIWSNPKTHNDSDWIRQDRELLAETPEMIFSEIDIDTLQFVINKTHNWKANGSDKIHNYWYKKFTHSHPLLLAHINNFIKSPTTIPDYITVGTTYMLPKDKTDPKNPAKYRPITCLQNIYKIITSCIGQLIYRHINSQNLLAEQQKGCKKGSLGCKEQLSIDAVVSKQALKKKRNIFTMYIDYKKAFDSVPHSWLIYVLDHYKIHPLIIGFLRNAMLKWKTILKLFNEGCSLETEPIAIRRGIFQGDAFSPLWFCMALNPLSTLLNNSNNGYKITHDNTHHTLSHLLYMDDIKLYGSSLREIHNLADITETFSTDIQMEFGIDKCKIQSIRGGKIEQNSYFLQTGEIVEPVDEFSGYKYLGFNQTQQIHQKCTKKVLEEQFKSRLHRILNTQLNARNTIKAINTYAIPILTYSFGIIQWSKTNLMKLQRLINTTMTKYRKHHPRSCIERLTLSKIEGGRGIIDITNLHNSQITSDRKFFHQEADRTLLHKAIVNADTKLTPLNLKSQTNQRNEVIVTEDEKINCWLQKSLHGRHRRDLINPTVDKIASNMWLKRGELFPETEGFMLAIQDQTIHTLNYRKHIIKDHSLQSDLCRHCHHSPETIQHITGACSSITQTDYKHRHDQIAAVVHQYLAFKYKLINEKIAYYKYKPEIILDSRDYKLYWDRTIITDKTVHFNRPDITLHDKKNDTVYLIDIAVPNTHNISNTYTEKIAKYTDLTVEIKSQWKVKIVKTIPIIISTTGVIPHSLLTSLETLNIHKLTYILIQKAAILNTCRIVRKFLSSDQPNIN

SEQ ID NO: 8287 - protein, 1348 aa, Erannis defoliaria
MSMNPKNLPQVPGGSTGDADDSRQVPRGTRGQMNLRARVLNYRTTRASNTDSDTSESISVSSAAEDVVWEASAANPTPAKASRSARRKWTEDMNIFILRTYLILTNMESNVRSYLPELHSKFVQKFPTMDVSKQRVGDQRRAIVRSNLLTTEQIQAIHNEANAQLHNTNNEPTQCTNLSSSQRMRWDNDLNEFILKSYYRITEVETNKTAYRRPLHQSFINEYPHLAHISEQRVADQRRVIVNNKLINSARLQELRDEIAIELASHRNDTSCNSESETQNILIADCDTQNPQTETNPFVTSQMPIPSSQDSSPINNANIEQADENSTQTNNLHDLPSEMKHQIEDIFVTTLAKYKNVEPTSRPSIPKQKTSKKLASIVNYINLTVLPKYLLTDADFDTTQNAIYSGACTAAICNGCRIDDSTNHNTTRTKSIPKWQKRLENKITDLRAKIGRLTEFINGNTSLALKRQVNKIKIAYKIHSRHENENTELAHFLDTLKQKLSALSNRLRRYKQTSIRKHQNSLFNNNEKLFYRNLKNNVQGNTTENTEMPEPRALHQYWSNIWSNPKTHNDSDWIRQDRELLAETPEMMFSEIDIDTLQFVINKTHNWKATGSDKIHNYWYKKFTHSHPLLLAHINNFIKSPTTIPDYITVGTTYMLPKDKTDPKNPAKYRPITCLQNIYKIITSCIGQLIYRHINSQNLLAEQQKGCKKGSLGCKEQLSIDAVVSKQALKKKRNIFTMYIDYKKAFDSVPHSWLIYVLDHYKVHPLIIGFLRNAMLKWKTILKLFNEGCSLETEPIAIRRGIFQGDAFSPLWFCMALNPLSTLLNNSNNGYKITHDNTHHTLSHLLYMDDIKLYGSSLREIHNLADITETFSTDIQMEFGIDKCKIQSIRGGKIEQNSYFLQTGEIVEPVDEFSGYKYLGFNQTQQIHQKCTKKVLEEQFKSRLHRILNTQLNARNTIKAINTYAIPILTYSFGIIQWSKTNLMKLQRLINTTMTKYRKHHPRSCIERLTLSKIEGGRGIIDITNLHNSQITSIRKFFHQEADRTLLHKAIVNADTKLTPLNLKSQTNQRNEVIVTADEKINCWLQKSLHGRHRRDLINPIVDKIASNMWLKRGELFPETEGFMLAIQDQTIHTLNYRKHIIKDHSLQSDLCRHCHHSPETIQHITGACSSITQTDYKHRHDQIAAVVHQYLAFKYKLINEKIAYYKYKPEIILDSRDYKLYWDRTIITDKTVHFNRPDITLHDKNNDTVYLIDIAVPNTHNISNTYTEKIAKYTDLTVEIKSQWKVKIVKTIPIIISTTGVIPHSLLTSLETLNIHKLTYILIQKAAILNTCRIVRKFLSSDQPNIN

SEQ ID NO: 8288 - protein, 1348 aa, Erannis defoliaria
MSMNPKNLPQVPGGSTGDADDSRQVPRGTRGQMNLRARVLNYRTTRASNTDSDTSESISVSSAAEDVVWEASAANPTPAKASRSARRKWTEDMNIFILRTYLILTNMESNVRSYLPELHSKFVQKFPTMDVSKQRVGDQRRAIVRSNLLTTEQIQAIHNEANAQLHNTNNEPTQCTNLSSSQRMRWDNDLNEFILKSYYRITEVETNKTAYRRPLHQSFINEYPHLAHISEQRVADQRRVIVNNKLINSARLQELRDEIAIELASHRNDTSCNSESETQNILIADCDTQNPQTETNPFVTSQMPIPSSQDSSPINNANIEQADENSTQTNNLHDLPSEMKHQIEDIFVTTLAKYKNVEPTSRPSIPKQKTSKKLASIVNYINLTVLPKYLLTDADFDTTQNAIYSGACTAAICNGCRIDDSTNHNTTRTKSIPKWQKRLENKITDLRAKIGRLTEFINGNTSLALKRQVNKIKIAYKIHSRHENENTELAHFLDTLKQKLSALSNRLRRYKQTSIRKHQNSLFNNNEKLFYRNLKNNVQGNTTENTEMPEPRALHQYWSNIWSNPKTHNDSDWIRQDRELLAETPEMMFSEIDIDTLQFVINKTHNWKATGSDKIHNYWYKKFTHSHPLLLAHINNFIKSPTTIPDYITVGTTYMLPKDKTDPKNPAKYRPITCLQNIYKIITSCIGQLIYRHINSQNLLAEQQKGCKKGSLGCKEQLSIDAVVSKQALKKKRNIFTMYIDYKKAFDSVPHSWLIYVLDHYKVHPLIIGFLRNAMLKWKTILKLFNEGCSLETEPIAIRRGIFQGDAFSPLWFCMALNPLSTLLNNSNNGYKITHDNTHHTLSHLLYMDDIKLYGSSLREIHNLADITETFSTDIQMEFGIDKCKIQSIRGGKIEQNSYFLQTGEIVEPVDEFSGYKYLGFNQTQQLHQKCTKKVLEEQFKSRLHRILNTQLNARNTIKAINTYAIPILTYSFGIIQWSKTNLMKLQRLINTTMTKYRKHHPRSCIERLTLSKIEGGRGIIDITNLHNSQITSIRKFFHQEADRTLLHKAIVNADTKLTPLNLKSQTNQRNEVIVTADEKINCWLQKSLHGRHRRDLINPIVDKIASNMWLKRGELFPETEGFMLAIQDQTIHTLNYRKHIIKDHSLQSDLCRHCHHSPETIQHITGACSSITQTDYKHRHDQIAAVVHQYLAFKYKLINEKIAYYKYKPEIILDSRDYKLYWDRTIITDKTVHFNRPDITLHDKNNDTVYLIDIAVPNTHNISNTYTEKIAKYTDLTVEIKSQWKVKIVKTIPIIISTTGVIPHSLLTSLETLNIHKLTYILIQKAAILNTCRIVRKFLSSDQPNIN

SEQ ID NO: 8289 - protein, 806 aa, Schrankia costaestrigalis
METTLNARKRRRMEYARVQELYRKCKGRAAAEIIDGRARSVRHGLEEMDAYWRPIFETVSDAPGPDETALRGLVREEQHDDGSPSVAGLWAPITLEEVRSSRVDSKSSPGPDGILPGDWAAVPAETQVLLFNAWLTQGEIPNRLRQCRTVFVPKVDEPQGPGEYRPISIASVPLRHMHTILARRLESSCRLNVQQRGFIRADGTLEATGVLDAVLDDSRRRLRECHVAVLDFAKAFDTVSHKALLRVLRGKGLPGAFCSYIARLYDTAETVLDVNGARSPSTRVGQGVRQGDPLSPALFNLAMDVILGSLPREVGYRLEGEKVSSIAYADDLVLLAGSVVGMQCAIDRVLECGKTMGLFVSHAKSSVLSMVPDGKRKKVHHLSARTFRMGRRWVKQTDCVERWRYLGVDFKATGCATLEHNVKQALTNISKAPLKPQQRLDIVRGHLIPRFLHGFVLGNISDDRLRMLDVQIRNVVRKWLRLPQDVPVAYFHAGTADGGLAIPSLRTCVPDLVVKRFGRLETSVWAAARAASRSVKIQRKLRWANGQVLKFSKPDPKTGEPKTSLFWREKLHTSVDGFALRESSNTPASTRWIRERSCQISGRDYVQFIHVHINALPSRVRNSRGRRGSGVELNCRAGCMCRETTAHTIQQCFRTHGGRILRHNKVADVISSSMVERGWNVVLEPKIRTAIGLRKPDFVASKDGVGVIVDAQVVSGQPDLDLQHLQKKTKYGSHVELVQKVADLLDLPGSECVTSTSCTLSWRGVWSRKSYKELRALGLPETVMQLVPTLVLRGSHMNWTRFNQMT

SEQ ID NO: 8290 - protein, 1236 aa, Enchytraeus crypticus
MPNCAGRPFEPCPQARNDSSVKFSLCDLYLCPDCLEYRWPTSRNNETITSKPYLIQANSKSYIEPVSKVNCVSQGTASVLRNKVSSFQDCSSVSPDSLPAVKHRTSGACSVCFSIHQICKETGAVRVHGKMSNHCPRSHFPPRPESILSLPIQDVNKNPHSTHISASLPETILEPSSPLHNATSLLLHPTLQNNTIKHIQAARPSCAKSLANILNKISNCPRDINDWSHLFNFGKDVLIAPPRAGKRMNLSNAIKKRSELFDCRKETALPKYKFNRSPGNSDKLYSLIRSKIEDGNMRAAVRLLCSDDAPAADNPDTLQNLKDKHPILSEVLPPAPDPFTTQSFQASENGILNAVSSFPAGSSAGPDGIRPQHILDLINDRVSGPILLPALTSFTNTLLNGECPDPIRKLLFGGRQIAIGKKDGGVRPIAIGYTWRRIAAKCANAHVSSKVASFLSPIQVVVGVSGGCEATLHAVRRFLTSLPEKFSVVKLDFKNAFNNVNRFQMLQEVYKYVPEIYKFCYSSYSATSHLKYNDHIIECMVGVQQGDPLGPLLFSLTIHPLLKSLICPLRVAYLDDVTLGGSEDSLSHDICNIMENGKVLGLELNLNKCEIVSPCPQTVRHSILQSFTMIPQDESSLLGAPLSFGIAMDKSLSAKIVDLELASSRLPLISRHDALTILRYSLSISKMLYTLRSSPCFNDPALIAFDNKLKECLSTMSNIVLSDTQWSQATLPVKKGGLGIRQTSHVAPSAFISSYISTRPLQDSILGHFSSYHDVNFDLALSLWSERYNAVAPTGDKDKMQKFWDAAAIEKCFEQILNFQSDASDRARLLAVSSPRSSDWLHAFPISSCGLHLDDESVRVANGLELLIGFRLSARLCEPHTCPCGSIVDSRGIHSLSCKRSAGRASRHHNLNDIVWRALTKASIPSAKEPLDLFRSDGKRPDGLTLIPWQKGKCLAWDVTVSDTLANSYLHVTSSSAGGAAELAARRKLEKYKDLPSVYDFMPIAIETFGPMNEAASEFINILGRKISDITDDNRETSFLRQRISMALQLFNAVCFRGSFSHSDDPASEDNVNPTTSHGLPVSIATAAMTIILADAPDGTMPSDFDSISSSCLFNPLTAPLETSEPFNGAHPLLSSICNDASSYDLEVVGSNEKDRNDVVAYNTDSFNSAATDTKRSRRGSRRSVLDLTIVEAKAMCGDMDNSSSRQLRKRKPHPESNVNRIYETHDMRKQNLQRQ

SEQ ID NO: 8291 - protein, 1204 aa, Enchytraeus crypticus
MPNCAGRPFEPCPQARNDSSVKFSLCDLYLCPDCLEYRWPTSRNNETNTSKPYLIQANSKLYIEPVSNVNCLSQGTASVRRNKVSSFQDCSSVSPDSLPAVKHRTSGACSVCFSIHQICKETGAIRVHGKMSNRCPGSHFPPRPESILSLPIQDVNKNPHSTRISASPPEPILEPSSPLLNATSLLLHPTLPYNTIKHIPKAARPSCAKSLANILNKISNCPRDINDWSHLFNFGKDVLIAPPRAGKRMNLSNAIKKRSELFDCRKETALPKYKFNRSPGNSDKLYSLIRSKIEDGNMRAAVRLLCSDDAPAADNPDTLQNLKDKHPILSEVLPPAPDPFTTQSFQASENGILNAVRSFPAGSSAGPDGIRPQHILDLINDRVSGPILLPALTSFTNTLLNGECPDPIRKLLFGGRLIAIGKKDGGVRPIAIGYTWRRIAATCANAHVSSKVASFLSPIQVGVGVSGGCEATVHAVRRFLTSLPEKFSVVKLAFKNAFNNVNRFQMLQEVYKYIPEIYKFCYSSYSATSHLKYNDHIIESMVGVQQGDPLGPLLFSLTIHPLLKSLICPLRVAYLDDVTLGGSEDSLSHDICNIMENGKVLGLELNLNKCEIVSPCPQTIRHPILQSFKMIPQDESSLLGAPLSFGIAMDKSLSTKIVDLELASSRLPLISRHDALTILRYSLSISKMLYTLRSSPCFNHPALIAFDNKLKECLSTMSNIALSDTQWSQATLPVKKGGLGIRQTSHVAPSAFISSYISTRPLQDSILGHFSSYHDVNFDLALSLWSERYNAVAPPGDKDKMQKFWDAAAIEKCFEQILNFQSDAADRARLLAVSSPRSSDWLHAFPISSCGLHLDDESVRVAIGFRLGARLCEPHTCPCGSIVDSRGIHSLSCKRSAGRASRHHNLNDIVWRALTKASIPSIKEPPGLFRSDGKRPDGLTLIPWQKGKCLAWYVTVSDTLANSYLHVTSSSAGGAAELAARRKLEKYKDLPSVYDFMPIAIETFGPTNEAASEFINILGRKISDITDDNRETSFLRQRISMALQRFNAVCFRGSFSHSDDPASEDNVNPPTSHGLPVSIATAAMTIILADAPDGTMPSDFDSISSSCLFNPLTAPLETSEPFNGAHPLLSSISNDASSYDLEVVGSNEKDRNDVVAYNTDSFNSAATDTKRSRRRSRRSVLDLTIVEAKAMCGDMDNSSSRQLR

SEQ ID NO: 8292 - protein, 1147 aa, Mythimna impura
MKGKENAEEKNKNVKKTVENNTLKTSESPSPIQKSPIKLENKSASLETLLESIDAPCSLWPREALKAVLTRFDRMPRGGWILTSKIYNVKFNKEETVELLKRKAHDNLKGENGRPISNHKFKEESRKRTKTLIDLIESSTTIQEQKFLKVKNLMMNTVLGAKKRSVSDCKRTPKIPRDICDFETIERINRAIGDSLTIYPSSHLTDLAKIYQSAQEVYFEVTKSKKEPSQWKDAIVTKISSIKKTIDLITRHEKNERINKEEKAGLIKIFRDNGKLLVRKSDLMEMKSQLESSILIYEKKIKVSDNRKEYRRQNRKYELYRGRFYRDLEVTNTYEDEEALVKTEDIANFWSKMWNRVEEDKERKKKYIDLVPVHGGKDKEHFILPSFEEFQEILKYLPNWKATGPDNIYNFFIKQLNSLHETLYRLIKDTIENPERMEEWLTTGNTYLIPKEGCKSGGDFRPITCLSNIYKLMTKCVSKVFQLEIEKRGLISENQLGNVRGIQGAKEQAMFNIAINKEYKNNLKTAWIDIKKAFDSIDHDYLLHCIASLNIAPWIYTFMEESTKKWKINIFAKNNLILKKKVTRGILQGDSLSPLLFVICMDPLSKCLNAKYPMVQIPISKEESHSTNHLLFIDDLKLLAENESTLEKMMEETMEFCKTVNLEINPKKSATNAASIKTEIVKLDEKSSYKYLGITEDYTSAPLNEVKDMIMKEITRRAHGLARTKLSGKNMIKAINEYSLSLVNYYIGVLDLEPEVYKRIDDEVRRILVHNGIHLQPSCKERLYLPRAELGRGLVSVEHRSEAMLFKLFNDFSKTKLVYKRRAAILKVQEDDKTHFWLIKEYCRTKYRLAAPEIDVPSILTAQKEALYNEIKTKTLHKKLYKGVSHEKVSIKESSVWLRHGNIPARREAALCFLQDRNMFLGEAKKCPHCNDSSKTVDHLASRCEKMLGTDYTRRHNEVLKCIHLLLCKKYGLKSSKKLRNHSVQKVVSNKHVEIRVDTFIKTDIKVKHNRPDIVIIDKRGKEILVVEVGITSLENLQQVETEKLRKYDVLANELAQIYGFKTLIIPYVMTWDGVVSKYHDIYRRRLEISDRIQAYIQALVLKKTLESISMDFRRNGDLEDLIGDERDACLELNSAKMESINHTGST

SEQ ID NO: 8293 - protein, 1156 aa, Mythimna impura
MIFFKLVMKGKENVEEKNQKLSKTTENNTKEASEQVNLTPNSPVKPESKTVSLKSLLDSIDAPCTLWPKEALKAVLTRFDRMPRGGWCLCSEVYNVKFCKEESVDLFKRKAHESLKGENGRPISNHKFKEESRKKSKTLIDLIEASTTIKKEKFLKIKNLMTNTVLAAKKRGVADCKRTPKIPRDICDFEVLDNINRAIVDSLTIYPASNLTDLAKIYQSAQEVYFDVTKNTKEPSKWKESIDVKISLLKDKLNLIKRHEDKEKLSKEDKAKLIKIFRDENKLLVRKSDLMEMKSTIDSAILVYEKKISVSNKRVEYKRQNRKFELYRGKFYRDLEYTNTADNDEALVSTEDIASFWSKMWSRGEEDEERKKKYKDLVPVHGTKEKEHFVFPSLEEFIVIVKHLPNWKAAGPDNIYNFFIKQMDSLHSTLYKLIKETVENPEKTDEWLTTGNTFLIPKEGCKSGGDFRPITCLSNIYKLITKCVSKVFQLEIEDRKLISENQLGNVRGIQGAKEQAMFNIAINKEYKNKLKTAWIDVKKAFDSIDHDYLLHCISSLNIAPWIYKFMEESTKKWKINIFAKNNLILKKEVSRGILQGDSLSPLLFVVCMDPLSKCLNAKFPMVQIPIEKEESYSTNHLLFIDDLKLMAENETTLEKMLEETLEFCKAVNLEINPKKSATNALSINTEIVKLDDTSCYKYLGITEDSTSTPLKEVKDAIAKEIIRRTYELSKSKLSGKNMIRAINEYAISLINYYIGVLNLEPEIFKTIDDEVRQVLIHNGIHLQPACKERLYLPRSELGRGLVSIEHRSEIMLFKLLENFSKTSLVLKRRAAILKIQEEEKTHFWLIGKYCEEKYKTAIKLNVPVLLSAQKQSLYDKIKTKTFHKKLYKGVSNEKVSIKDSSVWLKHGNIPAKREAALCFLQDRNMFFGEIKKCPHCGNAPKTVDHLASKCEKMLGTDYTRRHNEVLKCIHLLLCNKYGVKSTKKLRNHSVQEIISNKYVEIRVDTFVKTDIKIKHNRPDIIVIDKRTKEILIIEVGITSLDNLQQVETEKLRKYDVLANELTQIHGFKSTIIPYVLTWDGVVSIYHETYRRRLELSDRIESYIQSLVLKKTLEGISLDFRRNGNLEEFLSPERTVCSEKKAGERGGIDPSWNSMKS

SEQ ID NO: 8294 - protein, 1133 aa, Papilio xuthus
MKGKENIEEENKDEQKTMENNTLEGSNQSKPTANHQVKVDDKSASLRSLLSSIDAPCTLWPKEALKAVLTRFDRMPRGGWNLTTEVFNVKFKKEESVELFKRKAHENLKGENGRPVSNHKFKEESRKKSKTLIDLIEASTTAKEENFLKVKNLLTNTILSAKKRNVEDCRRTPKIPRDICDFEVIESINRAIDDSFTIYPSSQLTELAKIYQSAQEVYFDITRSKKEPSKWKEAIVTKITALKEKLDLIVRHEKNEKLNKEEKARLIKIFRDDNKLLARKSDLMEMKSHIDGAILIYEKKIKMSENRKEYRRQNRKYELYRGRFYRDLEINETANKDDSFIKTEEIANFWSKMWNRAEKDDERVKKYKEIVPIHGSKEKDHFVFPSIEEFKEIIKCLPNWKAAGPDNIFNFFIKQLSSLHGTLYKLIKETVENPETMEEWLTTGNTYLIPKDGCNSGGDFRPITCLSNIYKLITKCVSKVFQLEIEDRRLISENQLGNVRGIQGAKEQAMFNIAINKEYKNKLKTSWIDVKKAFDSIDHDYLLHCVNSLNIAPWIYKFLEESTKKWKINIFAKNNLILKKTVTRGILQGDSLSPLLFVICMDPLSKCLNSKFPMVQIPIDKEESYSTNHLLFIDDLKLLAENETTLGKMMEETMEFCKIVNLEINPKKSATNANTLKTEMVKLDETSSYKYLGIIEDSTSTPKEEVINKITKEILRRTFELAKTKLSGKNMIKAINEYAISLINYYIGILNLEPEVYKKIDNEVRLILVHNGIHLQPACKERLYLPRIELGRGLVNIEHRSEIMLLKLFEEFTKSRLVYKRRAAILKVQEEDKTHFWTIKKFCEEKYKCTVEMKVPLLQIAQKESLYNNLKNKTFHKKLYKGVANEQVSIKDSSIWLSNGNIPAKREAALCFLQDRNIFLGEIRKCPHCGDGPKTVDHLASKCEKMLGTDYTRRHNEVLKCIHLLLCNKYGLKSTKKLRNHSVQEIVSNKYVEIRVDTFVKTDIKIKHNRPDLVVIDKRKKEILIVEVGITSAENLQQVETEKLRKYDILANELAQTYKFKSIIIPYVLTWDGVVTRYHDKYRRSLEISNRIEAYIQSLVLKKTLESISLDFRRSGDLEEFISKEEEVCQNRP

SEQ ID NO: 8295 - protein, 1043 aa, Mythimna impura
MKGKENVEEKNQKLSKTTENNTKEASEQVNLTPNSPVKPESKTVSLKSLLDSIDAPCTLWPKEALKAVLTRFDRMPRGGWCLCSEVYNVKFCKEESVDLFKRKAHESLKGENGRPISNHKFKEESRKKSKTLIDLIEASTTIKEEKFLKIKNLMTNTVLAAKKRGVADCKRTPKIPRDICDFEVLDNINRAIVDSLTIYPASNLTDLAKIYQSAQEVYFDVTKNTKEPSKWKESIDVKISLLKDKLNLIKRHEDKEKLSKEDKAKLIKIFRDENKLLVRKSDLMEMKSTIDSAILVYEKKISVSNKRVEYKRQNRKFELYRGKFYRDLEYTNTADNDEALVSTEDIASFWSKMWSRGEEDEERKKKYKDLVPVHGTKEKEHFVFPSLEEFIVIVKHLPNWKAAGPDNIYNFFIKQMDSLHSTLYKLIKETVENPEKTDEWLTTGNTFLIPKEGCKSGGDFRPITCLSNIYKLITKCVSKVFQLEIEDRKLISENQLGNVRGIQGAKEQAMFNIAINKEYKNKLKTAWIDVKKAFDSIDHDYLLHCISSLNIAPWIYKFMEESTKKWKINIFAKNNLILKKEVSRGILQGDSLSPLLFVVCMDPLSKCLNAKFPMVQIPIEKEESYSTNHLLFIDDLKLMAENETTLEKMLEETLEFCKTVNLEINPKKSATNALSINTEIVKLDDTSCYKYLGITEDSTSTPLKEVKDAIAKEIIRRTYELSKSKLSGKNMIRAINEYAISLINYYIGVLNLEPEIFKTIDDEVRQVLIHNGIHLQPACKERLYLPRSELGRGLVSIEHRSEIMLFKLLENFSKTSLVLKRRAAILKIQEEEKTHFWLIGKYCEEKYKTAIKLNVPVLLSAQKQSLYDKIKTKTFHKKLYKGVSNEKVSIKDSSVWLKHGNIPAKREAALCFLQDRNMFLGEIKKCPHCGNAPKTVDHLASKCEKMLGTDYTRRHNEVLKCIHLLLCNKYGVKSTKKLRNHSLQEIISNKYVEIRVDTFVKTDIKIKHNRPDIIVIDKRTKEILIIEVGITSLDNSNKSKQKN

SEQ ID NO: 8296 - protein, 1147 aa, Papilio xuthus
MKGKENIEEKNKDEQKTMENNTLEGSNQSKPTANHQVKVDDKSASLRSLLSSIDALCTLWLKEAPKAVLTRFDRMPRGGWNLTTEVFNVKFNKEESVDLFKRKAHENLKGENGRPVSNHKFKEESRKKSKTLIDLIEASTTAKEENFLKVKNLLTNTILSAKKRNVEDCRRTPKIPRDICEFEVIESINRAIDDSFTIYPSSQLTELAKIYQSAQEVYFDITRSKKEPSKWKEAIVTKITALKEKLDLIVRHEKNEKLNKEEKARLIKIFRGDNKLLARKSDLMEMKSHIDGAILIYEKKIKMSENRKEYRRQNRKYELYRGRFYRDLEINKTANKDDSFIKTEEIANFWSKMWNRAEKDDERVKKYKEIVPIHGSKEKDHFVFPSIEEFKEIIKCLPNWKAAGPDNIFNFFIKQLSSLHGTLYKLIKETVENPETMEGWLTTGNTYLIPKDGCNSGGDFRPITCLSNIYKLITKCVSKVFQLEIEDRRLISENQLGNVRGIQGAKEQAMFNIAINKEYKNKLKTSWIDVKKAFDSIDHDYLLHCVNSLNIAPWIYKFLEESTKKWKINIFAKNNLILKKTVTKSILQGDSLSPLLFVICMDPLSKCLNSKFPMVQIPIDKEESYSTNHLLFIDDLKLLAENETTLGKMMEETMEFCKIVNLEINPKKSATNANTLKAEMVKLDETSSYKYLGIIEDSTSTPKEEVINKITKEILRRTFELAKTKLSGKNMIKAINEYAISLINYYIGILNLEPEVYKKIDNEVRLILVHNGIRLQPACKERLYLPRIELGRGLVNIEHRSEIMLLKLFEEFTKSRLVYKRRAAILKVQEEDKTHFWTIKKFCEEKYKCTVEMKVPLLQIAQKESLYNNLKNKTFHKKLYKGVANEKVSLKDSSIWLSNGNIPAKREAALCFLQDRNIFLGEIRKCPHCGDGPKTVDHLASKCEKMLGTDYTRRHNEVLKCIHLLLCNKYGLKSTKKLRNHSVQEIVSNKYVEIRVDTFVKTDIKIKHNRPDLVVIDKRKKEILIVEVGITSAENLQQVETEKLRKYDILANELAQTYKFKSIIIPYVLTWDGVVTRYHDKYRRSLEISNRIEAYIQSLVLKKTLESISLDFRRSGDLEEFISKEEEACQASVLEENKESVIPTVII

SEQ ID NO: 8297 - protein, 1124 aa, Gesta gesta
MYTKMIMKGKENVEQKKIKNQKTTENDMQKAGNQANSTLNSEIKLETKPASLKTLLDSIDAPCSLWPKEALKAVLTRFERMPRGGWCLTSEIYNAKFSKQETVELFKRKAHESLKGENGRPISNHKFKEEARKKSKTLIDLIEASTTVKEEKFLKIKNLLTNTVLSAKKRKVIDCKRTPKIPRDICDFEVIECINRAIVDSLSIYPSSHLTDLAKIYQSAQEVYFEITKNKREPSRWKEDIENKITSLKEKLNLIKRHENNEKLTKEEKARLIKIFRDDNKLLARKSDLMEMKSFIDGAILIYEKKIKISDTRKEYRRQNRKYELYRGRFYRDLEVKPVNDDVFIKTEDIAEFWSKMWCKAEENDERKKKYKELVPVHGAKEREHFIFPSLEEFKGVVKCLPNWKATGPDNIYNFFIKQLSSLHDTLYKLVKETVENPNSMDEWLTTGNTYLIPKEGCKSGGDFRPITCLSNIYKLITKCVSKVFQLEIEDRRLISENQLGNVRGIQGAKEQAMFNIAINKEYKNKLKTSWIDIKKAFDSIDHDYLLHCIESLNIAPWIYKFMAESTRKWKINIFSNGKLILEKEVTRGILQGDSLSPLLFVVCMDPLSKSLNAKFPMVQIPIDKEESYSTNHLLFIDDLKLMAEDESTLEKMMNETMEFCKTVNLEINPKKSATNATSLETEIVKLDDKSSYKYLGITEDYTSSPLQEVKDSIVKEIIRRTNQLAKSRLSGKNMIKAINEYAISLTNYYIGVLDLEPEIFKKIDDEIRLTLVHNGIHLQPASKERLYLPRLELGRGLVNVEHRSEAMLYKLLDDFSKTRLVYKRRAAILKLQEEDKTHFWLVKKYCEQKYNITLKDDIKILFSAQKEALYNNIKNKKLHKMLYKGASNEMVSVKDSSVWLKYGNIPARREAALCFLQDRNMFLGEVKKCPHCGEVQKTVDHLASRCEKMLGNDYTRRHNEVLKCIHLLLCNKYGVRSTKRLRNHSVQEVVSNKYVEIRVDTFVKTDIKVKHNRPDLVVIDKRSKEILIVEVGITSSDNLQQVESEKLRKYDILANELSQLYGFKSTIIPYVLTWDGVVTKFHAIYRGRLEISDRVEAYIQSLVLKKTLESISLDFRRNGSLEE

SEQ ID NO: 8298 - protein, 1146 aa, Mythimna impura
MKGKENVEEKNQKLSKTTENNTKEASEQVNLTPNSPVKPESKTVSLKSLLDSIDAPCTLWPKEALKAVLTRFDRMPRGGWCLCSEVYNVKFCKEESVDLFKRKAHESLKGENGRPISNHKFKEESRKKSKTLIDLIEASTTIKEEKFLKIKNLMTNTVLAAKKRGVADCKRTPKIPRDICDFEVLDNINRAIVDSLTIYPASNLTDLAKIYQSAQEVYFDVTKNTKEPSKWKESIDVKISLLKDKLNLIKRHEDKEKLSKEDKAKLIKIFRDENKLLVRKSDLMEMKSTIDSAILVYEKKISVSNKRVEYKRQNRKFELYRGKFYRDLEYTNTADNDEALVSTEDIASFWSKMWSRGEEDEERKKKYKDLVPVHGTKEKEHFVFPSLEEFIVIVKHLPNWKAAGPDNIYNFFIKQMDSLHSTLYKLIKETVENPEKTDEWLTTGNTFLIPKEGCKSGGDFRPITCLSNIYKLITKCVSKVFQLEIEDRKLISENQLGNVRGIQGAKEQAMFNIAINKEYKNKLKTAWIDVKKAFDSIDHDYLLHCISYLNIAPWIYKFMEESTKKWKINIFAKNNLILKKEVSRGILQGDSLSPLLFVVCMDPLSKCLNAKFPMVQIPIEKEESYSTNHLLFIDDLKLMAENETTLEKMLEETLEFCKTVNLEINPKKSATNALSINTEIVKLDDTSCYKYLGITEDSTSTPLKEVKDAIAKEIIRRTYELSKSKLSGKNMIRAINEYAISLINYYIGVLNLEPEIFKTIDDEVRQVLIHNGIHLQPACKERLYLPRSELGRGLVSIEHRSEIMLFKLLENFSKTSLVLKRRAAILKIQEEEKTHFWLIGKYCEEKYKTAIKLNVPVLLSAQKQSLYDKIKTKTFHKKLYKGVSNEKVSIKDSSVWLKHGNIPAKREAALCFLQDRNMFLGEIKKCPHCGNAPKTVDHLASKCEKMLGTDYTRRHNEVLKCIHLLLCNKYGVKSTKKLRNHSLQEIISNKYVEIRVDTFVKTDIKIKHNRPDIIVIDKRTKEILIIEVGITSLDNLQQVETEKLRKYDVLANELTQIHGFKSTIIPYVLTWDGVVSIYHETYRRRLELSDRIESYIQSLVLKKTLEGISLDFRRNGNLEEFLSPERTVCSEKKPENEVVLTLAGTA

SEQ ID NO: 8299 - protein, 901 aa, Chilo suppressalis
MKLISRHESNEKLNKEDKAKLTKFFRDDNKLLVRKSDLMEMKSSIDESILIYEKKIKIANNRKEYRRQNRKYELYRGRFYRDLEVKSTLEGDDALIPTEDIASFWSKMWNRAEEDDEDRKIKYKELVPVHGSKEKDHFVFPSLEEFKEIIKFLPNWKATGPDNIYNFFIKQLSSLHEILYKLIKETVENPERMEEWLTTGNTYLIPKEGCKSGGDFRPITCLSNIYKLITKCVSKVFQLEIEDRRLISENQLGNVRGIQGAKEQAMFNIAINKEYKNKLKTAWIDIKKAFDSIDHDYLLHCIESLNVAQWIYKFMEQSTKKWKINIFAKNNLILKKEVTRGILQGDSLSPLLFVICMDPLSKCLNAKYPMVQIPIDKQESYSTNHLLFIDDLKIMAEDEEILGKMMKETLEFCKTVNLEINPKKSATNAVNLNTEIVKLDNKSSYKYLGITEDSTSSPLQKVKDTITGEIIRRTNELSKSKLSGKNMMKAINEYALSLINYYIGVLDLEPEIYRKIDSEVRLILIHNGIHLQPACKERLYLPRIELGRGLVNVEHRSEAMLLKLRDDFSKTRYVYKRRAAILKLQEEEKTHFWLIKKYCEEKYNNREELSISDLLAAQKASLYNNLRTKKLHQKLYKAALNENISIKNSSIWLKNGNIPAKREASLCFLQDRNMFLGEIKKCPHCGEAQKTVDHMASMCEKMLGTDYTRRHNEVLRCIHLLLCNKYNIKSTRKLKSHSVQEIVSNKFVEIRVDTFIKTDIKVKHNRPDLVVIDKKSKEILIVEVGITSIDNLQQVETEKFRKYDLIASELTQIYGFKSSIIPYVVTWDGVVTRYHDIHRRRLGISDRIEAYIQSLVLKKTLESISLDFRRNGNLEEMVSEESTDYLKSILGKAEPITSSLE

SEQ ID NO: 8300 - protein, 1156 aa, Mythimna impura
MIFFKLVMKGKENVEEKNQKLSKTTENNTKEASEQVNLTPNSPVKPESKTVSLKSLLDSIDAPCTLWPKEALKAVLTRFDRMPRGGWCLCSEVYNVKFCKEESVDLFKRKAHESLKGENGRPISNHKFKEESRKKSKTLIDLIEASTTIKKEKFLKIKNLMTNTVLAAKKRGVADCKRTPKIPRDICDFEVLDNINRAIVDSLTIYPASNLTDLAKIYQSAQEVYFDVTKNTKEPSKWKESIDVKISLLKDKLNLIKRHEDKEKLSKEDKAKLIKIFRDENKLLVRKSDLMEMKSTIDSAILVYEKKISVSNKRVEYKRQNRKFELYRGKFYRDLEYTNTEDNDEALVSTEDIASFWSKMWSRGEEDEERKKKYKDLVPVHGTKEKEHFVFPSLEEFIVIVKHLPNWKAAGPDNIYNFFIKQMDSLHSTLYKLIKETVENPGKMDEWLTTGNTFLIPKEGCKSGGDFRPITCLSNIYKLITKCVSKVFQLEIEDRKLISENQLGNVRGIQGAKEQAMFNIAINKEYKNKLKTAWIDVKKAFDSIDHDYLLHCISSLNIAPWIYKFMEESTKKWKINIFAKNNLILKKEVSRGILQGDSLSPLLFVVCMDPLSKCLNAKFPMVQIPIEKEESYSTNHLLFIDDLKLMAENETTLEKMLEETLEFCKTVNLEINPKKSATNALSINTEIVKLDDTSCYKYLGITEDSTSTPLKEVKDAIAKEIIRRTYELSKSKLSGKNMIRAINEYAISLINYYIGVLNLEPEIFKTIDDEVRQVLIHNGIHLQPACKERLYLPRSELGRGLVSIEHRSEIMLFKLLENFSKTSLVLKRRAAILKIQEEEKTHFWLIGKYCEEKYKTAIKLNVPVLLSAQKQSLYDKIKTKTFHKKLYKGVSNEKVSIKDSSVWLKHGNIPAKREAALCFLQDRNMFLGEIKKCPHCGNAPKTVDHLASKCEKMLGTDYTRRHNEVLKCIHLLLCNKYGVKSTKKLRNHSLQEIISNKYVEIRVDTFVKTDIKIKHNRPDIIVIDKRTKEILIIEVGITSLDNLQQVETEKLRKYDVLANELTQIHGFKSTIIPYVLTWDGVVSIYHETYRRRLELSDRIESYIQSLVLKKTLEGISLDFRRNGNLEEFLSPERTVCSEKKAGERGGIDPSWNSMKS

SEQ ID NO: 8301 - protein, 1146 aa, Mythimna impura
MKGKENVEEKNQKLSKTTENNTKEASEQVNLTPNSPVKPESKTVSLKSLLDSIDAPCTLWPKEALKAVLTRFDRMPRGGWCLCSEVYNVKFCKEESVDLFKRKAHESLKGENGRPISNHKFKEESRKKSKTLIDLIEASTTIKEEKFLKIKNLMTNTVLAAKKRGVADCKRTPKIPRDICDFEVLDNINRAIVDSLTIYPASNLTDLAKIYQSAQEVYFDVTKNTKEPSKWKESIDVKISLLKDKLNLIKRHEDKEKLSKEDKAKLIKIFRDENKLLVMKSDLMEMKSTIDSAILVYEKKISVSNKRVEYKRQNRKFELYRGKFYRDLEYTNTADNDEALVSTEDIASFWSKMWSRGEEDEERKKKYKDLVPVHGTKEKEHFVFPSLEEFIVIVKHLPNWKAAGPDNIYNFFIKQMDSLHSTLYKLIKETVENPEKTDEWLTTGNTFLIPKEGCKSGGDFRPITCLSNIYKLITKCVSKVFQLEIEDRKLISENQLGNVRGIQGAKEQAMFNIAINKEYKNKLKTAWIDVKKAFDSIDHDYLLHCISSLNIAPWIYKFMEESTKKWKINIFAKNNLILKKEVSRGILQGDSLSPLLFVVCMDPLSKCLNAKFPMVQIPIEKEESYSTNHLLFIDDLKLMAENETTLEKMLEETLEFCKTVNLEINPKKSATNALSINTEIVKLDDTSCYKYLGITEDSTSTPLKEVKDAIAKEIIRRTYELSKSKLSGKNMIRAINEYAISLINYYIGVLNLEPEIFKTIDDEVRQVLIHNGIHLQPACKERLYLPRSELGRGLVSIEHRSEIMLFKLLENFSKTSLVLKRRAAILKIQEEEKTHFWLIGKYCEEKYKTAIKLNVPVLLSAQKQSLYDKIKTKTFHKKLYKGVSNEKVSIKDSSVWLKHGNIPAKREAALCFLQDRNMFLGEIKKCPHCGNAPKTVDHLASKCEKMLGTDYTRRHNEVLKCIHLLLCNKYGVKSTKKLRNHSLQEIISNKYVEIRVDTFVKTDIKIKHNRPDIIVIDKRTKEILIIEVGITSLDNLQQVETEKLRKYDVLANELTQIHGFKSTIIPYVLTWDGVVSIYHETYRRRLELSDRIESYIQSLVLKKTLEGISLDFRRNGNLEEFLSPERTVCSEKKPENEVVLTLAGTA

SEQ ID NO: 8302 - protein, 863 aa, Mythimna impura
MEMKSTIDSAILVYEKKISVSNKRVEYKRQNRKFELYRGKFYRDLEYTNTADNDEALVSTEDIASFWSKMWSRGEEDEERKKKYKDLVPVHGTKEKEHFVFPSLEEFIVIVKHLPNWKAAGPDNIYNFFIKQMDSLHSTLYKLIKETVENPEKMDEWLTTGNTFLIPKEGCKSGGDFRPITCLSNIYKLITKCVSKVFQLEIEDRKLISENQLGNVRGIQGAKEQAMFNIAINKEYKNKLKTAWIDVKKAFDSIDHDYLLHCISSLNIAPWIYKFMEESTKKWKINIFAKNNLILKKEVSRGILQGDSLSPLLFVVCMDPLSKCLNAKSPMVQIPIEKEESYSTNHLLFIDDLKLMAENETTLEKMLEETLEFCKTVNLEINPKKSATNALSINTEIVKLDDTSCYKNLGITEDSTSTPLKEVKDAIAKEIIRRTYELSKSKLSGKNMIRAINEYAISLINYYIGVLNLEPEIFKTIDDEVRQVLIHNGIHLQPACKERLYLPRSELGRGLVSIEHRSEIMLFKLLENFSKTSLVLKRRAAILKIQEEEKTHFWLIGKYCEEKYKTAIKLNVPVLLSAQKQSLYDEIKTKTFHKKLYKGVSNEKVSIKDSSVWLKHGNIPAKREAALCFLQDRNMFLGEIKKCPHCGNAPKTVDHLASKCEKMLGTDYTRRHNEVLKCIHLLLCNKYGVKSTKKLRNHSVQEIISNKYVEIRVDTFVKTDIKIKHNRPDIIVIDKRTKEILIIEVGITSLDNLQQVETEKLRKYDVLANELTQIHGFKSTIIPYVLTWDGVVSIYHETYRRRLELSDRIESYIQSLVLKKTLEGISLDFRRNGNLEEFLSPERTVCSGKKPENEVVLTLAGTA

SEQ ID NO: 8303 - protein, 862 aa, Choaspes benjaminii
MEMKSFIDGAILIYEKKIKISDTRKEYRRQNRKYELYRGRFYRDLEVKPVNDDDVFIKTEDIAEFWSKMWCRAEENDERKKKYKELVPVHGAKEREHFIFPSLEEFKEVIKCLPNWKATGPDNIYNFFIKQLSSLHDTLYKLVKETVENPNSMDEWLTTGNTYLIPKEGCKSGGDFRPITCLSNIYKLITKCVSKVFQLEIEDRRLISENQLGNVRGIQGAKEQAMFNIAINKEYKNKLKTSWIDIKKAFDSIDHDYLLHCIESLNIAPWIYKFMAESTRKWKINIFSNGKLILEKEVTRGILQGDSLSPLLFVVCMDPLSKSLNAKFPMVQIPIDKEESYSTNHLLFIDDLKLMAENEATLEKMMNETMEFCKTVNLEINPKKSATNATSLETEIVKLDDKSSYKYLGITEDYTSSPLQEVKDSIVKEIIRRTNQLAKSRLSGKNMIKAINEYAISLTNYYIGVLDLEPEIFKKIDNEIRLTLVHNGIHLQPASKERLYLPRLELGRGLVNVEHRSEAMLYKLLDDFSKTRLVYKRRAAILKLQEEDKTHFWLVKKYCEQKYNITLEDDIKILLNAQKEALYNNIKNKKLHKMLYKGTSNEMVSVKDSSVWLKYGNIPARREAALCFLQDRNMFLGEVNKCPHCGEVQKTVDHLASRCEKMLGNDYTRRHNEVLKCIHLLLCNKYGVRSTKRLRNHSVQEVASNKYVEIRVDTFVKTDIKVKHNRPDLVVIDKRSKEILIVEVGITSADNLQQVESEKLRKYDILASELSQLYGFKATIIPYVLTWDGVVTKFHAIYRRRLEISDRVEAYIQSLVLKKTLESISLDFRRKGSLEELLSVERPDKDLVKSDITDSVAPLAIE

SEQ ID NO: 8304 - protein, 1145 aa, Tagiades litigiosa
MKGKENVEQKKIKIQKTTENDMQKAGNQANSTLNSEIKLETKPASLKTLLDSIDAPCSLWPKEALKAVLTRFERMPRGGWCLTSEIYNAKFSKQETVELLKRKAHESLKGENGRPISNHKFKEEARKKSKTLFDLIEASTTVKEEKFLKIKNLLTNTVLSAKKRKVIDCKRTPKIPRDICDFEVIECINRAIVDSLSIYPSSHLTDLAKIYQSAQEVYFEITKNKREPSRWKEDIENKITSLKEKLNLIKRHENNEKLTKEEKTRLIKIFRDDNKLLARKSDLMEMKSFIDGAILIYEKKIKISDTRKEYRRQNRKYELYRGRFYRDLEVKPVNDDDVFIKTEDIAEFWSKMWCRAEENDGRKKKYKELVPVHGAKEREHFIFPSLEEFKEVIKCLPNWKATGPDNIYNFFIKQLSSLHDTLYKLVKETVENPNSMDEWLTTGNTYLIPKEGCKSGGDFRPITCLSNIYKLITKCVSKVFQLEIEDRRLISENQLGNVRGIQGAKEQAMFNIAINKEYKNKLKTSWIDIKKAFDSIDHDYLLHCIESLNIAPWIYKFMAESTRKWKINIFSNGKLILEKEVTRGILQGDSLSPLLFVVCMDPLSKSLNAKFPMVQIPIDKEESYSTNHLLFIDDLKLMAENEATLEKMMNETMEFCKTVNLEINPKKSATNATSLETEIVKLDDKSSYKYLGITEDYTSSPLQEVKDSIVKEIIRRTNQLAKSRLSGKNMIKAINEYAISLTNYYIGVLDLEPEIFKKIDNEIRLTLVHNGIHLQPASKERLYLPRLELGRGLVNVEHRSEAMLYKLLDDFSKTRLVYKRRAAILKLQEEDKTHFWLVKKYCEQKYNITLEDDIKILLNAQKEALYNNIKNKKLHKMLYKGTSNEMVSVKDSSVWLKYGNIPARREAALCFLQDRNMFLGEVNKCPHCGEVQKTVDHLASRCGKMLGNDYTRRHNEVLKCIHLLLCNKYGVRSTKRLRNHSVQEVASNKYVEIRVDTFVKTDIKVKHNRPDLVVIDKRSKEILIVEVGITSADNLQQVESEKLRKYDILASELSQLYGFKATIIPYVLTWDGVVTKFHAIYRRRLEISDRVEAYIQSLVLKKTLESISLDFRRKGSLEELLSVERPDKDLVKSDITDSVAPLAIE

SEQ ID NO: 8305 - protein, 1146 aa, Papilio xuthus
MKGKENVEEKNQKLLKTTENNTKETSEQVDLTPNSPGKPESKAVSLKSLLDSIDAPCTLWPKEALKAVLTRFDRMPRGGWSLCSEVFNVKFCKEESVELFKRKAHESLKGENGRPISNHKFKEESRKKSKTLIDLIEASTTIKEEKFLKIKNLMTNTVLNAKKRGVTDCKRTPKIPRDICDFEVLDNINRAIVDSLTIYPASNLTDLAKIYQSAQEVYFDFKKNTKEPSKWKESIEIKISSLKDKLNLIKRHEDKEKLSKEEKAKLIKTFRDDNKLLVRKSDIMEMKSEINNAILIYEKKILISNKRIEYKRQNRKFELYRGKFYRDLEYDKTADIDEALVSTEDIASFWSKMWSRGKEDEERKKKYKDLVPVHGTKEKEHFVFPSVEEFIVMIKHLPNWKAAGPDNIYNFFIKQLDSLHSTLYKLIKETVENPEKMDEWLTTGNTYLIPKEGCSSGGDFRPITCLSNIYKLITKCVSKVLQLENEDRKLISENQLGNVRGIQGAKEQAMFNIAINKEYKNKLKTAWIDVKKAFDSIDHDYLLHCIASLNVAPWIYKFMEESTKKWKINIFAKNNLILKKEVSRGILQGDSLSPLLFVVCMDPLSKCLNAKFPMAQIPINKEESYSTNHLLFIDDLKLMAENETTLEKMLEETLEFCKTVNLEINPKKSATNAHTLNTEIVKLDNTSCYKYLGITEDSTSTPLKEVKDAITKEIIRRTYELSKSKLSGKNMIRAINEYAISLINYYIGVLNLEPEIFKTIDDEVRQVLIHNGIHLQPACKERLYLPRSELGRGLVSIEHRSEIMLFKLLEDFSKTSLVLKRRASILKIQEEEKTHFWLIGRYCEEKYKTAIKLNVPVLLSAQKQSLYDKITTKTFHKKLYKGVSNEKVSIKDSSIWLKHGNIPSKREAALCFLQDRNMFLGEIKKCPHCGNAPKTVDHLASKCEKMLGTDYTRRHNEVLKCIHLLLCNKYGVKSTKKLRNHSVQEIISNKYVEIRVDTFAKTDIKIKHNRPDIIVIDKRTKEILIIEVGITSLDNLQQVETEKLRKYDVLANELTQMHGFKSTIVPYVLTWDGVVSIYHEMYRRRLELSDRIESYIQSLVLKKTLEGISLDFRRNGNLEEFLSPERIVCPEKNPENEVVSTLAGTP

SEQ ID NO: 8306 - protein, 1072 aa, Papilio xuthus
MPRGGWCLSSEVYNVKFCKEETVELFKRKAHESLKGENGRPISNHKFKEESRKKSKTLVDLIEASTTIKEEKFLKIKNLLTNAVLTAKKRSVTDCRRTPKIPRDICDFEVLDNINRAIVDSLTIYPASQLTDLAKIYQSAQEVYFDFKKNDKEPSKWKESIEIKISSLKDKLNLIKRHEDKEKLSKEEKAKLIKTFRDDNKLLVRKSDIMEMKSEIDNAILIYEKKILISNKRIEYKRQNRKFELYRGKFYRDLEYDKTADIDEALVSTEDIASFWSKMWSRGKEDEERKKKYKDLVPVHGPKEKEHIVFPSLEEFIVIVKHLPNWKAAGPDNIYNFFIKHLDSLHSTLYKLIKETVENPEKMDEWLTTGDTYLIPKEGCKSGGDFRPITCLSNIYKLITKCVSKVFQLEIEDRKLISENQLGNVRGIQGAKEQAMFNIAINKEYKNKLKTAWIDVKKAFDSIDHDYLLHCIASLNVAPWIYKFMEESTKKWKINIFAKNNLILKKEVSRGILQGDSLSPLLFVVCMDPLSKCLNAKFPMVQIPINKEESYSTNHLLFIDDLKLMAENETTLEKMLEETLEFCKTVNLEINPKKSATNAHSLNTEIVKVDNTSCYKYLGITEDSTSTPLKEVKDAITQEILRRTNELSRSKLSGKNMMRAINEYAISLINYYIGVLNLEPETFKKIDDEVRQILIHNGIHLQPACKERLYLPRVELGRGLVSIEHRSEMMLFKLLEDFTKTSLVIRRRAAILKVQEEERTHFWLIQKYCEDKYKTVSKLNVPVLLSAQKQCLYNNIKTKTFHQKLYKGVSNENVSVKDSSIWLKHGNIPAKREAALCFLQDRNMFLGEVKKCPHCGNASKTVDHLASKCEKMLGTDYTRRHNEVLKCIHLLLCNKYGVRSTKKLKNHSVQEIVSNKFVEIRVDTFVKTDIKIKHNRPDIVVIDKRTKEILIVEVGITSLDNLQQVETEKLRKYDVLANELTQMYGFKATIVPFVLTWDGVVSKYHQIYRRRLELSDRIEAYIQSLVLKKTLEGISLDFRRNESLEEFFSTERSVCLGAKPENEEPLTLAGTP

SEQ ID NO: 8307 - protein, 876 aa, Blastobasis lacticolella
MNGNRSIRLTRHVNEIMENYKVHSAYEDLNSQLTHFLDTLKQKLAVTCNRLKRYKTCTQRKTQNTQFKMNEKQFYRTISAKSTNNIHNSRNRQNEHSLQPNELREFWARIWENPVQHNTEATWLNNEQLFHDDNTNTMAFDNITMDIFELITLKLHNWKSPGADNIHNYWYKKYTYLHPFLLKYINQFIQNPQTTSDFITAGITYMIPKDLTDMLNPAKFRPITCLQTIYKILTACLSHLIYEHVNGNNILVEQQKGCRKYSQGCKEQITIDTVILNQVQRKKSDLYSMYIDYKKAYDSVPHTWLIKVLDVYKINPTIISFLQVIMNKWTTQLKLSTPINTYVTEEIQIRRGIFQGDTLSPLWFCLALNPLSRILNAAGAGYRLQYKEHATEAPSSFKLSHLLYMDDIKLYGATLDELNELTRLTENYSTDICMEFGLDKCKINSIRKGQITENEYQMQSGELIESLGDNETYKYLGYYQSKQILTKEVKDTLTQKFKHRLNTILKTQLSARNTTKAINSYAVPVLTYSFGIIINWTKSQLIQLQRIINTTMTHNRKHHPRSCIQRQTLPRADVGRGLIDISNLHSKQITCLRTYFCQKAITSPLHNAIIQNDRKLTPLNLQDSEEQRNESQTNRQTKLNEWSQKSLHGRHRQDLCQINVDLTASNEWLRNGVLFPETEGFMVAIQDQVIETRNYRKFIIKDPTASDDRCRRCQSSPETIQHITGACKTIVQTDYKYRHDQVANIIHQKLAIKYSLIPDTPVPYYKYTPEVVIENATHKIYFDRAVLTDRTIHYNRPDIIVIDKNNKTAHLIDIAVPNTHNIQSTIVEKLNKYTDLKDEISRLWNLHKVTIVPIVLSATGIIPTHHHQPEDAHCWA

SEQ ID NO: 8308 - protein, 989 aa, Blastobasis lacticolella
MISEERLQQLKNSVEHTLSATIHNTQTQTQTNKQTWYTHSNDTESQPEIYINTTQNDINTTENQQNDSQIENFELQSEKIYEIESIFLKAYDEFRNICPTERPYIPKQKSTKKLNLLVQALNSYVLPKLLNAEADFETVHTAIYCAAYTAAVYSGFRVDTPNIVKTHIYRIPIWQKRLQNKIDKLRAKIRKVTEFIRGNTSRRLKNEIDKIKETYKIHSTHENNNTELSQFLDTLKQKLSALSNRLRRYKATTLRKNQNHQFSANENQFYRKLTGNVTPNTNTAIPPTTQDLHQFWSSIWNVPLEHRNSDWIQADRDKLGDLPDMSFDEISFDLLQKVLHKLHNWKATGSDKIHNYWFKKLTATHHFILLNINKFIKDPDAIPSYITQGITYMLPKDMADSQNPSKYRPITCLQNFYKIITSCLSELIYHHVDVNNILAEQQKGCRKFSRGCKEQLIIDSVASKQAFSKKRNIYTMYIDYKKAFDSVPHTWLLYILQHYKIHPTIVNFLQDMMSKWSTSLKLNLNNHIVETEPISIQRGIFQGDALSPLWFCLALNPLSNLLNDSKAGFHIKNGSNKFILTHLMYMDDIKLYSSNLTQLNKLANITQTFSADIHMEFGLDKCQIQSVHKGKLEINNYTLDNGETIGPVDDITGYKYLGYQQSRQIHQKETKSNLTQKFKSRLHKITNSYLNAKNTTKAINSYAIPILTYSFGVIKWSQSDLTTLHRVINSVMTKCRKHHPRSCYERLTLPKLHGGRGIIDIKNLHNKQITNLRTFFQNQAENSPLHKIIVQADTNSTPLNLSEPNTQVNEVIITTEQKIDKWRQKSLHGRHHRDLTSDNVDKVASNAWLKQGQLFPETEGFMLAIQDQVINTRNYRKHIIHDSTLQSDRCRHCHNSPETIQHITGACSSIAQTDYKHRHDQVAAIIHQYLALKYKLVNDKVPYYKYKPEVVLESSQHKLYWDRTILTDKTVHHNRPDITLHDKNIKPYI

SEQ ID NO: 8309 - protein, 756 aa, Blastobasis lacticolella
MSFDEISFDLLQKVLHKLHNWKATGSDKIHNYWFKKLTATHHFILLHINRFIKDPDAIPSYITQGITYMLPKDMADSQNPSKYRPITCLQNFYKIITSCLSELIYHHVDVNNILAEQQKGCRKFSRGCKEQLIIDSVASKQAFSKKRNIYTMYIDYKKAFDSVPHTWLLYILQHYKIHPTIVNFLQDMMSKWSTSLKLNLNNHIVETEPISIQRGIFQGDALSPLWFCLALNPLSNLLNDSKAGFHIKNGSNKFILTHLMYMDDIKLYSSNLTQLNKLANITQTFSADIHMEFGLDKCQIQSVHKGKLEINNYTLDNEETIGPVDDITGYKYLGYQQSRQIHQKETKSNLTQKFKSRLHKITNSYLNAKNTTKAINSYAIPILTYSFGVIKWSQSDLTTLQRVINSVMTKCRKHHPRSCYERLTLPKLHGGRGIIDIKNLHNKQITNLRTFFQNQAENSPLHKIIVQADTNSTPLNLSEPNTQVNEVIITTEQKIDKWRQKSLHGRHHRDLTSDNVDKVASNAWLKQGQLFPETEGFMLAIQDQVINTRNYRKHIIHDSTLQSDRCRHCHNSPETIQHITGACYSIAQTDYKHRHDQVAAIIHQYLALKYKLVNDKVPYYKYKPEVVLESSQHKLYWDRTILTDKTVHHNRPDITLHDKNNKTVYLIDIAIPNTHNLSSTYTDKITKYTDLSIEIKSQWRTTTVKTIPITISSTGIIPNTLHISLEQLNIHPLTYIQLQKAVILNTCRIVRKFLNV

SEQ ID NO: 8310 - protein, 1482 aa, Aricia agestis
MRSATPKESYLGCCKAYTFLYFIYVCLFFNIIYITIIFINLPSNMERELDRTSIEPLPGGDRRGMSGAGAGHYSMRTASGYSLTRRARAEELENATAEHIREDDTALRSRPHATNSAGISPETIASQNTNVDIRQKWSLEEARELLFCYFKAKSQGVGYIRRLENLFKDRNPTSNKINKLTGITLSNQARSIIARRTLSDEIINVIKNQAESSEINTNSETNRVSERSQNQLIPQITITQNIQSTERSIIEGDNNDSLDTGISQEDSRRKWTPQEVCELMYCYFKSRSEGPGYVKRLETLFKLRNANNPKARKMTGQLLSNQARRIITYKDLSDDTLREIRMRADQPNDSSLRSVQETNDAVEPNEHSIQNRVIQSDMQTPNLANFTEDNHRLSELPGIPGTDDDDNHLAQTYRQPQSCAQTEVNQTEPHLNITESTFTLDQNALMESRLQNESAEVDDMQDQNIINDFLQSLAETKETPVENRQSLPKPNFNKSFFDKLNKINKYLPNILETQETLRGINDVIYAAAKTLIISNCQKPYCKQKAARPAKEPAWKMRIKNKIEQTRKDLGRLIESKNNNISLNKQNTINKLYDKYQIFNEQDLENTIEILKQKVKLYAGRIKRYEEIINRKIQNTLFKESQYKFYRTLGNKTKSPRDLPNKQDIQTFWSQILSQPKQFNTNAPWIKEIENNVQIDPDNHIYRFENISVEMLKNAIRKTNNWKAPGIDKIQNFYLKYFTSTHFYIAKAFDRIFNGTEDTEEWFTTGQVILIPKTENNTDNPKNWRPIACLPTMYKLLTSIIADRLYLFCEHNKILAVEQRGCRRGTRGCKDHLMLNKAILEDAYHAKKNLSMCWIDYQKAFDSISHEWLIKLLSLYKCPIAVISFLKKVMTNWKVVMTAHGERTTVVTDPIQINCGLFQGDSLSPLLFCLAINPLSQILNKYTNKGYQLKDSANINHLLYMDDLKLYAKTKKTLESLIHTVEIFTNDIGMKFGLEKCNTLHIIEGRKSRNQTEGQMLLSGEEFAYLKDNETYKYLGIHESGKLNHQELRHQITKEYFKRTKKILNTHLSARNTMKAINAYATPVLLYSFGIVNYKDRDIKAIDTKTRKLLALNKAHQQKAEVERLYLPTEEGGRGLLNIESLYKSQIIKYKQHLNNARDYLIKAVNDHDKNINKYSINVNAEEYVREIGLNGRDNINETDIKKAILKKKIHTWKSKPLRAQFHKQVLEKENIDKNLSFNWIKKQMISPTLEAAIFAIQDQSIITKQFERDILKKEADGKCRICFTKDETIQHIVSGCEKLAGIQYTQRHNNIVQYIYWALSKKHNFNTEQLWWRDKLTQPQVKENDTAKLMWEMPVQTDVQVIHNRPDIIYIDKQQNITYLIDVTIPTDYNIGAKEMEKLTKYHLLKKEITRLWKTKAIIVPIVIGATGMVAKSIRRYCDTLDAKLDLTIMQKQTAIYTSTIVSKVLGSNILTVEGESAVPSP

SEQ ID NO: 8311 - protein, 1428 aa, Glaucopsyche alexis
MERQFNRNSKGPLPGGDRRGMSGAGAGRDSMRTASGYLLNRRAGAGELEDATAEHTRDDDNALRSRPQATNSAGLSPETTVPHNTNADIRQKWSLEEVRELLFCYFKAKSLGIGYIKRLEKLFKDRNPNSNKINKLTGTTLSNQARSIISRKIISDEVIHEIKNQVENSEINSESEQNSNNSNFQTTIQHTDIQTPIIEIDSNSNDTAEVRISLQDSRRKWSQQEICELMFCYFRTRSQGPGYVKRLEKLFKQRNANNPKIAKMTGQLLSNQARRVITYKDLSDERLREIRIEAEQYSNNDSYPLQIQETSNLVELNEYPHDHASQSYTQTSNRSNVSEEIHRVLEEASTNVQPDIILESHLSQIYTQSQSHTRTEIEHTDPQLENTLTFEYDTPIENNLHDEDNIEYVETDDLQDNIINDFLQNLSETKGIQIEDRKSLPKPNFKKAFFDKLNKINKYLPNILQTQETLRDINDVIYAAAKTLIVSNNQKPYGKQKSVRPIKEPPWKMRIKKKIEEIRKELGRLTESKNNNIGQKKRNAINKLYDKHNIFSEQDLNNTIEILKQKVKLYAGRIKRYEEMNNRKTQNTLFKDNQHKFYRTLENKINNPQDIPNKQDIHSFWSQILSQPKDFNIDAPWIKEIENNTQFNLDNNIYRFECIDVEMLKNAIKKTHNWKTPGIDKIQNFYLKYFTSAHVYIAKAFDRIFKGIEDTDEWFTTGQVILIPKTNNNTNNPKNWRPIACLPTMYKLLTSILADRLYLYCEHNKILAVEQRGCRRGTRGCKDHLMLNKAILEDAYYAKKNLSMCWIDYQKAFDSISHEWLLKVLSLYRCPDAVIDFLKTVMMKWRVIMSAYGEKTTVVTEPIRIKCGLFQGDSLSPLLFCLAINPISQILNKYINKGYQLKDTTNINHLLYMDDLKLYAKTKNNLETLIHTVEIFTKDIGMKFGLEKCNTLHIIEGRKSKNQTDGQLLLNGEEFSYLKDNETYKYLGIHESGKLNHQELRDQISKEYFKRTKKILNTHLSARNIMKAINTYAAPVLLYSFGIVNYKDRDIKAIDVKTRKLLALNKVHQQKAEVERLYLPVEEGGRGLLSIESLYKTQIIKYSQYLNNTGDYLIKAVNEHDKNVNKYSININAKEYIKELGLDAKDNIIDINIKKAIVKKKKLSWKSKPLRKQFYKQVLEKENIDKNLSFNWLKKQLISSRLEAAVFAIQDQSIITKQFERDIMKKPIDGKCRICSTKDETIQHIVSGCEKLAGTLYVQRHNNIVQYIYWALSKKHNFNTHQLWWKDTLTQPQVKENDTAKLMWEMPVQTDVQVNHNRPDIIYIDKNQNITYLIDVTIPTDYNIGAKEMEKITKYHLLKKEITRLWKTKTVIIPIVIGATGMVARSIRRYCDILDAKLDIAIMQKQTAIHTSTIVSKILGDNILIDKN

SEQ ID NO: 8312 - protein, 1482 aa, Cyaniris semiargus
MRSATSKESYLGCCKAYTFLYFIYVCLFFAIIYVTIIFINLPSNMERELDRTSIEPLPGGDRRGMSGAGAGHYSMRTASGYPLIRRAGAEELENATAEHIRDDDNALRSRPHATNSAGISPETIAPQTTNVDIRQKWSLEEARELLFCYFKAKSQGVGYIRRLENLFKDRNPTSNKINKLTGTTLSNQARSIISRRTLSDEIINVIKDQAERSEINANSETNRVSEQSQNHLNPQITITENIQNTESSIIEIDNYDSSDTGILQEDSRRKWTPQELCELMYCYFKTRSEGPGYVKRLETLFKQRNANNPKARKITGQLLSNQARRVITYKDLSHDTLREIQMRAEQPNDTGLRSIQTEEANDTVEPNECSQNRITQSDMQTSNLTNCTEDNHRLLETPATNADEDDNHLAQTYRQPQSRAQTEVNQTGPQLNITENTFTLEQNTLIEFRLQDEGFEVDGMQDQNIINDFLQSLAETKETPVENRKSLPKPNFNKSFFDKLNKINKYLPNILETQETLRGINDVIYAAAKTLIISNSQKPYCKQKIARPTKEPPWKMRIKNKVEQTRKDLGRLIESKNNNISQNKQNTINKLYDKYQIFNEQDLDNTIEILKQKVKLYAGRIKRYEEIINRKTQNALFKENQHKFYRNLDNKAKSPRDLPNKQDIHTFWSQILSQPKQFNIDAPWIKEIENNVQIDPDNHIYRFENINVEMLKNAIRKTHNWKTPGIDKIQNFYLKYFTSTHFYIAQAFDRIFKGTEDTEEWFTTGQVILIPKTENNTDNPKNWRPIACLPTMYKLLTSIIADRLYLFCEHNNILAVEQRGCRRGTRGCKDHLMLNKAILEDAYHSKKNLSMCWIDYQKAFDSISHEWLIKLLSLYKCPIAVIGFLKKVMTNWRVIMTTHGENTTVVTDPIQIKCGLFQGDSLSPLLFCLSINPLSQILNKYTNKGYQLKDSTNINHLLYMDDLKLYAKTKKNLETLIHTVEIFTNDIGMKFGLEKCNTLHMIEGRKSRNQTEGQILLSGEEFAYLKDNETYKYLGIHESGKLNHQELRHQITKEYFKRTKKILNTYLSARNTMKAINAYATPVLLYSFGIVNYKDRDIKSIDTKTRKLLALNKAHQQKAEVERLYLPTEEGGRGLLNIESLFKSQIIKYKQHLNNECDYLIKVVNEHDKNVNKYSINVNAEEYVKEIGLNGRDNINDTDIKKSIIKMKIHTWKAKPLRAQFHKQVLEKENIDKNLSFNWIKKQMISPILEAAVFAIQDQSIITKQFERDILKNQVDGKCRICFTKDETIQHIVSGCEKLAGTQYTQRHNNIVQYIYWALSKKHNFNTDQLWWKDKLTQPQVKENDTAKLMWEMPVQTDVQVNHNRPDIIYVDKQQNITYLIDVTIPTDYNIGAKEIEKLTKYHLLKKEITRLWKTKTIIIPIVIGATGMVAKSIRRYCDILDAKLDLTIMQKQVAIHTSTIVSKVLGGNVLTDEGESAVPSP

SEQ ID NO: 8313 - protein, 927 aa, Cyaniris semiargus
MRIKNKVEQTRKDLGRLIESKNNNMSQNKQNTINKLYDKYQIFNEQDLDNTIEILKQKVKLYAGRIKRYEEIINRKTQNTLFKENQHKFYRTLDNKAKSPRDLPNKQDRHTFWSQILSQPKQFNIDAPWIKEIENNVQIDPDNHIYRFENINVEMLKNAIRKTHNWKTPGIDKIQNFYLKYFTSTHFYIAQAFDRIFKGTEDTEEWFTTGQVILIPKTENNTDNPKNWRPIACLPTMYKLLTSIIADRLYLFCEHNNILAVEQRGCRRGTRGCKDHLMLNKAILEDAYHSKKNLSMCWIDYQKAFDSISHEWLIKLLSLYKCPIAVICFLKKVMTNWRVIMTAHGENTTVVTDPIQIKCGLFQGDSLSPLLFCLSINPLSQILNKYTNKGYQLKDSTNINHLLYMDDLKLYAKTKKNLETLIHTVEIFTNDIGMKFGLEKCNTLHMIEGRKSRNQTEGQILLSGEEFAYLKDNKTYKYLGIHESGKLNHQELRHQITKEYFKRTKKILNTYLSARNTMKAINAYATPVLLYSFGIVNYKDRDIKSIDIKTRKLLALNKAHQQKAEVERLYLPTEEGGRGLLNIESLFKSQIIKYKQHLNNECDYLIKVVNEHDKNINKYSINVNAEEYVKEIGLNGRDNINDTDIKKAIIKKKIHTWKAKPLRAQFHKQVLEKENIDKNLSFNCIKKQMISPILEAAVFAIQDQSIITKQFERDILKNQVDGKCRICFTKDETIQHIVSGCEKLAGTQYTQRHNNIVQYIYWALSKKHNFNTDQLWWKDKLTQPQVKENDTAKLMWEMPVQTDVQVNHNRPDIIYVDKQQNITYLIDVTIPTDYNIGAKEIEKLTNYHLLKKEITRLWKTKTIIIPIVIGATGMVAKSIRRYCDILDAKLDLTIMQKQVAIHTSTIVSKVLGSNVLTDEGESAVPSP

SEQ ID NO: 8314 - protein, 1431 aa, Glaucopsyche alexis
MERQFNRNSKGPLPGGDRRGMSGAGAGRDSMRTASGYLLNRRAGAGELEDATAEHTRDDDNALRSRPQATNSAGLSPETTVPHNTNADIRQKWSLEEVRELLFCYFKAKSLGIGYIKRLEKLFKDRNPISNKINKLTGTTLSNQARSIISRKIISDEVIHEIKNQVENSEINSESEQNSNNSNFQTTIQHTDIQTPIIEIDSNSNDTAELRISLQDSRRKWSQQEICELMFCYFRTRSQGPGYVKRLEKLFKQRNANNPKIAKMTGQLLSNQARRVITYKDLSDERIREIRIEAEQYSNNDSCPLQIQETGNLVELNEYPHDHASQSYTQASNRSNVSEEIHRVLEEASTNVQPDIILESHLSQIYTQSQSHTRTEIEHTDPQLENTLTFEYDTPIENNLHDEDNIEYVETDDLQDNIINDFLQNLSETKEIQIEDRKSLPKPNFKKAFFDKLNKINKYLPNILQTQETLRDINDVIYAAAKTLIVSNNQKPYGKQKSVRPIKEPPWKMRIKKKIEEIRKELGRLTESKNNNIGQKKRNAINKLYDKYNIFSEQDLNNTIEILKQKVKLYAGRIKRYEEMNNRKTQNTLFKDNQHKFYRTLENKTNNPQDIPNKQDIHSFWSQILSQPKDFNIDAPWIKEIENKTQFNLDNNIYRFECIDVEMLKNAIKKTHNWKTSGIDKIQNFYLKYFTSAHVYIAKAFDRIFKGIEDTDEWFTTGQVILIPKTNDNTNNPKNCRVVRPIACLPTMYKLLTSILADRLYLYCKPNKILAVEQRGCRRGTRGCKDHLMLNKAILEDAYYAKKNLSMCWIDYQKAFDSISHEWLLKVLSLYRCPDAVIDFLKTVMMKWRVIMSAYGEKTTVVTDPIRIKCGLFQGDSLSPLLFCLAINPISQILNKYINKGYQLQDTTNINHLLYMDDLKLYAKTKNNLETLIHTVEIFTKDIGMKFGLEKCNTLHIIEGRKSKNQTDGQLLLNGEEFSYLKDNETYKYLGIHESGKLNHQELRDQITKEYFKRTKKILNTHLSARNIMKAINTYAAPVLLYSFGIVNYKDRDIKAIDVKTRKLLALNKVHQQKAEVERLYLPVEEGGRGLLSIESLYKTQIIKYSQYLNNTGDYLIKAVNEHDKNVNKYSININAKEYIKELGLDAKDNIIDINIKKAIVKKKILTWKSKPLRKQFYKQVLEKENIDKNLSFNWLKKQLISSRLEAAVFAIQDQSIITKQFERDIMKKPIDGKCRICSTKDETIQHIVSGCEKLAGTLYVQRHNNIVQYIYWALSKKHNFNTHQLWWKDTLTQPQVKENDTAKLMWEMPVQTDVQVNHNRPDIIYIDKNQNITYLIDVTIPTDYNIGAKEMEKITKYHLLKKEITRVWKTKTVIIPIVIGATGMVARSIRRYCDILDAKLDITIMQKQTAIHTSTIVSKILGDNILIDKN

SEQ ID NO: 8315 - protein, 1023 aa, Cyaniris semiargus
MQDQNIINDFLQSLAETKETPVENRKSLPKPNFNKSFFDKLNKINKYLPNILEAQETLRGIDDVIYAAAKTLIISNSQKPYCKQKVARPTKEPPWKMRIKNKVEQTRKDLGRLIESKNNNMSQNKQNTINKLYDKYQIFNEQDLDNTIEILKQKVKLYAGRIKRYEEIINRKTQNTLFKENQHKFYRTLDNKAKSPRDLPNKQDIHTFWSQILSQPKQFNIDAPWIKEIENNVQIDPDNHIYRFENINVEMLKSAIRKTHNWKTPGIDKIQNFYLKYFTSTHFYIAQAFDRIFKGTEDTEEWFTTEQVILIPKTENNTDNPKNWRPIACLPTMYKLLTSIIADRLYLFCEHNNILAVEQRGCRRGTRGCKDHLMLNKAILEDAYHSKKNLSMCWIDYQKAFDSISHEWLIKLLSLYKCPIAVIGFLKKVMSNWRVIMTAHGENTTVVTDPIQIKCGLFQGDSLSPLLFCLSINPLSQILNKYTNKGYQLKDSTSINHLLYMDDLKLYAKTKKNLETLIHTVEIFTNDIGMKFGLEKCNTLHMIEGRKLKNQTEGQILLSGEEFAYLKDNETYKYLGIHESGKLNHQELRHQITKEYFKRTKKILNTYLSARNTMKAINAYATPVLLYSFGIVNYKDRDIKSIDTKTRKLLALNKAHQQKAEIERLYLPTEEGGRGLLNIESLFKSQIIKYKQHLNNECDYLIKVVNEHDKNINKYSIYVNAEEYVKEIGLNGRDNINDTDIKKAIIKKKIHTWKAKPLRAQFHKQVLEKENIDKNLSFNWIKKQMISPILEAAVFAIQDQSIITKQFERDILKNQVDGKCRICFAKDETIQHIVSGCEKLAGTQYTQRHNNIVQYIYWALSKKHNFNTDQLWWKDKLTQPQVKKNDTAKLMWEMPVQTDVQVNHNRPDIIYVDKQQNITYLIDVTIPTDYNIGAKEIEKLTKYHLLKKEITRLWKTKTIIIPIVIGATGMVAKSIRRYCDILDAKLDLTIMQKQVAIHTSTIVSKVLGGNVLTDEGESAVPSP

SEQ ID NO: 8316 - protein, 915 aa, Glaucopsyche alexis
MRIKKKIEEIRKELGRLTESKNNNIGQKKRNAINKLYDKYNIFSEQDLNNTIEILKQKVKLYAGRIKRYEEMNNRKTQNTLFKDNQHKFYRTLENKTNNPQDIPNKQDIHSFWSQILSQPKDFNIDAPWIKEIENKTQFNLDNNIYRFECIDVEMLKNAIKKTHNWKTSGIDKIQNFYLKYFTSAHVYIAKAFDRIFKGIEDTDEWFTTGQVILIPKTNDNTNNPKNWRPIACLPTMYKLLTSILADRLYLYCEHNKILAVEQRGCRRRTRGCKDHLILNKAILEDAYYAKKNLSMCWIDYQKAFDSISHEWLLKVLSLYRCPDAVIDFLKTVMMKWRVIMSAYGEKTTVVTDPIRIKCGLFQGDSLSPLLFCLAINPISQILNKYINKGYQLQDTTNINHLLYMDDLKLYAKTKNNLETLIHTVEIFTKDIGMKFGLEKCNTLHIIEGRKSKNQTDGQLLLNGEEFSYLKDNETYKYLGIHESGKLNHQELRDQITKEYFKRTKKILNTHLSARNIMKAINTYAAPVLLYSFGIVNYKDRDIKAIDVKTRKLLALNKVHQQKAEVERLYLPVEEGGRGLLSIESLYKTQIIKYSQYLNNTGDYLIKAVNEHDKNVNKYSININAKEYIKELGLDAKDNIIDINIKKAIVKKKILTWKSKPLRKQFYKQALEKENIDKNLSFNWLKKQLISSRLEAAVFAIQDQSIITKQFERDIMKKLIDGKCRICSTKDETIQHIVSGCEKLAGTLYVQRHNNIVQYIYWALSKKHNFNTHQLWWKDTLTQPQVKENDTAKLMWEMPVQTDVQVNHNRPDIIYIDKNQNITYLIDVTIPTDYNIGAKEMEKITKYHLLKKEITRLWKTKTVIIPIVIGATGMVARSIRRYCDILDAKLDITIMQKQTAIHTSTIVSKILGDNI

SEQ ID NO: 8317 - protein, 1482 aa, Aricia agestis
MRSATPKESYLGCCKAYTFLYFIYVCLFFNIIYITIIFINLPSNMERELDRTSIEPLPGGDRRGMSGAGAGHYSMQTASGYSLTRRARAEELENATAEHIREDDTALRSRPHATNSAGISPETIASQNTNVDIRQKWSLEEARELLFCYFKAKSQGVGYIRRLENLFKDRNPTSNKINKLTGTTLSNQARSIIARRTLSDEIINVIKNQAESSEINTNSETNRVSERSQNQLIPQITITQNIQSTERSIIEGDNNDSLDTGISQEDSRRKWTPQEVCELMYCYFKSRSEGPGYVKRLETLFKLRNANNPKARKMTGQLLSNQARRIITYKDLSDDTLREIRMRADQPNDSSLRSVQETNDAVEPNEHSIQNRVIQSDMQTPNLANFTEDNHRLSELPGIPGTDDDDNHLAQTYRQPQSCAQTEVNQTEPHLNITESTFTLDQNALMESRLQNKSAEVDDMQDQNIINDFLQSLAETKETPVENRQSLPKPNFNKSFFDKLNKINKYLPNILETQETLRGINDVIYAAAKTLIISNCQKPYCKQKAARPAKEPAWKMRIKNKIEQTRKDLGRLIESKNNNISLNKQNTINKLYDKYQIFNEQDLENTIEILKQKVKLYAGRIKRYEEIINRKIQNTLFKESQYKFYRTLGNKTKSPRDLPNKQDIQTFWSQILSQPKQFNTNAPWIKEIENNVQIDPDNHIYRFENISVEMLKNAIRKTNNWKAPGIDKIQNFYLKYFTSTHFYIAKAFDRIFNGTEDTEEWFTTGQVILIPKTENNTDNPKNWRPIACLPTMYKLLTSIIADRLYLFCEHNKILAVEQRGCRRGTRGCKDHLMLNKAILEDAYHAKKNLSMCWIDYQKAFDSISHEWLIKLLSLYKCPIAVISFLKKVMTNWKVVMTAHGERTTVVTDPIQINCGLFQGDSLSPLLFCLAINPLSQILNKYTNKGYQLKDSANINHLLYMDDLKLYAKTKKTLESLIHTVEIFTNDIGMKFGLEKCNTLHIIEGRKSRNQTEGQMLLSGEEFAYLKDNETYKYLGIHESGKLNHQELRHQITKEYFKRTKKILNTHLSARNTMKAINAYATPVLLYSFGIVNYKDRDIKAIDTKTRKLLALNKAHQQKAEVERLYLPTEEGGRGLLNIESLYKSQIIKYKQHLNNARDYLIKAVNDHDKNINKYSINVNAEEYVREIGLNGRDNINETDIKKAILKKKIHTWKSKPLRAQFHKQVLEKENIDKNLSFNWIKKQMISPTLEAAIFAIQDQSIITKQFERDILKKEVDGKCRICFTKDETIQHIVSGCEKLAGIQYTQRHNNIVQYIYWALSKKHNFNTEQLWWRDKLTQPQVKENDTAKLMWEMPVQTDVQVIHNRPDIIYIDKQQNITYLIDVTIPTDYNIGAKEMEKLTKYHLLKKEITRLWKTKAIIVPIVIGATGMVAKSIRRYCDTLDAKLDLTIMQKQTAIYTSTIVSKVLGSNILTVEGESAVPSP

SEQ ID NO: 8318 - protein, 1482 aa, Cyaniris semiargus
MRSATSKESYLGCCKAYTFLYFIYVCLFFSIIYVTIIFINLPSNMERELDRTSIEPLPGGDRRGMSGAGAGHYSMRTASGYPLIRRAGAEELENATAEHIRDDDNALRSRPHATNSAGISPETIAPQTTNVDIRQKWSLEEARELLFCYFKAKSQGVGYIRRLENLFKDRNPTSNKINKLTGTTLSNQARSIISRRTLSDEIINVIKDQAERSEINANSETNRVSEQSQNHLNPQITITENIQNTERSIIEIDNYDSSDTGILQEDSRRKWTPQELCELMYCYFKTRSDGPGYVKRLETLFKQRNANNPKARKITGQLLSNQARRVITYKDLSHDTLREIQMRAEQPNDTGLRSIQTEEANDTVEPNECSQNRITQSDMQTSNLTNCTEDNHRLLETPATNADEDDNHLAQTYRQPQSRAQTEVNQIGPQLNITENTFTLEQNTLIEFRLQDEGFEVDGMQDQNIINDFLQSLAETKETPVENRKSLPKPNFNKSFFDKLNKINKYLPNILETQETLRGINDVIYAAAKTLIISNSQKPYCKQKIARPTKEPPWKMRIKNKVEQTRKDLGRLIESKNNNISQNKQNTINKLYDKYQIFNEQDLDNTIEILKQKVKLYAGRIKRYEEIINRKTQNTLFKENQHKFYRTLDNKAKSPRDLPNKQDIHTFWSQILSQPKQFNIDAPWIKEIENNVQIDPDNHIYRFENINVEMLKNAIRKTHNWKTPGIDKIQNFYLKYFTSTHFYIAQAFDRIFKGTEDTEEWFTTGQVILIPKTENNTDNPKNWRPIACLPTMYKLLTSIIADRLYLFCEHNNILAVEQRGCRRGTRGCKDHLMLNKAILEDAYHSKKNLSMCWIDYQKAFDSISHEWLIKLLSLYKCPIAVIGFLKKVMTNWRVIMTAHGENTTVVTDPIQIKCGLFQGDSLSPLLFCLSINPLSQILNKYTNKGYQLKDSTKINHLLYMDDLKLYAKTKKNLETLIHTVEIFTNDIGMKFGLEKCNTLHMIEGRKSRNQTEGQILLSGEEFAYLKDNETYKYLGIHESGKLNHQELRHQITKEYFKRTKKILNTYLSARNTMKAINAYATPVLLYSFGIVNYKDRDIKSIDTKTRKLLALNKAHQQKAEVERLYLPTEEGGRGLLNIESLFKSQIIKYKQHLNNECDYLIKVVNEHDKNVNKYSINVNAEEYVKEIGLNGRDNINDTDIKKAIIKMKIHTWKAKPLRAQFHKQVLEKENIDKNLSFNWIKKQMISPMLEAAVFAIQDQSIITKQFERDILKNQVDGKCRICFTKDETIQHIVSGCEKLAGTQYTQRHNNIVQYIYWALSKKHNFNTDQLWWKDKLTQPQVKENDTAKLMWEMPVQTDVQVNHNRPDIIYVDKQQNITYLIDVTIPTDYNIGAKEIEKLTKYHLLKKEITRLWKTKTIIIPIVIGATGMVAKSIRRYCDILDAKLDLTIMQKQVAIHTSTIVSKVLGSNVLTDEGESAVPSP

SEQ ID NO: 8319 - protein, 1360 aa, Autographa gamma
MNRENKRYSLRPLPGGRRGTSGASAGCSSMRTIGGGGLNRRVLPEQLTTADDHSSPSLPPSSPSSLFPSIPSSPASYANSRHQSSNHSQPSSPSIIGHLTEDVVQEAKAASDPAPASVLVGKRKIWSEEMNIFILRSYLIITSLETNVKQYLSPLFEAFIQKFPQMQASKQRIGDQRRSIVRNKLLSDEKIKQIRLEVQTYLKDNPATNFSQNSNSERLRWTTDINETIMRSYYRITNLETNVTGYRQQLHQQVTTLCPSIAHVSAQRISDQRRAIINNKYVSLERLNKIREEVASELNDSAVLSPDGPEPLNLTSSILETSEDQTTLPSLTQNSEQQTQIEVVESESFILPSEVQLHINETFKEIFTMYKNTVASCRPSIPKQKSSKRFASIVNYINSYVIPGAINNDTDFATTQLIIYSAAYSAAKHNGAKFRDTSAVKTTTERVPKWQENMQRRIANFRSSIARLNEYKNGNQSPALKRKVEEIKERYKTHSHHENPNTDINHFLDTLKQKLSVLSSRLRRYKQTTLRKSQNQMFVNNEKVFYRNLAQNNINILPTSSSSASMPARESLQEFWSNIWSNPVEHKDNEWIEQDKEKFKNVPEMVYEEITLDLLTRIINRTHNWKATGSDKLHNYWYKKFTSVHTLLLTHINRFIQSPETLPNYITEGITYMLPKDQADTGNPAKYRPITCLQSIYKIITSYLCEVIYKHVDENNILAEEQKGCRRSSQGCKEQLTIDAVACKQAHTKSRNIYSMYIDYKKAFDSVPHSWLIYVLKHYHIHPTIVTFLENAMGSWKTVLKLYNKGESIETEFLNIRRGIFQGDALSPLWFCLALNPLSTLLNNSKKGFRIKYDNSNFMLSHLLYMDDIKLVSTTLLDLHTLADITQLFSSDIHMEFGIDKCKVHSVRKGKVEYNAYQLQDTREVEPVDEIEGYKYLGFSQSRQIHQRQTKEMLKEKFKSRLHKIFNTHLNARNTVKAINSYAIPILTYSFGVIKWSKSQIQNLQRLVNTTMTKYRKHHPRACVQRQTLPRLEGGRGIIDIQNLHIKQIQTLREFFHSKANHSHLHLATVRADLNYTPLHLSNSSIRLEPITNPQKLDAWAQKSLHGRHRLDLTNPIVDKIASNMWLKRGELFPETEGFMIAIQDQTIDTKNYRKYIIRDPTAQNDFCRHCHRSSETIQHITGACSSIAQSDYKHRHDQIAAIVHQYLAYKYKLIPEKTAYYKYTPQTILDSTEFKIYWDRTIMTDKTVHYNRPDITLLDKNNKIVFLIDIAVPNTHNLQTTYTEKIAKYTDLAIELKTQWRVNDVRTVPIVISSTGVIPKTLHNSLKTLEIHPLTYILIQKAAILNTCRLVRKFLSIEA

SEQ ID NO: 8320 - protein, 1212 aa, Autographa pulchrina
MWSEEMNIFILRSYLIITSLETNVKQYLSPLYETFIQKFPEMLASKQRVGDQRRSIVRNKLLSDEKIKQIQLDVQTYLKDNPETNFSQNSTSERLRWTTDINETIMRSYYRITNLETNVTGYRQQLHQQVTALCPSIAHVSAQRISDQRRAIVNNKYISLERLNKIREEAASELNDTAVLPPIAQNPEPQTQIEVMECERFILPSEEQRQISETFTEIFTMYKETVASCRPSIPKQKSSKRFASIVNYINSYVIPEAINHDTDFATTQLIIYSAAYSAAKHNGAKFRDTSAVKTTTERVPKWQVNMQKRIANLRSGIARLNEYTNGNQSPALKRKVEEIKERYKTHSQHENPNTDINHFLDTLKQKLSVLASRLCRYKQTTLRKSQNQMFVNNEKVFYRNLAQNNINILPSSSSSAPMPAKESLQDFWSSIWSNPVEHKDNEWIEQDKEKFKNVPEMEYEEITLDLLKRIINKTHNWKATGSDKLHNYWYKKFTSIHTLLLTHINRFIQTPETLPNYITEGITYMLPKDQADTGNPAKYRPITCLQSIYKIITSCICEVIYKHVDENNILAEEQKGCRKSSQGCKEQLTIDAVACKQAHTKSRNIYSMYIDYKKAFDSVPHSWLIYILKHYHIHPTIITFLENAMSSWKTVLKLFNKGDSIETEFLNIRRGIFQGDALSPLWFCLALNPLSTLLNNSNKGFRIKYDNSNYTLSHLLYMDDIKLFSTTLSDIHTLADITQAFSSDIHMEFGIDKCKVHSVRKGKVEPNAYQLQDNREVEPVDELEGYKYLGFSQSRYIHQRQTKELLKEKFKSRLHKIFNTHLNARNTVKAINSYAIPVLTYSFGVIKWSKSQLQNLQRMVNTTMTKYRKHHPRACVQRQTLPRLEGGRGIIDIQNLHSKQIQTLRAFFHSKSNHSHLHLATVRADHNYTPLHLANSSIRLEPITNPQKLDAWAQKSLHGRHRLDLTNPNVDKVASNMWLKRGELFPETEGFMIAIQDQTIDTKNYRKHIIRDPTAQNDFCRHCHRSSETIQHITGACSSIAQSDYKHRHDQIAAIVHQYLAYKYKLILEKTAYYKYTPQTILESAEFKIYWDRTIMTDKTIHYNRPDITLLDKNNKIVFLIDIAVPNTHNLQTTFTEKIAKYTDLAIELKTQWRVDDVRTVPIVISSTGVIPKTLHNSLKILKIHPLTYILIQKAAILNTCRLVRKFLSIQT

SEQ ID NO: 8321 - protein, 1360 aa, Autographa pulchrina
MNRVNKRYSLRPLPGGRRGTSGASAGCSSMRTIGGGGLNRRVLPEQLTTADDHSSPSLPPSSPSSLFPSIPSSPASYANSLHQSSSHSQPSSPSIISHLAEDVVQEAIAASDPAPASGLVGKRKMWSEEMNIFILRSYLIITSLETNVKQYLSPLYETFIQNFPTMQASKQRLGDQRRSIVRNKLLSDEKIKQIRLEVQTFLKDNPATNFSQNSNSERLRWTTDINETIMRSYYRITNLETNVTGYRQQLHQQVTALCPSIAHVSAQRISDQRRAIINNKYVSLERLNKIREEVASELNDSTVLPPNGPEPLNLTPLILETSEDQTTLPTLTQNSEPQTQIEVVECERFILPSEVQQHINETFKEIFTMYKDTVASFRPSIPKQKSSKRFASIVNFLNSYVIPEAISHDTDFATTQLIIYSAAYSAAKHNGAKFRDTTAVKTTSERVPKWQENMQRRIANLRSSIARLNEFKNGNQSPALKRKVEEIKERYKTHSQHENPNTDINHFLDTLKQKLSVLASRLRRYKQTTLRKSQNQMFVNNEKVFYRNLAQNNINILPSSSSSASMPAKESLQEFWSSIWSNPVEHKDNEWIEQDKEKFKNVPEMEYEEITLDLLTRIINRTHNWKATGSDKLHNYWYKRFTSIHTLLLTHINRFIQSPETLPNYITEGITYMLPKDQADTGNPAKYRPITCLQSIYKIITSCICEVIYKHVDENNILAEEQKGCRRNSQGCKEQLTIDAVACKQAHTKSRNIYSMYIDYKKAFDSVPHSWLIYILKHYHIHPTIVTFLENAMGSWKTVLKLYNKGESIETEFLNIRRGIFQGDALSPLWFCLALNPLSTLLNNSKKGFRIKYDNSNYILSHLLYMDDIKLFSTTLLDIHTLADITQLFSSDIHMEFGIDKCKVHSVRKGKVEPNTYQLQDNREVEPVHEMEGYKYLGFSQSRQIHQRQTKEMLKEKFKSRLHKIFNTHLNSRNTVKAINSYAIPILTYSFGVIKWSKSQLQNLQRMVNTTMTKYRKHHPRACVQRQTLPRFEGGRGIIDIQNLHNKQIQTLRAFFHSKSNQSHLHLAIVRADHNYTPLHLVNSSISLEPITNPQKLDAWAQKSLHGRHRLDLTNPIVDKVASNMWLKRGELFPETEGFMIAIQDQTIDTKNYRKHIIRDPTAQNDFCRHCHRSSETIQHITGACTSIAQSDYKHRHDQIAAIVHQYLAYKYKLLPDKIAYYKYTPQTILESAEYKIYWDRTIMTDKTIHYNRPDITLLDKNNKIVFLIDIAVPNTHNLQTTFTEKIAKYTDLAIELKTQWRVDDVRTVPIVISSTGVIPKTLHNSLKILKIHPLTYILIQKAAILNTCRLVRKFLSIQA

SEQ ID NO: 8322 - protein, 1304 aa, Hemaris fuciformis
MSYHHHVLHRRHHYSHPYHHHHHHTLIISITHLKILHHHLSTIPLRMLCRRQYLPTFLCPPQEEQKKRKKWSEEMNIFILRTYYIITSLESDVKNYLTPLYAKFIEKYPHMQASKQRLGDQRRAIVQKNLLSDDKIKQIKLEVENYLKIHPGTDIPPSTDTNNERLRWTTDINESIIKSYYRITNLETNLTAYRQQLHHDVIALHPSIAHVSVQRIADQRRVIINNKYISAERLEEIKKDVILEATRNRENEIPSDTILSDPQDFTPTNPMTIHTNVIEGQDINESVENEGEVNSSLSKEIQTEIENRFNETIAELRNTEPNQRVPIPRQKPSRKFSSIVHFINTVVLPKFLSNETNFETLQLIIYSAAFTAVSQNGIKISNSLSRSKDQIPKWQINMHTRINKLRTNIGRLTEYIKGNQSPRLKKKVDEIVNRFKIHSKHESPNFDLSHYLDTLKQKLSVLSSRLRRYKQTTLRKTQNKLFLKNEKIFYRKLNQNSINDLPSNNHTNHVPSKETLQEYWSGIWSNSVTHKCNSWIKEDKNRLTNLPDMVFGEISIDLLQRVINKTHNWKATGSDKIHNYWYKKLTSTHSILLKHINNFVQNPHFLPLYITEGITYMLSKDPSDTINPAKYRPITCLQTIYKIMTSCISELIYSHVHKNKVLAEEQKGCRKNSQGCKEQLTIDAVACNQARATKRNMYSMFIDYKKAYDSVPHTWLIYILKHYKIHPQIVSFLEFAMTRWKTVLKLHINNQTVETDYINIKRGIFQGDALSPLWFCLSLNPLSTLLNSTEKGYKIEFDNTQYTLSHLLYMDDIKLFSTTLADIHTLTDITQSFSSDICMEFGIDKCKILSFKDGEIQNDNYKLNDNRLIESVDEIEGYKYLGFYQTGQIHHKDTKNILAEKFKSRIHKILNTYLNSRNTVKGINTYAIPILTYSFGIIKWSQTDIKNLQRNINTLMTKYRKHHPRACVQRMTLPRSEGGRGIIDLQNLFNKQIRSLREFFHSRTPESNLHHAVVKADRKYTPLNLSESFMELKQISDKQKLDEWTQKSLHGRHRLDLTNPIVDKSASNAWLKRGELFPETEGFMIAIQDQTIDTKNYRKYIIKDPKAQIDLCRHCHSSPETIQHITGACKSITQNDYKHRHDQVAAIVHQYLAYKYGLITTKTPYYKYSPKIILESDSYKLYWDRTIMTDKTIHHNRPDITVHDKKNKIVFLIDISVPNTHNLQNTYTEKISKYTDLAIELKTQWRVDSVRTIPIVVSTTGVIPKYLHKSLKILQIHPLTYTLLQKAVILNTCRIVRKFLSIET

SEQ ID NO: 8323 - protein, 1369 aa, Hemaris fuciformis
MTNDALVYHFIHAMRLRNRTIPQAGTGANCDGESRPESSGSGCPTYSGEGTVSQQTAQLTTVAVPHVLSSSCSSPPSSLFSSIPSSPPSYVDNIYNSSENSSSPSIDNPPEDVMQEAISANIPVSAPGGTKKRKKWSEEMNIFILRTYYIITSLESDVKNYLTPLYAKFIEKYPHMQASKQRLGDQRRAIVQKNLLSDDKIKQIKLEVENYLKIHPGTDIPPSTDTNNERLRWTTDINESIIKSYYRITNLETNLTAYRQQLHHDVIALHPSIAHVSVQRIADQRRVIINNKYISAERLEEIKKDVILEATRNRENEIPSDTILSDPQDFTPTNPMTIHTNVIEGQDINESVENEGEVNSSLSKEIQTEIENRFNETIAELRNTEPNQRVPIPRQKPSRKFSSIVHFINTVVLPKFLSNETNFETLQLIIYSAAFTAVSQNGIKISNSLSRPKDQIPKWKINMHTRINKLRTNIGRLTEYIKGNQSPRLKKKVDEIVNRFKIHSKHESPNFDLSHYLDTLKQKLSVLSSRLRRYKQTTLRKTQNKLFLKNEKIFYRKLNQNSINDLPSNNHTNHVPSKETLQEYWSGIWSNSVTHNCNSWIKEDKNRLTNLPDMVFGEISIDLLQRVINKTHNWKATGSDKIHNYWYKKLTSTHSILLKHINNFVQNPHFLPLYITEGITYMLSKDPSDTINPAKYRPITCLQTIYKIMTSCISELIYSHVHKNKVLAEEQKGCRKNSQGCKEQLTIDAVACNQARATKRNMYSMFIDYKKAYDSVPHTWLIYILKHYKIHPQIVSFLEFAMTRWKTVLKLHINNQTVETDYINIKRGIFQGDALSPLWFCLSLNPLSTLLNSTEKGYKIEFDNTQYTLSHLLYMDDIKLFSTTLADIHTLTDITQSFSSDICMEFGIDKCKILSFKDGEIQNDNYKLNDNRLIESVDEIEGYKYLGFYQTGQIHHKDTKNILAEKFKSRIHKILNTYLNSRNTVKGINTYAIPILTYSFGIIKWSQTDIKNLQRNINTLMTKYRKHHPRACVQRMTLPRSEGGRGIIDLQNLFNKQIRSLREFFHSRTPESNLHHAVVKADRKYTPLNLSESFMELKQISDKQKLDEWTQKSLHGRHRLDLTNPIVDKSASNAWLKRGELFPETEGFMIAIQDQTIDTKNYRKYIIKDPKAQIDLCRHCHSSPETIQHITGACKSITQNDYKHRHDQVAAIVHQYLAYKYGLITTKTPYYKYSPKIILESDSYKLYWDRTIMTDKTIHHNRPDITVHDKKNKIVFLIDISVPNTHNLQNTYTEKISKYTDLAIELKTQWRVDSVRTIPIVVSTTGVIPKYLHKSLKILQIHPLTYTLLQKAVILNTCRIVRKFLSIET

SEQ ID NO: 8324 - protein, 1034 aa, Hemaris fuciformis
MTIHTNVIEGQDINESVENEGEVNSSLSKEIQTEIENRFNETIAELRNTEPNQRVPIPRQKPSRKFSSIVHFINTVVLPKFLSNETNFETLQLIIYSAAFTAVSQNGIKISNSLSRPKDQIPKWQINMHTRINKLRTNIGRLTEYIKGNQSPRLKKKVDEIINRFKIHSKHESPNFDLSHYLDTLKQKLSVLSSRLRRYKQTTLRKTQNKLFLKNEKIFYRKLNQNSINDLPSNNHTNHVPSKETLQEYWSGIWSNSVTHNCNSWIKEDKNRLTNLPDMVFGEISIDLLQRVINKTHNWKATGSDKIHNYWYKKLTSTHSILLKHINKFVQNPHFLPLYITEGITYMLSKDPSDTINPAKYRPITCLQTIYKIMTSCISELIYSHVHKNKVLAEEQKGCRKNSQGCKEQLTIDAVACNQARATKKNMYSMFIDYKKAYDSVPHTWLIYILKHYKIHPQIVSFLEFAMTRWKTVLKLHINNQTVETDYIYIKRGIFQGDALSPLWFCLSLNPLSTLLNSTEKGYKIEFDNTLYTLSHLLYMDDIKLFSTTLADIHTLTDITQSFSSDICMEFGIDKCKILSFNDGEIQNDNYILNDDRLIESVDEIEGYKYLGFYQTGQIHHKDTKKILAEKFKSRIHKILNTYLNSRNTVKGINTYAIPILTYSFGIIKWSQTDIKNLQRNINTLMTKYRKHHPRACVQRMTLPRSEGGRGIIDLQNLFNKQMRSLREFFHSRTPESNLHHAVVKADRKYTPLNLSESFMELKQISDKQKLDEWTQKSLHGRHRLDLTNPIVDKSASNAWLKRGELFPETEGFMIAIQDQTIDTKNYRKYIIKDPKAQIDLCRHCHSSPETIQHITGACKSITQNDYKHRHDQVAAIVHQYLAYKYGLITTKTPYYKYSPKIILESDSYKLYWDRTIMTDKTIHHNRPDITVHDKKNKIVFLIDISVPNTHNLQNTYTEKISKYTDLAIELKTQWRVDSVRTIPIVVSTTGVIPKYLHKSLKILQIHPLTYTLLQKAVILNTCRIVRKFLSIET

SEQ ID NO: 8325 - protein, 1369 aa, Hemaris fuciformis
MTNDALVYHFIHAMRLRNRTIPQAGTGANCDGESRPESSGSGCPTYSGEGTVSQQTAQLTTVAVPHVLLSSCSSPPSSLFSSIPSSPPSYVDNIYNSSENSSSPSIDNSPEDVMQEAISANIPVSAPGGTKKRKKWSEEMNIFILRTYYIITSLESDVKNYLTPLYANFIEKYPHMQASKQRLGDQRRAIVQKNLLSDDKIKQIKLEVENYLKIHPGTGIPPSTDTNNERLRWTTDINESIIKSYYRITNLETNLTAYRQQLHHDVIALHPSIAHVSVQRIADQRRVIINNKYISAERLEEIKKDVILEATRNRENEIPSDTILSDPQDFTPTNPMTIHTNVIEGQDINESVENDGEVNSSLSKEIQTEIENRFNETIAELRNTEPNQRVPIPRQKPSRKFSNIVHFINTVVLPKFLSNETNFETLQLIIYSAAFTAVSQNGIKISNSLSRPKDQIPKWQINMHTRINKLRTNIGRLTEYIKGNQSPRLKKKVDEIVNRFKIHSKHESPNFDLSHYLDTLKQKLSVLSSRLRRYKQTTLRKTQNKLFLKNEKIFYRKLNQNSINDLPSNNHTNHVPSKETLQEYWSGIWSNSVTHNCNSWIKEDKNRLTNLPDMVFGEISIDLLQRVINKTHNWKATGSDKIHNYWYKKLTSTHSILLKHINNFVQNPHFLPLYITEGITYMLSKDPSDTINPAKYRPITCLQTIYKIMTSCISELIYSHVHKNKVLAEEQKGCRKNSQGCKEQLTIDAVACNQARATKRNMYSMFIDYKKAYDSVPHTWLIYILKHYKIHPQIVSFLEFAMTRWKTVLKLYINNQTVETDYINIKRGIFQGDALSPLWFCLSLNPLSTLLNSTEKGYKIEFDNTQYTLSHLLYMDDIKLFSTTLADIHTLTDITQSFSSDICMEFGIDKCKILSFKDGEIQNDNYKLNDNRLIESVDEIEGYKYLGFYQTGQIHHKDTKNILAEKFKSRIHKILNTYLNSRNTVKGINTYAIPILTYSFGIIKWSQTDIKNLQRNINTLMTKYRKHHPRACVQRMTLPRSEGGRGIIDLQNLFNKQIRSLREFFHSRTPESNLHHAVVKADRKYTPLNLSESFMELKQISDKQKLDEWTQKSLHGRHRLDLTNPIVDKSASNAWLKRGELFPETEGFMIAIQDQTIDTKNYRKYIIKDPKAQIDLCRHCHSSPETIQHITGACKSITQNDYKHRHDQVAAIVHQYLAYKYGLITTKTPYYKYSPKIILESDSYKLYWDRTIMTDKTIHHNRPDITVHDKKNKIVFLIDISVPNTHNLQNTYTEKISKYTDLAIELKTQWRVDSVRTIPIVVSTTGVIPKYLHKSLKILQIHPLTYTLLQKAVILNTCRIVRKFLSIET

SEQ ID NO: 8326 - protein, 1192 aa, Hemaris fuciformis
MQVSKQRIGDQRRAIVQKELLSNDKIIQIRSEVETYLKHNPAIGNQSSTVTNNERLRWTNEINEAIIKIYYRVTNLESNVTAYRQQLHSEVIALYPDIAHVSAQRVADQRRAIINNRYISAERLAEIKQEVSNELNTYNNTNPPSTILLNESRDSYTDTIASQRETVEYSILNEVVETDKEEAVLPLDLQLEIENNFKEILVELRNSDPTQRAPIPRQKPSKKFAGIVNFFNSTVIPKVISNNSNFETIQLIIYSAAYTAAKQNGTKFITAKLKPKDQIPKWQKNLQIRIEKIRSNIGRLTEYIKGNQSPRLKRKVDDIINRYKIHSQHENPNSDLTHFLDTLKQKLSVLSSRLRRYKQTTLRKSQNRLFIKNEKVFYRTLVYNNISNSSPQNNLSRLPTKEALQEYWSGIWSKPVNHNNSPWIEEDKDRLKNLPEMDFNNISLDLLKRVINRTHNWKATGSDKLHNYWYKKFTSIHTVLLKHINTFIQEPNTIPHYITEGITYMLPKDPTDTINPAKYRPITCLQTIYKIITACISELIYHHVNNNNVLAEEQKGCRRNSQGCKEQLTIDAVAYNQARVTNRSIYNIFIDYKKAFDSVPHSWLLYILKHYNIHPNIISFLESAMRGWKTMLKLHSHNNAIETEYINIKRGIFQGDALSPLWFCLSLNPLSALLNETKTGFQIKFEDTHYTLSHLLYMDDIKLFGTTLAEIHTLADTTQSFSSDICMEFGIDKCKIFSLRQGQIENNSYKLNDTEYIEPVDETEGYKYFGFLQSGQIHHKQTKNVISDKFKSRLHKILNTHLNARNTIKAINTFAIPILTYSFGVIRWSQTDIQNLQRSINTLMTKYRKHHPRACVQRQTLPRAEGGRGLIDLQNLRNKQIKTLHSFFHSKSLVSNLHKAITLADRKYTPLNLSDVTMELAQVTNKHKMDDWARKSLHGRHRLDLSNPIVDKIASNAWLKRGEMFPETEGFMIAIQDQTIDTKNYRRYIIKDPNARNDLCRHCHSSPETIQHITGACKSIAQSDYRHRHDQVAAIVHQYLAYKYKLIPDKMAYYKYSPQIILESEEYKLYWDRTIMTDKTIHHNRPDITLHDKKNRAVSLIDVAIPNTHNLQNTYTEKIAKYTDLTIELKTQWRVDSVRTVPIALSTTGVIPKHLHKSLKTLQIHPLTYTLMQKAVILNTCRIVRKFLSIET

SEQ ID NO: 8327 - protein, 1365 aa, Hemaris fuciformis
MTNDALVYHFIHAMRLRNRTIPQAGTGANCDGESRPESSGSGCPTYSGEGTVSHLQAAQVTTVAAQHDPTSSCASPTSSLFSSIPSSPPSYTDNHNSSYSSSSTARSSEDVIQEAIPANIPVSAPRGPRTRKKWSEEMNTFILRTYYIITSLETNVKNYLTPLYIKFTEKYPQMQVSKQRIGDQRRAIVQKELLSNDKIIQIRSEVETYLKHNPAIGNQSSTVTNNERLRWTNEINEAIIKIYYRVTNLESNVTAYRQQLHSEVIALYPDIAHVSAQRVADQRRAIINNRYISAERLAEIKQEVSTELNTYNNTNPPSTILLNESRDSYTDTIASQRETVEYSILNEVVETDKEEAVLPLDLQLEIENNFKEILVELRNSDPTQRAPIPRQKPSKKFAGIVNFLNSTVIPKVISNNSNFETIQLIIYSAAYTAAKQNGTKFITAKLKPKDQIPKWQKNLQIRIEKIRSNIGRLTEYIKGNQSPRLKRKVDDIINRYKIHSQHENPNSDLTHFLDTLKQKLSVLSSRLRRYKQTTLRKSQNRLFIKNEKVFYRTLVYNNISNSSPQNNLSRLPTKEALQEYWSGIWSKPVNHNNSPWIEEDKDRLKNLPEMDFNNISLDLLKRVINRTHNWKATGSDKLHNYWYKKFTSIHTVLLKHINTFIQEPNTIPHYITEGITYMLPKDPTDTINPAKYRPITCLQTIYKIITACISELIYHHVNNNNVLAEEQKGCRRNSQGCKEQLTIDAVAYNQARVTNRSIYNIFIDYKKAFDSVPHSWLLYILKHYNIHPNIISFLESAMRGWKTMLKLHSHNNAIETEYINIKRGIFQGDALSPLWFCLSLNPLSALLNETKTGFQIKFEDTHYTLSHLLYMDDIKLFGTTLAEIHTLADTTQSFSSDICMEFGIDKCKIFSLRQGQIENNSYKLNDTEYIEPVDETEGYKYLGFLQSGQIHHKQTKNVISDKFKSRLHKILNTHLNARNTIKAINTFAIPILTYSFGVIRWSQTDIQNLQRSINTLMTKYRKHHPRACVQRQTLPRAEGGRGLIDLQNLRNKQIKTLHSFFHSKSLVSNLHKAITLADRKYTPLNLSDVTMELAQVTNKHKMDDWARKSLHGRHRLDLSNPIVDKIASNAWLKRGEMFPETEGFMIAIQDQTIDTKNYRRYIIKDPNARNDLCRHCHSSPETIQHITGACKSIAQSDYRHRHDQVAAIVHQYLAYKYKLIPDKMAYYKYSPQIILESEEYKLYWDRTIMTDKTIHHNRPDITLHDKKNRAVSLIDVAIPNTHNLQNTYTEKIAKYTDLTIELKTQWRVDSVRTVPIVLSTTGVIPKHLHKSLKTLQIHPLTYTLMQKAVILNTCRIVRKFLSIET

SEQ ID NO: 8328 - protein, 1358 aa, Deilephila porcellus
MRLRNRILPQAGTGATSNGESRPGPSSPGCPTYSGEGTVSHHSAQFQTVADQHDAMTSCSSPTSSLFPSLPSSPPSYVDNLHQDSSSNTSSSLTDHSPEDVIQEATSAKVPVSAAGGIKTRKKWSEEMNIFIMRTYFIVTSLELNLKNYLTPLYSKFTEKFPHMQASKQRIGDQRRAIIQKKLLSEDKIKDIKVDVENYLKNHPESNSQTNVATNNERLRWTADINEAIIRTYYRITNLESNLTAYREQLHREVITICPSISHVSVQRIADQRRAIINNKYISVERLEEIKHEVRREIVRNEENINNSRITLNDSQDHTNTIIVSNTTQSYADEYSAVNEIDTEEQDRSILPIEKQIEIENNFKEIFEEFQHTNPTKRPSIPRQKTSRKFAVIVNFLNTYVIPKVITDDTDFENLQLIIYTAAYTASKQNGTKFTNIPITLKSQIPKWQENMQLRIDKLRTNIARLTEYINGNQSPRLKRKVDEIINRFKIHSSHENPNSDLPHFLDTLKQKLSVLSSRLRRYKQTTLRKTQNRLFSRNEKVFYRKLAQHNSNNVLPRSNPDAIPSKETLHEYWAGIWSNPVVHKNNQWIKEDKDRIKNIPEMEFGCISLDLLQQVINRTHNWKATGSDNLHNYWYKKFTSTHIILLKHINSFFLEPHTLPPFITEGITYMLPKDPSDTINPAKYRPITCLQTIYKIITSCISELIYTHVNDNKVLMEEQKGCRKQSQGCKEQLTIDAVACNQAHATNRNMYNMYIDYKKAYDSVPHSWLIFILKHYNIHPKIISFLESVMTHWKTILKLQNNNQTIETSSINIKRGLFQGDALSPLWFCLSLNPLSTLLNNTKKGFKIKFDNNHYTLSHLLYMDDIKLFGTTLADIHTLTDITQSFSSDIHMEFGIDKCNILSVKRGQIEPNCYKLKDNREIEPLDEIEGYKYLGFQQTGQIHHKQTKNILIEKLKTRLHKILNTHLNARNTVKGINTFAIPILTYSFGIIKWSATDIKNLQSKINTTMTHYRKHHPRACVQRQTLPRTEGGRGLIDLHNLLMKQIQTLRCYFHSKSNDSELHRAVVRADRKYTPLNLSDPVMQLNQTNNTQKLDAWVQKSLHGRHRLDLTNPIVDKTASNAWLKRGEMFPETEGFMIAIQDQIIDTKNYRKHIIKDPTAQNDLCRHCHSSPETIQHITGACKSITQTDYKHRHDQVAAIVHQYLAYKYNLITDKMPYYKYSPKIILESDDYKLYWDRTIMTDKTIHHNRPDITLHDKKNKAVFLIDVAIPNTHNLQTTYTEKIAKYTDLAIELKRQWRVDSVRTVPIVVSTTGVIPKFLHKSLKTLEIHPLTYTLMQKAVILNTCRIVRKFLSLET

SEQ ID NO: 8329 - protein, 1369 aa, Hemaris fuciformis
MTNDALVYHFIHAMRLRNRTIPQAGTGANCDGESRPESSGSGCPTYSGEGTVSQQTAQLTTVAVPHVLSSSCSSPPSSLFSSIPSSPPSYVDNIYNSSENSSSPSIDNSPEDVMQEAISANIPVSAPGGTKKRKKWSEEMNIFILRTYYIITSLESDVKNYLTPLYAKFIEKYPHMQASKQRLGDQRRAIVQKKLLSEDKIKQIKLEVENYRKIHPGTDIPPSTDTNNERLRWTTDINESIIKSYYRITNLETNLTAYRQQLHHDVIALHPSIAHVSVQRIADQRRVIINNKYISAERLEEIKKDVILEATRNRENEIPSDTILSDPQDFTPTNPMTIHTNVIEGQDINESVENEGEVNSSLSKEIQTEIENRFNETIAELRNTEPNQRVPIPRQKPSRKFSSIVHFINTVVLPKFLSNETNFETLQLIIYSAAFTAVSQNGIKISNSLSRPKDQIPKWQINMHTRINKLRTNIGRLTEYIKGNQSPRLKKKVDEIVNRFKIHSKHESPNFDLSHYLDTLKQKLSVLSSRLRRYKQTTLRKTQNKLFLKNEKIFYRKLNQNSINDLPSNNHTNHVPSKETLQEYWSGIWSNSVTHNCNSWIKEDKNRLTNLPDMVFGEISIDLLQRVINKTHNWKATGSDKIHNYWYKKLTSTHSILLKHINNFVQNPHFLPLYITEGITYMLSKDPSDTINPAKYRPITCLQTIYKIMTSCISELIYSHVHKNKVLAEEQKGCRKNSQGCKEQLTIDAVACNQARATKRNMYSMFIDYKKAYDSVPHTWLIYILKHYKIHPQIVSFLEFAMTRWKTVLKLHINNQTVETDYINIKRGIFQGDALSPLWFCLSLNPLSTFLNSTEKGYKIEFDNTQYTLSHLLYMDDIKLFSTTLADIHTLTDITQSFSSDICMEFGIDKCKILSFKDGEIQNDNYKLNDNRLIESVDEIEGYKYLGFYQTGQIHHKDTKNILAEKFKSRIHKILNTYLNSRNTVKGINTYAIPILTYSFGIIKWSQTDIKNLQRNINTLMTKYRKHHPRACVQRMTLPRSEGGRGIIDLQNLFNKQIRSLREFFHSRTPESNLHHAVVKADRKYTPLNLSESFMELKQISDKQKLDEWTQKSLHGRHRLDLTNPIVDKSASNAWLKRGELFPETEGFMIAIQDQTIDTKNYRKYIIKDPKAQIDLCRHCHSSPETIQHITGACKSITQNDYKHRHDQVAAIVHQYLAYKYGLITTKTPYYKYSPKIILESDSYKLYWDRTIMTDKTIHHNRPDITVHDKKNKIVFLIDISVPNTHNLQNTYTEKISKYTDLAIELKTQWRVDSVRTIPIVVSTTGVIPKYLHKSLKILQIHPLTYTLLQKAVILNTCRIVRKFLSIET

SEQ ID NO: 8330 - protein, 1320 aa, Hestina assimilis
MWSRRAPVAEEATADLSSSTSLSPSSFSSLFSSIPSSPPLYMDSLHQSTSPGLSSPLSTQSSEDVVQKANYANDPAPITVGTKTRKKWSDDMNIFILRNYFIITAMETNLKNYLTPLHAKFTETFPHMQATKQRVGDQRRAIVQKQLLTNNKIMQIKSEAETYLKNNNVTDHHTNIVSNSERIKWTPDINETIMRSYYRITNLERNLTAYRQQLHLDVIASCPTIAHVSVQRIADQRRAIVNNRYISLDKLEELKEAVRLELERYAEAMLPDNTILSDLENTTVIDPTSNNLVTNTPEIIARRLEAEEKEEQISFLPTDIQKQIEETFFQTITQYKNTNPTSRPSIPRQKSSKKFSSLVHFLNLNIIPKAISDDSDFETIQLTIYSAAYTAAKLNGTKFTTIESKNNIEKLPKWQENMQNRINKLRTHIARLTEFINGNRSPALKRKIDKIKQNFKIHSQHEDPNSQLPHFLDTLKQKLSVLASRLRRYKQTTLRKSQNKLFARNEKVFYRNLDQNNPNTHSPTTPSKESLEEYWTSIWSNPVEHNHNNKWIAEDKNRLKDLPQMQFANIDLNLLHVIINKTHNWKAPGSDKIHNFWYKKFTKIHPYLLKHINYFINTPHIIPHYITEGITYMLPKDTSDTNNPANYRPITCLQSIYKIITSCISEIIYKHVNNNNILAEEQKGCRKYSKGCKEQLIIDAVACNQAHSKKRNIFSMFIDYKKAFDSIPHSWLIYILKHYHIHPTLITFLETVMVNWKTTLKIRHQNQLIESDTIDIKRGIFQGDALSPLWFCLALNPLSVLLNNTQKGFKIKYENTHHTLSHLFYMDDIKLFGTTLSEIHTLADGTQTFSADIRMEFGVNKCKIQSVNRGKIEANNYELNDNQQIVPVDSVEGYKYLGFQQSIQIHHQQIKKSLTTKFRTRLHKILNTHLNARNTTKAINSFGIPLLTYSFGIIKWSQTDLKNLQRIINTTMTKYRKHHPRACVQRQTLPRYEGGRGLIDLQNLHNKQIQTLRAFFHFKSEHSSLHRAIVQADHKHTPLNLSNNSFKLNLISFSQKQDVWTQKSLHGRHRLDLASINVDKNASNAWLRRGELFPETEGFIIAIQDQTIETKNYRKHIIRDPAAQNDLCRHCHNSSETIQHITGACKSISQTDYKHRHDQIAAIIHQYLAYKYKLIPKKTAYYKYVPQIILESDDYKLYWDRTIMTDKTIHHNRPDITLHDKNNKTVFLIDISVPNTHNLQTTYTEKIAKYTDLSIELKTQWKVDVVRTVPIIISSTGVVPKSLLLSLKTLQIHPLTFTLIQKAAILNTCRIVRKFMSLDT

SEQ ID NO: 8331 - protein, 903 aa, Hestina assimilis
MQNRINKLRTHIARLTEFINGNRSPALKRKIDKIKQNFKIHSQHEDPNSQLPHFLDTLKQKLSVLASRLRRYKQTTLRKSQNKLFARNEKVFYRNLDQNNPNTHSPTTPSKESLEEYWTSIWSNPVEHNHNNKWIAEDKNRLKDLPQMQFANIDLNLLHIIINKTHNWKAPGSDKIHNFWYKKFTKIHPYLLKHINYFINTPHIIPHYITEGITYMLPKDTSDTNNPANYRPITCLQSVYKIITSCISEIIYKHVNNNNILAEEQKGCRKYSKGCKEQLIIGAVACNQAHSKKRNIFSMFIDYKKAFDSIPHSWLIYILKHYHIHPTLITFLETVMVNWKTTLKIRHQNQLIESDTIDIKRGIFQGDALSPLWFCLALNPLSVLLNNTQKGFKIKYENTHHTLSHLFYMDDIKLFGTTLSEIHTLADVTQTFSADIRMEFGVNKCKIQSVNRGKIEANNYELNDNQQIVPVDSVEGYKYLGFQQSIQIHHQQIQKSLTTKFRTRLHKILNTHLNARNTTKAINSFGIPLLTYSFGIIKWSQTGLKNLQRIINTTMTKYRKHHPRACVQRQTLPRYEGGRGLIDLQNLHNKQIQTLRAFFHFKSEHSSLHRAIVQADHKHTPLNLSNNSFKLNLISFSQKLDVWTQKSLHGRHRLDLASINVDKNASNAWLRRGELFPETEGFIIAIQDQTIETKNYRKHIIRDPAAQNDLCRHCHNSSETIQHITGACKSISQTDYKHRHDQIAAIIHQYLAYKYKLIPKKTAYYKYVPQIILESDDYKLYWDRTIMTDKTIHHNRPDITLHDKNNKTVFLIDISVPNTHNLQTTYTEKIAKYTDLSIELKTQWKVDVVRTVPIIISSTGVVPKSLLLSLKTLQIHPLTFTLIQKAAILNTCRIVRKFMSLDT

SEQ ID NO: 8332 - protein, 1378 aa, Pseudonascus paulliniae
MVMSRKEYNLRPLPGGRRGTSGADAGRFSMRTVGGGGLNRRVPPEKNTTAENHPSSSPSNASSPLSSPLCSSSPSSLQSYADSLRRLSSSSSSSVTSSDSSNNYTPENVVRAARTAKTPAPVRAGPGTRKKWTQEMNIFIMRTYYIITSLESDTSIRYLPPLHAKFLEKFPEMDVSKQRIGDQRRAIINRKLLSSEKVQEIRSEVEAQLKKNSQSHTEISYLPIATSSRISWSKEVNEIIIRTYYKITKLETENMTTYRSILHQDVINQCPHLAHTSVQRIADQRRAIVNNKYIPADKLEQIRREIYEEQVLSTVNIHEEIFTPPINAHEDSAYNQNQLLSVTTPSERTAHQTGEGILNEEECSFRHICVRQEIAKKIDNDFAECMNNFKHIDPTSREHIAKQKSSKKFASIVDYLNNYVIPKTINTDTDFDTLQLIIYCAAYTAAKHNGAKFTSARNRTQHTEPLWQIRLQKRIDELRSDIARLTEYIRGNRSHKLQNHIERIKKRYQIHSQHESPNTDLTHYLDTLKQKLGALANRLRRYKETTLRKKQNKLFKNNEKRFYRKIFQTTNTLNGNNNTVTSFKENLHDFWANIWSNPVEHTKNSWMDEEKVKFNSLPKMTFEDVRLDLLQKIIAKTHNWKATGSDKIHNFWYKKFTNTHTLLLNHINRFIKCPHLMPQYITEGISFMLPKDRTDIMNPSKYRPITCLQNIYKIITSCITEIIYTYVEKNNILAEEQKGCRRHSQGCKEQLTIDNIVSKQAIAKKKDIYTMYIDYTKAYDSVPHSWLISTLEQYNIHPTLVSFLKTAMKSWKTKLKINSKEGLFETEPIHIKRGIFQGDALSPLWFCLALNPLSRLLNDTQQGFRIKYNTNNYTLTHLMYMDDVKLFASSLAGIQDLADVTQSFSADIQMKFGIDKCKIQSVRKGHIEHDPYPLNTLETIEPVDETKGYKYLGYQQTRQIHQKQTKKMLTENFKSRLHKILNTKLNSYNTIKAINTFAIPILTYSFGIIQWSQTDLKNLQRTINTTMSHYRKHHPRACIQRQTLPRNEGGRGLMDLQNLHNKQITSLRRFFHNKAQQSQLHYAIVQSDVKLTPLNLKQPELHLTITSVKQKLDTWVQKSLHGRHCLDLANANVDKSASNAWLKRGELFPETEGFMIAIQDQTIDTKNYRKHIIRDPKLHSDLCRHCHTSSETIQHITGACKSITQTDYKHRHDQVAAIVHQYLAYKYKLITDKTAYYKYTPQVILESTDYKLYWDRTLVTDKTVHYNRPDITLHDKQNKIVYIIDISIPNTHNIQTTFTEKIAKYTDLSVEIKAQWRVNSIRTIPIVLSSTGIIPKSLHNSLKILDIHPLTYILLQKAVILNTCRLVRKFLSIETTRI

SEQ ID NO: 8333 - protein, 1339 aa, Emesis spreta
MGLAGGGGLNRRVPPEKNTTAENHPSSPTSSTSSSLFPSVPSSPQSYANSLRQSSSSLSTRASPVSVISDTPENVMQKASAAKSSAPVKGGLNTRKTWTQEMNIFIMRTYFMITLLETDPKIRYLPPLHAKFLEKFPEMDVSRQRIGDQRRAIVNRKLLSDGTIQEIRLEVQTYLNNHNHTYTETNNVLTNSTGRLSWNREINEIIIRTYLKITKLETENLSAYRQILHQEVIKQCPQLAHISIQRIADQRRAIINNKYITTERLEQIKTEVCQELNLNTWNENIELLNIQSHSHSHEDHQTQTSLSCMTPELTHTPQHTQIDTHAQIHVEEQHRNIEHDFAECMSKFKDIDPTSREYIPKQKSSKRFANIIHHLNNYVIPKTLTTDTNFEALQLILYCAAHTAAKLNGAKFSSTQTNRTQHTEPLWQKRLQNRIEQLRADIARLTEYIRGSRSHNLEKHINRIKSSYKIHAQHENPNTNLTHFLDTLKQKLGALANRLRRYKETTLRKTQNKVFTNNEKLFYRKLTLNNPTDSPPNRNTTTATPSKEEQHQFWSNIWSNPVEHNKPNSWIDKEKELCKVLPEMIYDNVSLDLLQKIIAKTHNWKATGSDKIHNFWYKKFTNIHPLLLKHINNFIQYPQTMPSYITEGITFMLPKDPNDTCNPAKYRPITCLQNIYKIITSCITEIIYNYTQENNILAEEQKGCRRFSQGCKEQLTIDTVVSKHAIKKKKDIYTMYIDYKKAYDSVPHSWLISTLELYNIHPTIRDFLQTAMKTWKTTLKINSNEGLIDSEPIHIKRGIFQGDALSPLWFCLALNPLSTILNDTNKGFNITHNTNNYTLTHLMYMDDIKLFAASLTEIQELADITQTFSTDIKMEFGIDKCKIQSVRKGSVEHDPFQLNTLEMIEPVDQIEGYKYLGYQQTKQIHQKETKKKLTGNFKSRLHKILNTKLNSRNTIKAINTFAIPILTYSFGVIQWSQTDLRNLQRMINTTMTQYRKHHPRACAQRQTLPRDEGGRGLIDIQNLHNKQIKSLRAFFHSKSQLSQLHFAITQSDTKLTPLNLKQNEIQLTITSVNQKLDTWVQKSLHGRHRLDLTNANVDKIASNAWLKRGELFPETEGFMIAIQDQTIDTKNYRKHIIRDPTLHSDLCRHCHSNSETIQHITGSCKSITQTDYRHRHDQVAAIIHQYLAYKYKLITEKTAYYKYTPQVILESTDYKLYWDRTLVTDKTVHYNRPDITLQDKNNKTVYLIDIAIPNTHNLQTTFTEKIAKYTDLAIEIKAQWRVNSVRTIPIILSSTGVIPKSIHTSLKLLDIHPLTYITLQKAVVLNTCRLVRKFLSIET

SEQ ID NO: 8334 - protein, 1031 aa, Emesis lucinda
MTPELTHTPQHTQIDTHAQIHEEEQHRNIEHDFAECMSKFKDINPTSREYIPKQKSSKRFANIIHHLNNYVIPKTLTTDTNFEALQLILYCAAHTAAKLNGAKFSSTQTNRTQHTEPLWQKRLQNRIEQLRADIARLTEYIRGSRGHNLEKHINRIKSSYKIHAQHENPNTNLTHFLDTLKQKLGALANRLRRYKETTLRKTQNKVFTNNEKLFYRKLTLNNPTDSPPNRNTTTATPSKEEQHQFWSNIWSNPVEHNKPNSWIDKEKELCKVLPEMIYDNVSLDLLQKIIAKTHNWKATGSDKIHNFWYKKFTNIHPLLLKHINNFIQYPQTMPSYITEGITFMLPKDPNDTCNPAKYRPITCLQNIYKIITSCITEIIYNYTQENNILAEEQKGCRRFSQGCKEQLTIDTVVSKNAIKKKKDIYTMYIDYKKAYDSVPHSWLISTLELYNIHPTIRDFLQTAMKTWKTTLKINSNEGLIDSEPIHIKRGIFQGDALSPLWFCLALNPLSTILNDTNKGFNITHNTNNYTLTHLMYMDDIKLFAASLTEIQELADITQTFSTDIKMEFGIDKCKIQSVRKGSVEHDPFQLNTLEMIEPVDQIEGYKYLGYQQTKQIHQKETKKKLTGNFKSRLHKILNTKLNSRNTIKAINTFAIPILTYSFGVIQWSQTDLRNLQRMINTTMTQYRKHHPRACVQRQTLPRDEGGRGLIDIQNLHNKQIKSLRAFFHSKSQHSQLHFAITQSDTKLTPLNLKQNEIQLTITSVNQKLDTWVQKSLHGRHRLDLTNANVDKIASNAWLKRGELFPETEGFMIAIQDQTIDTKNYRKHIIRDPTLHSDLCRHCHSNSETIQHITGSCKSITQTDYRHRHDQVAAIIHQYLAYKYKLITEKTAYYKYTPQVILESTDYKLYWDRTLVTDKTVHYNRPDITLQDKNNKTVYLIDIAIPNTHNLQTTFTEKIAKYTDLAIEIKAQWRVNSVRTIPIILSSTGVIPKSIHTSLKLLDIHPLTYITLQKAVVLNTCRLVRKFLSIET

SEQ ID NO: 8335 - protein, 1368 aa, Emesis condigna
MNMSERKYNLRPLPGGRRGASGASAGRLSMGLAGGGGLNRRVPPEKNTTAENHPSSPTSSTSSSLFPSVPSSPQSYANSLRQSSSSLSTRASPVSVISDTPENVVQKASAAKSSAPVKGGLNTRKTWTQEMNIFIMRTYFMITLLETDPKIRYLPPLHAKFLEKFPEMDVSRQRIGDQRRAIVNRKLLSDGTIQEIRLEVQTYLNNHKHTYTETNNVLTNSTGRLSWNREINEIIIRTYLKITKLETENLSAYRQILHQEVIKQCPQLAHISIQRIADQRRAIINNKYITTERLEQIKTEVCQELNMNTWNENIELLNIQSHSHSHEDHQTQTSLSCMTPELTHTPQHTQIDTHAQIHVEEQHRNIEHDFAECMSKFKDIDPTSREYIPKQKSSKRFANIIHHLNNYVIPKTLFTDTNFEALQLILYCAAHTAAKLNGAKFSSTQTNRTQHTEPLWQKRLQNRIEQLRADIARLTEYIRGSRGHNLEKHINRIKSSYKIHAQHENPNTNLTHFLDTLKQKLGALANRLRRYKETTLRKTQNKVFTNNEKLFYRKLTLNNPTDSPPNRNTTTATPSKEEQHQFWSNIWSNPVEHNKPNSWIDKEKERCKVLPEMIYDNVSLDLLQKIIAKTHNWKATGSDKIHNFWYKKFTNIHPLLLKHINNFIRYPQTMPLYITEGITFMLPKDPNDTCNPAKYRPITCLQNIYKIITSCITEIIYNYTQENNILAEEQKGCRRFSQGCKEQLTIDTVVSKHAIKKKKDIYTMYIDYKKAYDSVPHSWLISTLELYNIHPTIRDFLQTAMKTWKTTLKINSNEGLIDSEPIHIKRGIFQGDALSPLWFCLALNPLSTILNDTNKGFNITHNTNNYTLTHLMYMDDIKLFAASLTEIQELADITQTFSTDIKMEFGIDKCKIQSVRKGSVEHDPFQLNTLEIIEPVDQIEGYKYLGYQQTKQIHQKETKKKLTGNFKSRLHKILNTKLNSRNTIKAINTFAIPILTYSFGVIQWSQTDLRNLQRMINTTMTQYRKHHPRACAQRQTLPRDEGGRGLIDIQNLHNKQIKSLRAFFHSKSQLSQLHFAITQSDTKLTPLNLKQNEIQLTITSVNQKLDTWVQKSLHGRHRLDLTNANVDKIASNAWLKRGELFPETEGFMIAIQDQTIDTKNYRKHIIRDPTLHSDLCRHCHSNSETIQHITGSCKSITQTDYRHRHDQVAAIIHQYLAYKYKLITEKTAYYKYTPQVILESTDYKLYWDRTLVTDKTVHYNRPDITLQDKNNKTVYLIDIAIPNTHNLQTTFTEKIAKYTDLAIEIKAQWRVNSVRTIPIILSSTGVIPKSIHTSLKLLDIHPLTYITLQKAVVLNTCRLVRKFLSIET

SEQ ID NO: 8336 - protein, 1240 aa, Mimas tiliae
MNIFILRTYFIITSLESNKIHYLTPLYEKFTEKFPDMQANKQRLGDQRRAIVQKQLLSNDKIKQIKLEVESYLKTHSTSDHVLHNDTNNERIKWTNEINETIIRTYYRLTNIETNITAYRQQLHREVITLCPSIAHMSVQRIADQRRLIINNKYISTQRLEQIKDEVRIEIAINQENIITSNVALDDLQDQPTTLTNLTALQTPVNQYHTSDEVNEEENQLLLPIDTQKQIEDTFTETVAEFKTTAPNLRPSIPKQKPSKKLASIVNYLNSFVIPKVISDDTDFDSTQLIIYSAAYTAAKQNASKFTQTLNPRKPNESIPKWQKNMQRRIDHLRTYIARLVEYIKGNQSPKLQMKIAEIRSRFKIHSQHENPNSDLSHFLDTLKQKLSVLVNRIRRYKQTTLRKTQNRLFITNEKVFYRNLGQNNINNLTSNSTSTNIPTKETLQEYWSGIWSNPVQHINNQWIEDDRDRNRNVPEMEFDSLSLDLLQRVINRTHNWKSPGSDKIHNYWYKKFTIIHTLLLKHINTFIHTPDLIPSYLTEGITFMLAKDPADKVNPAKYRPITCLQNIYKIMTSCISELIYSHVHHNNILAEEQKGCRKNSQGCKEQLTIDAVACNQARSRNRNIYTMYIDYKKAYDSVPHTWLIYILKHYHIHPIITKFLETVLTGWKTILKLRDGNQIIETEHINIKRGIFQGDALSPLWFCLSLNPLSTLLNNTKKGFKIKFDNTLHLLSHLLYMDDIKLFGTTLSEIHALADITQTFSSDIVMEFGVDKCKILSVRRGQIERNCYKVTEDIHLYFIYWLYLEPVDEIDGYKYLGYQQTEQIHHKQTKKTLIEKFRSRLHKILNTQLNARNTVKAINTYAIPILTYSFGIIKWSQTDIKNLQRNINTIMTKYRKHHPRACVQRQTLPRSEGGRGLIDLHNLHNKQIETLRAFFHSRSQQSSLHRAIVHADRKHTPLNLTDLTMTPNQITITQKLDAWSQKSLHGRHRLDLTSPNVDMIASNAWLKRGELFPETEGFMIAIQDQTIDTKNYRRYIIRDPTAQNDLCRHCHGSPETIQHITGACRSITQTDYKHRHDQIAAIVHQYLAYQYKLITQKTSYYKYTPEIILESDYYKMYWDRTIMTDKTIHHNRPDITVHDKVNKTVFLIDIAIPNTHNLQKTYTEKIAKYTDLSIELKSQWRVDSVRTIPIVVSTTGVIPKYLHNSLKTLRIHPLTYILIQKAVILNTCRLVRKFISIDT

SEQ ID NO: 8337 - protein, 1356 aa, Mimas tiliae
MESRNLRYSLRSLPGGRRGISGADAGYGSMRAVGGGALSRRALVAKETTADHQSPTSTTPSSPSSLFSSLPSSSSPPYAQNNYQSSPSSSNNQTPEDVVQEAITANIPVSATGGIKTRKKWSEEMNIFILRTYFIITSLESNKRHYLTPLYEKFTEKFPDMQANKQRLGDQRRAIVQKQLLSNDKIKQIKLEVESYLKTHSTSDHVPHNDTNNERIKWTNEINETIIRTYYRLTNIETNITAYRQQLHREVITLCPSIAHMSVQRIADQRRLIINNKYISTQRLEQIKDEVRIEIAINQENIITSNVALDDLQDQPTTLTNLTALQTPVNQYHTSDEVNEEENQLLLPIDTQKQIEDTFTETVAEFKTTAPNLRPSIPKQKPSKKLASIVNYLNSFVIPKVISDDTDFDSTQLIIYSAAYTAAKQNASKFTQTLNPRKPNESIPKWQKNMQRRIDNLRTYIARLVEYIKGNQSPKLQMKIAEIRSRFKIHSQHENPNSDLSHFLDTLKQKLSVLVKRIRRYKQTTLRKTQNRLFITNEKVFYRNLGQNNINNLTSNSTSTNIPTKETLQEYWSGIWSNPVQHKNNQWIEDDRDRNRNVPEMEFDSLSLDLLQRVINRTHNWKSPGSDKIHNYWYKKFTIIHTLLLKHVNTFIHTPDLIPSYLTEGITFMLAKDPADKVNPAKYRPITCLQNIYKIMTSCISELIYSHVHHNNILAEEQKGCRKNSQGCKEQLTIDAVACNQARSRNRNIYTMYIDYKKAYDSVPHTWLIYILKHYHIHPIITKFLETVMTGWKTILKLRDGNQIIETEHINIKRGIFQGDALSPLWFCLSLNPLSTLLNNTKKGFKIKFDNTLHLLSHLLYMDDIKLFGTTLSEIHALADITQTFSSDILMEFGIDKCKILSVRRGQIERNCYKVTEDIQIEPVDEIDGYTYLGYQQTEQIHHKQTKKTLIEKFRSRLHKILNTQLNARNTVKAINTYAIPILTYSFGIIKWSQTDIKNLQRNINTIMTKYRKHHPRACVQRQTLPRSEGGRGLIDLHNLHNKQIETLRAFFHSRSQQSSLHRAIVHADRKHTPLNLTDLTMTPNQITTTQKLDAWSQKSLHGRHRLDLTSPNVDMIASNAWLKRGELFPETEGFMIAIQDQTIDTKNYRRYIIRDPTAQNDLCRHCHGSPETIQHITGACRSITQTDYKHRHDQIAAIVHQYLAYQYKLITQKTSYYKYTPEIILESDYYKMYWDRTIMTDKTIHHNRPDITVHDKVNKTVFLIDISIPNTHNLQKTYTEKIAKYTDLSIELKSQWRVDSVRTIPIVVSTTGVIPKYLHNSLKTLRIHPLTYILIQKAVILNTCRLVRKFLSIDT

SEQ ID NO: 8338 - protein, 1356 aa, Mimas tiliae
MESRNLRYSLRSLPGGRRGISGADAGYGSMRAVGGGALSRRALVAKETTADHQSPTSTTPSSPSSLFSSLPSSSSPPYAQNNYQSSPSSSNNQTPEDVVQEAITANIPVSATGGIKTRKKWSEEMNIFILRTYFIITSLESNKRHYLTPLYEKFTEKFPDMQANKQRLGDQRRAIVQKQLLSNDKIKQIKLEVESYLKTHSTSDHVPHNDTNNERIKWTNEINETIIRTYYRLTNIETNITAYRQQLHREVITLCPSIAHMSVQRIADQRRLIINNKYISTQRLEQIKDEVRIEIAINQENIITSNVALDDLQDQPTTLTNLTALQTPVNQYHTSDEVNEEENQLLLPIDTQKQIEDTFTETVAEFKTTAPNLRPSIPKQKPSKKLASIVNYLNSFVIPKVISDDTDFDSTQLIIYSAAYTAAKQNASKFTQTLNPRKPNESIPKWQKNMQRRIDNLRTYIARLVEYIKGNQSPKLQMKIAEIRSRFKIHSQHENPNSDLSHFLDTLKQKLSVLVKRIRRYKQTTLRKTQNRLFITNEKVFYRNLGQNNINNLTSNSTSTNIPTKETLQEYWSGIWSNPVQHKNNQWIEDDRDRNRNVPEMEFDSLSLDLLQRVINRTHNWKSPGSDKIHNYWYKKFTIIHTLLLKHVNTFIHTPDLIPSYLTEGITFMLAKDPADKVNPAKYRPITCLQNIYKIMTSCISELIYSHVHHNNILAEEQKGCRKNSQGCKEQLTIDAVACNQARSRNRNIYTMYIDYKKAYDSVPHTWLIYILKHYHIHPIITKFLETVMTGWKTILKLRDGNQIIETEHINIKRGIFQGDALSPLWFCLSLNPLSTLLNNTKKGFKIKFDNTLHLLSHLLYMDDIKLFGTTLSEIHALADITQTFSSDILMEFGIDKCKILSVRRGQIERNCYKVTEDIQIEPVDEIDGYTYLGYQQTEQIHHKQTKKTLIEKFRSRLHKILNTQLNARNTVKAINTYAIPILTYSFGIIKWSQTDIKNLQRNINTIMTKYRKHHPRACVQRQTLPRSEGGRGLIDLHNLHNKQIETLRAFFHSRSQQSSLHRAIVHADRKHTPLNLTDLTMTPNQITTTQKLDAWSQKSLHGRHRLHLTSPNVDMIASNAWLKRGELFPETEGFMIAIQDQTIDTKNYRRYIIRDPTAQNDLCRHCHGSPETIQHITGACRSITQTDYKHRHDQIAAIVHQYLAYQYKLITQKTSYYKYTPDFILESDYYKMYWDRTIMTDKTIHHNRPDITVHDKVNKTVFLIDISIPNTHNLQKTYTEKIAKYTDLSIELKSQWRVDSVRTIPIVVSTTGVIPKYLHNSLKTLRIHPLTYILIQKAVILNTCRLVRKFLSIDT

SEQ ID NO: 8339 - protein, 1348 aa, Hyles vespertilio
MRLRNRTLPQAGTGANSNGEPRPGLMIPGCPTYSGEGTVSHHSAQFQTAADQHDALTSCSSPTSSLFPSLPSSPPSYVDNLHDTSSSTSSSMTHQSPEDVIQEATSANIHVSATGGSKKRKKWSEEMNIFILRTYYIITSLELNVKNYLTPLHSKFTENFPHMQASKQRLGDQRRAIVQKQLLSEDKIKEIKAEVENYLKNHPVSNNQSSVTNNERLRWTTDINETIIRSYYRITNLESNLTAYREQLHREVTTVCPSIAHVSVQRIADQRRAIMNNHYISIERLEEIKNEIRTELVRNLDNINNPSITPNDSQDHTNIEIISNSQSHQNEYSGVNEIESTDEDISTLPIDKQIEIENDFKEIFAEFKQSNPTERPLIPRQKTSKKFAVIVNFLNIHVIPKFISHDTDFDTIQLIIYAAAYTAAKQNGTKFTRTAVTPNPQIPKWQENMQIRINNLRTNIARLTEYINGNQSPRLKRKIDEITNRFKIHSSHENPNSDLPHFLDTLKQKLSVLSSRLRRYKQTTLRKTQNRLFTRNEKVFYRTLAHNNFTSDSNSYNIPSKETLQEYWSGIWSNPVVHKNSQWIEEDKERVKNIPEMEFGSISIELLQRVIHRTLNWKATGSDKLHNYWYKKFTSTHILLLKHINKFFEEPNTIPTYVTEGITYMLPKDPSDTVNPAKYRPITCLQTIYKIMTSCISELIYTHIDKNKVLKEEQKGSRKDSQGCKEQLTIDAVACNQAHATNRNIYSMYIDYKKAYDSVPHSWLLFILKHYNIHPKIIAFLKSVMTNWKTILKLHNTNQTIESEYIDIKRGLFQGDSLSPLWFCLALNPLSTLLNNTKKGFKLKFDNSHYTLSHLLYMDDIKLFGTTLSEIHTLAEITESFSSDIHMEFGIDKCNILSIRRGKLEHNCYKLRDSRQIEPVDEIEGYKYLGYQQTGQIHHKQTKAMLIEKFMSRMHKILNARNTVKGINTYAIPILTYSFGIIKWSATDIKNLQRKINIIMTKYRKHHPRACVQRQTLPRTEGGRGLIDLNNLLIKQIETLRTFFNFKSQDSELHRAVVRADRKYTPLNLSEPSIRLNQTTNTQKLDAWTQKSLHGRHRLDLTNPIVDKTASNAWLKRGDMFPETEGFMIAIQDQTIDTKNYRKYIIKDPTAQNDLCRHCHSSPETIQHITGACKSITQTDYKHRHDQVAAIVHQYLALKYNLITDKMPYYKYTPKIILESDNYKLYWDRTIMTDKTIHHNRPDITLHDKRNKAVFLIDVAIPNTHNLQTTYTEKIAKYTDLAIELKRQWRVDSVRTVPIVVSTTGVIPKYLHTSLKTLQMHPLTYTLMQKAVILNTCRIVRKFLSIET

SEQ ID NO: 8340 - protein, 1334 aa, Hyles vespertilio
MRLRSRILPQAGTRANSDGESRPGPSGSGCPAYSGEGTVSHQAAQFQTAAAQNDPTRSCSSPSSSLFSSIPSSPPSYLDSFHHHASLSPSSSLTDHSPEDVVQEASTANNPVSTAGGIKTRKKWSEEMNIFIMRTYFIITSLETNIKNYLTPLYNKFNEKFPHMQASKQRLGDQRRAIVQKQLLSNDTIKEIKSEVEAYLKSQPVNDSQTQIDSNNQRLKWTNDINEIIIKTYYRITNLENNITAYREQLHREVITLCPSISHVSVQRVADQRRAIINNKYISVERLAQIKEEIRLELVRSEENVTTPNVIVDNLACQHANLLTDGHPIETSETENHPLNEIVGTENEYESSLPTDIQAQIDEKFAETLAMFKDSNPTQRTPIPRQKPSKKLTSIVNYLNSVVLPKSMTDDTDYDTIQLILYSAAFTAAKMNGTKFNNINRPSRDQIPKWQENLQRRINNLRTNIARLTEYMKGNQSPRLKNKVDEIIIRYKVHSQHENPNSDLSHFLDTLKQKLSVLASRLRRYKQTTLRKTQNRIFTSNEKVFYRRLCQNNINNLPIHSTPTNIPSKESLQEYWSSIWSNPKTHKESQWIKEDKDRFKNVPTMEFEHISLDILRRVINRTHNWKATGSDKLHNYWYKKFTNLHAPLLKYINTFIHTPHIMPPYLTEGITFMLPKDPTDTINPAKYRPITCLQTFYKIITSCISEVIYSHINSNNILAEEQKGCRKNSQGCKEQLIIDAVACGQAHSKNRNIFSMFIDYKKAYDSVPHTWLIYILRHYNVHPTIVSFLEIVMRGWKTSIKLYRNNQSIETDFINIKRGIFQGDALSPIWFCLSLNPLSTLLNNTSKGFKIKFDNSHYTLSHLLYMDDIKLFGSSLAEIHTLADITQKFSSDIQMEFGIDKCKILSVRRGQIEHNNYTFNDNAQIEPLDILEGYKYLGFQQTVQIHHKQIKNILTEKFRSRLHKILNTHLNARNSVKAINTYAIPILTYSFGIIKWSQTDIKNLQRNINTTMSKYRKHHPRACVQRQTLPRAEGGRGIIDLSNLHTKQIQSLRSFFLTKSLTSSLHRAIALADNKYTPLNLTDPTIQINQTSITQKLDAWAQKSLHGRHRLDLANTIVDKNASNAWLKRGDLFPETEGFMIAIQDQTIDTKNYRRYIIKDPTAQNDLCRHCHSSPETIQHITGACKSITQTDYKHRHDQVAAIVHQYLAYKYKLISNKTAYYKYTPKIILESDNYKLYWDRTIMTDKIIHHNRPDITLHDKINKTVFLIDVAIPNSHNLQTAYTEKIAKYTDLSIELKTQWRLNSVRTVPIIVSTTGLIPKYLHNSLKCSKYIH

SEQ ID NO: 8341 - protein, 1360 aa, Hyles vespertilio
MRLRSRILPQAGTRANSDGESRPGPSGSGCPAYSGEGTVSHQAAQFQTAAAQNDPMRSCSSPSSSLFSSIPSSPPSYLDSFHHHASLSPSSSLTDHSPEDVVQEASTANNPVSTAGGIKTRKKWSEEMNIFIMRTYFIITSLETNIKNYLTPLYNKFNEKFPHMQASKQRLGDQRRAIVQKQLLSNDTIKEIKSEVEAYLKSQPVNDSQTQIDSNNQRLKWTNDINEVIIKTYYRITNLENNITAYRKQLHREVITLCPSISHVSVQRVADQRRAIINNKYISVERLAQIKEEIRLELVRSEENVTTPNVIVDNLACQHANLLTDGHPIETSETENHPLNEIVGTENEYESPLPTDIQAQIDEKFAETLAMFKDSNPTQRTSIPRQKPSKKLTSIVNYLNSVVLPKSMTDDTDYDTIQLILYSAAFTAAKMNGTKFNNINRPSRDQIPKWQENLQRRINNLRTNIARLTEYMKGNQSPRLKNKVDEIIIRYKVHSQHENPNSDLSHFLDTLKQKLSVLASRLRRYKQTTLRKTQNRIFTSNEKVFYRRLCQNNINNLPIHSTPTNIPSKESLQEYWSSIWSNPKTHKESQWIKEDKDRFKNVPTMEFEHISLDILRRVINRTHNWKATGSDKLHNYWYKKFTNLHAPLLKYINTFIHTPHIMPPYLTEGITFMLPKDPTDTINPAKYRPITCLQSFYKIITSCISEVIYSHINSNNILAEEQKGCRKNSQGCKEQLIIDAVACGQAHSKNRNIFSMFIDYKKAYDSVPHTWLIYILRHYNVHPTIVSFLEIVMRGWKTSIKLYRNNQSIETDFINIKRGIFQGDALSPIWFCLSLNPLSTLLNNTSKGFKIKFDNSHYTLSHLLYMDDIKLFGSSLAEIHTLADITQKFSSDIQMEFGIDKCKILSVRRGQIEHNNYTFNDNAQIEPLDILEGYKYLGFQQTVQIHHKQIKNILTEKFRSRLHKILNTHLNARNSVKAINTYAIPILTYSFGIIKWSQTDIKNLQRNINTTMSKYRKHHPRACVQRQTLPRAEGGRGIIDLSNLHTKQIQSLRSFFLTKSLTSSLHRAIALADNKYTPLNLTDPTIQINQTSIAQKLDAWAQKSLHGRHRLDLANTIVDKNASNAWLKRGDLFPETEGFMIAIQDQTIDTKNYRRYIIKYPTAQNDLCRHCHSSPETIQHITGACKSITQTDYKHRHDQVAAIVHQYLAYKYKLISNKTAYYKYTPKIILESDNYKLYWDRTIMTDKTIHHNRPDITLHDKINKTVFLIDVAIPNSHNLQTAYTETIAKYTDLSIELKTQWRLNSVRTVPIIVSTTGLIPKYLHNSLKMLQIHPLTYTLMQKAVILNTCRIVRKFLSIET

SEQ ID NO: 8342 - protein, 1364 aa, Autographa gamma
MNRENKRYSLRPLPGGRRGTSGASAGCSSMRTIGGGGLNRRVLPEQLTTANNQSSPSLPPSSPSSLFPSLPSSPASYANSLHQSSSHSTPSSSSTSIQLSEDVVQEAIAARNPAPASGLIGKRKMWSEEMNIFILRSYLIITSLESNTKNYLTPLYESFIEKYPEMQVSKQRVGDQRRAIVRNKLLSNEKVKQIKLEVQTHLEDNPLASFTPNSNPERLSWTNDINETIMRLYYKITNLEKNVTGYRQQLHQQVIALCPSIAHVSVQRISDQRRVIINNKYIPSDRLNTIREEVASELNINTNLQNSSELISPNHFSPIVVESHSQRSLTPPFTQQLEQLESLTQVVEEENESFLPLEIQSQIDETFLDILKKCETIDPTKRPAIPKQKTSKRFGYIVNYINSCVIPKVISNETDFATVQLVIYSAAYTASKHNGAKFYETSTARKPKDRVPKWQENMQKRIENLRAYIARLHEFMNGNQSQYLRKKIEEIKNRFKVHSQHENPNTDLTHFLDTLKQKLSVLVSRLRRYKQTTLRKTQNQLFVNNEKVFYRNLAQNSINHLPSERTSAPTPTKDSLEAFWSNIWSNPVEHKDNKWLELDKDRVKNIPQMEFRAISLDLLKRIINRTHNWKATGSDRLHNYWYKKFTKIHTLLLTHINQFIESPDTLPKYITEGITYMLPKDQSDTGNPAKYRPITCLQSIYKIITYCICEVIYRHVDENDILAEEQKGCRRSSQGCKEQLTIDAIACKQAHAKSRNIYSMYIDYKKAFDSVPHSWLIYVLKHYHIHPSLVSFLENTMSSWKTILKLYSKEETIETEFLNIRRGIFQGDALSPLWFCLALNPLSAMLKNTNKGFNIKYDNTNYNLSHLLYMDDIKLFGTTLIDIHTLADITQTFSSDICMEFGIDKCKIQSVRKGRVEPTSYQLHDERTIESVDESEGYKYLGYVQSRQIHQSQTKLTLKEKFKSRLHKILNTHLNARNTVKAINSYAIPILTYYFGVIKWSKSQLQNMQRMVNTTMTKYRKHHPRACVQRQTLPRVEGGRGIIDIQNLHSKQIQTLRAFFHSKSNHSHLHLAIVRADNKYTPLHLTNLSVQLEQITNPHKLDTWAQKSLHGRHRLDLTNPIVDKVASNMWLKRGELFPETEGFMIAIQDQTIDTKNYRKHIIRDPSAQNDFCRHCHRSPETIQHITGACTSIAQSDYKHRHDQIAAIVHQYLAYKYKLIPEKTAYYKYVPQTILESAEFKMYWDRTIMTDKTVHFNRPDITLLDKINKTVFLIDIAVPNTHNLQTTFTEKIAKYTDLSIELKTQWRVDDVRTVPIVISSTGVIPKTLHNSLKTLQIHPLTYILIQKAAILNTCRIVRKFLSIHN

SEQ ID NO: 8343 - protein, 1380 aa, Autographa pulchrina
MVSTFLTNGPKNPPFFFSMNRENKRYSLRPLPGGRRGTSGASAGCSSMRTIGGGGLNRRVLPEQLTTADNHSSPSLPPSSPSSLFPSIPSSPAAYANSLHQSSSHSTPLSPSPSIQLSEVVVQEAIAARDPAPASGLIGKRKMWSEEMNIFILRTYLVITSLENNTKHYLTPLYESFTEKYPEMQVSKQRVGDQRRAIVRNKLLSDEKVKQIRLEIQTHLKDNPQASFTPNSNSERLSWTNDINETIMRSYYKITNLETNVTGYRQQLHQQVIALCPSIAHVSVQRISDQRRVIVNNKYISSNRLNKIREEVASELNMNPNLPNIPELINLTPPIVESHSQRSLTPTFTQQLEQMESLTQVVETDSERLIPSLEIQSQIDETFLDIFKKYEATDPTKRPAIPKQKTSKRFGCIVHYLNSCLIPKVISNETDFETVQLVIYSAAYTAAKHNGAKFYETSTARKPKDRIPKWQENMQKRIENLRAYIARLHEFMNGNQSQYLRKKIEEIKDRFKVHSQHETPNTDLTHFLDTLKQKLSVLVSRLRRYKQTTLRKTQNQLFINNEKVFYRNLAQNSINNLPSDRRSTQTPTKDSLEAFWSNIWSNPVVHKDNLWLEQDKERVKDLPEMEFREISLDLLKCIINRTHNWKATGSDKLHNYWYKQFTNIHTLLLTHINQFIKSPETLPKYITEGITYMLPKDQSDTGNPAKYRPITCLQSIYKIITSCICEVIYRHVDENKILAEEQKGCRRSSQGCKEQLTIDAIACKQAHAKSRNIYSMYIDYKKAFDSVPHSWLIFILKHYHIHPSLVSFLENTMSSWKTILKLYSKEGTIITEFLNIRRGIFQGDALSPLWFCLALNPLSAMLNNTNKGFKIKYDNTNYNLSHLLYMDDIKLFGTTLIDIHSLADITQTFSSDICMEFGIDKCKIQSVRKGRIEPNSYQLHDERTIESVDESEGYKYLGYAQSRQIHQSQTKLTLKEKFKTRLHKILNTHLNARNTVKAINSYAIPILTYSFGVIKWSKSQLQNMQRMVNTTMTKYRKHHPRACVQRQTLPRVEGGRGIIDIQNLHSKQIQTLRAFFHSKSNHSHLHLAIVRADNKYTPLHLANLSVQLEQITHPQKLDTWAQKSLHGRHRLDLTNPIVDKVASNMWLKRGELFPETEGFMIAIQDQTIDTKNYRKHIIRDPSAQNDLCRHCHRSPETIQHITGACTSIAQSDYKHRHDQIAAIVHQYLAYKYKLIPEKTAYYKYIPQTILESAEFKMYWDRTIMTDKTVHFNRPDITLLDKINKTVFLIDIAVPNTHNLQTTFTEKIAKYTDLSIELKTQWRVDDVRTVPIVISSTGVIPKSLHNSLKTLQIHPLTYILIQKAAILNTCRIVRKFLSIHT

SEQ ID NO: 8344 - protein, 1364 aa, Autographa gamma
MNRENKRYSLRPLPGGRRGTSGASAGCSSMRTIGGGGLNRRVLPEQLTTADNHSSPSLPPSSPSSLFPSLPSSPAAYANSLHQSSSHSTPSSPSTSIQLSEDVVQEAIAARDPAPASGLIGKRKMWSEEMNIFILRSYLIITSLESNTKNYLTPLYESFIEKYPEMQVSKQRVGDQRRAIVRNKLLSNEKVKQIKLEVQTHFEDNPLASFTPNSNPERLSWTTDINETIMRSYYKITNLEKNVTGYRQQLHQQVIALCPSIAHVSVQRISDQRRVIINNKYIPSDRLNTIREEVASELNINTNLQNSSELISPNHFSPIVVESHSQRSLTPPFTQHLEQLESLTQVVEEENESLLPLEIQSQIEETFLDILKKFETIDPTKRPPIPKQKTSKRFGYIVNYINSCVIPKVISNETDFATAQLVIYSAAYTAAKHNGAKFYETSTARKPKDKVPKWQENLQKRIENLRAYIARLHEFMNGNQSQYLQKKIEEIKNRFKVHSQHENPNTDLTHFLDTLKQKLSVLVSRLRRYKQTTLRKTQNQLFVNNEKVFYRNLAQNSINHLPSERTSTPTPTKDSLEAFWSNIWSNPVEHKDNKWLELDKDRVKNIPQMEFRAISLDLLKRIINRTHNWKATGSDKLHNYWYKKFTKIHTLLLTHINQFIESPDTLPRYITEGITYMLPKDQSDTGNPAKYRPITCLQSIYKIITSCICEVIYRHVDENNILAEEQKGCRRSSQGCKEQLTIDAIACKQAHAKSRNIYSMYIDYKKAFDSVPHSWLIYILKHYHIHPSLVSFLENTMSSWKTILKLNTKEETIETEFLNIRRGIFQGDALSPLWFCLALNPLSAMLNNTNKGFKIKYDNTNYNLSHLLYMDDIKLFGTTLIDIHTLADITQTFSSDICMEFGIDKCKIQSVRKGRVEPNSYQLHDERTIESVDESEGYKYLGYVQSRQIHQSQTKLTLKEKFKSRLHKILNTHLNARNTVKAINSYAIPILTYSFGVIKWSKSQLQNMQRMVNTTMTKYRKHHPRACVQRQTLPRLEGGRGIIDIQNLHSRLIQTLRAFFHSKSNHSHLHLAIVRADNKYTPLHLANLSVQLEQITNPHKLHTWAQKSLHGRHRLDLTNPIVDKVASNMWLKRGELFPETEGFMIAIQDQIIDTKNYRKHIIRDPSAQNDFCRHCHRSPETIQHITGACTSIAQSDYKHRHDQIAAIVHQYLAYKYKLIPEKTAYYKYVPQTILESAEFKMYWDRTIMTDKTVHFNRPDITLLDKINKTVFLIDIAVPNTHNLHTTFTEKIAKYTDLSIELKTQWRVDDVRTVPIVISSTGVIPKTLHNSLKTLHIHPLTYILIQKAAILNTCRIVRKFLSIHN

SEQ ID NO: 8345 - protein, 1391 aa, Boloria selene
MERRFYNLRPLPGGRRGAPGADAGCLSMRTIGDKELTRRAPVEEFVTADVHLDHKPSFQLSSTHSLFQSPSSSTHLLKIPPSPSSSSNTNLSNSVAQEASYVSTPVPTLSSTQRTRMRWNNELNEAIIKFYYRITKLETNTIPYRRTLHQHFINTFPHLSHVSEQRVADQKRRIILNKLISASRLQSIKNEISIELQADYDITKTQSNNLNVPLSARMRWSNELNESLIRCYYIVTELENNMTSYRQKLHSKFIEIHPEYSNMSAQRLSDQRRSIVNNKLLSSQRLLEIRKEIQNNYNYEDKQHNRMRSSDESSNTQIAKTANTSVNIVNNTGSRQVITTTIPSTSNTQKLVLESREPEDVNLEVNQEIEDLFQETLHYFINTDPTCRLYIPKQKLTKKFYTNLHYINTITLPKHIHPNIDFKTLQNIIYSAAYTVAKLNGSIVKQINNVQSEKKPKWQVRLEKKIDDLRVKIGRMTQYINGNKGAKLAHQVQQIMNHYKTHTTHESPNTLPIHFLDTLKQKLALTASRLRRYRACSLRKTQNKQFSHNEKTFYRNISAASSNYTKSSPQNIPSPEELRNYWADLWETSTEHNDKAEWIEIEKKYHEKITQMEFESIPLEIFNKVIKKLHNWKSPGSDNIHNFWYKHLTCTHPHLYNHINKFIQDPHTIPQYIMHGITYMLPKNNSESLNPSNYRPITCLQTIYKIITSCITELIYTHINSNSILAEQQKGCRRFTQGCKEQLIVDTITLQTANRNKSELHTMYIDYKKAFDSVPHSWLLKVLDIYKVHPCLTNFLQSIIQKWSTNLRLKTTLGIIDTPSIKIRKGIFQGDSLSPLWFCLALNPLSNLLNNSNVGYPLKYTNNESNQLITYHLNHLMYMDDIKLYASSLEDLHKLAKIAECFSKDIHMTFGIDKCRINSLNARQDQELNYLLENGQLIHSLQEGEAYKYLGYNQSREIMYKEVKTKLIQNFKHRLNILLRSQLYSRNLIKAINTYAIPILTYSFGIIKWSKSELKNIQRIINTNMTKHRKHHPRACVQRQTLPRTEGGRGLIDVSNLHNKQISILRTYFHQRSVQSILHEIIVNADNKFTPLNLQDRTTQKNENQISNQLKIDEWTRKSLHGRHRHDLCQATVDKAASNAWLRRGELFPETEGFMISIQDQIIETRNYQKHIMKTLTQNTDLCRKCNSSPETIQHITGACRTIVQTDYKHRHDQVANIIHQQIVQMLKITTIKSVPYYKYIPDTVIESLNYRLYFDRAILTDKTIHYNRPDITLHDKRSQSAFIIDIAIPNTHNLQNAIAEKLTKYIELKDELKRMWKLKSVTIVPIVLSTTGVIPKQLFQSLKTLNLPVYTYFNLQKAVILNTCRIVRKFLQTENDTGSNVPTSFDIAQN

SEQ ID NO: 8346 - protein, 1402 aa, Fabriciana adippe
MEKRFYNLRPLPGGRRGAPGADAGCLSMRTIGDKELTRRAPVEEFVTAEVHLDHNPSFQLTSSHSVSQTPSSPTHPLKTPPSPSSSTNTDLSNSVAQETSYVSTPVPTVSTTKRTRMRWNNELNEAIMKSYYRITKLETNSIPYRRTLHQHFINTFPHLSHVSEQRVADQKRRIILNKLISEDRLQTIKTEISIELQATHNITQNQNNNLYAPLPTSRMRWANELNESLIRCYYIVTELENNMTAYRQKLHSKFIQIHPEYSNMSAQRLSDQRRSIVNNKLLSSQKLLQIRKDIQNNYKYEDKQHNSVRYNNESSNTQKEIPPCTVVAEAANTSVNIAIDKAIPQDINTTIPSTFHTQNIPQISVLDHRQPEDINLEVNQEIENLFQETLHYNINTNPTCRTYIPKQKLSKKFSAILHYLNTITLPKYIDPNIDFSTLQNIIYSAAWTAAKLNGSILHQNNTVQPEKKAKWQVRLEKKIDNLRVKIGRMTQYINGNKSEKLAYQIQQIKNQYKTHSTHEDPNTQPIHFPDTLKQKLALTASRLRRYRACSLRKTQNKQFSHNEKSFYRSISTISSNYTASTPQNIPSPEDLRNYWADLWETSIEHNDKAEWIKIEKNHHKDIPQMEFESIPIEIFNKVIRKLHNWKSPGSDNIHNFWYKTFTCIHPHLYNHINKFIQNPHTIPQYIMHGITYMLPKNNSEPLNPANYRPITCLQAIYKIISSCITEVIYTHIDSNNILAEQQKGCRKFTQGCKEQLIIDTTILQKANRNKSELYTMYIDYKKAFDSVPHSWLLKVLDIYKVHPCVINFLQSIIQKWSTILRLKTTVGIIDTPPIKIKKGIFQGDSFSPLWFCLALNPLSSLLNNSNVGYPLRYTNTESNQVITYHLNHLMYMDDIKLYASSLDDLHKLAKITECYSKDIHMSFGIDKCRINSLNARQNQELNYLLENGQLIHSLQQDEVYKYLGYNQSNEIKSKEVKDKLIQNFKHRLNILLRSQLYSRNLIIAINTYAIPILTYSFGIIKWSKAELKNIQRIINTSMTKCRKHHPRACVQRQTLPRTEGGRGLIDVSNLHNKQITILRTYFYQRSVQSTLHETIVNIDKKLTPLNLQDRNTQKNENQVSNQFKIDEWSRKSLHGRHRHDLCQSNVDKAASNAWLRRGELFPETEGFMISIQDQTIETRNYQKHIMKTLMLNIDLCRKCNSSPETIQHITGACRTIVQTDYKHRHDQVANIIHQHIVQTLKISTNKSVPYYKYIPETIIENLNYRLYFDRAILTDKTIHYNRPDITLHDKRSQSAFIIDIAIPNTHNLQNAIAEKLTKYTELKDEIRRMWHLKNVTIVPIVLSTTGIIPKQLFQSLKILNLPLYTYFNLQKAVILNTCRIVRKFLQTDKDIGSSIPTSFDIT

SEQ ID NO: 8347 - protein, 1391 aa, Boloria selene
MERRFYNLRPLPGGRRGAPGADAGCLSMRTIGDKELTRRAPVEEFVTADVHLDHKPSFQLSSTHSLFQSPSSSTHLLKIPPSPSSSSNTNLSNSVAQEASYVSTPVPTLSSTQRTRMRWNNELNEAIIKSYYRITKLETNTIPYRRTLHQHFINTFPHLSHVSEQRVADQKRRIILNKLISASRLQSIKNEISIELQADYDITKTQSNNLNVPLSARMRWSNELNESLIRCYYIVTELENNMTSYRQKLHSKFIEIHPEYSNMSAQRLSDQRRSIVNNKLLSSQRLLEIRKEIQNNYNYEDKQHNRTRSSDESSNTQIAKTANTSVNIVNNTGSRQVITTTIPSTSNTQKLVLESREPEDVNLEVNQEIEDLFQETLHYFINTDPTCRLYIPKQKLSKKFYTNLHYINTITLPKHIHPNIDFKTLQNIIYSAAYTVAKLNGSIVKQINNVQSEKKPKWQVRLEKKIDDLRVKIGRMTQYINGNKGAKLAHQVQQIMNHYKTHTTHESPNTLPIHFLDTLKQKLALTASRLRRYRACSLRKTQNKQFSHNEKTFYRNISAAGSNYTESSPQNIPSPEELRNYWADLWETSTEHNDKAEWIEIEKKYHEKITQMEFESIPLEIFNKVIKKLHNWKSPGSDNIHNFWYKHLTCTHPHLYNHINKFIQDPHTIPQYIMHGITYMLPKNNSESLNPSNYRPITCLQTIYKIITSCITEVIYTHINSNSILAEQQKGCRRFTQGCKEQLIVDTITLQTANRNKSELHTMYIDYKKAFDSVPHSWLLKVLDIYKVHPCLTNFLQSIIQKWSTNLRLKTTLGIIDTPSIKIRKGIFQGDSLSPLWFCLALNPLSNLLNNSNVGYPLKYTNNESNQLITYHLNHLMYMDDIKLYASSLEDLHKLAKIAECFSKDIHMTFGIDKCRINSLNARQDQELNYLLENGQLIHSLQEGEAYKYLGYNQSREIMYKDVKTKLIQNFKHRLNILLRSQLYSRNLIKAINTYAIPILTYSFGIIKWSKSELKNIQRIINTNMTKHRKHHPRACVQRQTLPRTEGGRGLIDVSNLHNKQISILRTYFHQRSVQSILHEKIVNADNKFTPLNLQDRTTQKNENQISNQLKIDEWTRKSLHGRHRHDLCQATVDKAASNAWLRRGELFPETEGFMISIQDQIIETRNYQKHIMKTLTQNTDLCRKCNSSPETIQHITGACRTIVQTDYKHRHDQVANIIHQQIVQMLKITTIKSVPYYKYIPDTVIESLNYRLYFDRAILTDKTIHYNRPDITLHDKRSQSAFIIDIAIPNTHNLQNAIAEKLTKYIELKDELKRMWKLKSVTIVPIVLSTTGVIPKQLFQSLKTLNLPVYTYFNLQKAVILNTCRIVRKFLQTENDTGSNVPTSFDIAQN

SEQ ID NO: 8348 - protein, 896 aa, Boloria selene
MNHYKTHTTHESPNTLPIHFLDTLKQKLALTASRLRRYRACSLRKTQNKQFSHNEKTFYRNISAASSNYTESSPQNIPSPEELRNYWADLWETSTEHNDKAEWIEIEKKYHEKITQMEFESIPLEIFNKVIKKLHNWKSPGSDNIHNFWYKHLTCTHPHLYNHINKFIQDPHTIPQYIMHGITYMLPKNNSESLNPSNYRPITCLQAIYKIITSCITEVIYTHINSNSILAEQQKGCRRFTQGCKEQLIVDTITLQIANRNKSELHTMYIDYKKAFDSVPHSWLLKVLDIYKVHPCLTNFLQSIIQKWSTNLRLKTTLGIIDTPSIKIRKGIFQGDSLSPLWFCLALNPLSNLLNNSNVGYPLKYTNNESNQLITYHLNHLMYMDDIKLYASSLEDLHKLAKIAECFSKDIHMTFGIDKCRINSLNARQDQELNYLLENGQLIHSLQEGEAYKYLGYNQSREIMYKEVKTKLIQNFKHRLNILLRSQLYSRNLIKAINTYAIPILTYSLGIIKWSKSELKNIQRIINTNMTKHRKHHPRACVQRQTLPRTEGGRGLIDVSNLHNKQISILRTYFHQRSVQSILHEIIVNADNKFTPLNLQDRTTQKNENQISNQLKIDEWTRKSLHGRHRHDLCQATVDKAASNAWLRRGELFPETEGFMISIQDQIIETRNYQKHIMKTLTQNTDLCRKCNSSPETIQHITGACRTIVQTDYKHRHDQVANIIHQQIVQMLKITTIKSVPYYKYIPDTVIESLNYRLYFHRAILTDKTIHYNKPDITLHDKRSQSAFIIDIAIPNTHNLQNAIAEKLTKYIELKDELKRMWKLKSVTIVPIVLSTTGVIPKQPFQSLKTLNLPVYTYFNLQKAVILNTCRIVRKFLQTENDTGSNVPTSFDIAQN

SEQ ID NO: 8349 - protein, 1355 aa, Fabriciana adippe
MGELNNKSYNNNNNNNNSVSQTPSSPIHPLKTPPSPSSSTNTDLSNSVAQETSYVSTPVPTVSTTKRTRMRWNNELNEAIMKSYYRITKLETNSIPYRRTLHQHFINTFPHLSHVSEQRVADQKRRIILNKLISEDRLQSIKTEISIELQATHNITQNQNNNLYAPLPTSRMRWSNELNESLIRCYYIVTELENNMTAYRQKLHSKFIQIHPEYSNMSAQRLSDQRRSIVNNKLLSSQKLLQIRKDIQNNYKYEDKQHNSVRYNNESSNTQKEIPPCTVVAEAANTSVNTAIDKAIPQDINTTIPSTFHTQNIPQTSVLDHRQPEDINLEVNQEIENLFQETLHYNINTNPTCRTYIPKQKLSKKFSAILHYLNTITLPKYIDPNIDFSTLQNIIYSAAWTAAKLNGSILHQNNKVQPEKKAKWQVRLEKKIDNLRVKIGRMTQYINGNKSEKLAYQIQQIKNQYKTHSTHEDPNTQPIHFLDTLKQKLALTASRLRRYRACSLRKTQNKQFSHNEKSFYRSISTISSNYTASTPQNIPSPEDLRNYWADLWETSIEHNDKAEWIKIEKNHHKDIPQMEFESIPIEIFNKVIRKLHNWKSPGSDNIHNFWYKTFTCIHPHLYNHINKFIQNPHTIPQYIMHGITYMLPKNNSEPLNPANYRPITCLQAIYKIISSCITEVIYTHIDSNNILAEQQKGCRKFTQGCKEQLIIDTTILQKANRNKSELYTMYIDYKKAFDSVPHSWLLKVLDIYKVHPCVINFLQSIIQKWSTILRLKTTVGIIDTPPIKIKKGIFQGDSFSPLWFCLALNPLSSLLNNSNVGYPLRYTNTESNQVITYHLNHLMYMDDIKLYASSLDDLHKLAKITECFSKDIHMSFGIDKCRINSLNARQNQELNYLLENGQLIHSLQQDEVYKYLGYNQSNEIKSKEVKDKLIQNFKHRLNILLRSQLYSRNLIIAINTYAIPILTYSFGIIKWSKAELKNIQRIINTSMTKCRKHHPRACVQRQTLPRTEGGRGLIDVSNLHNKQITILRTYFHQRSVQSTLHETIVNIDKKLTPLNLQDRNTQKNENQVSNQFKIDEWSRKSLHGRHRHDLCQSNVDKAASNAWLRRGELFPETEGFMISIQDQTIETRNYQKHIMKTLMLNTDLCRKCNSSPETIQHITGACRTIVQTDYKHRHDQVANIIHQHIVQTLKISTNKSVPYYKYIPETIIENLNYRLYFDRAILTDKTIHYNRPDITLHDKRSQSAFIIDIAIPNTHNLQNAIAEKLTKYTELKDEIRRMWHLKNVTIVPIVLSTTGVIPKQLFQSLKILNLPLYTYFNLQKAVILNTCRIVRKFLQTDKDIGRSIPTSFDIT

SEQ ID NO: 8350 - protein, 1391 aa, Boloria selene
MERRFYNLRPLPGGRRGAPGADAGCLSMRTIGDKELTRRAPVEEFVTADVHLDHKPSFQLSSTHSLFQSPSSSTHLLKIPPSPSSSSNTNLSNSVAQEASYVSTPVPTLSSTQRTRMRWNNELNEAIIKSYYRITKLETNTIPYRRTLHQHFINTFPHLSHVSEQRVADQKRRIILNKLISASRLQSIKNEISIELQADYDITKTQSNNLNVPLSARMRWSNELNESLIRCYYIVTELENNMTSYRQKLHSKFIEIHPEYSNMSAQRLSDQRRSIVNNKLLSSQRLLEIRKEIQNNYNYEDKQHNRMRSSDESSNTQIAKTANTSVNIVNNTGSRQVITTTIPSTSNTQKLVLESREPEDVNLEVNQEIEDLFQETLHYFINTDPTCRLYIPKQKLSKKFYTNLHYINTITLPKHIHPNIDFKTLQNIIYSAAYTVAKLNGSIVKQINNVQSEKKPKWQVRLEKKIDDLRVKIGRMTQYINGNKGAKLAHQVQQIMNHYKTHTTHESPNTLPIHFLDTLKQKLALTASRLRRYRACSLRKTQNKQFSHNEKTFYRNISAASSNYTESSPQNIPSPEELRNYWADLWETSTEHNDKAEWIEIEKKYHEKITQMEFESIPLEIFNKVIKKLHNWKSPGSDNIHNFWYKHLTCTHPHLYNHINKFIQDPHTIPQYIMHGITYMLPKNNSESLNPSNYRPITCLQTIYKIITSCITEVIYTHINSNSILAEQQKGCRRFTQGCKEQLIVDTITLQTANRNKSELHTMYIDYKKAFDSVPHSWLLKVLDIYKVHPCLTNFLQSIIQKWSTNLRLKTTLGIIDTPSIKIRKGIFQGDSLSPLWFCLALNPLSNLLNNSNVGYPLKYTNNESNQLITYHLNHLMYMDDIKLYASSLEDLHKLAKIAECFSKDIHMTFGIDKCRINSLNARQDQELNYLLENGQLIHSLQEGEAYKYLGYNQLREIMYKEVKTKLIQNFKHRLNILLRSQLYSRNLIKAINTYAIPILTYSFGIIKWSKSELKNIQRIINTNMTKHRKHHPRACVQRQTLPRTEGGRGLIDVSNLHNKQISVLRTYFHQRSVQSILHEIIVNADNKFTPLNLQDRTTQKNENQISNQLKIDEWTRKSLHGRHRHDLCQATVDKAASNAWLRRGELFPETEGFMISIQDQIIETRNYQKHIMKTLTQNTDLCRKCNSSPETIQHITGACRTIVQTDYKHRHDQVANIIHQQIVQMLKITTIKSVPYYKYIPDTVIESLNYRLYFDRAILTDKTIHYNRPDITLHDKRSQSAFIIDIAIPNTHNLQNAIAEKLTKYIELKDELKRMWKLKSVTIVPIVLSTTGVIPKQLFQSLKTLNLPVYTYFNLQKAVILNTCRIVRKFLQTENDTGSNVPTSFDIAQN

SEQ ID NO: 8351 - protein, 994 aa, Sinella curviseta
MEDEDDSTCPSCTSSGLPEEERSNSKWIYCDKCDGCFHGCCINLSNEEVTKLGQDTSKWYCPKCSTEANINNGFTCPHCTDHFASSKGLKIHISRKHRNIDVNIDCPPAEHDFISLISTLKSNVPVLKRIPTGARNAAACKLANIMEECISDNSPNSWKKLLLFPFECLRIPNRQGKQSLTSLVKETISTQSLPDNARASKRKPISLEKRVQSKMDDHDLRGALRILCSNDTLAPINDDTFTKLKDLHPGPSRPTILPEPPNETTPHFQVDEKAVTKAISSFAPGSASGIDALLPQHLKDLTAKSAGEQRLLRQITKLVDLMLRGNVNTEVQKYIFGATLCALNKKGGGLRPIAVGCTIRRLTAKLACLESREACSNYFQPHQLGFATKQGCEIIVHATRTFLENNHQSNSVLVKIDYKNAFNTVERDSILEQVKTQVPQIFPFMWQSYSSPSLLFFGNKTIESQVGCQQGDPTGPLAFSLAIHPIILSLQSELRLFYLDDGTIGGDPEIDLKDIEQLVEESSKIGLRVNPTKCELFFTSGIIDPEVQRRFEEILPGIRVVSTEDLELLGSPLCEEGFSDALLERFETMKIMFGRLKNLSAHVAFFLLKNSLGIPKLIYTLRTTPSWMHYNILEEMDIAMKCCMEGILNISMGAQEWKQASLPTRHGGLGIRKITDLSLPTFLSSCSGVKPIVSKILNSTVDDLSIHKSKEALDLWQTKYEMIPPVPEVQTNWDSIIIKKSIQDLAFQSDTDKARFLALQCKESNAWLDAFPSRNIGMLLDNNQLRISIGLRLGCDICRSFTCLCSQSVDNKGLHPLSCSKSSGRYFRHSEINHIIKRALATIAIPSILEPTGISRDDGKRPDGITLTPWSRGQCLVWDVTCVDTFAPTYLPKICCDAGAAAEIACKRKHSKYSKIKDDGNIFKAFAVETMGAWSEEAKEWIGTIGTNLNFISGEMRSKYYLTQRISMTIQRGNVASILGSLPTTIPMDEIFFL

SEQ ID NO: 8352 - protein, 1163 aa, Nephromyces sp.
MMLLAKAIVSRSAWWALGVRRRQVVNLRLTYKTQIAQLSKSSAPSKRVARRKWSKNDNLDVMRAYYLATKCEQNKIGYRAKFYKIWKEYRPDIDITEQRLCDQKRVILTQNRLSTSELVYLKNQIFLEINLNTQTEVNISDNSDELPDLESNVHTVRQREIEPEAEDTVIRNETFDLFQESISEYSYHNPTMRPRLPKIWSSIKATEAINEVNQIIKAHLHQMNPVDINIQNINTIIYCGALTVVRMLKRKSFHTQQVSKCNKNYNPPWKVRIENRIKHLRRQLTHIIEYRNNKHNLQLANKVNIILNNHNKEPKDEIAINQLIDFFKQKIAALGKRIRRYNNMYKRRNQNSAFISNPKKFYQDLDTPSDKTEVDPPQKFELVNFWENIWSIPRNHNKNAHWLDTERQLQNNTTKMLNVQINKNDVVAATKKISNWKSPGSDNIQNFWLKYFTNSHEYIATAFQKALDCPKDVPDFFTQGITYMKSKGSDSKNPKNYRPITCLQTLYKLFTKIITTKVNQHLEINNIMNFEQKGCQKRSMGCKEQLTIDSIITSQAKKKSRNLSVGWVDYKKAFDSVPHSWLLEILKIYKVSDNIRQYFEIAMTNWSTVMKLSDITTDVIKINRGIFQGDSFSPLWFCMALNPLSNLMRNSGMGYSLKYSKNSYLFTHLFYMDDIKVYAKNKDQLSSLLEIISTFSKDIHMNFGIEKCKILHVLKGKVTENCDIQLLTQDIKIEHLKQDELYKYLGFYQALNKPTSEIKYNLTSKFFKRVKKILNTELNSRNKFTALNTYCMPLLTYTFGVLKWSKTEMDNLNRKVRVLLTKYRMHHPKASIHRLYLPRQIGGRGLCDLSTLCYNQLNNLRDYFHSDDKIHKIISKADIDYTPLNLANTTFKHESLTQSDRLQEWKTKELHGRYPYALANVDEVMSLKWLKTGQLFGETEGFICAIQDQVIKTRNYQKYIIKANINSDKCRLCNQRSETIQHISSECSNLAPTEYLTRHNQTAKILHKHLAEKYNLTDNVSPYYKYIAETTLERKNIRLYWDQPIITDKTVKHNRPDITLIDFENKNAFLIDVTHPTDHNVKKAEMEKISKYNDLAVEVKKIYKLDTVKIIPIVISCNGLVSCNLSSYMTKVEAPLSLISEMQKSVILETCRIVRKVLNIEEQ

SEQ ID NO: 8353 - protein, 1044 aa, Alatina alata
MRIHQGKVCKKGAQNCRSSLRKTSINAVQEANHSDSTNTPELENCDEKRPKVAWPNASEKQKYAEFESIILKMLRKKLKGSVDEKLKLLSDAIYDKGVENFGLLSNGKRKACPSRPCRREKAIAQLRKEKKQARKQWIAAAKEEKDGLKVIYEDLKRRSRMLMRAERRKLRKQEKRKYRKQFLENPYKFAKSLFTASNGGQLECTKDELEKHLKQVYSDSQRDEDLPLIKGIQRPTAPGTKFDLSDLKLREVQTFIQKARSKSAPGQDGVPYKVYKQCPKLRYKLFTVLKEAWKEKSVAKRWCRAEGIYLPKEESSTKLPQFRPISLLNIDGKIFFGVIAKRTITFLQSNGYIDETVQKAGLPGIPGCIEHASTIWESIQRAKKDKADLAVVWLDLANAFGSVPHKLLLLAMQFFWIPEEIQKIMMDYYDSFIMRFSTTEFTTTWQRLEIGVAAGCTISVIWFILSMEIVLKGTRCTDTSERLRTPKKAFMDDITLLTQSSAAMEGMLNRLDNLISWARMEFKAKKSRSITFKSGKQVNIKYKVAGEEIPTVAEEPVKSLGRKYEGTLSDRHRGIEIQELAEQGLKSIDKAKLSGNYKVWILQFALYPRIMWPLTIYEVALSRVEKLEMRINTYIRKWLGLPRMLSTSALYKNKSVLELPLASIVEQYKCGKIRTVLMLRHSTDSEIYNDPPDVVTGRKWKAEEATDNNIAVMRHKDIVGATQTSSRGLGDGSFKPWNSMSEKEQRNAIVAVTKDDEAQNRYTKLVQQSVQGQCVSWEEKVLQRKVTWQEMWGWRPARLSFLIRSTYDTLPSPTNLVRWKLSTDEKCRCGARGTLRHILSNCPLSLPSRYLWRHNQVLATIATAVRVKIKEINEGKLPKVKALGKIKFCKQGISPPKSEKQERTDERWKGFWEVSADIESMLVFPAVETRQRPDLIVWCAERKIVKLIELTVSWETNIDDAHSRKEDRYEDLVLQCEENGWDAECLPIEVGCRGYIGHRVISLLTKLGFKQSEKSKLIKEIQHTAEKTSFWIWLKRQDETWSTE

SEQ ID NO: 8354 - protein, 898 aa, Histomonas meleagridis
MKFNWIKNTLEDEIATRSGILSEKYKEKIQNLYQEDSRKCINWRICKNPTPECPLTLNQFEEFFKNEWNSKIDFHPPNNDSKWNLDNCFKKEDKDLFITMLLDKDRIKEVIRSRPNLSAHGIDGISNSIWKSNINITFKIIKYIVSYMILYERISESWKSSKTILLYKKEAPEELRSWRPISISNTIYRIIFCLFLKCIQDINYKINIINRVQKGFKEGINGAAEHIETINELISNARRKKQSIYITALDFTNAFGTVPHELITWALKAKGFPDKFIDIIKNSYKNSYTKIFYKGNNSRPIFVKRGVKQGCPLSPTLFDLCLEPLLKAIQIKNKDDGILIEDEINNEILRFNIQAYADDVILMSSSEEGMNNMLKTVEKFCKFSGMELATKKCKSLYYTYTDRTRNTLNINFNINNEIIPQISLFSYIENLGIPIACNRAIKKKHSRLIINEIKNQITKIMESPLKITQKIDCIKRLITPKFDYILLNSVCPLNELKEIDKYIRGWINKLCKSKGIPINYFYTNWRYGGLGMKSLYERYQILTIRNYIAMKYSKENIIRKFTNQMEKDEIDYRGLIKDGESPYLNFRFDDQNNLMQTRRNKEHCLFIETLKSLSNLQIIFIIDKKNESIKLGDFKDEIVEQNVESDKILEQLNQLICVRHRNALISSDFKGHTFNTLIDSKTSNYFFTQCKYPISDTLAKFVILSRTNNLSTGEILHKNKPEVFDGKCHRCHSNLNDSLMHRLNGCHIIKSWFTPRHNAILKEVIKSIKEKDRENKLIINYDKPIKKNQLRLPERSKRLKPDAWFFTDNILNIIEVNCPNGSLKDTDEGKINSSVIRRQEKLDKYNNLVGDCNNTFNCTTNIYVIIVSSLGAIPKETYKDIKILLHNDKYKAKLTTSK

SEQ ID NO: 8355 - protein, 1066 aa, Tomocerus qinae
MDISSDSIPPDLDNDICPICDLVLSNFDDSSLSIQCDDCKRWYHLECTDLKHFTIAEIEPMSWICKFCDEGLPDVDAFLRRIRNSESVNDSHITNASDDSNCPICQKTYKGSRGVAIHISKSHPLEYRNSLISQPHKASVMDQQSLNSDVLDQSNMVLSSDKRISKFNDELDKINERLTPLLQELDEILLNELVLRIVCVLRNANEHLPGPRHPARKYYQLRKNKQLVKSMRASFKNSTNPSRKDAKSRKLRREKYNHDLMQYNYFNQRKRCVKSIFNNDDTKCSISIDELHSSFMKRWGTPNDLTRSNYSFVTPEDQLAINEHFDSTLTENDIKISINFIKSDSAMGPDGVLPRSLKATNCEKVLCTLANIMLTHNVIPDCLKEAKTILTFKKKGDPKDISNWRPISISSVIRRVIEKTIERKLRLFVTFNPFQKGFINEPGCHINSSILNGCLKKAKNNKLSFVALILDGHQASYDTTGHIHMEKSLYELPIPDCLRNLTLKLQTENRTRISSNGKLSDLIYLKRGIFQGSSLSPIVFNVSINYVFNEITDPLISEEYGFSLEKNLPNLSILGFVDDLAPLANSRESAVTLFTMTESLLLETGYRINNFKSSAIIIEDGKLSESDLKINNEIHISALKKNDSIKYLGVTFAEEIVLDENKILDKLIDKLNILSSTPMLYSDQKLNIINQYIWPILTYSLQSTPSDKLTAKFINKIDKCIRSTVKEILTIPHDTNNCMIYSSRKCKGLEITCTSWERYLQAFNIINILHKINNPYVSCCRNYAEEIQVCTNKLGFSSDDMNELYQKFKSRKSPYTKKLTQDMREELRAREFVKWTNLPSKGKGVVLFSQCPYANSWMFRKENLTYTEWTSSIKMTANVVANRTTPGRSQNLRCRINSCDEFETLGHILGFCPHGSLLRNSRHHEIRSMIADSFRNKNYNVFEEVFCTSEDGSNRRVDIIAFMDKKGFIVDPTIVFECNENQPLEVHENKKRIYDPCIPYLKSKYNLNDIETIGLMIGARGTITKFFDDFRKRFGFPKELVKSIVISVLKGSCKILQNHLYHYNNP

SEQ ID NO: 8356 - protein, 1079 aa, Tomocerus qinae
MDTSIDDLPLILDNNTCYLCGDSFFNDDDTNSTLYVQCDECDGWYHVLCTELKDLSQGEIDSLSWKCAYCVDNLPDVGAFLQEMHNNDCDNDAPSQLQNQLLSEETILDPNAQPCPICNKLCKGSRGVAIHISKSHPSDYRNSLLTNTKPNLPVQVIANNNTTELTEQSSKSQKNVIKTNSDLSYINDLLTPLIENFDVQLFNEIVAKFIQILKEANDKLPGPVHPARKFYLLRKNKKLFANKRATYKSSTNPERKDSRCRKARFDKYNYELMQYNYFNQRKRCVDSIFKGDSVKCPIAIENLHSSFGNRWSTPNNLVRDHYSTISYEDQHNINKSFNSIISDDEVQSAIKSIKYDSSTGPDEILPRTIKSTKCNSVIATIINIMLRHNIIPECLKEARTILVFKKKGDINDVSNWRPISISSVIRRVIEKVIEKKLRNFVTFNSFQKGFIHEPGCHINSSILNGCLQTAKNGKLTFVALILDGHQAYDTTGHLHMERSLLELLIPDVLRNLTLTLQTNNFTRIYSNSKISEPIFLNRGIFQGSSLSPIVFNISINYVFNEITNPEVADKFGFQIQKNLPKVSLLGFVDDLAPFGNSREAASILFSMTESLLLETGYRINHNKSTAIILENGILSEQDLLLNNGLKIKALKHNEQIKYLGVTFEDEIVINENSILKKLNDKLNILTSTPMLQSDQKINILNQYIWPILTYFLQTTPIYKLNQSFMKKIDKSIRSTVKEILSIPHDTNNHMLYSPRKFKGLGITCAYWEAYLQSFNITCILESIKNPFVSACRNYKKEKDLCISRLGFTSQDIQNIYQKFKIRESEYKKKVTQDMRSELKLREFESWKLLPQKGKGVALFNQCSYANFWMFNKEQLTYSEWTTSIKMTANVVAARAVPGRSQNNRCRINTCNEIETLGHILGFCDHGSLLRNTRHHEIRSMIADSFRKKGFSVHEEVHCIAENGSNRRIDMIAIFEKTGYIVDPTIQFETNENQPKDTHLNKKLIYDPCIPYLKRKYDLKVIETIGLMIGARGTITSFFEDFRKRFSFPKDLTKNIVVSVLRGSCKIIHNHLNYNKTNLK

SEQ ID NO: 8357 - protein, 1153 aa, Nylanderia fulva
MENIGEASEAAGFENVPGGPVAACVANRRGDVNGARVPGAPPDMRWEPLPLRVTQSYDIQGSVETAIICPKCSENGLNISCLGSGQLNKHVLEEHPSVSLNWSCDKCNKSFPKMHAWRCHYAKCKGRKLANPLATFTCEKCQEKFTSQIGLSQHERHAHPNLRNAKRAAEANAATGQGGRRPTVWTDDELDELREREREFANERFINIKLMEFFPGRTNKQISDARRRLRAMELASQSPQPEDAAIAGPSQDAAHSQSQKSMESQSGSVAVLNSPLREIAPELLEDQWKPRISAELRVEYEVPRKWSAWSTEQLHESEVSQRDLDTLYERLVADLSDTDPGRNERAKRPKVSERKRKRRKAGTRPNRAQRRRYAFAKCQELMNKCPKRLADVVAANDLSLMQIRETPDTNDTKDLYLGLWGTAGPEQAPLTQVVPTVEVGRILSPITPGEIKSKIRKIPNSSAAGVDGLTKAHIKYDGLSVVLAKLFNLLLVNEAYPSAWKINRTTLKPGKDTRNIKNWRPITIASMISRIYSSLLDRRIRGVISQTERQKGFTEENGCFANVHLLGLAITEAKAQGGIFTVLDVSKAFDTVPHAAIKVALERKGIPPLVADYIAKSYIDCHTTIKTQDGVVAVQLKRGVKQGDPLSPLLFNLVVEPIIEAVQDTTLGIKVEGHNLAAMAFADDIVLLASNKEAANTQLRMVHEQLRNRGMSLSIDKCSAFEYVPRHKTWYTRDPGLHLRDEPVPHNEPGETFKYLGAKLTPWKGLMEGFEVETFQDIINRVKTLPIKPMQKIELLKTYLLPRFTYGLIVRPPSNETLKAIDVVIRDGAKRILHLHETTSSAFLYTPKREGGLGLLEVRKQVLVAALRNGVKAMQSADKIVRDSFENDRTRKKYAGYAAALRLQWPLSIQQIDQYKVRMRREYREQLSQQVAQGQGSVDFAYEPICNAWLSRSDLMKSSRIIDAIKLRTNTYPTRVVMSRAHDNVDTTCRACGDHRETLGHILGQCRTTKPKRIKRHNEIVHLLKERLAANDQVMVEPTIEVSGERFKPDLVIMNEKGIIVLDVTVRYENQDFLQIAAREKVAKYTPVANKLKREFKAKSARVAAIVVGSRGALPQSTVHELKQLKIKRTDWLTMSLIALRSSIEMINAFMDA

SEQ ID NO: 8358 - protein, 1157 aa, Nylanderia fulva
MENIGEASEAAGFENVPGGPVAACVANRRGDVNGARVPGAPPDMRWEPLPLRVTQSYDIQGSVETAIICPKCSENGLNISCLGSGQLNKHVLEEHPSVSLNWSCDKCNKSFPKMHAWRCHYAKCKGRKLANPLATFTCEKCQEKFTSQIGLSQHERHAHPNLRNAKRAAEANAATGQGGRRPTVWTDDELDELREREREFANERFINIKLMEFFPGRTNKQISDARRRLRAMELASQSPQPEDAAIAGPSQDAAHSQSQKSMESQSGSVAVLNSPLREIAPELLEDQWKPRISAELRVEYEVPRKWSAWSTELSQLHESEVSQRDLDTLYERLVADLSDTDPGRNERAKRPKVSERRRRRRKAGTRPNRAQRRRYAFAKCQELMNKCPKRLADVVAANDLSLMQIRETPDTNDTKDLYLGLWGTAGPEQAPLTQVVPTVEVGRILSPITPGEIKSKIRKIPNSSAAGVDGLTKAHIKYDGLSVVLAKLFNLLLVNEAYPSAWKINRTTLIPKPGKDTRNIKNWRPITIASMISRIYSSLLDRRIRGVISQTERQKGFTEENGCFANVHLLGLAITEAKAQGGIFTVLDVSKAFDTVPHAAIKVALERKGIPPLVADYIAKSYIDCHTTIKTQDGVVAVQLKRGVKQGDPLSPLLFNLVVEPIIEAVQDTTLGIKVEGHNLAAMAFADDIVLLASNKEAANTQLRMVHEQLRNRGMSLSIDKCSAFEYVPRHKTWYTRDPGLHLRDEPVPHNEPGETFKYLGAKLTPWKGLMEGFEVETFQDIINRVKTLPIKPMQKIELLKTYLLPRFTYGLIVRPPSNETLKAIDVVIRDGAKRILHLHETTSSAFLYTPKREGGLGLLEVRKQVLVAALRNGVKAMQSADKIVRDSFENDRTRKKYAGYAAALRLQWPLSIQQIDQYKVRMRREYREQLSQQVAQGQGSVDFAYEPICNAWLSRSDLMKSSRIIDAIKLRTNTYPTRVVMSRAHDNVDTTCRACGDHRETLGHILGQCRTTKPKRIKRHNEIVHLLKERLAANDQVMVEPTIEVSGERFKPDLVIMNEKGIIVLDVTVRYENQDFLQIAAREKVAKYTPVANKLKREFKAKSARVAAIVVGSRGALPQSTVHELKQLKIKRTDWLTMSLIALRSSIEMINAFMDA

SEQ ID NO: 8359 - protein, 931 aa, Leptotrombidium pallidum
MRLVHKDRFDEVCVLPESKNHNWVLEELILLRQAECLVRASGQTYRRKWVYHKFLELTGSTEATYRYPQVVSMLKSKRYGKVDDRAYVACQVQNTFQPTQVSTESSKREEELVSYITSDWNALISKKVITADTLDLLWETYSDNHEFLICKLYDLILGICSKEGKVRIRRQQHKFIGRLSRMKPFLNNSRDRKRAEYKKVQQLWIKNRRACYQYVMKGSKETKDPVDMHDFHAFWKGVFSGTSSAVVEDRTDESTIVVPTVRRDCSIAFKCLGLEEIRVAVRRGKRKAKGLDGIAGEELGRLPPRLLRLFFHLVMRFGYVPPAFKANRTVLIPKGEISMDPAAWRPITVASSLLRTLHCILAKRLSRVIQFHPRQKGFVQGDGLLANVQLLDYLLKRNRSMYLVSLDVSKAFDSVKWTSVEAALQTFGVPASMIRYINCTYRGSTTILEVGGKRSDVISLSAGVKQGDPLSPLIFNMVVDNLMYSLPTAPGLQVGRKRLNCLAFADDLVLAAETRVGLQALVEAATKFYQKQGLTLNAKKSVFLGRIYQGKRKTTRVDSETFCINGTPVPRLKRGGFLRYLGVNFSYDGKQVPGLQGFSSGIEKIERAPLKPDQKVYLLKCHLLPQVLFAVTLGKSTREILEKCDTLVRRCVKKILHLPDWTPNAFFHTPVRKGGLGFPMLSAQVPLSLRGRLLKFQKSTDTVLKEYSETPEYEGLLSKLQSMYPEGVKNKNDLDELSFRSWQATQNGKDAQAFADDAPGNQWLSGANSRVGGSEFVRFVQLRTNTLYVLANAHRGRPLPSCRACKQPGEFETLAHVLQTCRTTHLPRLQRHDKLVETCVTEWKRLGYLVYKERTFTVDGTHYRPDVVMIKGKRIYIIDFAVPIESSVSFYASYNMKVQKYRGAIPKDLVRETFKLPDAVVSYRAFIVGAK

SEQ ID NO: 8360 - protein, 1049 aa, Hycleus cichorii
MERVVLAEVSLGGRMNYKRLIEITGLTHEQLRRVREKSAYKDLLSRQQSNLPSMSLAGPSSRPDELSNFPSTQFDNRNLITDSCVVEDTNIDTRLVARDLQRESLTRIRLTDTDIRSFATDSCLIENSTIDTQAEAWELRREEPNLTAPPRTPVSRSRAASLQNQIHDGFHQAPTSNMPQPIVNVRGFIADAASKFKNSDPGLYRLANAALIEPDEILLGILDDWIASRFSLGRRGPYQRAASVVRPAYGVQRAGSGKRVENYKKAQDLFRKNRRMLTEIIITGRPLDGPRDAPDMNDIEKLYGDLFETVEVMDEAPINNIPETICLNQPISEEDIANAKQGWNCSAPGVDGVSVRDVLRCPNDVLCVLFNVVIFRNCHPTSWRTMRTTLIPKSGDLKSPSNWRPISVGSGLQRLLHRVLFHQLSRVITLHESQRGFTNLDGTLANTIILNQYIRERTSKALPFNVVSLDVRKAFDTVLHASIKGAFQRRGLSGSYIEYILETLDNSSTVIKLGNLRSRPIRLLRGVRQGDPLSPLLFNLVLDDLLRKLDDTSLGGLVDGEHRCAGLAFADDLVLIADTKKDMHSLLSTCVEFFSNQGMSLNIEKCHAISATSVGGKTLPTSSPTFYVQGKSIPMILQNNSFRYLGHSFDSKGILKPCLPNLEIWLRRLCSSPLKPDQKFLLLKQFIIPRLLYGLQNPKVTSKLLKDADRLIRIAAKRFLHLNIHTPDAALYAKIRHGGLGMMELSSVIPDIMMRRINNLREANNDDILTCVLRSPQIANLLDRLNSMLGVLSPELKWRERLATGVLTKGLEAAVEDAASRMWIDRKPFGWTGKDYVKAVQLRTANLPTRAIPSNPPNQRRCRGGCLNDETLAHVLQICPVTHGARIKRHDEIVKKLVTHCRRKRFDFECEPHLRHNDGTLFKPDIAVHLRDGSTVISDVQVTWASDTTLKSVWERKRKVYDCIKFRQAASKVWPNRNLTFAPVIIEARGIWPKTNERAVNYLKIDSRLKQSCVHSAIKWAATIHRLFTRSVWRTGPGPPGGFFGRLRF

SEQ ID NO: 8361 - protein, 1297 aa, Hycleus cichorii
MASGAREHGPGPSRTQQGINQQEDDPAAGAGETTLANDDGSVQTSASSRFNLRSRNPVNYVDDGRDITTAASGASENNCAQTKIKYSAATRAYHLRSQKTQGGLDSSNYLLKGAERSSFAGIPKSAVDANADSDVEYDLNNDCVSDDDSEGSSKNLPTIGVAGAASSTAHDDLRCDMCGKYFKTRSGITRHWKRPCERRTKCLYCNLSFPTYSGVKQHEKFAHLESYRSAALSRAVEVCVVCDSAFASFAGLRQHHQKRHPNIPLEGELKLMERVAAVEIRFDGKINYKNFIELTGLTHEQLRRMRAKQTYKEILSKLLRTPQLMNAADPVPSQAICVPSMTEPCVPSPSANIEEIDETIPVHNVQSEDDLRSTLDPIDVQADISPISSRLSRIIESNEQVSLRETNSSQMSDNPRRSTIRVSRKSISRRCLDDCIASAVSKFENSDPNLSSLAQAALTESDDILLNKLDEYILTRFSSNRRRPLRRNFVSEVRAYGVSHPGSGRRVERYKKAQDLFKKNRRMLTDVILSGRSFDGPRDLPDIGAVEDLYGNIYESVEPSDDVPIDTCSVITFLNQPILEDDIANAKEGWKCSAPGLDGVGVQDVIRCPNDTLAALFNIIISRNCHPTSWLTMRTTLIPKGGDLKSPSNWRPISVGSSLQRLLHRVLFHRLSSVVELHHNQRGFVNLDGTLANTLILDQYIKMKLSACQPYNIVSLDVRKAFDTISHEAIKNSIAGRGLRGTIIDYVLQTLDNSSTIIRVGNLKTRPIKIRRGVRQGDPLSPLLFNMVLDGLLRELDDTGLGGLLGGELRCAGLAFADDLVLMADTKDNMSTLLSNCVRFFSQRGMSLNIDKCHAISTSRVDGRVLPFSTPTFYIQGKAIPMVLQTNSFRYLGHDFDSRGALKPSLPNLEIWMRRLCSSPLKPDQKLVLLKQFIVPKLLYYLQNPRITSKVLKDSDRLIRLAAKKFLHLNIHTPDAALYAKIRNGGVGLMELSSAIPDIMMRRINNLNEVSDDRILSHVLRSPQVRSFIEKLNMMLGVMTPEMKWRERLASSPLIKGLEAAVEDSVSRSWIDRKPFGWTGKDYVKAVQLRTANLPTRAIPSNPPNQRRCRGGCPNDETLAHVLQVCPVTHGARIKRHDEIVSKLVQNCRRKRLETEYEPRIRHSDGTLYKPDIAVHLRDGSTVISDVQVTWASDTTLAQVWDRKRKVYDCPKFRQAALRIWPNRRLSFAPIVIEARGIWPRVNEPAVQFLKINKQLKASCVHSAIKWAATIHRLFTRSVWRTGPGPPRGFFRRLETS

SEQ ID NO: 8362 - protein, 861 aa, Araneus ventricosus
MVRGARSPSRPLKTTLSMSGVLVSFERLAQLGQFWPLCHKTPITHSPSEFRPDFYRQCEDGRVPLLDTPFTVKEVKVKLQNAANTSPGPDRITYADWKTIPASVKFLVTVFNACVHFQRIPPSWKTSTTVLLPKSGDPNIPNNWRPIALSSTMYKMFTKCLAARLSAWCERYDVLSKCQKGFTPHDGVIEHNYVLKNFLDSARRDKTDVCIAWLDVTNAFGSIPHEAIFEMLSRSGAGLPFTELIRDIYSNSSTKILSDGGLTRDIPILSGVKQGCPISGIIFDMCIDPVIRGVQAENQSHKVLAFADDLCLLANSPEELQLSLSFVNASLKRLGLALNPSKSVALYVSGRTPVGVRNSPFFIDNAQIRNIEEGDFHKFLGKPVGFNPCPDYKYLSDLAIIATRLLESCLAPWQRIAALKTFFFPALQFPMRNAQFDKEKWAEIDAMIRPEIKNTLGLPERACNDYLYASRKVGAVGLPIAAEDADLHRIDTAFKLLTSKDPHVAELALAELLKTVKFRLRKPSPSDSDLGDFMTGEARAAQFDNSNLWTCARRASARQGIRWEFVDNTPRLLFGDLTLKSANRKKLLFSLRDRLRLLRGDSLLARPDQGKVMEVVSQSAASSHFMANGDYTRFSEWRFVHKARTNTLPLNGNKPWDKTSNTACRGCDECDLETLAHVLNHCKGRSRGWQLRHNSISDRVKNALLFDGCTLISENQPIGPDGQRPDLVFRKRNEVYIIDITCPFENRLEAFTAARNHKIEKYASLVPFFESMGLKATIIPILVGALGSWDPKNDSFLRKHMAKSFLHKLQRLCVSETIRWSRDIYVEHVTGVRQFSEDSPPIETITPPVPDTNYELIGASQ

SEQ ID NO: 8363 - protein, 1323 aa, Araneus ventricosus
MCQSCNFVEIMPGGLNNHKKRCPRSRKNSSNAIEFHCPTSQNLTPPPSGDPRTNSTTSHPNTRPPSPPHECRGCKTKFTFKAHFDLHCAHCPAVLKKTEVKNKDSTRTPLNKCNKCPFVGKNSDALTLHTNVSHRSNNSASSKQQTKSENSKTPGRNKKSFSFDVSFSNNSVMNGNNSSSEVNNRTRTAEEDVDNPNPHLSQETDNQSQDSQTRTDPPPASIPNFNCRTGNAINIIFPISGCLPCTESGCGFKSNGTTYNICKRSLKRHLDTHHRIQIKACYFWCYICQARITRHPAAHGCLKNGQLLLPPDVPFEWRCTTCNLSFPSEVGLKNHSLAHKLRDINNSGAPLTLIKPKSIPRRARFALVTPEPGDESLPVPGAPTDGSDVNILTPPATNPDEDNSILRSFIVEIAALLESEATDEAFNYFCVIVEQAIAEIQSSVLNGPPRDFSNAPPAPPVNVADPKTIQILFKKNPRKAIRAITKKDGDRCKIPVSVLEPHFSTVWGPSNFQPDFFKQCEEERVPLLDTPFTVREEMTKLKNAENTSPGPDRIAYSEWKSIPSSVKFLTSVFNACVHFRRIPPSWKTSTTVILPKSGDPSLPNNWRPIALSATIYKMFTKCLAARLSTWCERYDVLSNCQKGFTPHDGVIEHNYVLKNFLDSARRNHTDVCIAWLDVTNAFGSIPHEAIFEMLTRSGAGLPFTDLIRDIYANSTTKILSDGGLSRDIPVQSGVKQGCPISGLLFNLCIDPIIRGVQADSASHKILAFADDICLLANFAEELQLSLSFINAGLKRLGLSLNPSKSVALHVSGKQPVGVRDSPLYIDNNRIRNIAEGEFHKFLGKPVGFNPCPDYKHLSELAEIATLILESSLAPWQRIAALKTFFFPALQFPMRNSQFDKSKWAEIDSLIRPEIKNTLGLPERACNDYLYASRKVGAIGIPIAAEDADIHRVDTAFKLLTSKDPGVSELAFSELSSTVKFRLRKSDITDNDVGSFLSGEAKALQFNNLNLWSCARMASARQGIRWEFVDKSPKLIFGDLVLKTAQRKKILFSLRDRLKLLRGDSLLAKPDQGKVMEVVAQAGASSHFIANGDYTRFSEWRFVHKARTNTLPLNGNSPWDRSGNTGCRRCEECDLETLAHVLNHCKGRSRGWQLRHNSISDRLKQALIFDGCVLIAENQSVGPDGLRPDLVFRKGNEIYIIDVTCPFENRLEAFTDARQLKLDKYAPLIPYFANMGLTASIIPILVGALGSWDPKNNSFLKKHMSRSFRYKFEKLCVSETIRWSRDIYVEHVTGVRQFTENSPLIETITPPVPDVNYELISSSQ

SEQ ID NO: 8364 - protein, 1880 aa, Araneus ventricosus
MSEMTLGVPTDLLSTNDSQQSDTLVVVPYNDTLSPPRIVDCSIRVQDILVSPSPICRRTRRQLQLRQTVNLQTVNDEHDNDIPLDLSPQRTLVTDTPVSALSVECSLDNCTTPLSPSKIDIQILNCAAEIESEFHQQTPSCGINTVSCLTPDELQILRNIKVMESPISLFPAVSEPSASKKETTAHSSSKVEDSSKSPKMNEGETPPAIQISSADSPIHMQQMEYFPFSLRCAFCDLQLSSPTSFAEHVLEIHSGCSESQIGVIQRREVQGPSSPPSGELIQKEETCVSSEEESPSFKCDKCKDKFKNEASLLQHICSPSPSRSWSCVLCNHVAHKRRGLRFHMKSKHSTWKIRTNECGLPVANLTPVSHRTPIAKRVKFSLPKSDGLLPPLTPSSEPSSNVRQQNDLSSHEPPLLPPVETDIPLADFPSLDKQINSSFKCKKCPFVGPSENVLEAHTYDVHSPVFSSSHETIGCSSSPHCETKCDGHCSPTEANTQISPRLQKCPLCSAICLSSVELLTHACGAVGGELDTPADSPNRNCPVCGFVVRAPDKKVDGILRRHVYDKHSCKNCKFVEKSNGELKDHLRHCRSKVPPSGAIPKKSSSSQVNSMSTVQSQIGPRQPAHECENCGLKFTFKNHFELHRKSCLVASKRTNSDSNPSTLPPLNKCKSCPFVGKNSDALLLHMKVAHSSVKTGSLPTQQHTKSTATSTNLPPAEKCSFDIAFSNSLPDTNRDAPDTPPRSQPVGYNPGMNDTPVSQESDLQLSQGHARGDPPPSSIPNETCRIGNAINILFPITGFLQCTEAGCGFKSFGSSYNICKRSLKRHLETNHKLQIRACHFWCFICQGRITRHPAAHGCFKNSALLIPPDRPHDWKCDVCDLSFPSEIGLKNHSLAHKLRNIKNSGAQLTLVKPRSIPRRARFAPVEPEQGDESIPVPGAPGNSESLDILTPPATNSEEDSSILKPYITEIATLLETEATEGSFTYFCSIVDQAVADIQSSVLNGPPRDFTNSAPAPPVNTKDPKSLQILFKKNPRKAVRAITKTDGERCKIPLSTLEDHFTTVWGPSEFCPDFFRQCEEGRVPLLDTPFTVKEVKIKLQNAANTSPGPDRITYADWKTIPASVKFLVTVFNACVHFQRIPPSWKTSTTVLLPKSGDANVPNNWRPIALSSTMYKMFTKCLAARLSAWCERYDVLSKCQKGFTPHDGVIEHNYVLKNFLDSARRDKTDVCIAWLDVTNAFGSIPHDAIFEMLSRSGAGLPFTELIRDIYSNSTTKILSDGGLTRDIPILSGVKQGCPISGIIFDMCIDPVIRGVQAENQSHKVLAFADDLCLLANSPEELQLSLSFVNASLKRLGLSLNPSKSVALHVSGRTPVGVRNSPFFIDNAQIRNIAEGDFHKFLGKPVGFNPCPEYKYLSDLAIIATRLLESCLAPWQRIAALKTFFFPALQFPMRNAQFDKEKWAEIDAMIRPEIKNTLGLPERACNDYLYASRKVGAVGLPIAAEDADLHRIDTAFKLLTSKDPHVADLALAELLKTVKFRLRKPSPSDSDLGEFMSGEARAAQFDNSNLWTCARRASARQGIRWEFVDNSPRLLFGDLTLKSSNRRKLLFSLRDRLRLLRGDSLLARPDQGKVMEVVSQSAASSHFMANGDYTRFSEWRFVHKARTNTLPLNGNKPWDKTSNTACRGCDECDLETLAHVLNHCKGRSRGWQLRHNSISDRVKNALLFDGCTLISENQPIGPDGQRPDLVFRKRNEVYIIDITCPFENRLEAFTAARNHKIEKYASLVPFFENMGLKATIVPILVGALGSWDPKNDSFLRKHMAKSFLHKLQRLCVSETIRWSRDIYVEHVTGVRQFSENNPPIETVTPPVPDINYELIGASQ

SEQ ID NO: 8365 - protein, 957 aa, Hyalomma asiaticum
MAATPFSHQQRAASTSSSSPHPFGNSNHHRRPNSGTPRWQESSFTTQGDPTRRGPEGSAWILLEDAAELRTLSRLPVSAEGWARFEAILDRAEAAIVEHLRLPNRGSRQPPRREVNPDNPQQIQSLYRRNRRRAVRLIAEGPSQLCPINPGTLHSYYSTLWSTAVVDTTLLRTRTPTNEELDTCPFLPDEVAAKLRRCESTAPGEDRLTYHHWRQVDPEGRFLAAVFNVCLLYRRTPLSWKSTRTILIHKKGDRQDPTNWRPIALGRTIAKLYAGCLTTRLQRWLGDHAVLSRCQKGFLPHDGVFEHNFVLQGRLDDARTGGGELCVGFLDYANAFGSVAHQALVDAVRGAGAGEAFTAIVEELYRANTTCVVAAEGITEPITIGAGLRQGCPLSGLLFNLVVDPIIRAVQGGDRQHNILAYADDLTLLAEDPATLQRRLNVVTALSAQLGLRLKPAKCRTLHLSGSYPVGTRPTTFTIGSNQIPALADYEGHEFLGRPVGFRVLPDQTTVDEAIHLGRKLLSSMLTPWQRLDAIKTFLFPALNFAMRVGLASKGEWHRLDEELRPLIKKTLYVPARASNEYVYGSALAGTAGIPIAAELSDICRVDGAFKLLTSADLEVRERAREELGRVVSRRLRRPAETEDEEAYLSGDTEGDFRQTATQLQSVWTEARKASRRLSVAWELFDQGARITCGEASVSVRSRNKLIRTLRDNLCRDRDRTLQGKPNQGKVMECVAADPANSHFMRSGRYTRFMDWRFIHRARLNLLPLNGARTWAPAAEKRCRRCGYAEETLPHVLCHCMRQSRAMTERHNSIVARVKKAALGRFTVIGENQVVGLPSLRPDLVLARGEEALILDVCCPFENRAQAFQEARRTKEEKYAPLQRHLLQRFQRVSVDAIIVGCLGTWHPVNDRVVRRLCSRSYLRTMKRLCERRSRFLYPDLPWAHWTVFLGWTFKER

SEQ ID NO: 8366 - protein, 1184 aa, Dermacentor silvarum
MDESEDDGDPDSTPEQGRQPTRDGDTLTVHLPVPHTFRCCERGCRAAYGAAQWTSRRQSLQRHLEQEHNCRIRRTVNLCSICGATLGLRPSSHACLAAAGVSAPPVSQPHQCGQCSMSFPTRMGMSNHEQWHSRQAALAARSNLAVGAPTTSNDGAPIQDDSGTPIPEQDSTRGSPGPTGEVAERTADQSADQPADQEPLVEALRQDSSGESGEDSSWQAPTLAEQDTASSPLPSTPATPADQASPENQMAGVEGPAAGGEPPPESTGSQEGGDSQVYATQEETTGTMGPEDSTWVLREETAELRELSRLPESAGDWARFENIIDRAIAAAIKHLRLPEGGSRQSRRREVNPDNPQQIQSLYRRNRRRAVRLIAEGPSQLCPIDPDALQAHYTSLWSPAAVDTSLLRSRTATTEEMDLCPFTPNEVAAKLRKCESTAPGGDRLTYHHWRQVDPEGRFLAAVFNICLRHRRTPLSWKSTRTILIYKKGDRGDPTNWRPIALGRTIAKLYAGCLTTRLQRWLGDHAVLSRCQKGFLPHDGVFEHNFVLQGRLDDARTGGGELCVGFLDFANAFGSVAHQALVDAVRGAGAGEAFTAIVEELYCANTTSVVAAAGTTEPIAIGAGLRQGCPLSGLLFNLVVDPVIRAVQGGDRQHNILAYADDLTLLAADPITLQRRLDTVTTLSAQLGLRLNASKCRSLHLSGRHPVGTRPTTFIVDGDPIPALGDFEGHRFLGRPVGFRVLPDNTTVDEAIHLGRKLLSSMLAPWQRLDAIKTFLYPALNFAMRVGVASKGEWQRLDEELRPLIKKTLYVPARASNEYLHGSTQAGTAGIPLAAELSDICRVDGAFKLLTSTDLEVRQRARDELQQVVTRRLRRPADTEDTEAYLSGETEGEFRQTSTQLQSVWTEARKASRRLSIAWEITDHGARITCGEASVSTRNRHKLIRTIRALLSKDRDSTLHEKPNQGKAMVCVAADLANAHFMRSGRYTRFTDWRFVHRARLNLLPLNATRVWAPAADKRCRRCGYGEETLPHVLCHCMRQSRVMTERHNAIVDRVKKAALARFTVIAENQVVGNTSLKPDLVLARGEEALILDVCCPFENRLQAFQDARKAKEEKYAPVQRHLLRRFQRVTVDAVVVGCLGTWDPGNDRVLRRICSKEYLRTMKRLCVSDTIRFSTQIYKGHIGSA

SEQ ID NO: 8367 - protein, 1063 aa, Dermacentor silvarum
MSFPTRMGMSNHEQWHRTQAALAARSNPTAGAPTTSNDGAPTQDDSGNPLPEQDSTRASPGPSGEVADQEPVDEALRQDSSGEADEDPPWQAPTLADTASSPLPETPATPTDQTSPENQLAGMEGPAASGEPSPEPAGSQESGDSQAYATQEEAAGTMGPEDSAWMLREETAELRELRRLPESAGDWARFENIIDRAIAAATKHLRLPEGGSRQLRRREVNPDNPQQIQTLYRRNRRRAVRLITEGPSQLCPINPDALQAHYTSLWSPAAVDTSLLRSRTAATEEMDLCPFTPDEVAAKLRKCESTAPGEDRLTYHHWRQVDPEGRFLAAVFNICLKYRRTPLSWKSTRTILIYKKGDPGDLTNWRPIALGRTIAKLYAGCLTTRLQRWLGDHAVLSRCQKGFLPHDGVFEHNFVLQGRLDDARTGGGELCVGFLDFANAFGSVAHQALVDAVRGAGAGEAFAAIVEELYRANTTSVVAAAGTTEPIAIGAGLRQGCPLSGLLFNLVVDPVIRAVQGGDRQHNILAYADDLTLLAADPTTLQRRMDMVATLSDRLGLRLNASKCRSLHLSGRHPVGTRPSTFTVGGDPIPALGDFEGHRFLGRPVGFRVLSDNTTVDEAIHLGRKLLSSMLAPWQRLDAIKTFLYPALNFAMRVGVASKGEWQRLDEELRPLIKKTLYVPARASNEYLHGSTQAGTAGIPLAAELSDICRVDGAFKLLTSTDSEVRQRARDELQQVVTRRLRRPADTEDMEVYLSGETEGEFRQTATQLQSVWTEARKASRRLSIAWEITDQGARITCGEASVSARNRHKLTRTIRALLSKDRDSTLHGKPNQGKAMVCVAADLANAHFMRSGRYTRFTDWRFIHRARLNLLPLNATRVWAPAADKRCRRCGYAEETLPHVLCHCMRQSRVMTERHNAIVDRVKKAALVRFTVIAENQVVGNTSLKPDPGAGPWGGSSHPGRLLPIREPAAGVPGRPEGQGGKVRPSTTTSPPAVPASDGGCRSGWLPWHLGPGERSCPPQDMQQGVPADHEKTLCERHDPLLDADIQRPHRLSLMYLLFIEK

SEQ ID NO: 8368 - protein, 1204 aa, Rhipicephalus microplus
MASGGPTLDSSEDDGDPPWQERQPVRDGSTLVVYFPVPPAIECCELGCGATYNPATWTSRRQSLERHLEAEHGARITSTSYICSLCGDVLGQRPMAHVNKCLANVPTAAPPPRFRHQCDKCPRSFPARKGLHNHQQWHLREEAKQARQNVAAGAPPRQPPTSATGSTSPHQQASPGRAATPGTPSVVAPSPSQSGAGSSPGETDQQQRATASPTQSAAAGPSPQEVLPTPLPGGVEDAAGSPADHQAARPSSPSDEYCSPAEGELPEQTAGRAIGSPPPPSPEAMTPRRVNRHSGSTYGTQEEMADTAGPESAWVLAEMTAELRALSRLPVSEEEWARFESILDRAEAAITDHLRLPNRDSRQTPPRREINPDNPSQIQALYRRNRRRAVRLIAEGPSQLCPIDPGTLQSYYTRLWSPAAVDTTILRTRAPTNEELDLCPFLDDEVAAKLRRCESTAPGEDRLTYHHWRQVDPEGRYLAAVFNVCLKYRRTPRSWKSTRTILIHKKGDREDPTNWRPIALGRTIAKLYAGCLTTRLQRWLGDHAVLSRCQKGFLPHDGVFEHNFVLQGRLDDARTGGGELCVGFLDYANAFGSVAHEALVDAVRGAGAGEPFAEIVEELYRANTTCVVAADGTTEPIAIGAGLRQGCPLSGLLFNLVVDPIIRAVQGGDRQHNILAYADDLTLLAGDPATLQRRLNVVTALSDPLGLRLKPAKCRTLHLSGRYPVGTRPTTFTVGSVPVPALADFEGHRFLGRPVGFRVLPDQTTVDEAIHLGRRLLSSMLTPWQRLDSIKTFLYPALNFAMRVGLASKGEWHRLDEELRPLIKKTLYVPARASNEYVYGSAHAGTAGIPLAAELSDICRVDGAFKLLSSTDLEVRERAREELNRVVSRRLRRPADTDDTEAYLSGETEGDFRQTATQLQSVWTEARKASRRLSVAWELLDQGARITCGEATVSARNRNKLIKILRAILNQDRDRSLQEKPSQGKAMACVAADPASFHFMRSGRYTRFKEWRFIHRARLNLLPLNGTRTWVPAADKRCRRCGYGEETLPHVLCHCMRQSRAMTERHNAIVARLKKAALERFTVIGENQQVGVPGLRPDLVLARGEEALILDVCCPFDNRMQAFQEARRVKEEKYAPLQRHLLQRFQRVSVDAIVVGCLGSWDPANDRVCRRFCSRSYLRTMKRLCVSDTIAASTDIYRGHIGVL

SEQ ID NO: 8369 - protein, 1204 aa, Rhipicephalus annulatus
MASGGPTLDTSEDDGDPPWQERQPVRNGSTLVVYLPVPPAIECCELGCGATYNPAAWTSRRQSLERHLEAEHGTRITSTSYICSLCGDVLGQRPMAHVNKCLANVPTTAPSQCFRHQCEKCPRSFPSRKGLHNHQQWHLREEAKQARQNVAAGAPPQQPPTSAIGSTIPHQQASPGRAATPGTPSVVAPSPLQSGAGSSPGETEQQQQATASSTQNATAGPSTQEVLPTPLPSGVEDAAGSPADHQEARPSPPSEEYCSPAEGEPPEQTAGRAIGNPPPPSPEAMTPHIVDRHSSSTYGTREEAADTAGPESAWVLAEMTAELRALSRLPVSEEEWARFETILDRAEAAITDHLRLPNRDSRQTPSRREINPDNPSQIQALYRRNRRRAVRLIVEGPSQLCPIDPGTLHGYFTRLWSPVAVDTTILRTRAPTNEELDLCPFLDEEVAAKLRRCESTAPGEDRLTYNHWRQVDPEGRYLAAVFNVCLKYRRTPRSWKSTRTILIHKKGDREDPTNWRPIALGRTIAKLYAGCLTTRLQRWLGDHAVLSRCQKGFLPHDGVFEHNFVLQGRLDDARTGGGELCVGFLDYANAFGSVAHEALVDAVRGAGAGEPFAEIVEELYRANTTCVVAADGTTEPIAIGAGLRQGCPLSGLLFNLVVDPIIRAVQGDDRQHNILAYADDLTLLAGDPATLQRHLNVVTALSDPLGLRLKPAKCRTLHLSGRYPVGTRPTTFTVGSVPVPALADFEEHRFLGRPVGFRVLPDQTTVDEAIHLGRRLLSSMLTPWQRLDSIKTFLYPALNFAMRVGLASKGEWHRLDEELRPLIKKTLYVPARASNEYVYGSAQAGTAGIPLAAELSDICRVDGAFKLLSSTDLEVRERAREELNRVVSRRLRRPADTDDTEAYLSGETEGDFRQTATQLQSVWTEARKASRRLSVAWELLDQGVRITCGEATVSARNRNKLIKILRAILNQDRDRSLQEKPSQGKTMACVAADPASFHFMRSGRYTRFKEWRFIHRARLNLLPLNGTRTWVPAADKRCRRCGYEEETLPHVLCHCMRQSRAMTERHNAIVARLKKAALERFTVIGENQQVGVPGLRPDLVLARGEEALILDVCCPFDNRLQAFQEARRVKEEKYAPLKRHLLQRFQRVSVDAIIVGCLGSWDPANDRVCRRICSKNYLRTMKRLCVSDTIAASTDIYRGHIGVL

SEQ ID NO: 8370 - protein, 898 aa, Rhipicephalus sanguineus
MGPEGGAWVLAEETAELRALSRLPVADEQWARFEEILDRAEAAVTEHLRLPNRGSRQTPPRREINPDNAALIQGLYRRNRRRAVRLIAEGPSQLCPIDPGTLHAFYTRLWSPAAVDTTLLRSRAPTNEKLDTCPFLPDEVAAKLRRCESTAPGEDHLTYHHWRQVDPDGRYLAAVFNVCLLYRRTPQSWKSTRTILIHKKGDREDPTNWRPIALGRTIAKLYAGCLTTRLQRWLGDHAVLSRCQKGFLPHDGVFEHNFVLQGRLDDARTGGEELCVGFLDYANAFGSVAHQALVDAVRGAGAGEAFSEIVEELYRANTTCVVAAAGTTEPIPIGAGLRQGCPLSGLLFNLVVDPIIRAVQGGDKQHNILAYADDLTLLAKDPATLQRRLNMVTALSDRLGLRLKPAKCRTLHLSGRYPVGTRPTTFTVGSDPVPALADFEGHRFLGRPVGFRVLPDQTTVDEAIHLGRKLLSSMLTPWQRLDAIKTFLYPALNFAMRVGLASKGEWHRLDEELRPLIKKTLYVPARASNEYVYGSARAGTAGIPLAAELSDICRVDGAFKLLSSTDPEVRERAREELHRVVSRRLRREAETEDIEAYLSGDTEGDFRQTATQLQSVWTEARKASRRLTVAWEMFEQGARITCGEATVSARNRNKLIKTLRAILNQGRDRSLQDKPNQGKGMACVAADPANSHFMRSGRYTRFKEWRFIHRARLNLLPLNGTRTWVPAADKRCRRCGYVEETLPLVLCHCMRQSRAMTERHNAIVARLKKAALGRFTVIGENQQVGVPGLRPDLVLARGEEALILDVCCPFDNRMQAFQEARRIKEEKYAPLQQHLLRRFQRVSVEAIVVGCLGSWDPGNDRVCRRLCSKNYLRTMKRLCVSDTVAASTNIYRSHIGLM

SEQ ID NO: 8371 - protein, 1087 aa, Dermacentor silvarum
MDDSEDDGDPDPTPEQGRQPTRDGDTLTVYFPVPHTFRCRERGCRAAYGAAQWTSRRQSLQRHLEQQHNCRIRRTINRCSICGATLGLRASTHACLAATSVSAAPVSQPHQCGQCPMSFPTRMGMSNHEQWHRMQAALAARSNPTAGAPTTSNDGAPAQDDSGTPLPEQDSTRASPGPSGEVAERVADQEPADEALRQDSSGEADEDPPWQAPTLADTASSPLPETPATPTDQTSPENQLAGMEGPAASGEPSPEPAGSQESGDSQAYATQEEAAGTMGPEDSAWMLREETAELRELRRLPESAGDWARFENIIDRAIAAATKHLRLPEGGSRQFRRREVNPDNPQQIQTLYRRNRRRVVRLITEGPSQLCPINPDALQAHYTSLWSPAAVDTSLLRSRTAATEEMDLCPFTPDEVAAKLRKCESTAPGEDRLTYHHWRQVDPEGRFLAAVFNICLKYRRTPLSWKSTRTILIYKKGDPEDPTNWRPIALGRTIAKLYAGCLTTRLQRWLGDHAVLSRCQKGFLPHDGVFEHNFVLQGRLDDARTGGGELCVGFLDFANAFGSVAHQALVDAVRGAGAGEAFAAIVEELYRANTTSVVAAAGTTEPIAIGAGLRQGCPLSGLLFNLVVDPVIRAVQGGDRQHNILAYADDLTLLAADPTTLQRRMDMVATLSDRLGLRLNASKCRSLHLSGRHPVGTRPTTFTVSGDPIPALGDFEGHRFLGRPVGFRVLSDNTTVDEAIHLGRKLLSSMLAPWQRLDAIKTFLYPALNFAMRVGVASKGEWQRLDEELRPLIKKTLYVPARASNEYLHGSTQAGTAGIPLAAELSDICRVDGAFKLLTSTDSEVRQRARDELQQVVTRRLRRPADTEDMEVYLSGETEGEFRQTATQLQSVWTEAGKASRRLSIAWEITDQGARITCGEASVSARNRHKLTRTIRALLSKDRDSTLHGKPNQGKAMVCVAADLANAHFMRSGRYTRFTDWRFIHRARLNLLPLNATRVWAPAADKRCRRCGYAEETLPHVLCHCMRQSRVMTERHNAIVDRVKKAALVRFTVIAENQVVGNTSLNPDLVLARGEEALILDVCCRKP

SEQ ID NO: 8372 - protein, 1174 aa, Dermacentor silvarum
MDDSEDDGDPDPTPEQGRQPTRDGDTLTVYFPVPHTFRCRERGCRAAYGAAQWTSRRQSLQRHLEQQHNCRIRRTINLCSICGATLGLRASTHACLAATSVSAAPVSQPHQCGQCPMSFPTRMGMSNHEQWHRTQAALAARSNPTAGAPTTSNDGAPTQDDSGTPLPEQDSTRASPGPSGEVAERVADQEPVDEALRQDSSGEADEDPSWQAPTLADTASSPLPETPATPTDQTSPENQLAGMEGPAASGEPSPEPAGSQESGDSQAYATQEEAAGTMGPEDSAWMLREETAELRELRRLPESAGDWARFENIIDRAIAAATKHLRLPEGGSRQFRRREVNPDNPQQIQTLYRRNRRRAVRLITEGPSQLCPINPDALQAHYTSLWSPAAVDTSLLRSRTAATEEMDLCPFTPDEVAAKLRKCESTAPGEDRLTYHHWRQVDPEGRFLAAVFNICLKYRRTPLSWKSTRTILIYKKGDPEDPTNWRPIALGRTIAKLYAGCLTTRLQRWLGDHAVLSRCQKGFLPHDGVFEHNFVLQGRLDDARTGGGELCVGFLDFANAFGSVAHQALVDAVRGAGAGEAFAAIVEELYRANTTSVVAAAGTTEPIAIGAGLRQGCPLSGLLFNLVVDPVIRAVQGGDRQHNILAYADDLTLLAADPTTLQRRMDMVATLSDRLGLRLNASKCRSLHLSGRHPVGTRPTTFTVGGDPIPALGDFEGHRFLGRPVGFRVLSDNTTVDEAIHLGRKLLSSMLAPWQRLDAIKTFLYPALNFAMRVGVASKGEWQRLDEELRPLIKKTLYVPARASNEYLHGSTQAGTAGIPLAAELSDICRVDGAFKLLTSTDSEVRQRARDELQQVVTRRLRRPADTEDMEVYLSGETEGEFRQTATQLQSVWTEARKASRRLSIAWEITDQGARITCGEASVSARNRHKLTRTIRALLSKDRDSTLHGKPNQGKAMVCVAADLANAHFMRSGRYTRFTDWRFIHRARLNLLPLNATRVWAPAADKRCRRCGYAEETLPHVLCHCMRQSRVMTERHNAIVDRVKKAALVRFTVIAENQVVGNTSLKPDLVLARGEEALILDVCCPFENRLQAFQDARKAKEEKYAPVQRHLLRRFQRVTVDAVVVGCLGTWDPGNDRVLRRICSKEYLRTMKRLCVSDTIRFSTQIYKGHIGSA

SEQ ID NO: 8373 - protein, 1240 aa, Hyalomma asiaticum
MPAGASGRGSRGPPGGGDGAHFRQPTRQGDVLTVYFPVPADFECCEPGCRRAYTTVNWTSRRQNLQRHLESDHGARILHVRNVCSVCEQTLSARPLQHACLAGLPAQAPAEDRPRHRCELCDSSFPSRQGLANHTRWHQRQAALQAAQAPPVPVGQPVASPGAASPPAPTDPGPAPSTRIATPTTATSTGAPTALSSTPTDDPTRPEELPDFSSPQASTGGASSPASADLTPASSTRMTRTSGTTTSPRASATTPAALVDDHTQSDGLPDASSPEASTGASEAQVGPTQEQRAALLELLNEEITDEQDPASEADSPDVPASGASQPDAVYPESTAGSQSTTTTTASQQEDDWPLRELTNELITLGRAPVTNQIWAQVEDALDRATALVRDHLQLHDRGPRQTTRRAINPTNPQQIQALYRRNRRQAVRLIAEGPPELCPIQPSMLQDYFTNTWSATPVDTTLLRARTPAPEELDLCPFSADEVAEKLRRCESTAPGEDRLTYHHWRQVDADGRFLAAAFNICVKHRRTPAAWKNTRTILIHKKGDRYDPANWRPIALGRTMAKLYAGCLTTRLQRWIGEHNILSRCQKGFLPYDGVFEHNFVLQGRLDDARTRGGELVVAFLDYANAFGSVAHEALVDAVRGTGAGEPFAAIVRELYSGNTTSVVAEAGVTDPIPIEAGLRQGCPLSGLLFNMVVDPVVRAVQGGDRPHNILAYADDLTVLAEDVDTMQRRLNTVATLSAGLGLRLKPSKCRTLHLSGRCPVGTRPTIFNIGDDQIPALADFEGHRFLGRPVGFRVLPDRTTVNEAIHLGKLLLTSMLTPWQRLDAIKTFLFPAMNFAMRVGVASKGEWQRLDDELRPLIKKTLYLPTRAANDYLYGSSGAGTAGVPLAAELSDIVRVDSAFKLLTSRDGEVRERAMQDLRRIVDRRLRRPAGLEDLEMYLSGDTEGDFRQTATQLQSVWTEARKASRRLSVSWEIFDPGARITCGEASVSQRNRHRLIRTLRALLTTQRDLALQDKPNQGKTMACVAADPANSHFMRSGRYTTFSTWRFVHRARLNLLPLNAARMWGPTDRRCRRCGYVEETLPHVLCHCMRQSQAMTKRHNAIVARVKKAALGRFTVISENQVVGTTNLKPDLVLARGEEALVIDVCCPFENQLQAFERARREKEDKYLPVQQHLLRRFQRVTVDAVVVGCLGTWDVRNDRVLRRLCSRSYLRTLKRLCVSDTVAASAAIYRCHIVTT

SEQ ID NO: 8374 - protein, 1257 aa, Ephydatia muelleri
MERTQPPMLANTPDTQGEGMPSPPPAPLLEETVLRLQRAEEALNKLRNSTVERWEPEPSNLPSPAQENQIEGTTLPPATNTQDEGTIISQHREEALAILGSDNIHLWDPEEEMLSPTLLAGLTTPPTSPLIEAGAEGPHSSPGACADMPASPMAAGDQSVPPLVHVSMPPPSIFRSLLHVPPFIPARPQTDALARESALPTHPSSPRAGGPEGRVADQPPSLVPPRNGRLSIDPDNLDESLRLPFQHDIRPYSGRLLGQFEWVAFEETLNRWSAAIKVAVNIRNQRPPNPTSQWAQRRRREQQSTEPRRNQRASGWARRAAESASIQRQYRANPSACVRRILTDSPPLYCKVAEEEMVAHFTTNYATSPPLNPTPDWLFPPRVSEDEDGDVLSQPFSPAEVVRQFRRMNNTAPGVDGLTYATWRWVDPEGAILANIYNICRINARVPSAWKHSTVTLLHKGGEPAELNNWRTISLQLTVYKLYAAMIAKRIASWATTTSSFSPAQKGFLAYDGCAEHNFLLRSIINDSRREKKNVLLAWLDIKDAFPSVSHQLMLRLMERLGLSGSVLKVVQDIYSHATVAIRTGRESYTPPIPQQRGVKQGCPLSPILFNVVIEGLLRHLSASQEGYHIAGHNINTLAYADDVCIIASNKKGMQSLLDRCAEFGEWSGFRFKAAKCGSMCLVNQAPRIYVDCLFTPHLGGDIIPALTWADRYKYLGCPTGAFRTRDQDLGSIREDLMRDTSAIFKSSLAEWQKLDAFRRFLFPRLSFIFQVIFPGIRWCRQLDTKMRGIIKQGLKLPQRTCSQYLYLPQASGGMGIPNAEDEAHVAKAAQAFKFLGDTRDPVIRAVALQQMRATVAVRARRLDPTKKEDLEEFLNTTAAPGEGRAGDLQSLWSSARAGLANGGATIEISADSAILHTSRLHISWDQRKKAFQALKAEVGARRLRAIKLSKDQGRAFDSLSLHPDSSYFTYTGAFMSFYQYRFAHKARLNLLPVRTVQARCRKLIPSTMCRHCGREQETLAHVINHCNHNLGMVRERHNAVLERVIRAIPAHLGTKQKEQAIPGTTGANRPDLTITSPDGSSLIIVEVTCPFEGSPTALEDAARAKVEKYEPLRQILAQRYSSVEVLPFIVGSLGSWYPPNDAALSRLHIGWKYARLMRRLCVMSAIAGSQYIWYKTMCTQRRVTGSVDGPSVARDGVGEDGTTAGGEVRVRRANLLDDPAVVVAGPVTGGHEETAGASDNRPEAAVASPVGLAASP

SEQ ID NO: 8375 - protein, 837 aa, Cyclina sinensis
MHSDSNRHEELGECEKLLTPEEPEEEFDCAEPRLKEIRDIVKKARTSSAPGPNGVPYRVYKNCPKILLRLWKLLKVFWRKGELCREWLKAEGCFISKEEDSTKLSQFRTISLLNVEGKILLAVLSRRMTSYLLKNKYIDTTVQKGGVPGVSGCIEHTSVITQIIKEARENKGDIAVIWLDLANAYGSVPHQLIQKTLQLYHVPVRFRQMLQHYFDGFKLRFSTRDMTTDWHRLEVGIVTGCTISVVLFSAAMNLIVKSAEKTSRGPKMASGTIQPPTRAFMHDMTITAKSYIEGRWMLQDIGEIIQWARMKFKPEKSRSLVLRKGKMQENARYRIKGQLIPTVKEQPVKCLGKWFRDSLSDKQSIQDTITQMEDWLKLVDKCGLPGKFKAWIYQHGILPRLLWPLLVYSVPLSTAEAMERTINSFLRRSMGVPKSFTSLGLYCTGSKLQMPLKSLTEEYKVTKARQVIMLRDSGDEKVREAGEQVNTGRKWKANKVVSEAEARLRHGDIVGSVAQGRLGFGYITRSRWSKASEKERRTLIQDEVRRMEEETRLTKAVTLKKQGKWLNWEGAQQRKLTWNDIWTMEGDRLSFLLKSVYDVLPSPTNLKTWGLSKGPDCKLCGRPANLEHVLSSCRTALSDGRYRWRHDKVLSSIAEHLDQARRAQKTVSKGPSLISFVRAGQEGKGAKSACGILGTASDWKLEVDLKNQLKFPQEITLTNLRPDMVMWSPSTKQVVMVELTVPWEERIEESFERKLTKYQALTESCVERGWKALCFPVEVGCIGFPAQSLWSTFSRLGITGQSRKGALSAIVRETEGASLWIWRKREEQWVGGHSAEK

SEQ ID NO: 8376 - protein, 1196 aa, Dreissena rostriformis
MKEIVAASRLYLTTISSGYPVTVGKDQLTTVNSTVTPWRDRWQLGKTGIGVNCPSKSVYVLRKKKPEQATERQHKKYPRGRTRVGEDDRPTSQQVTNTPDQPTTNQDTDRSRTCSCGKVCKNEVGLKIHRTKKGCTPILNLLQRARQLGETEEELDQDEHHSVQSLHASEEGEVTIENAERTEERAAVESTERRKKVMWPASTERAKWKAFEEELELVMENVMKGKVESKLHVMSELIYTFGKERFGTAKEKVGQPKVGGNRRLQKISNLRGELRRLKSRYRLAEEEEKHGLAELRDSLRKEIQSLRRAENLRKMRHERRRKRAQFTSNPFQFVKRLLGEKKTGELQCTKEEANKYIKDMYSDSDRHKELGECGKLLTPDEPEHDFDCAEPRLQEVKDIVRKARASSAPGPNGVPYRVYKNCPKILLRLWKLIKVVWRKGELCREWLKAEGCFIPKEEDSSTLGQFRTISLLNVEGKILLAVLSRRMTSYLLQNKYIDTAVQKGGVPGVSGCVEHTSVITQIIKEARENKGDIAVIWLDLANAYGSVPHQMIQKTLQLYHVPIRFRQMLQHYFDGFIMRFSTRKITTDWQRLEVGIVTGCTISVVLFAAAMNLIVKSAEKPSRGPKLTSGCIQPPTRAFMDDMTITAKSYVEGRWMLQDIGELIEWARMKFKPQKSRSMVLRKGQIQESARYRIKDQLIPTVKEQPVKCLGKWFRDSLNDQQSIKDTVVQMENWLKDVDKCGLPGKFKAWIYQHGILPRLLWPLLVYSVPSSTVEAMERTINSFLRRWMGVPKSFTSLGLYCTGSKLQIPLKSLTEEYKVTKARKVIMLRDSSDEKVREAGVQVNTGRKWRADKAVEEAEARLRHSDIVGNVAQGRLGFGCVTRSQWSKASAKDRRIQVQEEVRRMEEESRLTRAVTLRKQGKWLNWEGIPQRKLTWNAIWTMESDRLSFLLKSVYDVLPSPTNLVTWGLTETPDCKLCGRPANLEHVLSSCRTALSDGRYRWRHDRVLASIAEHLDQARKAQKTINKGPTFISFVRAGEEGAKAKRACGILGTATDWRMEADLKKQLKFPQEITVTNQRPDIVLWSSASKQVVMVELTVPWEERIEESFERKSTKYQPLTDACTEKGWKAWCFPVEVGCRGFPAQSLWRTFSRLGVTGQVRKRAISVVARETESASLWLWRKREEKWTGGHRAVD

SEQ ID NO: 8377 - protein, 1126 aa, Sinonovacula constricta
MVSTGLVQRTLTGERTDETAMCHCGKICKNLRGLRVHQGRKKCGRTKQPLQRTDSASGETQENVSQVAHHSTDDLHVMDGSDDDMESGLMDLLGLDLDQEDAQDTEQQASNPQVGDETATRQQQPLSSRKEQVKWPRQNDKKAWMKLDEDLDTILQVALQGSVERKLGALPTITYAVGLERFGMAEKHGTSRPYKPNRREEEIKRLRSEIRALGKQFKRANEEERVGLGQLRNLQRQKIQRLRRAERLRKNRKLKERRRAAFFGNPYKFTSQLLSEEKSGQLTSTKEETEKFLQEAHSDSQRKEPLGNCSRIKEVPPPSSRLDEKEPTLKEVMDVVKKARAGSAPGPSGIPYKVYKNCPRLLKRLWSLMKVVWRKGVIPDVWQIAEGCLTPKEKNSKSIAQFRSISLLSVEGKIFFSVLARRIQSYAIANSYINTSVQKGGIPGFSGCLEHTSAITQLIREAQVDKKDLTVVWLDLANAYGSIPHSLIQYALNHYHLPERVKSLVSSYYSNLLLRFSTKEFTTEWIRVERGIVTGCTISVILFVLGMNLILKAAEEETRGPKTASGIRMPPNRGFMDDITITTQSHIQTRWILSSLEDTVSWARMKFKPKKSRCLIIRKGHVTTQCTLTIQGEAIPSIKDNPIKCLGKWFDATLKDKEAIAGMKEQLEKGLKKIQQSSLPGKFKVWMYQNGLLPRLIWPLMLYEVPTTTVEGLERVINKHLRRWLGLPPSFTGLGLYTTSGKLQLPVSSLVEEFKVAKARLLMTLKDSPDQCISSAGIELRTGRKWSVSQAVEAAQGRLVHQDIVGNTNKGREGLGLQVRVSWATADKQKRRAMVQEEIRKEVEETRASQMVQLGCQGRSTGWNVPERKITWSQLWHLEPVRISFLLRSVYDVLPTPVNLKRWKLIEDPACPLCGKTATLDHILSSCQVALSQGRYRWRHDRVLRQLAHHIDLERRKKQPAKSNVTFIPFVKEGQEAKVTPSSSRVGVLATAQSWEMKVDLERKLQFPDVVQTTLRPDIVVWSSHGKKIVVIELTVPWEERCDEAYERKATKYAELMEECRRKGWSTWLFPVEVGCRGFPAASVWKMFTALGITGRNRKTAIQAVSSAAEKASSWIWLRRNHTSWS

SEQ ID NO: 8378 - protein, 1162 aa, Cyclina sinensis
MFHPEHPYQLQTIHMKNTPRAFREGGEDEGLTRTDQMVSTGLVQRTLTGERTDETAMCHCGKICKNLRGLRVHQGRKKCGRTKQPLQRTDSASGETQENVSQVAHHSTDDLHVMDGSDDDMDSGLMDLLGLDSDQEDAQDTEQQASNPQVGDEPATRQQQPLSSRKEQVKWPRQNDKKAWMKLDEDLDTILQVALQGSVERKLGALPTITYAVGLERFGMAEKHGTSRPYKPNRREEEIKRLRSEIRALGKQFKRANEEERVGLGQLRNLRRQKIQRLRRAERLRKNRKLKERRRAAFFGNPYKFTSQLLSEEKSGQLTSTKEETEKFLQEAHSDSQRKEPLGNCSRIKEVPPPSSRLDEKEPTLKEVMDVVKKARAGSAPGPSGIPYKVYKNCPRLLKRLWSLMKVVWRKGVIPDVWQIAEGCLTPKEKNSKSIAQFRSISLLSVEGKIFFSVLARRIQSYAIANSYINTSVQKGGVPGFSGCLEHTSAITQLIREAQVDKKDLTVVWLDLANAYGSIPHSLIQYALNHYHLPERVKSLVSSYYSNLLLRFSTKEFTTEWIRVERGIVTGCTISVILFVLGMNLILKAAEEETRGPKTASGIRMPPNRGFMDDITITTQSHIQTRWILPSLEDTVSWARMKFKPKKSRCLIIRKGHVTTQCTLTIQGEAIPSIKDNPIKCLGKWFDATLKDKEAIAGMKEQLEQGLKKIQQSSLPGKFKVWMYQNGLLPRLIWPLMLYEVPTNTVEGLERVINKHLRRWLGLPPSFTGLGLYTTSGKLQLPVSSLVEEFKVAKARLLMTLKDSPDQCISSAGIELRTGRKWSVSQAVEAAQGRLVHQDIVGNTNKGREGLGLQVRVSWATADKQKRRAMVQGEIRKGVEETRASQMVQLGCQGRSTGWNVPERKITWSQLWHLEPVRISFLLRSVYDVLPTPVNLKRWKLIEDPACPLCGKTATLDHILSSCQVALSQGRYRWRHDRVLRQLAHHIDLERRKKQPAKSNVTFIPFVKEGQEAKVTPSSSRVGVLATAQSWEMKVDLERKLQFPDVVQTTLRPDIVVWSSHGKKIVVIELTVPWEERCDEAYERKATKYAELMEECRRKGWSTWLFPVEVGCRGFPAASVWKMFTALGITGRNRKTAVQAVSSAAEKASSWIWLRRNHTSWS

SEQ ID NO: 8379 - protein, 1049 aa, Cyclina sinensis
MDGSDDDMDSGLMDLLGLDSDQEDAQDTEQQASNPQVGDETATRQQQPLSSRKEQVKWPRQNDKKAWMKLDEDLDTILQVALQGSVERKLGALPTITYAVGLERFGMAEKHGTSRPYKPNRREEEIKRLRSEIRALGKQFKRANEEERVGLGQLRNLRRQKIQRLRRAERLRKNRKLKERRRAAFFGNPYKFTSQLLSEEKSGQLTSTKEETEKFLQEAHSDSQRKEPLGNCSRIKEVPPPSSRLDEKEPTLKEVMDVVKKARAGSAPGPSGIPYKVYKNCPRLLKRLWYLMKVVWRKGVIPDVWQIAEGCLTPKEKNSKSIAQFRSISLLSVEGKIFFSVLARRIQSYAIANSYINTSVQKGGVPGFSGCLEHTSAITQLIREAQVDKKDLTVVWLDLANAYGSIPHSLIQYALNHYHLPERVKSLVSSYYSNLLLRFSTKEFTTEWIRVERGIVTGCTISVILFVLGMNLILKAAEEETRGPKTASGIRMPPNRGFMDDITITTQSHIQTRWILSSLEDTVSWARMKFKPKKSRCLIIRKGHVTTQCTLTIQGEAIPSIKDNPIKCLGKWFDATLKDKEAIAGMKEQLEQGLKKIQQSSLPGKFKVWMYQNGLLPRLIWPLMLYEVPTTTVEGLERVINKHLRRWLGLPPSFTGLGLYTTSGKLQLPVSSLVEEFKVAKARLLMTLKDSPDQCISSAGIELRTGRKWSVSQAVEAAQGRLVHQDIVGNTNKGRKGLGLQVRVSWATADKQKRKTMVQGEIRKEVEETRASQMVQLGCQGRSTGWNVPERKITWSQLWHLEPVRISFLLRSVYDVLSTPVNLKRWKLIEDPACPLCGKTATLDHILSSCQVALSQGRYRWRHDRVLRQLAHHIDLERRKKQPAKSNVTFIPFVKEGQEAKVTPSSSRVGVLATAQSWKMKVDLERKLQFPDVVQTTLRPDIVVWSSHGKKIVVIELTVPWEERCDEAYERKATKYAELMEECRRKGWSTWLFPVEVGCRGFPAASVRKMFTALGITGRNRKTAVQAVSSAAEKASSWIWLRRKHTSWS

SEQ ID NO: 8380 - protein, 1126 aa, Sinonovacula constricta
MVSTGLVQRTLTGERTDETAMCHCGKICKNLRGLRVHQGRKKCGRTKQPLQRTDSASGETQENVSQVAHHSTDDLHVMDGSDDDMESGLMDLLGLDLDQEDAQDTEQQASNPQVGDETATRQQQPLSSRKEQVKWPRQNDKKAWMKLDEDLDTILQVALQGSVERKLGALPTITYAVGLERFGMAEKHGTSRPYKPNRREEEIKRLRSEIRALGKQFKRANEEERVGLGQLRNLQRQKIQRLRRAERLRKNRKLKERRRAAFFGNPYKFTSQLLSEEKSGQLTSTKEETEKFLQEAHSDSQRKEPLGNCSRIKEVPPPSSRLDEKEPTLKEVMDVVKKARAGSAPGPSGIPYKVYKNCPRLLKRLWSLMKVVWRKGVIPDVWQIAEGCLTPKEKNSKSIAQFRSISLLSVEGKIFFSVLARRIQSYAIANSYINTSVQKGGIPGFSGCLEHTSAITQLIREAQVDKKDLTVVWLDLANAYGSIPHSLIQYALNHYHLPERVKSLVSSYYSNLLLRFSTKEFTTEWIRVERGIVTGCTISVILFVLGMNLILKAAEEETRGPKTASGIRMPPNRGFMDDITITTQSHIQTRWILSSLEDTVSWARMKFKPKKSRCLIIRKGHVTTQCTLTIQGEAIPSIKDNPIKCLGKWFDATLKDKEAIAGMKEQLEKGLKKIQQSSLPGKFKVWMYQNGLLPRLIWPLMLYEVPTTTVEGLERVINKHLRRWLGLPPSFTGLGLYTTSGKLQLPVSSLVEEFKVAKARLLMTLKDSPDQCISSAGIELRTGRKWSVSQAVEAAQGRLVHQDIVGNTNKGREGLGLQVRVSWATADKQKRRAMVQEEIRKEVEETRAAQMVQLGCQGRSTGWNVPERKITWSQLWHLEPVRISFLLRSVYDVLPTPVNLKRWKLIEDPACPLCGKTATLDHILSSCQVALSQGRYRWRHDRVLRQLAHHIDLERRKKQPAKSNVTFIPFVKEGQEAKVTPSSSRVGVLATAQSWEMKVDLERKLQFPDVVQTTLRPDIVVWSSHGKKIVVIELTVPWEERCDEAYERKATKYAELMEECRRKGWSTWLFPVEVGCRGFPAASVWKMFTALGITGRNRKTAVQAVSSAAEKASSWIWLRRNHTSWS

SEQ ID NO: 8381 - protein, 1126 aa, Sinonovacula constricta
MVSTGLVQRTLTGERTDETAMCHCGKICKNLRGLRVHQGRKKCGRTKQPLQRTDSASGETQENVSQVAHHSTDDLHVMDGSDDDMESGLMDLLGLDLDQEDAQDTEQQASNPQVGDETATRQQQPLSSRKEQVKWPRQNDKKAWMKLDEDLDTILQVALQGSVERKLGALPTITYAVGLERFGMAEKHGTSRPYKPNRREEEIKRLRSEIRALGKQFKRANEEERVGLGQLRNLQRQKIQRLRRAERLQKNRKLKERRRAAFFGNPYKFTSQLLSEEKSGQLTSTKEETEKFLQEAHSDSQRKEPLGNCSRIKEVPPPSSRLDEKEPTLKEVMDVVKKARAGSAPGPSGIPYKVYKNCPRLLKRLWSLMKVVWRKGVIPDVWQIAEGCLTPKEKNSKSIAQFRSISLLSVEGKIFFSVLARRIQSYAIANSYINTSVQKGGIPGFSGCLEHTSAITQLIREAQVDKKDLTVVWLDLANAYGSIPHSLIQYALNHYHLPERVKSLVSSYYSNLLLRFSTKEFTTEWIRVERGIVTGCTISVILFVLGMNLILKAAEEETRGPKTASGIRMPPNRGFMDDITITTQSHIQTRWILSSLEDTVSWARMKFKPKKSRCLIIRKGHVTTQCTLTIQGEAIPSIKDNPIKCLGKWFDATLKDKEAIAGMKEQLEKGLKKIQQSSLPGKFKVWMYQNGLLPRLIWPLMLYEVPTTTVEGLERVINKHLRRWLGLPPSFTGLGLYTTSGKLQLPVSSLVEEFKVAKARLLMTLKDSPDQCISSAGIELRTGRKWSVSQAVEAAQGRLVHQDIVGNTNKGREGLGLQVRVSWATADKQKRRAMVQEEIRKEVEETRAAQMVQLGCQGRSTGWNVPERKITWSQLWHLEPVRISFLLRSVYDVLPTPVNLKRWKLIEDPACPLCGKTATLDHILSSCQVALSQGRYRWRHDRVLRQLAHHIDLERRKKQPAKSNVTFIPFVKEGQEAKVTPSSSRVGVLATAQSWEMKVDLERKLQFPDVVQTTLRPDIVVWSSHGKKIVVIELTVPWEERCDEAYERKATKYAELMEECRRKGWSTWLFPVEVGCRGFPAASVWKMFTALGITGRNRKTAVQAVSSAAEKASSWIWLRRNHTSWS

SEQ ID NO: 8382 - protein, 1092 aa, Podocnemis expansa
MDPVEISGVGESRIQIDSEFNLLSMVFTNVAFKGIDVVEDFQPKDFDVSNFLVDPYIGEGDEEIVLESNLRGSGTFKDGVIYLEYPVDCFNCPLCPQILATFGKWAKHVNIVHKCKSIRVLCRKCGKASHFHAIACHYPKCKLKEEDVEGKIYVCGLCDAAFYTKSGRSQHIRHRHPAARNEERMKKRGRPKASRVWTDEEVNLFCELETKYVGRRNINKLIEMELGTKTNKQIGDKRRDLAKKRVRDVVVGGSVRENEELDGEVLKEVPPREKIRPLRDHPLVRRIISSGRSREVGRILEDLEEVERLLSDVSSMDVGWGMLEGLCKMLIVPEKERGNLNGSGKCRSVQEQGRKMDWKNGVNRRRYAVNKARFKFYQTLFDKDRKRLARIIMGEPDKAKCCLGIKELEDYYPGLLEREGHGTAKGWPPPLGQADNVLLEELISGEEIAEALKELRKTSALGPDKATVSELWDIFNLDVRILVRIFNFWYFNQRVPDFFKENRTILIPKVQDEEELKKISSWRPLTIGSVWLRLYTKILAKRLSTAVMICSRQKGFIAAPGCEENISILDKLIKGAKRNGDELAVVFVDLAKAFDSVGHGHIFSALRRMGVCERFIEVIRDLYTDCVTRIWNGKECSEPIFIRSGVKQGDPLSLLLFNIALDPLLVQLEQRGSGFFVQVRKIVVLAFADDIAIVSASYAGMLSDLDILNNFCRNTGLKIHVKKTKGFHIVPVYRSYVVNPKGRWRIGEEDIEYVGPGEVERYLGVRIDPWIGVERVSPCEKLKIWCENLCWAPLKPAQKLIILKVYILPRLFYNLLLMEPSFSVLNELDVLVRKVLKEILHLPHNITGGIFYAKGKDGGLAITKFGVQVPNMLIRKWRRHVVSRDDWVDLAFIYAGENLVDKILMYSAVTPNFRRWRDDEFDLWSQLRCQGIGIRYFRNDLISNSFIRHPELAKSSSFISALLLRANVFPTRETLPRGRLGAIALCRWCGKVKETIPHISGQCFKVKDARIKRHNRVVKLLADKVGKYGWTVWMEPHLRNSEGLLRKPDIIFVKEGYVAVVDVTVRWEDNADGLDAAHREKINYYKELKEEV

SEQ ID NO: 8383 - protein, 1235 aa, Podocnemis expansa
MEKSIIDIHTGVALAQDKNAPAAGFNAPASSVKYVRGVIRINGPLLPPSLAEVRRLREGVDHNENGFTPLEGAVSIPEMDPIEISEVGESRIQIDSEFNLLSMVFTNVAFKGIGVVEDFKPKDLDVLIFLVDPYIGEGDKEIVLESNLRGSGTFKDGVIYLEYPVDCFNCPLCPQILATFGKWAKHVNVVHKCKSIRVLCRKCCKASHFHAITCHYLKCKPKEEDVEGKIYACGLCDAAFYTKSGRSQHIRHRHPAARNEERMKKRGRPKASRVWTDEEVNLLCELETKYVGRRNINKLIEMELGTKTNKQIGDKCRDLAKKRVRDVVVGGSVHENEELDGEVLKEVPPREKIRPLRDHPLVRRIISSGRSREVGRILEDLEEVERLLSDVSSMDVGWGMLEGLCKMLIVPEKERGNLNGSGKCRSVQEQSRKMDWKNGVNRRRYAVKKARFKFYQTLFDKDRKRLARIIMGEPDKAKCCLGIKELEDYYRGLLEREGHGTAKGWPPPLGQADNVLLAELIFGEEIAEALKELRKTSAPGPDKATVSELWAIFNLDVRILVRIFNFWYFNQRVPDFFKENRTILIPKVQDEEELKKISSWRPLTIGSVWLRLYIKILAKRLSTAVMICSRQKGFIAAPGCEENISILDKLIKGAKRNGDELAVVFVDLAKAFDSVGHGHIFSALRRMGVCERFIEVIQDLYTDCVTRIWNGKECSEPFFIRSGVKQGDPLSPLLFNIALDPLLVQLEQRGSGFFVQGKKIVVWAFADDIAIVSASYAGMLSDLDILNNFCRNTGLKINVKKTKGFHIIPVYRSYVVNPKGRWRIGEEDIEYVGPGEVERYLGARIDPWIGVERVSPCEKLKIWCENLCRAPLKPAQKLIILKVYILPRLFYNLLLMEPSFSVLNELDVLVRKVLKEILHLPHNITGGIFYAKGKDRGLAITKFGVQVLNMLIRKWRMHVVSRDDWVDPAFIYAGENLVDKILMYSAVTPNFRRWRDDEFDRWIQLRCQGIGIRYFRNDLISNSFIRHPELAKSSSFISALLLRVNVFPTRETLSRGRLGAVALCRWCGKVKETIPHISGQCFKVKDARIKRHNRVVKLLADKFGKCGWTVWMEPHLRNSEGLLRKPDIIFVKEGYVAVVDVTVWWEDNADGLDAAHREKINYYKELKEEVVRLVGGCKIVSFFGFVIGARGKWSIGNEDLFKFLGVNLERNFKENMCRLVLYATADMLALFGDKV

SEQ ID NO: 8384 - protein, 1038 aa, Podocnemis expansa
MWQGIPFPCDPGIPFPCHYPKCKPKEEDVEGKTYACGLCDAAFYTKSGRSQHIRHRHPAARNEEKMKKRGRPKASRVWMDEEVNLLCELETKYVGRRNVNKLIEMELGTKTNKQIGDKHRDLAKKRVRDVGGVGSVRENEELDGEVLKEVPPREKIRPLIDHPLVRRIISSGRSREVGRILEDLEEVERLLSDVSSMDVGWGMLEGLCKMLIVPEKERGNLNGSGKCRSVQEQGRKMDWKNGVNRRRYAVKKARFKFYQTLFDKDRKRLARIIMGEPDKAKCCLGIKELEDYYRGLLEREGHGTAKGCPPPLRQADNVLLEELISGEEIAEALKELRKTSAPGPDKATVSELWDIFNLDVRILVRIFNFWYFNQSVPDFFKENRTILIPKVQDEEEFKKIFSWRPLTIGSVWLRLYTKIVAKRLSTAVMICSRQKGFIAAPGCEENISILDKLIKGAKRNGDELAVVFVDLAKAFDSVGHGHIFSALRRMGVCERFIEVIRDLYTDCVTRIWNGKECSEPVFIRSGVKQGDPLSPLLFNIALDPLLVQLEQRGSGFFMQGRKIVVLAFADDIAIVSASYAGMLSDLDILNNFCRNTGLKINVKKTKGFHIIPVYRSYVVNPKGRWRISEEDIEYVGPGEVERYLGARIDPWIGVERVSPCEKLKIWCENLCRAPLKPAQKLIILKVYILPRLFYNLLLMEPSFSVLNELDVLVRKVLKEILHLPHNNTGGIFYAKGKDGGLAITKFGVQVPNMLIRKWRRHVVSRDDWVDLAFIYAGENLVDKILMYSAVTPNFRRWRYDEFDRWSQLRCQGIGIRYFRNDLISNSFIRHLELARSSSFISALLLRVNVFPTRETLSRGRLGAVALCRWCGKVKETIPHISGQCFKVKDARIKRHSRVVKLLADKVGKCGWTVWMDPHLRNSEGLLRKPDIIFVKEGYVAVVDVTVRWEDNADGLDAAHREKINYYKELKEEVVRLVGGCKIVSFFGFVIGARGKWSIGNEDLFKFLGIHLQRNFKENMCRLVLYATTDMLALFGDKV

SEQ ID NO: 8385 - protein, 1049 aa, Bradysia coprophila
MRTMNCTPCNRSFDTGKGLKIHESFHAKLKGKIESKKSNRKRNINSQKGSGIERNKSCEGLTELDEFLLLNQNEIEIQTNNDPPSVLIPKNFSKDRIHCECGFLAKNERGLKIHQNKHKKNDLSKSEIDRKATNNNRKTDSVDSMNIDEFGVLLSKCKEAIPVVRIIQKSVRSAVSLELSKLVDQVVTKNDANSWCRLLAFPYIVLRSRPKKSKGGMNGIRENLKELEKITNVNDYLAFLLQDTKPREKKLCSQNEQVIKTVNQKLGEGDFSGAMRVLCSKEMIAEINDETLSKLQSKHPLDTLPVIDKHTPEEILPITSSETISKSISSFPISSSGGIDGLRPRHIKDLTSFTCGDAAEKLRKSIAKLSDLVKNGKIDQNVVRIVYSGRLVAFIKDNGDIRPIAVGTFWRRLAGKVECGDIIDQLSEKIKPFQLGFGAKGGAEAIIHAVRSFISNSYDEPMILLKYDFSNAFNELKRQYLLDETKNICPSLYPMMRQAYGSFTNLYFNYQVILSRRGVHQGDPLGPAGFCIGISKLVHSLSSRLNAWYLDDGTTGDNFKNTMEDVKRIKDFREVSGLTINPSKCEVHFINATKEQKDAMYAAISEELPGIRLMEEVDLLGSPIHNSLIPNFIKQKKDIVQSMCERLKLLDVHPALCLFRYCMSSPKFIYLLRTCPTFMFQNLLEEVDELFRQTLENICNIKMTPKVWRQTTLPYSLAGIGIRKLEDLAIPAYLSSIFQSKNLSNVLLGQLNLDIVDTEIKKLIDDLPSSLVPNTEAKRENQTNWDYPNMKFIFETLLSNANQTDRARLLASSKNESSKWLQVIPSSELGLLLNNNIARIAIAIRLGGKVCEKHTCRCGKTVEENGHHGLSCIRSAGRIPRHVGFNKITLNALSKIDFPSMLEPPGISRSDGKRVDGVTITPWERGKSLIWDATVSDTVAPSYLAQSAKIAGSVADQSERHKHNHYMALKRDYIFTPIAFETFGPMGEDTKKFINKIGKLLQQKTGEKRSTNFLIQQYSIEIQRGNCASILKTFENDDANAVSNIFDLL

SEQ ID NO: 8386 - protein, 1235 aa, Montipora cactus
MAENQSTSRTQWSSRQTTRLKWTTQMNSDLLECKVKAKEMVASQNPPRHENGRKKGYMVIMKELWSERGYSDLGLSCQNLRDQAARLEKTFGNVQGTILKNTGGEKRQFVEHGEGENLLFEDQDSNIEAEQSNAENLHTYLEPEDPKSPVLTPMDLNPCAYEILEGATSILTSISPIIGEFGRRNIDTRIKQRPTRTDVKNINVAIDVLMRREVEHSMDPTSNPFGYLWMANCILYSVVAAFLINKGWKKESGIKLQTKRKTTGQTIKEAFLTQATELRKRISIATAELDRIKKNKKITKRGKRNRTMLERECGKVSAASLVAYIERKKSELRKAKGSFIRKQKQEEIRSLNSKFYVDPGSVYDHFNEIIKSDPENNKPRYMKSTGERSEEQQGIFENITEAGSYWKDLWEQPSIATNSDATWLEDVRCAFAELVPVPPQEGFELDTVKCAYVIKKKRNWSAPGPDRIVNFWWKRAESLHKGIAASFQAAVVGDEEFPEWFTGGKTSLLPKPGEFSSQNQRPITCLNNQYKWFTSCLLPPMDKHLKEYDLLEGEQRGAKPRCSGTTDNLLVDRMVCHDSRNSRKNVSMAWIDVRKAFDSVSHEWLLEMMFLHKFPSWLCNTIKRLCQSWNTKITVRTRQGMETSDVIHFNKGLPQGDALCPRLFTLCLNPVSWKLKASEGYKPSKPINGKITHLLYIDDMKIYATSESKLDRVLKTTKLAMADIGLEFNEKKCAIAHVKRGVLDSRPNSTHVGESQIIESLKEGENYKFLGVLENSKQEDTLVLWGASKLFLQRLSVVWSSPLSDYHKVVASNQYALPVLMYPMWTQSWPIVELQQLDRESRKILKENGGYHPMGTTDLLYLPRKFGGRGLKSVESMYKNIKVKTAIKLYANEDPTMRMVREFEEKCERTGRRSLKKDAEKYALEKGLYLKLNYPCPTANTEEGEELPGEKVGVMMRIKEEESRTEEVRQQKWQGKLIEARWDDADVTGCFSWLCRWKTAPTHTVAGVYKLYQQLLPTKIHQQYKTKTNNNTDVKCRMCGKAMESVPHVLSGCSILAQSKYKTRHDAALKVLFFDLLCDMGLIESAPSWCSPETPKPEYKNDRASAFWDVPVYAEKTEVRANRIDARVVDKQKKKVLLLEMSCPWIANRKQKEEEKTSKYAPLRWEIRQQYPHYKIAQYNIIIDVLGGVSRKTLDSITELVGARADKILLDMQKAVISSTLNIARSFKVLTAQDL

SEQ ID NO: 8387 - protein, 928 aa, Montipora cactus
MLERECGKVSAASLVAYIERKKSELRKAKGSFIRKQKQEEIRSLNSKFYVDPGSVYDHFNEIIKSDPENNKPRYMKSTGERSEEQQGIFENITEAGSYWKDLWEQPSIATNSDATWLEDVRCAFAELVPVPPQEGFELDTVKCAYVIKKKRNWSAPGPDRIVNFWWKRAESLHKGIAASFQAAVVGDEEFPEWFTGGKTSLLPKPGEFSSQNQRPITCLNNQYKWFTSCLLPPMDKHLKEYDLLEGEQRGAKPRCSGTTDNLLVDRMVCHDSRNSRKNVSMAWIDVRKAFDSVSHEWLLEMMFLHKFPSWLCNTIKRLCQSWNTKITVRTRQGMETSDVIHFNKGLPQGDALCPRLFTLCLNPVSWKLKASEGYKPSKPINGKITHLLYIDDMKIYATSESKLDRVLKTTKLAMADIGLEFNEKKCAIAHVKRGVLDSRPNSTHVGESQIIESLKEGENYKFLGVLENSKQEDTLVLWGASKLFLQRLSVVWSSPLSDYHKVVASNQYALPVLMYPMWTQSWPIVELQQLDRESRKILKENGGYHPMGTTDLLYLPRKFGGRGLKSVESMYKNIKVKTAIKLYANEDPTMRMVREFEEKCERTGRRSLKKDAERYALERGLYLKLNYPCPTANTEEGEELPGEKVGVMMRIKEEESRTEEVRQQKWQGKLIEARWDDADVTGCFSWLCRWKTAPTHTVAGVYELYQQLLPTKIYQQYKTKTNNNTDVMCRMCGKAMESVPHVLSGCSILAQSKYKTRHDAALKVLFFDLLCDMGLIESAPSWCSPETPKPEYKNDRASAFWDVPVYAEKTEVRANRIDARVVDKQKKKVLLLEMSCPWIANRKQKEEEKTSKYAPLRWEICQQYPHYKIAQYNIIIDVLGGVSRKTLDSITELVGARADKILLDMQKAVISSTLNIARSFKVLTAQDL

SEQ ID NO: 8388 - protein, 854 aa, Montipora capitata
MKSTGERSEEQQGIFENITEAGSYWKDLWEQPSIATNSDATWLEDVRCAFAELVPVPPQEGFELDTVKCAYVIKKKRNWSAPGPDRIVNFWWKRAESLHKGIAASFQAAVVGDEEFPEWFTGGKTSLLPKPGEFSSQNQRPITCLNNQYKWFTSCLLPPMDKHLKEYDLLEGEQRGAKPRCSGTTDNLLVDRMVCHDSTNSRKNVSMAWIDVRKAFDSVSHEWLLEMMFLHKFPSWLCNTIKRLCQSWNTKITVRTRQGMETSDVIHFNKGLPQGDALCPRLFTLCLNPVSWKLKASEGYKPSKPINGKITHLLYIDDMKIYATSESKLDRVLKTTKLAMADIGLEFNEKKCAIAHVKRGVLDSRPNSTHVGESQIIESLKEGENYKFLGVLENSKQEDTLVLWGASKLFLQRLSVVWSSPLSDYHKVVASNQYALPVLMYPMWTQSWPIVELQQLDRESRKILKENGGYHPMGTTDLLYLPRKFGGRGLKSVESTYKNIKVKTAIKLYANEDPTMRMVREFEEKCERTGRRSLKKDTERYALERGLYLKLNYPCPTANTEEGEELPGEKVGVMMRIKEEESRTEEVRQQKWQGKLVEARWDDADVTGCFSWLCRWKTAPTHTVAGVYELYQQLLPTKIYQQYKTKTSNNTDVKCRMCGKAMESVPHVLSGCSILAQSKYKTRHDAALKVLFFDLLCDMGLIESAPSWCSPETPKPEYKNDRASAFWDVPVYAEKTEVRANRIDARVVDKQKKKVLLLEMSCPWIANRKQKEEEKTSKYAPLRWEICQQYPHYKIAQYNIIIDVLGGVSRKTLDSITELVGARADKILLDMQKAVISSTLNIARSFKVLTAQDL

SEQ ID NO: 8389 - protein, 1196 aa, Montipora capitata
MVASQNPPRHENGGKKGYMVIMKELWSERGYSDLGLSCQNLRDQAARLEKTFGNVQGTILKNTGGEKRQFVEHGEGENLLFEDQDSNIEAEQSNAENLHTYLEPEDPKSPVLTPMDLNPCAYEILEGATSILTSISPIIGEFGRRNIDTRIKQRPTRTDVKNINAAIDVLMRREVEHPMDPTTNPFGYLWMANCILYSVVAAFLINKGWKKESGIKLQTKRKTTGQTIKEAFLTQATELRKRISIATAELDRIKKNKKITKRGKRNRTMLERECGKVSAASLVAYIERKKSELRKAKGSFIRKQKQEEIRSLNSKFYVDPGSVYDHFNEIIKSDPENNKPRYMKSTGERSEEQQGIFENITEAGSYWKDLWEQPSIATNSDATWLEDVRCAFAELVPVPPQEGFELDTVKCAYVIKKKRNWSAPGPDRIVNFWWKRAESLHKGIAASFQAAVVGDEEFPEWFTGGKTSLLPKPGEFSSQNQRPITCLNNQYKWFTSCLLPPMDKHLKEYDLLEGEQRGAKPRCSGTTDNLLVDRMVCHDSRNSRKNVSMAWIDVRKAFDSVSHEWLLEMMFLHKFPSWLCNTIKRLCQSWNTKITVRTRQGMETSDVIHFNKGLPQGDALCPRLFTLCLNPVSWKLKASEGYKPSKPINGKITHLLYIDDMKIYATSESKLDRVLKTTKLAMADIGLEFNEKKCAIAHVKRGVLDSRPNSTHVGESQIIESLKEGENYKFLGVLENSKQEDTLVLWGASKLFLQRLSVVWSSPLSDYHKVVASNQYALPVLMYPMWTQSWPIVELQQLDRESRKILKENGGYHPMGTTDLLYLPRKFGGRGLKSVESTYKNIKVKTAIKLYANEDPTMRMVREFEEKCERTGRRSLKKDTERYALERGLYLKLNYPCPTANTEEGEELPGEKVGVMMRIKEEESRTEEVRQQKWQGKLIEARWDDADVTGCFSWLCRWKTAPTHTVAGVYELYQQLLPTKIYQQYKTKTSNNTDVKCRMCGKAMESVPHVLSGCSILAQSKYKTRHDAALKVLFFDLLCDMGLIESAPSWCSPETPKPEYKNDRASAFWDVPVYAEKTEVRANRIDARVVDKQKKKVLLLEMSCPWIANRKQKEEEKTLKYAPLRWEICQQYPHYKIAQYNIIIDVLGGVSRKTLDSITELVGARADKILLDMQKAVISSTLNIARSFKVLTAQDL

SEQ ID NO: 8390 - protein, 1235 aa, Montipora capitata
MAENQSTSRTQWSSRQTTRQKWTTQMNSDLLECKVKAKEMVASQNPPRHENGRKKGYMVIMKELWSERGYSDLGLSCQNLRDQAARLEKTFGNVQGTILKNTGGEKRQFVEHGEGENLLFEDQDSNIEAEQSNAENLHTYLEPEDPKSPVLTPMDLNPCAYEILEGATSILTSISPIIGEFGRRNIDTRIKQRPTRTDVKNINAAIDVLMRREVEHSMDPTTNPFGYLWMANCILYSVVAAFLINKGWKKESGIKLQTKRKTTGQTIKEAFLTQATELRKRISIATAELDRIKKNKKITKRGKRNRTMLERECGKVSAASLVAYIERKKSELRKAKGSFIRKQKQEEIRSLNSKFYVDPGSVYDHFNEIIKSDPENNKPRYMKSTGERSEEQQGIFENITEAGSYWKDLWEQRSIATNSDATWLEDVRCALAELVPVPPQEGFELDTVKCAYVIKKKRNWSAPGPDRIVNFWWKRAESLHKGIAASFQAAVVGDEEFPEWFTGGKTSLLPKPGELSSQNQRPITCLNNQYKWFTSCLLPPMDKHLKEYDLLEGEQRGAKPRCSGTTDNLLVDRMVCHDSRNSRKNVSMAWIDVRKAFDSVSHEWLLEMMFLHKFPSWLCNTIKRLCQSWNTKITVRTRQGMETSDVIHFNKGLPQGDALCPRLFTLCLNPVSWKLKASEGYKPSKPINGKITHLLYIDDMKIYATSESKLDRVLETTKLAMADIGLEFNEKKCAIAHVKRGVLDSRPNSTHVGESQIIESLKEGENYKFLGVLENSKQEDTLVLWGASKLFLQRLSVVWSSPLSDYHKVVASNQYALPVLMYPMWTQSWPIVELQQLDRESRKILKENGGYHPMGTTDLLYLPRKFGGRGLKSVESTYKNIKVKTAIKLYANKDPTMRMVREFEEKCERTGRRSLKKDTERYALERGLYLKLNYPCPTANTEEGEELPGEKVGVMMRIKEEESRTEEVRQQKWQGKLIEARWDDADVTGCFSWLCRWKTVPTHTVAGVYELYQQLLPTKIYQQYKTKTSNNTDVKCRMCGKAMESVPHVLSGCSILAQSKYKTRHDAALKVLFFDLLCDMGLIESAPSWCSPETPKPEYKNDRASAFWDVPVYAEKTEVRANRIDARVVDKQKKKVLLLEMSCPWIANRKQKEEEKTSKYAPLRWEICQQYPHYKIAQYNIIIDVLGGVSRKTLDSITELVGARADKILLDMQKAVISSTLNIAWSFKVLTAQDL

SEQ ID NO: 8391 - protein, 982 aa, Montipora efflorescens
MRREVEHSMDPTTNPFGYLWMANCILYSVVAAFLINKGWKKESGIKLQTKRKTTGQTIKEAFLTQATELRKRISIATAELDRIKKNKKITKRGKRNRTMLERECGKVSAASLVAYIERKKSELRKAKGSFIRKQKQEEIRSLNSKFYVDPGSVYDHFNEIIKSDPENNKPRYMKSTGERSEEQQGIFENITEAGSYWKDLWEQPSIATNSDATWLEDVRCAFAELVPVPPQEAFELDTVKCAYVIKKKRNWSAPGPDRIVNFWWKRAESLHKGIAASFQAAVVGDEEFPEWFTGGKTSLLPKPGEFSSQNQRPITCLNNQYKWFTSCLLPPMDKHLKEYDLLEGEQRGAKPRCSGTTDNLLVDRMVCHDSRNSRKNVSMAWIDVRKAFDSVSHEWLLEMMFLHKFPSWLCNTIKRLCQSWNTKITVRTRQGMETSDVIHFNKGLPQGDALCPRLFTLCLNPVSWKLKASEGYKPSKPINGKITHLLYIDDMKIYATSESKLDRVLKTTKLAMADIGLEFNEKKCAIAHVKRGVLDSRPNSTHVGESQIIESLKEGENYKFLGVLENSKQEDTLVLWGASKLFLQRLSVVWSSPLSDYHKVVASNQYALPVLMYPMWTQSWPIVELQQLDRESRKILKENGGYHPMGTTDLLYLPRKFGGRGLKSVESTYKNIKVKTAIKLYANEDPTMRMVREFEEKCERTGRRSLKKDTERYALERGLYLKLNYPCPTANTEEGEELPGEKVGVMMRIKEEESRTEEVRQQKWQGKLIEARWDDADVTGCFSWLCRWKTVPTHTVAGVYELYQQLLPTKIYQQYKTKTSNNTDVKCRMCGKAMESVPHVLSGCSILAQSKYKTRHDAALKVLFFDLLCDMGLIESAPSWCSPETPKPEYKNDRASAFWDVPVYAEKTEVRANRIDARVVDKQKKKVLLLEMSCPWIANRKQKEEEKTSKYAPLRWEICQQYPHYKIATSSSMCSVVYQERH

SEQ ID NO: 8392 - protein, 1191 aa, Montipora capitata
MAENQSTSRTQWSSRQTTRLKWTTQMNSDLLECKVKAKEMVASQNPPRHENGRKKGYMVIMKELWSERGYSDLGLSCQNLRDQAARLEKTFGSVQGTILKNTGGEKRQLVEHGEGENLLLEDQDSNIEAEQSNAENLHTYLEPEDPKSPVLTPMDLNPCAYEILEGATSILTSISPIIGEFGRRNIDTRIKQRPTRTDVKNINAAIDVLMRREVEHSMDPTTNPFGYLWMANCILYSVVAAFLINKGWKKESGIKFQTKRKTTGQTIKEAFLTQATELRKRISIANAELDRIKKNKKITKRGKRNRTMLERECGKVSAASLVAYIERKKSELRKAKGSFIRKQKQEEIRSLNSKFYVDPGSVYDHFNEIIKSDPENNKPRYMKSTGERSEEQQGIFENITEAGSYWKDLWEQPSIATNSDATWLEDVRCAFAELVPVPPQEGFELDTVKCAYVIKKKRNWSAPGPDRIVNFWWKRAESLHKGIAASFQAAVVGDEEFPEWFTGGKTSLLPKPGEFSSQNQRPITCLNNQYKWFTSCLLPPMDKHLKEYDLLEGEQRGAKPRCSGTTDNLLVDRMVCHDSRNSRKNVSMAWIDVRKAFDSVSHEWLLEMMFLHKFPSWLCNTIKRLCQSCNTKITVRTRQGMETSDVIHFNKGLPQGDALCPRLFTLCLNPVSWKLKASEGYKPSKPINGKITHLLYIDDMKIYATSESKLDRVLKTTKLAMADIGLEFNEKKCAIAHVKRGVLDSRPNSTHVGESQIIESLKEGENYKFLGVLENSKQEDTLVLWGASKLFLQRLSVVWSSPLSDYHKVVASNQYALPVLMYPMWTQSWPIVELQQLDRESRKILKENGGYHPMGTTDLLYLPRKFGGRGLKSVESTYKNIKVKTAIKLYANEDPTMRMVREFEEKCERTGRRSLKKDTERYALERGLYLKLNYPCPTANTEEGEELPGEKVGVMMRIKEEESRTEEVRQQKWQGKLIEARWDDADVTGCFSWLCRWKTAPTHTVAGVYELYQQLLPTKIYQQYKTKTSNNTDVKCRMCGKAMESVPHVLSGCSILAQSKYKTRHDAALKVLFFDLLCDMGLIESAPSWCSPETPKPEYKNDRASAFWDVPVYAEKTEVRANRIDARVVDKQKKKVLLLEMSCPWIANRKQKEEEKTSKYAPLRWEICQQYPHYKIAQYNIIIDVLGGVSR

SEQ ID NO: 8393 - protein, 1082 aa, Montipora cactus
MDLNPCAYEILEGATSILTSISPIIGEFGRRNIDTRIKQRPTRTDVKNINVAIDVLMRREVEHSMDPTTNPFGYLWMANCILYSVVAAFLINKGWKKESGIKLQTKRKTTGQTIKEAFLTQATELRKRISIATAELDRIKKNKKITKRGKRNRTMLERECGKVSAASLVAYIERKKSELRKAKGSFIRKQKQEEIRSLNSKFYVDPGSVYDHFNEIIKSDPENNKPRYMKSSGERSEEQQGIFENITEAGSYWKDLWEQPSIATNSDATWLEDVRCAFAELVPVPPQEGFELDTVKCAYVIKKKRNWSAPGPDRIVNFWWKRAESLHKGIAASFQAAVVGDEEFPEWFTGGKTSLLPKPGEFSSQNQRPITCLNNQYKWFTSCLLPPMDKHLKEYDLLEGEQRGAKPRCSGTTDNLLVDRMVCHDSRNSRKNVSMAWIDVRKAFDSVSHEWLLEMMFLHKFPSWLCNTIKRLCQSWNTKITVRTRQGMETSDVIHFNKGLPQGDALCPRLFTLCLNPVSWKLKASEGYKPSKPINGKITHLLYIDDMKIYATSESKLDRVLKTTKLAMADIGLEFNEKKCAIAHVKRGVLDSRPNSTHVGESQIIESLKEGENYKFLGVLENSKQEDTLVLWGASKLFLQRLSVVWSSPLSDYHKVVASNQYALPVLMYPMWTQSWPIVELQQLDRESRKILKENGGYHPMGTTDLLYLPRKFGGRGLKSVESMYKNIKVKTAIKLYANEDPTMRMVREFEEKCERTGRRSLKKDAERYALERGLYLKLNYPCPTANTEEGEELPGEKVGVMMRIKEEESRTEEVRQQKWQGKLIEARWDDADVTGCFSWLCRWKTAPTHTVAGVYELYQQLLPTKIYQQYKTKTNNNTDVKCRMCGKAMESVPHVLSGCSILAQSKYKTRHDAALKVLFFDLLCDMGLIESAPSWCSPETPKPEYKNDRASAFWDVPVYAEKTEVRANRIDARVVDKQKKKVLLLEMSCPWIANRKQKEEEKTSKYAPLRWEIRQQYPHYKIAQYNIIIDVLGGVSRKTLDSITELAGARADKILLDMQKAVISSTLNIARSFKVLTAQDL

SEQ ID NO: 8394 - protein, 1231 aa, Montipora capitata
MAENQSTSRTQWSSRQTIRLKWTTQMNSDLLECKVKAKEMVASQNPPRHENGRKKGYMVIMKELWSERGYSDLGLSCQNLRDQAARLEKTFGNVQGTILKNTGGEKRQFVEHGEGENLLFENQDSNIEAEQSNAENLHTYLEPEDPKSPVLTPMDLNPCAYEILEGATSILTSISPIIGEFGRRNIDTRIKQRPTRTDVKNINAAIDVLMRREVEHSMDPTTNPFGYLWMANCILYSVVAAFLINKGWKKESGIKLQTKRKTTGQTIKEAFLTQATELRKRISIATAELDRIKKNKKITKRGKRNRTMLERECGKVSAASLVAYIERKKSELRKAKGSFIRKQKQEEIRSLNSKFYVDPGSVYDHFNEIIKSDPENNKPRYMKSTGERSEEQQGIFENITEAGSYWKDLWEQPSIATNSDATWLEDVRCAFAELVPVPPQEGFELDTVKCAYVIKKKRNWSAPGPDRIVNFWWKRAESLHKGIAASFQAAVVGDEEFPEWFTGGKTSLLPKPGEFSSQNQRPITCLNNQYKWFTSCLLPPMDKHLKEYDLLEGEQRGAKPRCSGTTDNLLVDRMVCHDSRNSRKNVSMAWIDVRKAFDSVSHEWLLEMMFLHKFPSWLCNTIKRLCQSWNTKITVRTRQGMETSDVIHFNKGLPQGDALCPRLFTLCLNPVSWKLKASEGYKPSKPINGKITHLLYIDDMKIYATSQSKLDRVLKTTKLAMADIGLEFNEKKCAIAHVKRGVLDSRPNSTHVGESQIIESLKEGENYKFLGVLENSKQEDTLVLWGASKLFLVVWSSPLSDYHKVVASNQYALPVLMYPMWTQSWPIVELQQLDRESRKILKENGGYHPMGTTDLLYLPRKFGGRGLKSVESTYKNIKVKTAIKLYANEDPTMRMVREFEEKCERTGRRSLKKDTERYALERELYLKLNYPCPTANTEEGEELPGEKVGVMMRIKEEESRTEEVRQQKWQGKLIEARWDDADVTGCFSWLCRWKTAPTHTVAGVYELYQQLLPTKIYQQYKTKTSNNTDVKCRMCGKAMESVPHVLSGCSILAQSKYKTRHDAALKVLFFDLLCDMGLIESAPSWCSPETPKPEYKNDRASAFWDVPVYAEKTEVRANRIDARVVDKQKKKVLLLEMSCPWIANRKQKEEEKTSKYAPLRWEICQQYPHYKIAQYNIIIDVLGGVSRKTLDSITELVGARADKILLDMQKAVISGTLNIARSFKVLTAQDL

SEQ ID NO: 8395 - protein, 1039 aa, Montipora efflorescens
MAYPRFLFILLAGVVCSFCEKDFVSLGRHVWRCKQRIHRPERHNVGEEQLPNDHDPVADTASRVCLTKCCCRKLCKGNRGLKMHQRSCRVVLGLNYQLRADFNDITLTDQEYGNGSVPLITSSASSLEPGDYGFLDIKTGINLPKSDDQWITANEYFKSVFFLNHPITAQNLSSSIKLLNDTIYDYFSANFGQVAQATDERLIKKYEDKSKHDLKKSLKVLKHSASADIAEIKYVSRLLRDKLRNNTSQVNTDPMNHDYSISKNFWGYVKKIFNIKAEMLPSFSMDECFDYFTRTLSSLNPTRVFNLPSWIPTLSDPVIPFNLEPPTYQQISNVIRKMKASGSPCPLDQLSIICFKRCPFLRTYLSEIIRTAWSTGSVPSEWKKACTILIHKKGNVNDPANFRPITLQSVPLKVFTSCLRNAIFNFLAANNYIEHEIQKGFTPGLSGTFEHTAQMADIINKARTKQRSLVITLLDLKNAFGEVHHNLIQTALHYHHIPDHVKLLVKSLYTDFKTSIITNEFRTPFISIGRGVLQGDCLSPLLFNLCFNTFLQHIKSEKYRQFGFSLRFLNPIHWFQFADDAAVISGQESENQHLINRFIIWCQWSNMIIRVDKCFTFGIRKLCTKSVQYLPKLLINGVLVPCVEMGESFRYLGRYFDFNMSNNQHMSELSSLVQDLMCDIDEKPLHPKNKLLLYSRYVLSTLSWHFTVADISKTWIIANLDSIVNGCIRKWLEIPISGTLSNVFLERNKFGLNICPPSVKFTQCKTGLRNSLKESCNDSLKDLWKSSRSHTNIQYDECSNPPRKFLKTSVLIKKTNCNTTEHLKVSFLQMLSSTHSRPSVNSIWSSSQSHLPKNIYNFTICYINNTLPTRKNMTRWGLSQIPDCSFCLNPESLLHIVPGCQHYLDSFTWRHDSILNFIANSLQPVINDRSSLYADVNGFPSPLIITSESYRPDLPFLIQSKCLYILELTVGFESNLKNNAVRKKEKYISVVKDMRSKYRCVKFVNLSMSSLGIFSNECSTFLEMMNDIGIDKTQQHYSH

SEQ ID NO: 8396 - protein, 985 aa, Montipora capitata
MHQRSCRVVLGLNDQLRADLNDITLTDQEYGSGSVPLITSGVSSLEPGDYGFPDIKTGINLPKSDDQWITANEYFKSVLFLNHPITAQNLSSSIKLLNDTIYDYFSANFGQVAQATDERLIKKYEDKSKHDLKKSLKVLKHSASADIAEIKYVSRLLRDKLRNNTSQVNTDPINHDYSISKNFWGYVKKIFNIKAEMLPSFSMDECFDYFARTLSSLNPTRVFNLPSWIPTLSDPVIPFNLKPPTYQQISNVIRKMKASGSPCPLDQLSIICFKRCPFLRTYLSEIIRTAWSTGSVPSEWKKACTILIHKKGNVNDPANFRPITLQSVPLKVFTSCLRNAIFNFLAANNYIEHEIQKGFTPGLSGTFEHTAQMADIINKARTKQRSLVITLLDLKNAFGEVHHNLIQTALDYHHIPDHVKLLVKSLYTDFKTSIITNEFRTPFISIGRGVLQGDCLSPLLFNLCFNTFLQHIKSEKYRQFGFSLRFLNPIHWFQFADDAAVISGQESENQHLINRFIIWCQWSNMIIRVDKCFTFGIRKLCTKSVQYLPKLLINGVLVPCVEMGESFRYLGRYFDFNMSNNQHMSELSSLVQDLMCDIDEKPLHPKNKLLLYSRYVLSKLSWHFTVADISKTWIIANLDSIVNGYIRKWLEIPISGTLSNVFLERNKFGLNICPPSVKFTQCKTVLRNSLKESRNDSLKDLWKSSSSHTNIQYDVFKSTKEVLKDFRSNQEDKLQHHLTSQGFFFTNVIKHSLSSVNSIWSSAQSHLPKNIYNFTIRYINNSLPTRTNMARWGLSQSPDCSFCLNPESLLHIVAGCQHYLDRFTWRHDSILNFIANSLQPVINDRSSLYADVNGFPSPSIITGENYRPDLLFVIQSKCLYILELTVGFESNLKNNAVRKKEKYMNVVKDMRSNYRCVKFVNLSMSSLGVLSNECSAFLEMMNDIGIDKTQQHYIIKKMISLAIRATYFIFCRRNKTWDSPDLIKL

SEQ ID NO: 8397 - protein, 1067 aa, Montipora cactus
MAYPRFLFILLAGVVCSFCEKDFVSLGRHAWRCKQRIHRPERHNVGEEQLPNDHDPVADTASHVCLTKCCCGKLCKGNRGLKMHQRSCRVVLGLNDQLRADLNDITLTDQEYGNGSVPLITSGVSSLQPGDYGFPDIKTGINLPKSDDQWITANEYFKSVLFLNHPITAQNLSSSIKLLNDTIYDYFSANFGQVAQATDERLIKKYEDKSKHDLKKSLKVLKHSASADIAEIKYVSRLLRDKLRNNTSQVDTDPMNHDYSISKNFWGYVKKIFNIKAEMLPSFSMDECFDYFTRTLSSLNPTRVFNLPSWIPTLSDPVIPFNLEPPTYQQISNVIRKMKASGSPCPLDQLSIICFKRCPFLRTYLSEIIRTAWSTGSVPSEWKKACTILIHKKGNVNDPANFRPITLQSVPLKVFTSCLRNAIFNFLAANNYIEHEIQKGFTPGLSGTFEHTAQMADIINKARTKQRSLVITLLDLKNAFGEVHHNLIQTALHYHHIPDHVKLLVKSLYTDFKTSIITNEFRTPFISIGRGVLQGDCLSPLLFNLCFNTFLQHIKSEKYRQFGFSLRFLNPIHWFQFADDAAVISGQESENQHLINRFIIWCQWSNMIIRVDKCFTFGIRKLCNKSVQYLPKLLINGVLVPCVEMGESFRYLGRYFDFNMSNNQHMSELSSLVQDLMCDIDEKPLHPKFKLLLYSRYVLSKLSWHFTVADISKTWIIANLDSLVNGYIRKWLEFPISGTLSNVFLERNKFGLNICPPSVKFTQCKTVLRNSLKESRNDSLKDLWKSSNSHTNIQYDVFKSTKEVLKDFRSNQEDKLQHHLTSQGFFFANVIKHSLSSVNSIWSSAQSHLPKNIYNFTIRYINNSLPTRTNMTRWGLSQSPDCSFCLNPESLLHIVAGCQHYLDRFTWRHDSILNFIANSLQPVINDRSSLYADVNGFPSPSIITGENYRPDLLFLIQSKCLYILELTVGFASNLKINVERKKEKYMNVVKDMRSNYRSVKFVNLSMSSLGVLSNECSTFLEMMNDIGIDKTQQHYIIKKMISLAIRATYFIFCRRNKTWDSPDLIKL

SEQ ID NO: 8398 - protein, 1067 aa, Montipora efflorescens
MAYPRFLFILLAGVVCSFCEKDFVSLGRHAWRCKQRIHRPERHNVGEEQLPNDHDPVADTASRVCLTKCCCGKLCKGNRGLKMHQRSCRVVLGLNDQLRADLNDITLTDQEYGNGSVPLITSGVSSLQPGDYGFPDIKTGINLPKSDDQWITANEYFKSVLFLNHPITAQNLSSSIKLLNDTIYDYFSANFGQVAQATDERLIKKYEDKSKHDLKKSLKVLKHSASADIAEIKYVSRLLRDKLRNNTSQVNTDPMNHDYSISKNFWGYVKKIFNIKAEMLPSFSMDECFDYFTRTLSSLNPTRVFNLPSWIPTLSDPVIPFNLEPPTYQQISNVIRKMKASGSPCPLDQLSIICFKRCPFLRTYLSEIIRTAWSTGSVPSEWKKACTILIHKKGNVNDPANFRPITLQSVPLKVFTSCLRNAIFNFLAANNYIEHEIQKGFTPGLSGTFEHTAQMADIINKARTKQRSLVITLLDLKNAFGEVHHNLIQTALDYHHIPDHVKLLVKSLYTDFKTSIITNEFRTPFISIGRGVLQGDCLSPLLFNLCFNTFLQHIKSEKYRQFGFSLRFLNPIHWFQFADDAAVISGQESENQHLINRFIIWCQWSNMIIRVDKCFTFGIRKLCTKSVQYLPKLLINGVLVPCVEMGESFRYLGRYFDFNMSNNQHMSELSSLVQDLMCDIDEKPLHPKFKLLLYSRYVLSKLSWHFTVADISKTWIIANLDSIVNGYIRKWLEIPISGTLSNVFLERNKFGLNICPPSVKFTQCKTVLRNSLKESRNDSLKDLWKSSSSHTNIQYDVFKSTKEVLKDFRSNQEDKLQHHLTSQGFFFANVIKHSLSSVNSIWSSAQSHLPKNIYNFTIRYINNSLPTRTNMTRWGLSQSPDCSFCLNPESLLHIVAGCQHYLDRFTWRHDSILNFIANSLQPVINDRSSLYADVNGFPSPSIITGENYRPDLLFLIQSKCLYILELTVGFESNLKNNVERKKEKYMNVVKDMRSNYRSVKFVNLSMSSLGVLSNECSTFLEMMNDIGIDKTQQHYIIKKMISLAIRATYFIFCRRNKTWDSPDLIKL

SEQ ID NO: 8399 - protein, 813 aa, Montipora efflorescens
MNHDYSISKNFWGYVKKIFNIKAEMLPSFSMDECFDYFTRTLSSLNPTRVFNLPSWIPTLSDPVIPFNLEPPTYQQISNVIRKMKASGSPCPLDQLSIICFKRCPFLRTYLSEIIRTAWSTGSVPSEWKKACTILIHKKGNVNDPANFRPITLQSVPLKVFTSCLRNAIFNFLAANNYIEHEIQKGFTPGLSGTFEHTAQMADIINKARTKQRSLVITLLDLKNAFGEVHHNLIQTALDYHHIPDHVKLLVKSLYTDFKTSIITNEFRTPFISIGRGVLQGDCLSPLLFNLCFNTFLQHIKSEKYRQFGFSLRFLNPIHWFQFADDAAVISGQESENQHLINRFIIWCQWSNMIIRVDKCFTFGIRKLCTKSVQYLPKLLINGVLVPCVEMGESFRYLGRYFDFNMSNNQHMSELSSLVQDLMCDIDEKPLHPKNKLLLYSRYVLSKLSWHFTVADISKTWIIANLDSIVNGYIRKWLEIPISGTLSNVFLERNKFGLNICPPSVKFTQCKTVLRNSLKESRNDSLKDLWKSSSSHTNIQYDVFKSTKEVLKDFRSNQEDKLQHHLTSQGFFFANVIKHSLSSVNSIWSSAQSHLPKNIYNFTIRYINNSLPTRTNMTRWGLSQSPDCSFCLNPESLLHIVAGCQHYLDRFTWRHDSILNFIANSLQPVINDRSSLYADVNGFPSPSIITGENYRPDLLFLIQSKCLYILELTVGFESNLKNNVERKKEKYMNVVKDMRSNYRSVKFVNLSMSSLGVLSNECSTFLEMINDIGIDKTQQHYIIKKMISLAIRATYFIFCRRNKTWDSPDLIKL

SEQ ID NO: 8400 - protein, 1067 aa, Montipora capitata
MAYPRFLFILLAGVVCSFCEKDFVSLGRHAWRCKQRIHRPERHNVGEEQLPNDHDPVADTASRVCLSKCCCGKLCKGNRGLKMHQRSCRVVWGLNDQLRADLNDITLTDQEFGNGSVPLITSGVSSLEPGDYGFPDIKTGINLPKSDDQWITANEYFKSVLFLNRPITAQNLSSSIKLLNDTIYDYFSANFGQVAQATDERLIKKYEDKSKHDLKKSLKVLKHSANADIAEIKYVSRLLRDKLRNNTSQVNTGPMNHDYSISKNFWGNVKKIFNIKAEMLPSFSTDECFDYFTRTLSSLNPTRVFNLPSWIPTLSDPVIPFNLEPPTYQQISNVIRKMKASGSPCPLDQLSIICFKRCPFLRTYLSEIIRTAWSTGSVPSEWKKACTILIHKKGNVNDPANFRPITLQSVPLKVFTSCLRNAIFNFLAANNYIEHEIQKGFTPGLSGTFEHTAQMADIINKARTKQRSLVITLLDLKNAFGEVHHNLIQTALDYHHIPDHVKLLVKSLYTDFKTSIITNEFRTPFISIDRGVLQGDCLSPLLFNLCFNTFLQHIKSEKYRQFGFSLRFLNPIHWFQFADDAAVISGQESENQHLINRFIIWCQWSNMIIRVDKCFTFGIRKLCTKSVQYLPKLLINGVLVPCVEMGESFRYLGRYFDFNMSNNQHMSELSSLVQDLMCDIDEKPLHPKNKLLLYSRYVLSKLSWHFTVADISKTWIIANLDSIVNGYIRKWLEIPISGTLSNVFLERNKFGLNICPPSVKFTQCKTVLRNSLKESRNDSLKDLWKSSSSHTNIQYDVFKSTKEVLKDFRSNQEDKLQHHLTSQGFFFTNVIKHSLSSVNSIWSSAQSHLPKNIYNFTIRYINNSLPTRTNMTRWGLSQSPDCSFCLNPESLLHIVAGCQHYLDRFTWRHDSILNFIANSLQPVINDRSSLYADVNGFPSPSIITGENYRPDLLFVIQSKCLYILELTVGFESNLKNNAVRKKEKYMNVVKDMRSNYRCVKFVNLSMSSLGVLSNECSAFLEMMNDIGIDKTQQHYIIKKMISLAIRATYFIFCRRNKTWDSPDLIKL

SEQ ID NO: 8401 - protein, 999 aa, Graphium doson
MQGRSATPTGRPTNPFPMAAPTDHRLAPSQAEQHLTTPHQSSASSTAQNHSAPPQASYLVMERVNFTAEVVCFHGCTEVLSCHHYRTVSILVKPIFLERRASQWRCLRCSFNPQSGVGLETHMLQEHRVKVVFTCPFCFTEKPSVKAVAAHLRKRTCHRTVEINPLTDEELNNPPVGPSQDPQPLRRRLVEEIESLGNSTFRRLAREALYSSVGSRNVTTLCDHLTRLCKPESQPNTSHNRRRRRREAQQADRVEREFRRNQYWWHRCRSKCYSLALNGDKESSLNIDQADAFFRPLFDEVGTCSGDMIRCQPINSVNLTLFYIEHEEIEWYLKKKFRSAPGPDGLKTADILPRLREWTILLNLCLFHHRIPLTWHVSRTTLVPKCESDLPSNHRPISVSSLGYRALASCLTRRLEQSVTLHESQRGFIAEDGIHEAITTVRYLVSRQKPMVSIDLAKAFDSVPHATLFNACLANGFSLDSLNLLVDIYTDATTILQVNGKKSQPIPIRRGVRQGDPLSPLLFNLVIDQLLRRLDECNLGVKLGNRRLAAVGYADDIILCGETIDEVHNLVAVTNQVLCSLGLKVNWEKSFCYGGSIAGLTQRSSFKYLGAKIDPSGDSRMTPEELIDMVKRLDRAVLRGNQKIYFLRFHLLPSIFHRLTHEKVTATTLRKMTTSVRNFVRKWAKLPAFTCSSFIHLAIRNGGLGIVNLRWKLPEMIRARMVRLQKCRAWYVQHVVRSTWYRTELYRIDDLCPLEGSESWSIRDMALANPGHLAFPIGAARFSNRHLTGGGFVEGKKFYRFAQMRCSADNGNTRRARPPPICTKCNSGQLATLQHTLCQCPDNAANIRKRHDLVLEQIIAHCKRKNLVFLKEPTLRCGKRPDLVVSLQNGTNLCLDVTVVFELTSTSLQRAAKEKEDKYEPHLAEINGFMAHGNATQVHGLAFGARGSISAKSLNILEILLEMPRWRIEKILNSIITISLDLYEHCPLASRASANLFPI

SEQ ID NO: 8402 - protein, 996 aa, Graphium evemon
MPNKSAQLSGQSTIPPIFPMAPPNSERLAPNQAAPNQAAPRPNPPEANHTTRQVSYLVTERANFTAEVVCFYGCTEVLACCHYQSLSILVKPVCFERRPSQWRCLRCPFNPKSGIGLEDHMLKEHKVKITFYCPFCFVEKPSVKSVAAHMRKRTCHRTVEIEPLTQEELSLPPFQPVRPAEPLRHRLSNVIDSLEESVFKRLAREALYSGIGSNNVTTIADHLTRLCKPTNQRNTSHNRRRRRREAQQRDRIEREFRRNQYWWRRSKAKCYSLATKGDTDSRLNINQADAFFRPLFSEPGTCVGEFIRSQATNSVNVTQYYIEADEIESYLRKKFRSAPGPDGLRANDLLTKLSELTILINLCLLHHNIPRSWHSSRTTLIPKCDSDSPSDHRPISISSLGYRALASCLVRRLDQSITLHESQRGFIAEDGIHEAITMVRYLAATKKPMVSLDLAKAFDSVPHVTLLNACLANGFSISTMNLITDIYNDATTVLHVGGRQSSPIPIRRGVRQGDPLSPMLFNLVIDQLLRHIDKCNLGVKLGNRRLSAVAYADDIVLCGETEDEVHNLVAVTNQVLSTFGLNINWNKSFSFNADIVGLTRRSWFKYLGAKIDPSGDCRMRPEELIDMIERLDRAVLRGNQKIYFLRFHLLPSVFHRLTHESVTATTLCVMNTKVRNFVRKWAKLPASTCSSFIHLAIRNGGLGIVNLRWKLPEMMRNRMVRLQKSRVWFIQHVIRSSWYRDELYRIDDLCPLEGAERWALRDMSLANPGHMAFPVGAARFSNRHLTGSSFVEGKKFYRLAQLRSFADNGNTRRVRPPPVCCKCNSGQLATLQHTLCQCPDNAVNIRKRHDFILNELVAHCKHKRLRFVKEPTLRDGSRPDLVIVLPNSSTVCIDVTVVFELTATSLELAGKEKEHKYSPHAVEIARLAGCNSHPAQIYGLAFGARGSIAPKTLNVMERLEVPRWRIERMVNFIITISLDLFEHCPLAPKVPTFNLT

SEQ ID NO: 8403 - protein, 877 aa, Graphium evemon
MLQEHRVKVVFTCPFCFTEKPSVKAVAAHLRKRTCHRTVEINPLTDEELNNPPVGPSQDPQPLRRRLVEEIESLGNSTFRRLAREALYSSVGSRNVTTLCDHLTRLCKPESQPNTSHNRRRRRREAQQADRVEREFRRNQYWWHRCRSKCYSLALNGDKESSLNIDQADAFFRPLFDEVGTCSGDMIRCQPINSVNLTLFYIEHEEIEWYLKKKFRSAPGPDGLKTADILPRLREWTILLNLCLFHHRIPLTWHVSRTTLVPKCESDLPSNHRPISVSSLGYRALASCLTRRLEQSVTLHESQRGFIAEDGIHEAITTVRYLVSRQKPMVSIDLAKAFDSVPHATLFNACLANGFSLDSLNLLVDIYTDATTILQVNGKKSQPIPIRRGVRQGDPLSPLLFNLVIDQLLRRLDECNLGVKLGNRRLAAVGYADDIILCGETIDEVHNLVAVTNQVLCSLGLKVNWEKSFCYGGSIAGLTQRSSFKYLGAKIDPSGDSRMTPEELIDMVKRLDRAVLRGNQKIYFLRFHLLPSIFHRLTHEKVTATTLRKMTTSVRNFVRKWAKLPAFTCSSFIHLAIRNGGLGIVNLRWKLPEMIRARMVRLQKCRAWYVQHVVRSTWYRTELYRIDDLCPLEGSESWSIRDMALANPGHLAFPIGAARFSNRHLTGGGFVEGKKFYRFAQMRCSADNGNTRRARPPPICTKCNSGQLATLQHTLCQCPDNAANIRKRHDLVLEQIIAHCKRKNLVFLKEPTLRCGKRPDLVVSLQNGTNLCLDVTVVFELTSTSLQRAAKEKEDKYEPHLAEINGFMAHGNATQVHGLAFGARGSISAKSLNILEILLEMPRWRIEKILNSIITISLDLYEHCPLASRASANLFPI

SEQ ID NO: 8404 - protein, 1240 aa, Nicrophorus vespilloides
MEKASEATPKGSGVVGVLYSDQEPTGDDTTAKCTEEAASPKTTSARTNTMSTTGSPPGSNAGSVSKLIKIFGGLQDNPGPLPSPKTGHLSIQKVDNQPDPPSAPPSDRRSEEKRTGCLYCGLKFASHKLVRQHESRAHPVEYRKELEAKLPLPECELMAKIAKIEAGSKKGGKFYTEMMRATGLTEHQVRHRREQKIYQRYLAEARTQVRRSAAKLFGLPASSTSATQGQSTPSGGFTKTNICSQRPHQTANTSTDIHKAPSDIGSTTPRKRCREGVREGDSPTKEEPTQLPPNLRGRAATASEASGSQAGGKRGRSLSSTPSPSKKRICQSISSPMAALASVSDVAETTSVFVSTAQVILRESRDSAGTNENVLNDVLSNTNFNLTSVHRNVEPPSAPTMATLLPGSFVEYLTNLNDLDINTQDMITKALRGTGPELLAVMDDWIQHRFPEKVRTARGCAAAVERPPLSKRALRIAKYKKCQDLFAKSKKTLVDLILGGKDICQSVVSPTLADTEALYGGLLESESPADTDPFIERVRCCDTFRPVTEGEVLGAMGSWKVSAPGPDGTSVEDVKRCGPRALGVLYSLVLGSRIVPSRFLRNRTVLIHKDGDGSDPTNWRPITVGSAISRLFHRVIAGRLTAATNLNNNQRGFVRVDGTLLNGMILDHYLRSRRAQGKGYNVVSLDIKKAFDTVSHKSIRRALLRHGIETETIEYIMNSLGSSITHITVGHETTRPIGIRSGVKQGDPLSPILFNLVIDELLDELEARQPGGTITPSFRCASMGFADDIILLEDKEVDMPASLDFASDFFQRRGMSIHPKKTTSISVASYQGKSVPRSRPCFRLNGQLVSIKRDEEYIKYLGHQFTTSGVNRPSLYNLASWLSSITKAPLKPYQKFHLMKFYVIPKIRYGLSNSRVTAEVLRAADRLIRRAVKKVLHLSITTPDCTLYAATRDGGLGITCFRTSIPKILAARIRKSLDGSCGLVETLTSDPLFSRNLERLNRLAPLTNPATQRRDQIIANPYLQGIEEVSHDPASRSWIDHPPSGWSGRDYVRAVHLRNNNLPTMGIPSNPPALRRCRAGCASKESICHILQACPITHAVRIARHNEICGKLVSHCHRKQWTVEEEPHVRHDDGQLYKPDLAIRTGPDRLTVCDVQVSWSGQRSLDQSWTDKLIKYDNAHFRAAASKKWPNTTITILPLVLGARGIWANKNTNTSYVLGLAGPLRRSLVNTCLKWGNTIH

SEQ ID NO: 8405 - protein, 1153 aa, Nicrophorus vespilloides
MAKIAKVEAGSKKGGKFYNEMMRATGLSEHQVRHRREQKIYQRYLAEARAQVRKSATKLFGLPASSTPAMQGQSTPSGGYLKANICSTDPHQKACTSADTHTVPSDIESPGPRKRCREGVREGDSPDTREPKQLPPNLRGRAVTASEASGSQAGGKRGRSLSSTPSPSKKKVRMCAPMATLATVSDVAETSNVFTSTVQVVLRERRDSAGATSCVVNDVLDNTINNDSISVRRDVEPPSAPTMATLLPGSFVDYLTNLNDLDRNTQDMILKALRGTGPELLAVMDDWIQHRFPVKVRTARGCAAAVERPPLNKRALRIAKYKKCQDLFGKNKKTLVDLILSGKDICQSVVSPTLADTEALYGGLLESESPADTDPFTERVRCCDTYKPVTEEEVLRAMGSWKASAPGPDGTSVEDVKRCGPRALGVLYTLVLGSRIVPSRFLRNRTVLIHKDGDGTDPTNWRPITVGSAISRLFHRVIAGRLTAATNLNNNQRGFVRVDGTLLNGMILDHYLRSRRAQGKGYNVVSLDIRKAFDTVSHKSIRRALLRHGIEAETIEYIMNSLGSSITHITVGHETTRPIGIRSGVKQGDPLSPILFNLVIDELLDELEARQPGGTITPSFRCAAMGFPDDIILLEDREVDMPASLDFASDFFRRRGMSIHPKKTTSISVASYQGKSVPRSRPCFRLNGQLVSIKRDEEYIKYLGHQFTTSGVNRPSLYNLAAWLSSIIKAPLKPYQKFHLLKFYIVPKIQYGLSNSRVTAEVLRAADRLIRRAVKKVLHLGITTPDCTLYAATRDGGLGITCFRTSIPKILAARIRKSLDGSCGPVETLTNDPVFFRNLERIDRLAPLTNPAAQRRDDIISNPYLQGIEEVSHDPASRSWIDHPPSGWSGRDYVRAVHLRNNNLPTMGIPSNPPALRRCRAGCSVNESICHVLQACPVTHAVRIERHNEICAKLVSHCHRKQWAVEEEPHVRHDDGQLYKPDLAIRTGPDRLTVCDVQVSWSGQRSLDQAWTDKLLKYDNAHFRAAASKRWPNTTITILPLVLGARGIWANNNNNLVSVLGLTGPLKRSLVNSCLKWGSSIHTTFMRSIWAQRSRRSEGEHTTSTQPQHHTTPHHNTTRGHTHTPQATPLPTRTPAGRTGTTRLRGRRGRPPR

SEQ ID NO: 8406 - protein, 1751 aa, Loxosceles reclusa
MPTNRSPNHVLSGSDSDSECERLIMDIDGEVSLPTRDDVCPANPDTPLKAATTANYSAHVSADSTTWNLANLLRIFSPDNNVRSPPYHDSVTQRSPPNALLMNILDGPTPTIYISPPKPSPMTKPVLPQPAPTPCRYSDSQTPTTSRQADIDELNMAIGWGGRASTSTDRGATTQHRLRSKNALLRARKTLNKDPVPSPKISRCKPFTKKSILQAVDAFVTLRQSPSANPTPAFEQGNSVLLKDDTLTIRFPISGALRCPKWGCRCKFKSDGAWQADVRALSIHLQKAHNTPVACQKHSCSHCNASFEEKPSTHSCLVGKKLRMDNPLATPKQCPKCEYQSCNRKRLRQHIRTHDKNDGSCTSVQHASPEVHPPEPSPVSMADQPDPPPPAQLAPTDPISDTSPKTLRSQGATQADPEPSSELDETEVPQPTDVPSPTMPTALAMDDRTSDGDEDFQVVKRRRRKKNPSLNTSPPTQQPSPTPLSSPRSPVPPTPLPQPVPSTAAHVPADTARGSDPRITLTEHKLNIQFPAPAVFQCPFTRCFKQFRSAKSWSATKQSLQRHIEIHHEWKIEEEALWCGICSDRIPGRPSDHQCLVGLQLRDALPTNLRYVCRRCRERFPSRKGLLNHKKAHDREDAAADQPTLPAPDTGRNPSAATDQNNRRATTVPPRPTTEMQSAQSNNDRSDHAPARSSTPQPLDSSPIIVDAWPATTQSPQDSPILPTQPPDTHSSSGTQPILDTQPDPAPHLHVGTMITDWPDEDQGEEEDGFHDIDMDDNIPAVDPQEDDPPIPSLSHHLEALDSIIGNGPTAQAWTTFENALLQITDDVQKLTKVPPPRPPGGHPSTVNVEDARAIQRLYKRNRRRAIRTILGGGSSFCDLPIDTVEEHFRNTWSVRTANEELYDVLHDREPINTEPFSEDEVARALRSAENTAPGPDRISYNAWKEVDPEAKIITKIFNVCLEHGRVPDSWKQSRTILIPKKDTPTSINDWRPIALSPTIYKLYTKCLTARVSTWITQNDVLSFAQKGFTPYDGVFEHNYVLQTRIQRARTEKASLNIAWLDCSNAFGSLPHGALTKALECAGAGAKFTQIVKELYTGTTTVIATAGGTTQPIEQQAGIRQGCPLSGLLFNIAIDPVLRAVQADTANTHSALAYADDLVLLAQTTEELQSKIDTVEQGLRHICIKLNTEKSAVLSYSPKTPAGPREVDVTIQGTRVRCLKLADTYQFLGKPTGIATIPSMADMKEIIDRGLVIARSKLAPWQRLDALKTFFYPSLGHAMRTGQFRKGDWAHLDKVLRAEIKKTLYLPQEAANEYIYGPLRKGCLAIPCAAEDADLNAIDGAFKLLTSKDPRVRQMAIDDLTLTIRKRLKRQISHDDINRYLSGDGSEEFRLTSNAISSCWTAARMASHRQQVKWSVDANNNPCITYKEMALYERQRNTICKRIRDKKRQERCESLHQHRSQGKAMACVALDPASSHFTRDGEYMRFADWRFVHRARVNLLPLNGSKHWKSTDDRKCRICGHQNETLPHVLQHCMRYSAAIQRRHKAILLRLRKAAAYRHKILAQEQEFGGQRRWRPDLVIKRGRDLTILDVTVPFDNRPEAFQEARRQKIEKYAELAESLRGQYRTVTVDAIVVGALGSWDPANDKVMRPLATKKYLQRFKRLCVADAIRHSRDIYFEFVTGRPVSNQETRPNGSQQQVLTPNPEHPRQQQHSTSPNLPTHDQSITPNLPDTVQANVIPTQTSSTPPALKT

SEQ ID NO: 8407 - protein, 1084 aa, Loxosceles reclusa
MQNRTQGMTSWTTSRPCQHRIRAEGALPTPQHTAPRPTRTTPPDTSPGTPDPSPITVDAWPPANPDDPPPIPATPASQPNLPSPPHEEGYSCNPAPDLHVPIPLTDWPDDCADDETPENEIEGNAPSSDPNLQDIRLPSIAEFIEPLDTIAGRTPSEVTWRELEELLGKGKQEVHRQAKIPPLNVEDARALQRLYRRNRCRAVRALLNNNAATCDIPTSEVEDHFKRIWNERVFDSEIFSTLHDRSPISMDPFSEEEVAAILRSAEKSAPGNDRISYHTWREVDHEAKVLTRLFNICLLHRKIPTSWKASRTILIPKKEQPTSISDWRPIALSPTDYKLFTKCLTARVSACISQHSVLSHAQKGFTPHDGVFEHNFVLQTRIQRARSEKKALQVAWLDCTNAFGSLPHGAVTQALESAGAGPEFIQLLSNIYSDTVTTVATGQGDTEPIQIKAGIRQGCPLSGLLFNIVIDPVLRSLQPDTQSQHSALAYADDLVLLTNTPRELQALTKTEEGLRKLSILINPTKSAVLSYSPVKPAGTREIDIYIDDQRIRCLQKHETYRFLGKPTGIATLPCLDDMNEYINKGLVIVRSKLAPWQRIDALKTFFYPSLHHAMRTGQFRKGDWAQLDRVMRSEIKKTLYLPQEASNEYIYGPLRKGCLAIPVAAEDADLSYIDGAFKLLTSKDPRIKQMAAEELSLTVRKRLRRDINDGDLMSYMSGDTTDELHLSSNAIASCWTNARMASHWLGVRWSFAEGSICIPYKDISIYERQRNVTTERIRDRKRQERCETLHKHKSQGKPMECVALDPASSSFIGSGEFMRFADWRFIHRARLNLLPPNGTKRGKSSNDQRCRRCNHPKETLPHVLQHCMQLSSLNKERHTAILNRLKKAAAYRNKIISCEQEFGGDRRWRPDLVIRRGRHLTILDVTVPFDNRPEALKMARRAKIEKHSELAETLRNQYESVTVQALVVGALGSWDPENDKVMRPITTRKYLKKFKQLCVADAIRHSRDIYTEFLTGKRPTSTTRTSQRQETQDDASATPDNISTTTTQAPLPATNPSTRRHHSLPPTSQRNVARNSPRCRRTSV

SEQ ID NO: 8408 - protein, 933 aa, Lasius niger
MNSYLLERRGDDRSLESIKGVRRKQAYKDLVAEYRGQLLDQRIDESLSQPDARPIAAMVDGVPLSGSVAAKDWLLAKCDSIIPEMNGGIWIRTAIRRLEEGQSPEGALDDWWNNVFSDLEVTGRKRVARGPRAIPVLSKRKARRIEYRRMQQLWRTNMTKAAHKVLDGDAGSLPHPTLAAQLGFWKPVLEAESVDLAWPFAVGHPGVAVGDLWSPITEGEVINIRLPRTSSPGLDGLTVHRWFTEVPAILRATILNIFMATGWVPPRFRHSRTVLIPKSSDLMDPAYYRPISVSSVILRHFHKILARRVAACELLDVRQRAFIAADGCAENVAVLSAILFDARTNRRQLHVITLDVRKAFDTVSHNAIRYVLSKHGMPQIMVEYLSTLYRTAAVRLEVDGEFSDEILPGRGVRQGDPLSPLLFNLIMNEILAEVPDQVGYCMMDRNVNALAFADDLVLIGATRDGAQRSLERVMAALYRFGLELAPAKCAAFSLVPCGKTKRIKILTDPQFVAGDRPIPQLGVLHTVRYLGVRFGETGPVIQGVELLPLLERITRAPLKPQQRLKILRTYLIPRYTHNLVLGRVSYSMLRKLDKQTRAAVRRWLVLPDDVPVAFFHCPIKQGGLGIQSFETAIPRLTLLRLNRLKDSQYEMARVVGSSAWADRRMRWCRFARRRDEDWPSELHAKVDGFELREAGNVSVSTRWLDDAMVHIPSSDWLQYVKVWINALPTRIRTTRGSRRLREDVNCRGGCGVQETAAHVVQQCFRTHGGRIMRHDAVASALAGELQRGGYNVHRERVFRTREGVRKPDILAAKGTHGHVLDVQIISGARPLSDGHDRKRSYYANNADLLARISALLQVPVRNLDVSTVTLSWRGVWARESAAVLTSLGVSKAVLRGITTRVLKGSYMNFSRFNQTTATCRGRANLRMSGWGPP

SEQ ID NO: 8409 - protein, 1013 aa, Formica exsecta
MSSANDNGDVAVVAGRPDSYVCAICLRSFSSRIGLGVHRRSAHPVEYNDKISVAQVKRRWSDEEIRLLAVDEAGAPPQTRSMNLYLLERHGEARSLESIKGIRKRQDYKDLVVEYRNRHLIQRIDESVQRDSRNAAAGRGELPLPVPETAMSWLVAKSDDIIPEMNGGIWIRAAICRLREGRSPDDALDEWWNNTFPDLETARRVRTVRGPRAIPLMSKRKARRMEYRRVQQLWRTNMTKAAHKVLDGDAEGLPHPTLAEQLGFWKPVLETESVVLTRPLAANGTRTELEGIWSPITEGEVINIRLPSASAPGLDGMTVRRWFAEVPAILRATILNMFMATGRVPPRFRHSRAVLIPKSSDLMEPSCYRPISVSSVILRHFHKILAHRLAGRNLLDMRQRAFIAADGCAENVAVLSALLFDARANRRQIHVITLDVRKAFDTVSHDAIRHVLHKHGIPHEMVEYLSALYRTAAVRLEVDRAFSEELLPGRGVRQGDPLSPLIFNLIMNEILAEVPEQVGFDFTGHRVNALAFADDLVLIGATREGAQLSLERVMKALLAFGLELAPAKCAAFSLVPSGKTKRIKVLTDPQFAAGGRAVPQLGVIQTVRYLGVRFGESGPVAQEFEMLPLLDRITCAPLKPQQRLKILRTYLAPRYIHGLVLGRTSYGLLRKLDRQIRAAVRRWLRLPEDVPTAFFHSPMKQGGLGILSFETAVPRMTLARLERLKTSQYETARVAGSSAWADKKRRWCELSRRREVDWPAEFHAMVDGFELREAKNVPASTRWLDDCMVHIPSSDWLQYIKVWINALPARIRTTRGPRRLREDVACRAGCGVQETAAHIVQQCFRTHGGRIMRHDAVASTLAGELQRGGYNVRREHVFRTREGVRKPDILASKGERGHVIDVQVISGARPLTEGHHRKRRYYADNSDLLARVSSLLQVPLQNLDVTTATLSWRGVWASESADALSSLGISKAVMRGVTTRVLKGSFMNFARFNQTTETRRGRANMMMSGWGPP

SEQ ID NO: 8410 - protein, 952 aa, Lasius niger
MNVGEDVAVLDVGRPNSHVCPICLRSFTSRIGLGLHKKKRHPVEYNEEICIARVKPRWSEEEIRILAMEEARAPPRTKSMNVYLWERGDESRSLESIKGVRRKQSYKDLVISYKDQLLAEKVDESLERQCSVPVVPAETPLPGSEAAMKWLVARVDDIIPEMNGGIWVRAAVCRLREGCLPDAALDDWWRNVFSDLETARSGRISRGPRVAPVLSKRRARRVEYRRMQQLWKVNMTKAAHKVLDGDTDSLPHPTLAEQLDFWRPVLEASSASFVRPVGAGKVVDGLESVWSPITEGEVINIRLPPSSAPGLDGLTVNRWFAEVPAILRATILNIFMATGRVPPRFSGSRTVLIPKSLDLMDPSCYRPISVSSVVLRHFHKILARRLAAFNLLDTRQRAFIAADGCAENIAMLSALLFDARANLRQLHVLTLDVRKAFDTVSHDAIRYVLRRNGIPAGMVEYLSTLCRTSTIRLEVGGAFSDELFPGRGVRQGDPLSPLIFNLVMNEILAVVPEQVGYNMLGHNINALAFADDLVLVAATREGAQRSLDRVVAALSDFGLELAPAKCAAFSLVPSGKLKKMKVLSDPQFAAGGCAVPQLGVLQTMRYLGVWFADAGPVDREVELLPLLDRITRAPLKPQQRLKILKTFLIPRFIHILVLGRTSYGLLRKLDRQIRAAVRRWLRLPEDIPKAFFHSPIASGGLGILSYETAIPRLVLARLDRLDKSQYDAARMVGSSAWAVRKRRWCGLAKRVEENWPAEFYGMVDGFELREAGNVTASTNWLDDPMIRVPSSEWLEYVKVWINALPTRIRTTRGSRRLREDVACRGGCGVQETAAHVIQQCFRTHGGRIMRHDAVASTLAGELQRGGYKVRREHVFRTPVGVRKPDILASKGERGYVLDVQIISGARPLTEGHKRKRNYYAGNAELLAKVGGLLEVPVRNIDVSTVTLSWRGV

SEQ ID NO: 8411 - protein, 952 aa, Formica exsecta
MDEAKAPPQIRSMNLYLLEKRGEVRSLEAIKGVRRKQAYKDLVETYRTQILAREIDEIADRGDLRLSPAAATGRVGERESLSGSEAAANWLLSKVDDIVPEMNGGIWIRTAICRIREGQSPDGALDDWWNGLFPDLTAASNERVIRGPRVNPVLSKRRARRVEYRRMQQLWRTNMTKAAHKVLDGDADGLPHPTLAKQLEFWRPVLETGSVDFPQPQVAPATDLRDVWSPITEGEVINIRLPRSSAPGLDGMTVRRWFTGVPAILRAAIFNIFMATGRIPERFRHSRTVLIPKTLDRMDPASYRPISVASVILRHFHKILACRLAGHDLLDRRQRAFIAADGCAENVAVLSALQFDARTNRRQVHIITLDVRKAFDTVSHSAVSRVLCKYGMPRSMVDYLSALYRTAAVRLEVDREFSGELFPRRGVRQGDPLSPLIFNLIMNEVLAAVPDEVGYTMYGQNINALAFADDLVLIGSTREGAQRSLDGVTEALHAFGLELASAKCAAFSLVPSGKAKKIRILTDSQFVSGGCAVPQLGVLQTMRYLGVRFNETGPVFQEIEMLPLLERIGRAPLKPQQRLKILKTYLIPRFTHTLVLGRTSYGHLRKLDKQVRAAARRWFRLPDDIPVAFFHSPVRQGGLGVLSFETSIPRLTLARLEQLGTSQYEVARMVCASAWADRKRRWCGLSGAREDCWPTKLHNMVDGYELREAKNVPASTLWLDDPMVRIPSSEWLRYLKVWINALPTRVRTTRGPRRLREDVACRAGCGVQETAAHVIQQCFRTHGGRIMRHDAVAAVLALELQRGGYSVHRERVFRTQDGVRKPDLLAAKGERGHILDVQIISGARPLSEGHKRKRQYYAGNNDLLGRVSTLLQVPVRNLDITTVTLSWRGIWAKESADALVSLGISRAVMRGVTTRVLKGSFTNFARFNQTTATTRGRANLMMSGWGPPQSIS

SEQ ID NO: 8412 - protein, 978 aa, unidentified
MNSVNDNGDVTVVAGRPNAYVCAICLRSFSSRIGLGVHKRSAHPVEYNEEIRVAQVKRRWNDEEIRLLAVDEAGAPPQTRSMNLYLLERHGEARSLESIKGIRKRQDYKDLVVEYRNRHLIQRIDESVQRDSRNAAAGRGELPLPGPETAMSWLVAKSEDIIPEMNGGIWIRAAICRLREGRSPDDALDEWWNNTFPDLEIARRVRTVRGPRAVQLVSKRKARRVEYRRMQQLWRTNMTKAAHKVLDGDAEGLPHPTLAEQLGFWKPVLETESVVLTRPLTANRTQTELEGIWSPITEGEVINIRLPSASAPGLDGMTVRRWFAEVPAILRATILNMFMATGRVPPRFRHSRTVLIPKSSDLMDPSCYRPISVSSVILRHFHKILAHRLAGRNLLDMRQRAFIAADGCAENVAVLSALLFDARTNCRQIHVITLDVRKAFDTVSHDAIRHVLHKHGIPHEMVEYLSALYRTAAVRLEVDRAFSEELLPGRGVRQGDPLSPLIFNLIMNEILAEVPEQVGFDLTGHRVNALAFADDLVLIGATREGAQLSLERVMKALLAFGLELAPAKCAAFSLVPSGKTKRIKVLTDPQFAAGGRAVPQLGVIQTVRYLGVRFGESGPVAQEVEMLPLLDRITCAPLKPQQRLKILRTYLAPRYIHGLVLGRASYGLLRKLDRRIRTAVRRWLRLPDDVPRAFFHSPMKQGGLGILSFETAVPRMTLARLERLKTSQYEAARVAGSSAWADKKRRWCGLSRRREEDWPAEFHAMVDGFELREAKNVPASTRWLDDCMVHIPSSDWLQYIKVWINALPARVRTTRGPRRLREDVACRAGCGVQETAAHIVQQCFRTHGGRIMRHDAAASTLAGELQRGGYNVRREHVFRTREGVRKPDILASKGERGHVIDVQVISGARPLTEGHHRKRRYYADNSDLLARVSNLLQVPLQNLDVTTATLSWRGVWASESADALTSLGISKVAKCLVI

SEQ ID NO: 8413 - protein, 1013 aa, unidentified
MNSVNDNGDVTVVAGRPNAYVCAICLRSFSSRIGLGVHKRSAHPVEYNEEIRVAQVKRRWNDEEIRLLAVDEAGAPPQTRSMNLYLLERHGEARSLESIKGIRKRQDYKDLVVEYRNRHLIQRIDESVQRDSRNAAAGRGELPLPGPETAMSWLVAKSEDIIPEMNGGIWIRAAICRLREGRSPDDALDEWWNNTFPDLEIARRVRTVRGPRAVQLVSKRKARRVEYRRMQQLWRTNMTKAAHKVLDGDAEGLPHPTLAEQLGFWKPVLETESVVLTRPLTANRTQTELEGIWSPITEGEVINIRLPSASAPGLDGMTVRRWFAEVPAILRATILNMFMATGRVPPRFRHSRTVLIPKSSDLMDPSCYRPISVSSVILRHFHKILAHRLAGRNLLDMRQRAFIAADGCAENVAVLSALLFDARTNCRQIHVITLDVRKAFDTVSHDAIRHVLHKHGIPHEMVEYLSALYRTAAVRLEVDRAFSEELLPGRGVRQGDPLSPLIFNLIMNEILAEVPEQVGFDLTGHRVNALAFADDLVLIGATREGAQLSLERVMKALLAFGLELAPAKCAAFSLVPSGKTKRIKVLTDPQFAAGGRAVPQLGVIQTVRYLGVRFGESGPVAQEVEMLPLLDRITCAPLKPQQRLKILRTYLAPRYIHGLVLGRASYGLLRKLDRQIRTAVRRWLRLPDDVPRAFFHSPMKQGGLGILSFETAVPRMTLARLERLKTSQYEAARVAGSSAWADKKRRWCGLSRRREEDWPAEFHAMVDGFELREAKNVPASTRWLDDCMVHIPSSDWLQYIKVWINALPARVRTTRGPRRLREDVACRAGCGVQETAAHIVQQCFRTHGGRIMRHDAAASTLAGELQRGGYNVRREHVFRTREGVRKPDILASKGERGHVIDVQVISGARPLTEGHHRKRRYYADNSDLLARVSNLLQVPLQNLDVTTATLSWRGVWASESADALTSLGISKAVMRGVTTRVLKGSFMNFARFNQTTETRRGRANMMMSGWGPP

SEQ ID NO: 8414 - protein, 1044 aa, Ceratina calcarata
MESEDETASDAEVPGPGASEVDLSANQEGATVDETGLQMDNETEQIIEMPLSGNIKCAYCSVRNRTRLFLNEKDFMTHTEKDHPQHKIMWKCAPCRKAFGRLHGWRCHFPKCKGTTQTDAGDGVHPCEQCGKSFQSQRGLSIHEMHRHPEVRNRKRATSSRNDQDRNRPSNRALAWSKEEVDLLIILNERYKNDRQPNVAIRQYLPGKTLKQISDKRRLLPAQSSPAPMVPQEGDENSDNSSSTYDSAPEEEVVPLAQEDDDWETPFRESLRAGSPDSSSNFCEIERKIEELAGQSVTEEEDINMLLLEFTEKLKEGVDASSEGRSRDRNTNVERGQRPNRATRQRKYEYARCQEMYKKCPKKLLDLALMNKPLVERQIIDPPTKEEVGPLYENLWGMAGPQCSIAKPRNSAKVLIKDVWTPITMEAVIEKFKKIKNDTAAGVDGIKKAHLRKAGALRAFTKLCNLLMYKRVYPAQWKLNQTTLIPKPGKSVEEASNWRPITIGSLMARLYSGMIDVKLRRNVQQHMRQKGFTTEDGCKHNVAILTSALRQMKENGGGIVTIVDISKAFDTVLHSILESCLTSKGIPAVTAEYISKMYDGCRTKIACRRGESVEMALRRGVKQGDPLSPLLFNLSIDPIIKAIQETTEGIVLGEEKVSILAFADDMVVMAKTRKETEKQIKMLYKKLKVMGMKVSIEKCTTFQIVNKNKTWHLIDPKLVVGQETVPHADPQTTFRYLGVDFDPWRGLQRTQVQEIVDAANCVARMKLKPHQKVNMIRTYLLPRFTHKLVATSPSLGTLEQIDHEIKQVIKKILHLHPSTADGVLYTEKGYGGLGIQKVANIVKLAKLRSVLKMRDAEDEAVREAYYGQEEVAKKYASSIGLSWPTNFESIEESRKSLKKRETDGWKQLVSQGQGVRDFAKDKIGNAWLYNPTLLKPSRYLDAIRLRTNTFGTRVALRRAKKDIDYRCRRCGVQAETLGHVLGNCIHTKPKRIRRHDEICDLIMIKVPRQWAVFREPTVNVLGELRKPDMVIKDQEKVYVVDVTV

SEQ ID NO: 8415 - protein, 988 aa, Ceratina japonica
MHRHPEIRNMKRAMGGSSRETPRPSNRASAWSQEEVDLLIELNERFRNERYPNVAIREFIPNKTLKQISDKRRLLATAQSTPAEPVLPEVDSDSDSVESTYESAPEDESIEINEDDDWEAPFREALRVSDPESNSDFIGIEMKIGELADQPEAGENEVNLLLLEFTEKLKGGVDAEPEVRSRSRNDVRSGRRPNRATQTRRYEYARCQEMYKHCPKKLLDLALMNKSVVDRQRVEPPTKHEVGPLYDALWGMAGPQCSVPRPRDMIGLSRREVWTPVTLEDVVEKFKRIKNDTAAGIDGIKKAHLRKADALLALTKLCNLLMLKGVYPEAWRVNRTTLIPKPGKSVDQVANWRPITIGSLMARIYSGMIDIKLRQKAKQHLRQKGFTAEDGCKYNIAILSSALRHVKENEGGIITIVDISKAFDTVPHSILKSCLHSKGIPTATAEYISRMYNGCKTKIACRNGESYDMLLRRGVKQGDPLSPLLFNLSIDPIIEAIQERTEGISLGDSKVSILAFADDMILLAKTKIEANKQIRILYKMLNDMSMKVSIDKCTTFQVVTKNKSWHIVDPGLVVGQEEVPHADPHTKFKYLGVDFDPWRGLQRTEAQGIAAAANCVARMKLKPHQKVNLIRTYLLPRYIHKLVASSPTLGALDHIDHKVKQVIKRILHLHPSTTDGLLYTEKGYGGLGIQRVANIVKLAKLRSALKMNDTEDEAVREAGSRQEELFKKYASSVGLSWPTTKESIEEARKSLKKKDTDRWRQLVSQGQGVKDFRDKVGKAWLFNPKLLKPSRYLDALKLRTNTFGTRVALRRAKKSIDHTCRRCGMQAETLGHILGNCLHTKPKRIRRHDEICDLIVNKVLRDWTVFREPTVDVLGELRKPDMVIKDQGRVYVVDVTVRYEYQANLPNVYREKVRKYEETAEVLRTKMNGETAVVLPIVVGCRGAMPEATQRNLKLLGLKKEDYMTASLIALRSSIEMANAFIDYNHIH

SEQ ID NO: 8416 - protein, 986 aa, Phormia regina
MGINSSIQLDERPRTRKIPMRKICHKTLRGLDIVINDYLLNRDEPCFEELSMILYSAQSCYDELTKIDRKKSLWIENNQKKIDDALKEAATLENHAKAVKEGKKMPMTKKIKRTLKKNNGKRSDLADLERIANLKRDYARAIAKRIEMHGNRTQYRRENDLFEFNRKLFYRKLNDNKVYDCKQSEEDMTSFWSKVWSKPELKKEDYQILDDLDTKIIEYEDLTESETAINTIQKLIDTLPNWKTPGIDQVYNFFIKNIKSLHNHIIKNIVKSIDTPSLIPDFMYKSYTYLIPKKQVPENASEYRPISCLPTLYKLLTKTITQRLRSFVELNGTISMNQLGTVRNSQGAKEQCLFNEIINSSNSYSLKTCWIDVKKAFDSVRHEYLCKCLEKLGIPAKYIDFIRVAMSKWEINLSYKSKMIGKTKMGRGIIQGDSLSPLLFVLALEPLSRQLNKNLDKVTVQSEEEKIEVNHLIFIDDIKLFANDDETLKSLFDKTSSITKTIGLEINKEKTATNVNTMSGQCPLLEEHEAYKYLGVLETPTGKVSAKAKLVLFKEVKERISQLCKTSLNGKNMIHAINEYGISLINYYCGLLKIEHDEYSKLDLEIRSILTTHRLHFKPANKERLYLPRSLLGRGLNNVEDKAERILLQFHTFLTKRKNVCQRKRCIIYNERTKATQLGLINEYISSKYSVDRLNVKELEKLQYKTLTERIASKSLHSLLFKATKDENVDIKTSSLWLRSGNNPASSEAMYCLLQDRNMFFGKQKLCNHCNTRIKSVDHLATKCGRLLYINYSQRHDEVLRCLHLHYAIQFGFKSSKKIRTHKAAKYIENDKAIIKTDSFIFTDIQITNNKPDIFIHDKVKNKIILVEVGITSQDNLKTYETEKYRKYDLLAKELSIMHKCEVEIIPFVMTWDGIVTKYHNIHVKKIGIDNKTKTYIQSIVLKKTLEAVSFDYRRNNMLQGMGREVAAAEAVEETARVIEKQEWDE

SEQ ID NO: 8417 - protein, 1154 aa, Eufriesea mexicana
MCFGFRVGLDRSECIRYIKVPQFMDRVSRTGASDAGVPGPGTPAADSSAADRRATDDNPGTSPANEMEVYMDLPLSGTIRCGACVRNPKRFLQESQWGEHMRLAHPERKIWWRCARCSRSFEKLHGCRCHLPKCKGPPTTNEGGFMCLLCGSGFGTKIGLSQHERHMHPQVRNIKRAEMGSSSPIQTRSRGTVWSEEETDLLIQLNEKYKNERFPNKKIREYLPQKTLKQISDKRRILPHGEQTGRSDEGNKSLDSSPDDSALEINVENAPEPQENGSWKEALREHILADRLHEESGLKLIEEKIIEATESERVDPIEIEGILEQIEEKLKEGTAGRAGGRDRGGQRGHNKRPQRKESDRTRLAKFQYARYQELYNKCPKKLIDMAVAGVGLEARKRIKLPDRASIEQLYGSLWGRTGPTTGIPKLGGGPSQPTPTENIITPITEAELITKMRRIKTDTAPGIDGVIKPQLRREGALHLLSKFYNMLLMKMYFPQRWKQNRTTLIPKPGRDMEEVENWRPITIGSLLSRIFSAMIDSRMRTAIKQNKRQKGFTKEDGCKNNIAVLGRALQEMKESKGGVVTVVDVTKAFDTVPHAAIGDGLELKGIPITIREYITSMYENCSTEIKTEGSNIEVQLKRGVKQGDPMSPLIFNTIIDPIIESIDRTTEGVALGDENVSVLAFADDLVLLGKNEREAARQLDKLYKYLERLGMSIQTSKCLTFQIVRKNKTWHIRDPNLTLNHLAIPLSGPEDIFRYLGVSISPWRGLQRTEIDAIVKSAQNILKMKLKPYQKVNLIRTHLLPKYIHGMVASPPPLHVLETLDKEIKQVIKSALHLHPTTTDGIIYTEKLNGGLGVQKVADIVRVAKLRSALQMMNNSDPAVREAYNAQKATILKYAKSLRIDWPTSKEEIEKVRVSLRRGHAQRWETLVSQGQGVSSYANDRYGNAWLRTPSLLKPSRYIDALKLRTNTYGTRIALKRAKKQIDPICRKCKGQMETLAHVLGNCISTKPLRIRRHNEIVNFIEEKTSKRYAVYKEATINVVGELKKPDLVIDDQERLRVVDVTVRYEDKDSLYKAAREKEGKYKETAAYLKAKLNRKNAEVLPIVVGSRGAIPPSTVKNLKLLGLSAEDTVTVSLIALRSSIELANMFLDYDSIK

SEQ ID NO: 8418 - protein, 1133 aa, Eufriesea mexicana
MNRENETGASDAGVPGPGTPAADSSAAGQRAADDEIGMSPDNETIMYMDLPLSGSIRCGACARNRKRFLQEAQWAEHMRLAHPDKSIRWRCAQCGKSFEKLHGCRCHLPKCKGIPRTTNVGGLVCLLCGSAFGTKSGLSQHERHMHPNARNIKRAEVNPPKARGRGTVWSQEETDLLADLNERFKGEKFPNMKIREYLPNKSLKQISDKRRTLPLKESAKEQTSTEDEPNQSSGSSSHESALESSAERDTVPPENDSWKEALKVYILANRLEEENSLYELERQIMEAAENDGMDLTKIDDLLERIVEKLNEGTAGGTGGSNRDGKKGNKRIPNRKESDRTRLNKFQYARYQELYHKCPRKLIEMAVAGVGIEAREQLKLPDRAEIEQLYGSLWGNPGPNTGIPKLGGGPSEPTPIDNIITPITEAELIARMRKIKTDTAPGIDGIIKPHLRNKGTLRLLSKFFNVLLLKMYFPQMWRRNRTTLIPKPGKDASDIGNWRPITIGSLISRIFSSMLDSRLRAVIKNNIRQKGFTQEDGCKNNIAVLGRVLQDMKRSKGGVVTVVDVSKAFDTVPHAAIGDGLKLKGIPEPVITYIMKMYECCSTNIKTKDSSIAIDLKRGVKQGDPLSPLIFNIVMDPIIEYINRTTEGIALGDEKVSLMAFADDLVLLGRDGKEAAQQVAKLHKYLTALGMSIQTSKCLTFQVVHKNKTWHIQDPNLMINKKAIPLSGPENIFKYLGISIGPWRGLHRTDINKITKSANNITRMKLKPYQKINLIRTYLLPKYVHEMVANPPPLQLLESLDHEIKQIVKTILHLHPSTTDGVIYTDKRDGGLGMQKVADIVRVAKLKNGLKMMNNSDPAVREAYFSQEAAILKYAKSLRIEWPATEERLEEVRVSLRKGHAKRWETLVSQGQGVSSFANDRYGNAWLRTPALLQPSRYIDAIKMRTNTFGTRIALRRANKQIDPLCRRCKGQVETLAHVIGNCIFTKAARIRRHNEIVNFIEKKASNRYTIYKEATINVVGELKKPDLVMDDQARLKVVDITVRYEDQDSLRKAAKEKGNKYKETAAFLKAKLNRKDADVMPIVVGSRGAMPPGTARALKLLGLTEQEIVTVSLLALRSSIEIANMFLDYDIIR

SEQ ID NO: 8419 - protein, 1131 aa, Eufriesea mexicana
MYSTSRTGASDAGVPGPGTPVADSSAADRRAIDDNPGMSPGNEMEIYMDLPLSGTIRCGACARNPKRFLQESQWGEHMRLAHPERKIRWRCARCGKSFEKLHGCRCHLPKCKGPQTTNVGGFVCLLCGSAFGTKIGLSQHERHMHPQVRNIKRAEMGSSSPVQTRSRGTVWSEEETDLLIELNEKYKNERFPNKKIREYLPQKTLKQISDKRRILPQGVQTGRSDEKGKSPDSSPYESALETSAEYAPEPQENGSWKEALREHILADRLHEESGLKAIEEQIVEATESERVDPLEIEGILERIEEKLKEGTAGRTGGRDKGGERGHNKRPQRKESDRTRLAKFQYARYQELYNKCPKKLIDMAVAGVGLEARKQVKLPDRASIEQLYGSLWGRTGPTTGIPKLGGGPSKPTPTEIIITPITEAELIMKMRRIKTDTAPGIDGVTKPQLRKEGALRLLSKFYNLLLIKMYFPQRWKQNRTTLIPKPGKDAEKVENWRPITIGSLLSRIFSAMLDSRLRTAIQQSTRQKGFTKEDGCKNNIAVLGRALQEMKESKGGVVTVVDVTKAFDTVPHAAIGDGLEMKGIPTIIRKYVTSMYDNCSTEIRTEGSNIEVQIKRGVKQGDPMSPLIFNTIIDPIIESIDKTTEGIALGDENVSVLAFADDLVLLGKNEREAARQLDRLSKYLERLGMSIQTSKCLTFQIVQKNKTWHIRDPNLTLNNSAVPLTGPENIFRYLGVSISPWGGLQRTEIDAIVKSAQNVLRMKLKPYQKVNLIRTHLLPKYIHGMVASPPPLHVLESLDKEIKQIIKSALHLHPTTTDGILYTEKLNGGLGVQKVADIVRVAKLRSALQMMNNSDPAVREAYNAQKATILKYAKSLRVEWPTNKEEIEKVRVSLRKGHAQRWETLVSQGQGVSSYANDRYGNAWLRTPSLLKPSRYIDALKLRTNTYGTRIALKRANKQIDPICRKCKGQVETLAHVLGNCISTKPLRIRRHNEIVNFIEGKTSKRYAVYKEATINVVGELKKPDLVIDDQERLRVVDVTVRYEDKDSLYKAAREKENKYKETAAYLKAKLNRKTAEVLPIVVGSRGTIPPSTVRNLKLLGLSADDIVTVSLIALRSSIELANMFLDYDCIK

SEQ ID NO: 8420 - protein, 1121 aa, Eufriesea mexicana
MVIGIYTYLIMDSTSRTGASDTGVPGPGTPVADFSAADRRATDDEPGMSPGNEMVLYMDLPLSGAIRCGACARNQRRFLQESQWGEHMRLSHPERKVLWRCARCGRSFEKLHGCRCHLPKCKGPQTTNEGGFVCLLCGNSFGTKSGLSQHERHMHPQVRNIKRAEMGNSSTIQTRSRGTVWSKEETDLLIELNEKFKNERFPNMKIREYLPQKTLKQISDKRRILPQREQTIRLDEPNLTSDSSPNESALEISAENAPEPHENGSWKEALRAQILANRLPKEHSLQRIEERIIEAIEDEGGEALAIEGILEQIIEKFKEGTTGRTGGRDRGGERDLTRRPQRKESDRTRFAKFQYSRYQELYHKCPRKLIEMAVAGVGLEARKQVKLPDRASIEQLYGNLWGNTGPTTGIPKLGGGPSEPTPIGNIITPITEAELISKMRKIKTDTAPGIDGVIKPQLRKEGALHLLSKFYNMLLIKMYFPQRWRQNRTTLIPKPGKDMEEVGNWRPITIGSLLSRIFSAMLDSRLRTAIQHNTRQKGFTREDGCKNNIAVLGRALQEMKESKGGVVTVVDVTKAFDTVPHAAIGDGLRLKGIPMPIIEYIASMYNDCTTEIKTGGNSIEVQLKRGVKQGDPMSPLIFNSIIDPIIESIEKTTEGIALGDENVSILAFADDLVLLGKNEKEAARQLAKLNKYLAELGMSIQTRKCLTFQIVRKNKTWHIRDPNLSLNSLAVPLTGPEDIFRYLGISISPWWGLQRTEIDAIVKSAQNILRMKLKPYQKVNLIRTHLLPKYIHGMVASPPPLHVLETLDKEIKQIVKSALHLHPTTTDGIIYTEKRNGGLGVQKVADIVRVAKLRSALHMMNNSDPAVREAYNNQKATILKYAKSLRVEWPTTEEEVEKVRVSLRKGHAQRWETLVSQGQGVSSYANDRYGNAWLRTPSLLKPSRYIDALKLRTNTYGTRVALRRAQKQIDPLCRKCKGQVETLAHVLGNCISTKPLRIRRHNEIVNFIEGKALKRYAVYKEATINVVGDLKKPDLVIDDQERLRVVDITVRYEDKDSLYKAAREKEAKYKETAAYLKVKLNRKNAEVLPIVVGSRGSIPPSTAKNLKLLGLSADDIVTVSL

SEQ ID NO: 8421 - protein, 1142 aa, Eufriesea mexicana
MIIGIYTYLIIMESTSRTGASDTGVPGPGTPVADFSAADRRANVDEPGTSPANEMVLYMDLPLSGTIRCSACARNPRRFLQESQWGEHMRLAHPERKVLWRCARCGRSFEKLHGCRCHLPKCKGPQTTNEGGFVCLLCGNAFGTKSGLSQHERHMHPQVRNIKRAEGGNSGTIQTRSRGTVWSEEETDLLIELNEKFKNERFPNMKIREYLPQKTLKQISDKRRILPQREQTIRLDEPNITSDSSPNESVLEISAENAPEPHENGSWKEALRAQILANRLPREHSLQRIEERIIEAIEGEGGEALVIEGILEQMVEKFKEGTTGRTGGRNSGGERGLTRRPQRKESDRTRFAKFQYSRYQEMYHKCPRKLIEMAVAGVGLEARKQVKLPDRASIEQLYGNLWGNTGPTTGIPKLGGGPSEPTPIGNIITPITEAELISKMRRIKTDTAPGIDGVIKPQLRKEGALHLLSKFYNMLLIKMYFPQRWRQNRTTLIPKPGKDMEEVGNWRPITIGSLLSRIFSAMIDSRLRTAIQHNTRQKGFTREDGCKNNIAVLGRALQEMKESKGGVVTVVDVTKAFDTVPHAAIGDGLRLKGIPMPIIEYVTSMYNDCTTEIKTGGNSIEVQLKRGVKQGDPMSPVIFNSIIDPIIESIEKTTEGIALGDENVSILAFADDLVLLGKNEKEAARQLAKLNKYLTELGMSIQTSKCLAFQIVRKNKTWHIRDPNLSLNNLAVPLTGPEDIFRYLGISISPWWGLQRTEIDAIVKSAQNILRMKLKPYQKVNLIRTHLLPKYIHGMVASPPPLHVLETLDKEIKQIVKSALHLHPTTTDGIIYTEKRNGGLGVQKVADIVRVAKLRSALHMMNNSDPAVREAYNNQKATILKYAKSLRVEWPTTEEEVEKVRVSLRKGHAQRWETLVSQGQGVSSYANDRYGNAWLRTPSLLKPSRYIDALKLRTNTYGTRVALRRAKKEIDPLCRKCKGQVETLAHVLGNCISTKPLRIRRHNEIVNFIEGKALKRYAVYKEATINVVGDLKKPDLVIDDQERLRVVDITVRYEDKDSLYKAAREKEAKYKETAAYLQAKLNRKNAEVLPIVVGSRGTIPPGTAKNLKLLGLSADDIVTVSLIALRSSIELANMFIDYDCIK

SEQ ID NO: 8422 - protein, 1132 aa, Eufriesea mexicana
MYSSTNRTGASDAGVPGPGTPVADSSAAGRRATDDNPGMSPGNETEIYMDLPLSGTIKCGACARNPKRFLQESQWGEHMRLAHPERKIWWRCARCGKSFEKLHGCRCHLPKCKGPPTTNVGGFVCLLCGSAFGTKIGLSQHERHMHPQVRNIKRAEMGSSSPVQTRSRGTVWSEEETELLIELNEKYKNERFPNKKIREYLPQKTLKQISDKRRILPHGAQIGRFDEKGESPDSSPYKSTLETSEENAPEPQENGSWKEALREHILADRLQEESGLKGIEEQIIEATESERVDPLEIEGMLERIEEKLKEGTAGGTGGRDKGGRRGHNKRPQRKESDRTRLAKFQYARYQELYNKCPKKLIDMAVAGVGLEARKQVKLPDRASIEQLYGSLWGRTGPTTGIPKLGGGPSQPTPTKSIITPITEAELIMKMRRIKTDTAPGIDGVTKPQLRKEGALRLLSKFYNMLLIKMYFPQRWKQNRTTLIPKPGKDAEKVENWRPITIGSLLSRIFSAMLDSRLRTAIQQSTRQKGFTKEDGCKNNIAVLGRALQEMKESKGGVVTVVDVTKAFDTVPHAAIGDGLELKGIPKIIRKYITSMYDNCSTEIRTEGSNIEVQLRRGVKQGDPMSPLIFNTIIDPIIESIDKTTEGIALGDENVSVLAFADDLVLLGKNEKEAARQLDGLNKYLERLGMSIQTSKCLTFQIVRRNKTWHIRDPNLTLNNSAVPLTGPEDIFRYLGISISPWGGLQRTEIDAIVKSAQNVLRMKLKPYQKVNLIRTHLLPKYIHGMVASPPPLHVLESLDKEIKQIIKSALHLHPTTTDGIIYTEKLNGGLGVQKVADIVRVAKLRSALQMMNNSDPAVREAYNAQKATILKYAKSLRVEWPTNKEEIEKVRVSLRKGHAQRWETLVSQGQGVSSYANDRYGNAWLRTPSLLKPSRYIDALKLRTNTYGTRVALKRAKKQIDPICRKCKGQVETLAHVLGNCISTKPLRIRRHNEIVNFIEGKAIKRYAVYKEATINVVGELKKPDLVIDDQERLRVVDVTVRYEDKDSLYKAAREKEAKYKETAAYLKAKLNRKNAEVLPIVVGSRGTIPPSTVRNLKLLGLSADDIVTVSLIALRSSIELANMFLDYDCIK

SEQ ID NO: 8423 - protein, 1166 aa, Eufriesea mexicana
MQDTEGASDTGAPGPGAPVADSSAADRRAIGNDPGKSPVHELEITIDLPLSGVISCAACAKSKKRFLQEGQWAEHMRLAHPKHKVWWRCASCEKAFEKLHGCRCHIPKCKGPRPDNTEGHKCLLCGSAFGTKVGLSQHERHMHPGIRNIKRAETINPRPVRTTRAAVWSKEEVDLLVTLDERYRSERFPNVKIREHIPNKTLKQISDRRRLLPPKGNNNNDMDRSADSSSNHESITEEAPSPIGATNNDWKEAFRKEINSERLEAQHDLYEIENMIIETAKGGEPDVNGIERILLLITEKIKEGSAERTGGRRRGENKRPSKRISDRTRLSKFEYSRYQELYNKCPRKLVDMAVAGVGLEAGKQVKLPDRADIEELYGSLWGSPGPTTGIPKLGGGPSPPTPLGEIWKPISIVELIDKMKKTKADTAPGVDGVTKVHLRKKGALHVLMKFYNLLMLYMYFPRQWCKNRTTLIPKPGKDISDIRNWRPITIGSLMSRLFSSMIDKRLRWQIKNHIRQKGFTREDGCKHNISILSRALTEMKERSGGIVTIVDVSKAFDTVPHAAIGDGLKLKGIPAAVTKYILSMYDGCETNIRTREDDIHINLKRGVKQGDPLSPLIFNTVIDPIIGSIEETTEGVLMGEERVSVLAFADDLVLLGGSENEAAEQLKTLDKYLRQLGMSVQANKCSAFRVVRRNKSWHIQDPRLKIKEQAIPFSGPDDVFKYLGVTISPWRGLQRINIDKIMSSVRNVAKMKLKPHQKVNLIRTHLLPKFIHEMVASSPPLHTLESLDHEVKQVIKQILHLHPSTTDGIIYSNKINGGLGIQKVADIVRIAKLKSGLHMMNSEDNAVREAYKNEEGTMLKYAKSLRMEWPTTGEEIEKVRASLQQGHSERWGALSSQGQGVDCFTNDKYGNTWLYTPSLLQPSRYIDALKLRTNTYGTRVALKRVNKEIDPICRRCKGQIETLAHILGNCIFTKPSRIRRHNEIVNIIEEKVSRKQAVYKEATVSVVGELKKPDLVIDDHKRLRVVDVTVRYEDKGSLRKAAKDKIEKYKDTAKYLKQRLNREGAEVLPIVVGSRGAIPPTTVKNLKTLGLRAEDIKTISLIALRSSIEIANKFIDYDYILFIYLFIILLSDCLRADEILCHDQAPRANANFKPRHGQWPRKQFYI

SEQ ID NO: 8424 - protein, 1126 aa, Eufriesea mexicana
MENTNKDGASDAGVPGPGTPVADSSAADRRATVDDPGKSLEHELEIFINLPLSGVISCAACTRSKKRFLQESQWAEHMRLAHPKHKVWWRCASCEKTFDKLHGCRCHLPKCKGPRPENFEGHKCLLCGSTFGTKIGLSQHERLIHPGIRNIKRAETVNPRPVRTTRAAVWSKEEIDLLATLDERYRKERFPNVKIREYIPNKTLKQISDRRRLLPPKGNKEADKSTGSSSNYDSATEEVLSPAEAINNEWKAVFVTEINSQRLEVENDLYEIENKIIEMANGGEPDLEGIEETLLLITRKLCEGSAEGTGGRRRGEKGTGKGSRRKESDRTRLSKFEYSRYQELYNKCPRKLVDMAVAGVGLEAGKQVKLPDRADIKELYGNLWGSLGPTTGIPKLGGGPSQPTPIEDIWRPISIVELINKMKKMKTDTAPGVDGVTKAHLRKKGALHVLTKFYNLLMLYMYFPRQWCQNRTTLIPKPGKETNDITNWRPITIGSLMSRIFSSMIDTRLRWHIKNHKRQKGFTREDGCKHNIAVLSRALTEMKERSGGVVTIVDVSKAFDTVPHATIGDGLKLKGIPAAVSKYISSMYDGCKTKIRTREDDLEIDLKRGVKQGDPLSPLLFNTIIDPIIGSIEEMTEGVMMGEERVSVLAFADDLVLLGAGESEAAEQLKMLDKYLRQLGMSIQASKCSAFRVVRRSKTWHIQDPRLTVRSQAIPFSGPDDIFKYLGVTISPWRGLQCINTDKIMASLRNVAKMKLKPHQKVNLIRTHLLPKFIHEMVASSPPLRILESIDHETKQIIKQILHLHPSTTDGIIYSSKVNGGLGIQKVANIVRIAKLKSGLCMMNSEDTAVREAYQKEKDIIMKYAKSLRIEWPTTGEEIEKMRASLQQGHTERWGALSSQGQGVDSFSNDKYGNINAWLYTPSLLKPSRYIDALKLRTNTYGTRVALKRANKEIDPICRRCKGQIETLAHILGNCIFTKPSRIRRHNEIVNIIEEKVSQKHAVYKEATISVVGELKKPDLVIDDHKRLRVVDVTVRYEDKDSLKKASKDKMEKYKDTAKYPKQRLNREGAEVLPIVVGSRGAIPPATARNLKTLGLRAEDIKTISLIALRSSIEIANKFMDYDYII

SEQ ID NO: 8425 - protein, 1006 aa, Eufriesea mexicana
MDDTEGASDTGAPGPGAPVADSSAIDRRAIDDDPSKSPVHELEITIDLPLSGVISCEACARSKKRFLQEGQWAEHMRLAHPKYKVWWRCGSCKKAFEKLHGCRCHLPKCKGPRPENKEEHKCMLCGSAFSTKIGLSQHERHVHPGIRNIKRAEAAKPKPVGTTTRATAWSKEEVDLLITLDEKFHKERFPNVKIREYIPNKTLKQISDKRRLLPTKGNNNNKDANKSTDSSSNYESTTEEAPSPAGASNNDWKEAFRKEINTGRLEEQHDLYEIEKMIIEAANGGEPDANGIEKILLQITEKVKEGSAERTGGRRRGEKKANKRPSKKKSDRTRLSTFEYSRYQELYNKCPRKLVDMAVAGIGLEAGKQVKLPDRADIEELYGSLWGSLGPSTGIPKLGGGPSPPIPLEEIWRPISIVELVDKMKKTKTDTAPGVDGVTKTHLRKNGALHVLMKFYNLLMLYMYFPRQWCQNRTTLIPKPGKDTKDIKNWRPITIGSLMSRIFSSMIDKRLRWKIKNHIRQKGFTREDGCKHNISILSRALTEMKERSGGVVTIVDVSKAFDTVPHAAIGDGLKLKGIPAAVTNYILSMYDGCQTKIRTREDDIQINLKRGVKQGDPLSPLIFNIILDPIIGSIEEATEGILTGDERVPVLAFADDLVLLGNSESEAAEQLKMLDKYLRRLGMSIQANKCSAFRVVRKSKTWHIQDPKLTIEKQAIPCSGPDDIFKYLGVTISPWRGLQRIDINKVTSSLRNVVKMKLKPHQKINLIRTHLLPKFIHEMVASSPPLHTLETLDHEAKQIIKQILHLHPSTTDGIIYTNKINGGLGIQKVADIVRIAKMKSGLRMMSSEDNAVREAYKNEEGTILKYAKSLRMEWPTTGEEIEKVRASLQQGHSERWGALSSQGQGVDCFTNDKYGNAWLYTPSLLKPSRYIDALKLRTNTYGTRVALKRVNKEIDPICRRCKGQIETLAHIVGNCIFTKPSRIRRHNEIVNLKECPKDTRYTRRLP

SEQ ID NO: 8426 - protein, 1124 aa, Eufriesea mexicana
MENTNKDGASDAGVPGPGTPVADSSAADRRATVDDPGKSLEHEMEIFINLPLSGVISCVACTRSKKRFLQESQWADHMRLAHPKHKVWWRCASCEKSFDKLHGCRCHIPKCKGPRPEEIEGLKCLLCGSAFSTKAGLSQHERHMHPGIRNIKRAETVNPRPARTTRAAVWSKEEIDLLATLDEKFRKERFPNVKIREYIPNKTLKQISDRRRLLPPKGSKDADKSTGSSSNYDSATEEALSPVEAINNEWQAVFVTEINSQRLEVENDLYEIENKIIEMANGGEPDLEGIEETLLLITRKLSEGSAEGTGGRRRGEKETSKGSRRKESDRTRLSKFEYSRYQELYNKCPRKLVDMAVAGVGLEAGKQVKLPDRADIKELYGNLWGCLGPTTGIPKLGGGPSQPTPIEEIWKPISIVELINKMKKIKTDTAPGVDGVTKSHLRKKGALHVLTKFYNLLMLYMYFPRQWCQNRTTLIPKPGKETNDITNWRPITIGSLMSRIFSSMIDTRLRWHIRNHKRQKGFTREDGCKHNIAILSRALTEMKERSGGVVTIVDVSKAFDTVPHATIGDGLKLKGIPAAVSKYISSMYDGCKTKIRTREDNLEIDLKRGVKQGDPLSPLLFNTIIDPIIGSIEETTEGVMMGEERVSVLAFADDLVLLGASESEAAEQLKMLDKYLRQLGMSIQANKCSAFRVVRRSKTWHIQDPRLTVRSQAIPFSGPDDIFKYLGVTISPWRGLQCINKEKIMASLRNVAKMKLKPHQKVNLIKTHLLPKFIHEMVSSSPPLRILESIDHEAKQIIKQILHLHPSTTDGIIYSSKVNGGLGIQKVANIVRIAKLKSGLCMMNSEDTTVREAYQKERDIIMKYAKSLRIEWPTTGEEIEKMRASLQQGHTERWGALSSQGQGVDSFSNDKYGNAWLYTPSLLKPSRYIDALKLRTNTYGTRVALKRANKEIDPICRRCKGQIETLAHILGNCIFTKPSRIRRHNEIVNIIEEKVSQRHAVYKEATISVVGELKKPDLVIDDHKRLRVVDVTVRYEDKDSLKKASKDKVEKYNDTAKYLKQKLNREGAEVLPIVVGSRGAIPPATAKNLKTLGLRAEDIKTISLIALRSSIEIANKFMDYDYII

SEQ ID NO: 8427 - protein, 1124 aa, Eufriesea mexicana
MDNTNKDGASDTGVPGPGTPVADSSAADRRATVDDPGKSLEHEMEVFINLPLSGVISCAACTRSKKRFLQESQWAEHMRLAHPKHKVWWRCASCEKAFDKLHGCRCHMPKCKGPRPEDIEGLKCLLCGSAFSTKAGLSQHERHMHPGIRNIKRSETVNPRPARTTRAAVWSKEEIDLLTTLDEKFRRERFPNVKIREYIPNKTLKQISDRRRLLPPKENKDADKSTGSSSNYDSATEEALSPVEAINNEWQAVFVTEINSQRLEVENDLYEIENKIIEMANGGEPDLEGIEETLLLITRKLSEGSAEGTGGRRRGEKGTGKGSRRKESDRTRLSKFEYSRYQELYNKCPRKLVDMAVAGVGLEAGKQVKLPDRADIKELYGNLWGSLGPTTGIPKLGGGPSQPTPIEEIWRPISIVELINKMKKIKTDTAPGVDGVTKTHLRKKGALHVLTKFYNLLMLHMYFPRQWCQNRTTLIPKPGKETNDITNWRPITIGSLMSRIFSSMIDTRLRWHIKNHKRQKGFTREDGCKHNIAILSRALTEMKERSGGVVTIVDVSKAFDTVPHATIGDGLKLKGIPAAVSKYISSMYDGCKTKIRTREDDLEIDLKRGVKQGDPLSPLLFNTIIDPIIGSIEETTEGVMMGEERVSVLAFADDLVLLGASESEAAEQLKMLDKYLRQLGMSIQANKCSAFRVVRRSKTWHIQDPRLTVRSQAIPFSGPDDIFKYLGVTISPWRGLRCINTDKIMTSLRNVAKMKLKPHQKVNLIRTHLLPKFIHEMVASSPPLRVLESIDHEAKQIIKQILHLHPSTTDGIIYSSKANGGLGIQKVANIVRIAKLKSGLGMMNSEDTAVREAYQKERDIIMKYAQSLRIEWPTTGEEIEKMRASLQQGHTERWGALSSQGQGVDSFSNDKYGNAWLYTPSLLKPSRYIDALKLRTNTYGTRVALKRANKEMDPICRRCKGQIETLAHILGNCIFTKPSRIRRHNEIVNIIEEKVSQRHAVYKEATINVVGELKKPDLVIDDHKRLRVVDVTVRYEDKDSLQKASKDKIEKYKDTAKYLKQKLNREGAEVLPIVVGSRGAIPPATAKNLKTLGLRAEDIKTISLIALRSSIEIANKFMDYDYII

SEQ ID NO: 8428 - protein, 837 aa, Eufriesea mexicana
MEGILEQIVEKLKEETAGGTGGRDGGGKRGHNNRPRRKESDRTRLAKFQYSRYQEMYNKCPKKLVEMAVAGVGLEARKQVQLPDRASIEQLYGSLWGISGPTAGIPKLGGGPSAPTPIGNIFTPITEAELINKMRKIKTDTAPGIDGVTKPQLRKEGALRLLSKFYNLLLIKMYFPRTWKQNRTTLIPKPGKDAKDVGNWRPITIGSLINRIFSAMVDSRLRTAIQNNIRQKGFTKEDGCKNNIAVLGRALQEMRRSKGGVVTVVDVSKAFDTVPHAAISDGLKLKGIPELAINYISSMYNDCSTEIKTQGSNIEVRLKRGVKQGDPMSPLIFNTIIDPIIGSIEETTEGIALGDENVSILAFADDLVLLGKNEGEAAQQVAMLNEYLAALGMSIQANKCLTFQVVHRNKTWHIRDPNLTLNNMAFPFAGPEDIFSYLGISISPWRGLQRTDIDRIVKSAENILKMKLKPHQKVNLIRTHLLPKYIHGMVASPPPLHILESLDLEIKRVIKTALHLHHTTTDGIIYTEKLNGGLGVQKVADIVRVAKLRSALQMMNNSDPAVREAYENQKATIQKYAKSLKVGWPVANKEEIEKVRVGLRQGHAQRWGTLVSQGQGVSSFANDRYGNAWLRTPSLLKPSRYIDALKLRTNTYGTRVALKRARKEIDPICRKCNGQIETLAHVLGNCISTKPLRIRRHNEIVNFIEQKTSKRYAVYKEATVNVVGELKKPDLVINDQDRLRVVDVTVRYEDKDSLYKAAKEKEVKYKETAAYLKKKLNKKHAEVLPIVVGSRGAIPPSTAKNLKLLGLTTADIVTVSLIALRSSTEIANMFLDYDYIV

SEQ ID NO: 8429 - protein, 1133 aa, Eufriesea mexicana
MNSESENGASDAGVPGPGTPAADSSAAGRRATADETGTSPGNELDIYMDLPLSGPIKCGACARNQKRFLQEGQWGEHMRLAHPDKKVWWRCARCGKSFEKLHGCRCHLPKCKGPPTTNMGGFVCLLCRSAFGTKSGLSQHERHMHPQVRNIKRAEMGNSSPVRTRSRAIVWSEEETNLLIELNEKFKNERFPNMKIREYLPQKTLKQISDKRRILPHREQTNRPDGSNESSDSSPNATALETSAENEPEQSENGSWKDALREYILADRLREENGLRVIEEQIIEAIESEGVDPVRMEGILEQIVEKLKEETAGGTGGRDGGGKRGRNNSPRRKESARTRLARFQYSRYQEMYNKCPKKLIEMAVAGVGLEARKQVQLPDRASIEQLYGSLWGISGPTTGIPKLGGGPSAPTPIGNIFTPITEAELISKMRKIKTDTAPGIDGVTKPQLRKEGALRLLSKFYNMLLIKMYFPCKWKQNRTTLIPKPGKDAKDVGNWRPITIGSLINRIFSAMLDSRLRTVVQNNIRQKGFTREDGCKNNIAVLGRALQEMRRSKGGVVTVVDVSKAFDTVPHAAISDGLRLKGIPEMAIKYISSMYNDCSTEIKTQGSNIEVRLKRGVKQGDPMSPLIFNTIIDPIIGSIEETTEGIALGDGNVSILAFADDLVLLGKNEGEAAQQIAMLNEYLAALGMSVQANKCLTFQVVHKNKTWHIRDPNLTLNNMAFPFAGPEDIFSYLGISISPWRGLQRTDIDRIVKSADNILKMKLKPHQKVNLIRTHLLPKYIHGMVASPPPLHILESLDLEIKRVIKTALHLHHTTTDGIIYTEKLNGGLGVQKVADIVRVAKLRSALQMMNNSDPAVREAYENQRATIQKYAKSLKVGWPAASKEEIEKVRVSLRQGHAQRWGTLVSQGQGVSSFANDRYGNAWLRTPSLLKPSRYIDALKLRTNTYGTRVALKRARKEIDPICRKCNGQMETLAHVLGNCISTKPLRIRRHNEIVNFIEQKTSERYAVYKEATVNVVGDLKKPDLVINDQDRLRVVDVTVRYEDKDSLYKAAKEKEVKYKETAAYLKKKLNKKHAEVLPIVVGSRGAIPPSTAKNLKLLGLTTADIVTVSLIALRSSTEIANMFLDYDYIVL

SEQ ID NO: 8430 - protein, 760 aa, Brachyptera putata
MYQKTQYFYYNQRKKAVNTIIRGDSPKCRIGSGALYEAFSNRFSSANDQVREEYTSRLSDEEQAMSSTFSTSISEEHIADAIKSIRVDTAPGPDRVLMRIVKSKRVIKILSLIATTMLSKCWVQSSFKKARTILIFKSGDTSEPSNWRPVSIFSVLRRVIERVLDKFARYYETFNPHQKGFTRTPGTYLNISIVNAILEKVKREKGNATLVFLDISKAFDNVGHKHLAATIRASSIPLPVQNLIIELQEGNTTQVEANNEKTKEIVISRGVMQELSPFLYNLATYHILDGLSENEVSDMYGYRLVGNLDKLSVLGFANDTVIIGEDTRSAASLTLMAKSRFEQLGLELNVTKSIAIVIENGKLKEEPLQITKDMVIKSISQNESIRYLGVCFNKSIVTDHGALINNLKSKLQTLTSSHLLKADQKLNVLDQYIWPTLVYPLQNASISSLPMKYPDDLDKIIRSTIKEILSLPGDTPDSMLYTDKKYKGLGTFRAKWEAFVQHHNICQVIEKAKDPYVQKTRDTTSERKICLEKLNITPEELQRKGGSSKLSSRTIRDCLRDKEFNSWCSLIKKGRGVVMYKDFTPANKWVSNKKRLSSSEWRDALKFTCNTAPVRALHGRSQDGYHCRHCLSEKENLPHVLGFCSHGELLRNTRHHSALAVELRKNGLEVYEEVSCTGVNDSSRRVDIIAINRVTRQAYILDPTIRFETTSNQADEVDAEKKLRDLRAHHTIFFSLIQSAGRESDWTLDWCQKHNSSLLR

SEQ ID NO: 8431 - protein, 1110 aa, Brachyptera putata
MTRRGDGGNNCLSIISEENDSGQSTQTLHTFTCPNCEEKFPPSANVDFLDHFDHCAQRPQINTQVQNTASQSGDNRAPCPYCGKYFLRVKTHIAKSHRDHQKKSIKDQVNLNVECIIANGNTLQSNDGVSMENDETIDNNTEQSKLKPCPHCGKLFLKVRTHITRSHPEIHRELISSKYPEKKEKTKLKQKHNPYTGLQKVTNTDEDPLLPGNTVSTKDSNEAILHTELDEWILVFKSDLNQEEFNLKIEQLSTYLSNSIRYLLGPKHPSTRYYHARKNGNFKSNDRTFKDTTNPQRRSKRERIRRNEEFMYQKTQYFYYNQRKKAVNTIIRGDSPKCRIGSGALYEAFSNRFSSANDQVRDEYTSRLSDEEQAMSSTFSTSISEEHIADAIKSIRVDTAPGPDRVLMRIVKSKRVIKILSLIATTMLSKCWVPSSFKKARTILIFKSGDTSEPSNWRPISIFSVLRRVIERVLDKFARYYETFNPHQKGFTRTPGTYLNISIVNAILEKVKREKGNATLVFLDISKAFDNVGHKHLAATIRASSIPLPVQNLIIELQEGNTTQVEANNEKTKEIVISRGVMQGAPLSPFLYNLATDHILDELSENEVSDMYGYRLVDNLDKLSVLGFADDTVIIGEDTRSAASLTLMAKSRFEQLGLELNVTKSIAIVIENGKLKEEPLQITKDMVIKSISQNESIRYLGVCFNKSIVTDHGALINNLKSKLQTLTSSHLLKADQKLNVLDQYIWPTLVYPLQNAPISSLPMKYLDDLDKIIRSTIKEILSLPGDTPDSMLYTDKKYKGLGTFRAKWEAFVQHHNICQVIEKAKDPYVQKTRDTTSERKICLEKLNITPEELQRKEGSSKLSSRTIRDCLRDKEFNSWCSLIQKGRGVVMYKDFTPANKWVSNKKGLSSSEWRDALKFTCNTAPVRALHGRSQDGYHCRHCLSEKETLPHVLGFCSHGELLRNTRHHSVRSALAVELRKNGLEVYEEVSCTGVNDSSRRVDIIAINRVTRQAYILDPTIRFETTSNQADEVDAEKKLIYEPTIPYFLSLYNLLDVEVIGLLIGARGTIPHFFVEFCKRFNISNSFIYSLTLLALKGSISIFRNHLYNLN

SEQ ID NO: 8432 - protein, 1110 aa, Brachyptera putata
MTRRGDGGNNCLSIISEENDSGQSTQTLHTFTCPNCEEKFPPSANVDFLDHFDHCAQRPQINTQVQNTASQSGDNRAPCPYCGKYFLRVKTHIAKSHRDHQKKSIKDQVNLNVECIIANGNTLQNNDGVSMENDETIDNNTEQSKLKPCPHCGKLFLKVRTHITRSHPEIHRELISSKYPEKKEKTKLKQKHNPYTGLQKVTNTDEDPLLPGNTVSTKDSNEAILHTELDEWILVFKSDLNQEEFNLKIEQLSTYLSDSIRYLPGPKHPSTRYYHARKNGNFKSNDRTFKDTTNPQRRSKRERIRRNEEFMYQKTQYFYYNQRKKAVNTIIRGDSPKCRIGSGALYEAFSNRFSSANDQVRDEYTSRLSDEEQAMSSTFSTSISEEHIADAIKSIRVDTAPGPDRVLMRIVKSKRVIKILSLIATTMLSKCWVPSSFKKARTILIFKSGDTSEPSNWRPISIFSVLRRVIERVLDIFARYYETFNPHQKGFTRTPGTYLNISIVNAILEKVNREKGNATLVFLDISKAFDNVGHKHLAATIRASSIPLPVQNLIIELQEGNTTQVEANNEKIKEIVISRGVMQGAPLSPFLYNLATDHILDELSENEVSDMYGYRLVDNLDKLSVLGFADDTVIIGEDTRSAASLTLMAKSRFEQLGLELNVTKSIAIVIENGKLKEEPLQITKDMVIKSISQNESIRYLGVCFNKSIVTDHGALINNLKSKLQTLTSSHLLKADQKLNVLDQYIWPTLVYPLQNAPISSLPMKYLDDLDKIIRSTIKEILSLPGDTPDSMLYTDKKYKGLGTFRAKWEAFVQHHNICQVIEKAKDPYVQKTRDTTSERKICLEKLNITPEELQRKEGSSKLSSRTIRDCLRDKEFNSWCSLIQKGRGVVMYKDFTPANKWVSNKKGLSSSEWRDALKFTCNTAPVRALHGRSQDGYHCRHCLSEKETLPHVLGFCSHGELLRNTRHHSVRSALAVELRKNGLEVYEEVSCTGVNDSSRRVDIIAINRVTRQAYILDPTIRFETTSNQADEVDAEKKLIYEPTIPYFLSLYNLLDVEVIGLLIGARGTIPHFFVEFCKRFNISNSFIYSLTLLALKGSISIFRNHLYNLN

SEQ ID NO: 8433 - protein, 1110 aa, Brachyptera putata
MTRRGDGGNNCLSIISEENDSGQSTQTLHTFTCPNCEEKFPPSANVDFLDHFDHCAQRPQINTQVQNTASQSGDNRAPCPYCGKYFLRVKTHIAKSHRDHQKKSIKDQVNLNVECIIANGNTLQSNDGVSMENDETIDNNTEQSKLKPCPHCGKLFLKVRTHITRSHPEIHRELISSKYPEKKEKTKLKQKHNPYTGLQKVTNTDEDPLLPGNTVSTKDSNEAILHTELDEWISVFKSDLNQEEFNLKIEQLSTYLSNSIRYLPGPKHPSTRYYHARKNGNFKSNDRTFKDTTNPQRRSKRERIRRNEEFMYQKTQYFYYNQRKKAVNTIIRGDSPKCRIGSGALYEAFSNRFSSANDQVRDEYTSRLSDEEQAMSSTFSTSISEEHIADAIKSIRVDTAPGPDRVLMRIVKSKRVIKILSLIATTMLSKCWVPSSFKKARTILIFKSGDTSEPSNWRPISIFSVLRRVIERVLDKFARYYETFNPHQKGFTRTPGTYLNISIVNAILEKVKREKGNATLVFLDISKAFDNVGHKHLAATIRASSIPLPVQNLIIELQEGNTTQVEANNEKTKEIVISRGVMQGAPLSPFLYNLATDHILDELSENEVSDMYGYRLVDNLDKLSVLGFADDTVIIGEDTRSAASLTLMAKSRFEQLGLELNVTKSIAIVIENGKLKEEPLQITKDMVIKSISQNESIRYLGVCFNKSIVTDHGALINNLKSELQTLTSSHLLKADQKLNVLDQYIWPTLVYPLQNAPISSLPMKYLDDLDKIIRSTIKEILSLPGDTPDSMLYTDKKYKGLGTFRAKWEAFVQHHNICQVIEKAKDPYVQKTRDTTSERKICLEKLNITPEELQRKGGSSKLSSRTIRDCLRDKEFNSWCSLIQKGRGVVMYKDFTPANKWVSNKKGLSSSEWRDALKFTCNTAPVRALHGRSQDGYHCRHCLSEKETLPHVLGFCSHGELLRNTRHHSVRSALAVELRKNGLEVYEEVSCTGVNDSSRRVDIIAINRVTRQAYILDPTIRFETTSNQADEVDAEKKLIYEPTIPYFLSLYNLLDVEVIGLLIGARGTIPHFFVEFCKRFNISNSFIYSLTLLALKGSISIFRNHLYNLN

SEQ ID NO: 8434 - protein, 1165 aa, Crocallis elinguaria
MMMPEESGQKQNFTRFERLFRDRNPENPKIRKFTGNTLSNQARSIISRKYISTQVLDEIKAKAEQSLSQNSHETIADTDQNVPITHMSPVITNAQTIHTQDTEHIIQHPNQDIPHTPTQHIDTPERHTIPNSEIPDIQVDENQDPLILQFLQTLAETREISVESRETLPKPKFSKKFAENLRKINNFLPSLLVTNTSLREINDIIYASAKTLIIANDQIPYTLPNTRKPKRDPPWKTRLKNKTEAFRKELARLIEIKRGNNSRTMQRIRENLFSKYDIRNDKDLDYTIEIHTQKIKALAGRIKRYNDMNERKVQNKLIQENQHKFYRSLNGEQQVPTQIPSEEEIQGFWSSILSQPVPYNTEAPWITEVEEAMENVEEHTFREIDVDKLKIAIRKTHNWKAPGIDKIQNYYLKYLTTTHKYIATLFDRIMKGIEPVDQWFTTGMVILIPKNEQTEDPKNWRPIACLPTMYKLLTSVIANELYIHCDKNDILAPEQRGCRRRARGCKDHLMINKAILEDAQQCMKNLSMAWVDYQKAFDSISHEWLLKVLDIYKCPPAIKCFLERVMPLWNVIMTAYGANTSVTTDPIYIRRGIFQGDSLSPLLFCLGLNPLSLVLNKYESKGYRLKDSGNINHLLYMDDLKLYANNSNNLKVLIDSTEVFTADIGMKFGLNKCNVLHLVRGRRQDHEGRGHVLLSGEEFAHLNSGEQYKYLGVHESGKIDHTEARQQIQKEYFRRVKCLVSSHLNARNLLRSINIYAVPVLLYTFGIINYKTSDLRKIDIKTRKILAMNKAHHQKAEIERLYLPIEEGGRGLTNLEMLYKTQIIKYEKYLASEQDHIITAIVQHDRNRVKYSINKEAQDNLAEIGLGTVENYTDKEITNAVTKTKINKWKAKPLHGQFYKKVIEKENIDKKYSFQWLKKQPVTPGLESSIFAIQDQAVVTKQHERDILKRSVDGRCRLCLVKDETTQHIVSGCEKLAGTYYTRRHNNIVQYIYWTLAKKHKFEVSHLWWKDHLTQPQVKENETAKLMWEIPVQTDTTIVHNRPDIIYINKIENRTHLIDVTVPSDYNIGAKEVEKLSKYHALKTEITRLWKTPTEVIPIVVGATGVVAKSLHRYCSKLDSQINIHIIQKQAAIHTVTIISKVLGDTVFVNRGGNSNEGESEQPFP

SEQ ID NO: 8435 - protein, 1262 aa, Trapezites symmomus
MESTTNNLRKGPLPGGDRRGTSVAGVGRLSMLASDSRRTGWSGVGDRGVRGRSLDATADESTGDTLWSRDVSPTGSAGSLESTTGSSKDDARRKWSHTELQELMFCYYQAKAGGPGYIKRLESLFRNRNPHNAKSRKFTGNTLSNQVRSVLSRRCIAKEVLDEIKRKAEKALNPTPDMSDTYLPFISEITEPQTSDLTPIRTAFNRTPQSPQNAQQQNSTVSETQLNTINAPTIETEAHGIQINEDQEIIILDLLQTLAEVKETPIENRPFLPKPQFNKQFITNLNKINKYLPNLLNTNDSLREINDIIYASAKTLILNNKQTPFIPPSIQKPKRDPPWKIRLKRKIEEYRKELGRLIEIRGGVSSKKMIKIKQKLYNKYNINNEDDLNNTIEILKQKVKAVAGRLHRYDDINKRKIHNKLFAENQHKFYRTLNNTQLNPTQIPSQENIEQFWSTILSNPISYNKEAQWISEIEKSSERIEKHNFEEIDVKKVKDAIKKTQNWKTPGPDKIHNYYLKYLTSTHQYIAKLFDKIIKGIEPIENWFTTGQVILIPKDENTTDPKNWRPIACLPTMYKILTSIVANELYIHCDKNNIIAPEQRGCRRGARGCKDHLMINKAILEDAHTCQKNLSLAWVDYRKAFDSISHEWILKVLELYKCPPVIGAFLKMVMPTWNVIMTAHGANARVTTNPIYIRRGIFQGDSLSPLLFCLSINPISQILNNYKFKGYKLKDDNTINHLLYMDDLKIYANNKTNLRVLIDSTEIFTRDIGMQFGLNKCNVLHLVAGRRKEHQGEGHVLLSGDEFRHLQIEEKYKYLGINEAGKIVHNEIRQQIEKEYFRRIKSLTNSHLNARNLLRAINIYAVPVLLYIFGIINYKTTDLKKIDVKTRKILSINKAHQQKAEVERLYLPIDHGGRGLTNIETLHKIQIIKYKAYIGTEKDHILSTIFQHDINKDKYSIIQEARSNLTEIGLNNNKIYTDKELKNAIVKTRIDKIKAKPLHGQFHMAVLEKENIDRIQSFLWFKKQPISSTLESIVFAIQDQAILTKQHQRDILKTTSDGKCRLCLVKDETTQHIVSGCEKLAGTYYTKRHNNIVQYIFWALAKKHKFQVSNLWWQEHLMQPQVKENETAKIMWEIPVQTDVTIIHNRPDIIYINKIENKAYLIDITVPSDYNIGAKEIEKLSKYHALKIEIARLWKTPTEVIPIVIGATGIVAKSLRRYCDKLNCNINTNIIQKQAAIHTVTIVSKVLGDSVFVTGGTEPPFP

SEQ ID NO: 8436 - protein, 1280 aa, Agriopis aurantiaria
MEQNKNEKRLKPLSGGDRRSTFVAGVERRSMLASDSRRTGWSGVGDTGGRGTSLDATAEEPTGDTLRSRETSPASSAGTLALTTGSTSDDARRKWSHTELEELMFCYYRAKAGGAGYIKRLETIYHHRNSQNTKFRKFTGNMLSNQARSVLSRRCISTELLENIKRRAEHSHLTPDIQLPDTPETISQPAAIQSTDTPDTLALTATQSVISQYQITPQHDTLTQHTYDNIEQTLNSEQSLPNTQHTNTTLNNETEAQEVIVNEDQDPIILELLQVLSEVRETPIELRKFLPKPNFNKQFERNLNTINKYLPNLLVTNETLREINDIIYAAAKTLITANQQTPYTPAQVQKPKLDPPWKRRIKRKIDEFRKELGRLVEIKGGANSIKMINIKRKLYEKYKITNKEELNNTIEMLKQKVKALAGRLRRYDEINEKKTQNKMFAENQHKFYRSLDNTQHNPTHIPAKEDIQNFWENILSNPISYNTEATWIADIEKSAENIEQHQFDEIDIDKVKTAIRKTQNWKTPGIDKIQNYYLKYLTSTHKYIAKLFDRMIKGLEPIDSWFTTGQVILIPKSDDTRDPKNWRPIACLPTMYKILTSIIANELYIHCDKNDILAPEQRGCRRRVRGCKDHLMINKAILEDAHKCQKNLSMAWVDYRKAFDSMPHEWLLKVLDLYKCPPAIRRFLEIVMPAWNVIMTARGINASATTDPIYIRRGIFQGDSLSPILFCLGINPISQILNKYERKGYQLKDDTIINHLLYMDDLKIYANNKTNLKVLIDSTEIFTRDIGMEFGLNKCNVLHMVSGRRKEHQGEGHALLNGEEFNHLQIDEKYKYLGINESGKIDHGEVRQQIQKEYFRRVKKLIASHLNARNLLKAINIYAVPVLLYTFGIINYKTSDLKKIDVKTRKLLAISKAHQQKADVERLYLPIDEGGRGLTSLETLYKTQMIKYKAYIETEKDYILSAIVEHDKSKDKYSIVKETQTNLEEIGLRQNEKYTDKEIKHAIVKTRIEKIKSKPLHGQFYKAVLEKENIDKAQSFRWLKKQPVSPSLESAIFAIQDQAVMTKQHERDILKKPVDGKCRLCLVKDETTQHIVSGCEKLAGTYYIKRHNNIVQYIFWTLSKKHKFSVSNLWWQEHLTQPQVKENESAKLMWEIPVQTDVTIVHNRPDIIYTNKTENKTYLIDITVPSDYNIGAKEIEKLSKYHPLKREIARLWKTSTEIIPIVVGATGVIAKSLHRYCTKLDSNINTHIIQKQAAIHTSTIISKVLGDSVFVSGGTEPPFP

SEQ ID NO: 8437 - protein, 1250 aa, Agriopis aurantiaria
MLASDSRRTGWSGVGDTGGRGTSLDATAEEPTGDTLRSRETSPASSAGTLALTTGSTSDDARRKWSHTELEELMFCYYRAKAGGAGYIKRLETIYHHRNSQNTKFRKFTGNMLSNQARSVLSRRCISTELLENIKRRAEHSHLTPDVQLPDTPDTISQPAAIQSTDTPDTLALTATQSVISQYQITPQHDTLTQHTYDNIEQTLNSEQSLPNTQHTNTTLNNETEAQEVIVNEDQDPIILELLQVLSEVRETPIELRKFLPKPNFNKQFERNLNTINKYLPNLLVTNETLREINDIIYAAAKTLITANQQTPYTPAQVQKPKLDPPWKRRIKRKIDEFRKELGRLVEIKGGANSIKMINIKRKLYEKYKITNKEELNNTIEMLKQKVKALAGRLRRYDEINEKKTQNKMFAENQHKFYRSLDNTQHNPTHIPAKEDIQNFWENILSNPISYNTEATWISDIEKSAENIEQHQFDEIDIDKVKTAIRKTQNWKTPGIDKIQNYYLKYLTSTHKYIAKLFDRMIKGLEPIDSWFTTGQVILIPKSDYTRDPKNWRPIACLPTMYKILTSIIANELYIHCDKNDILAPEQRGCRRRVRGCKDHLMINKAILEDAHKCQKNLSMAWVDYRKAFDSMPHEWLLKVLDLYKCPPAIRRFLEIVMPAWNVIMTARGINASATTDPIYIRRGIFQGDSLSPILFCLGINPISQILNKYERKGYQLKDDTIINHLLYMDDLKIYANNKTNLKVLIDSTEIFTRDIGMEFGLNKCNVLHMVSGRRKEHQGEGHALLNGEEFNHLQIDEKYKYLGINESGKIDHGEVRQQIQKEYFRRVKKLTASHLNARNLLKAINIYAVPVLLYTFGIINYKTSDLKKIDVKTRKLLAISKAHQQKADVERLYLPIDEGGRGLTSLETLYKTQMIKYKAYIETEKDYILSAIVEHDKSKDKYSIVKETQTNLEEIGLKQNEKYTDKEIKHAIVKTRIEKIKSKPLHGQFYKAVLEKENIDRAQSFRWLKKQPVSPSLESAIFAIQDQAVMTKQHERDILKKPVDGKCRLCLVKDETTQHIVSGCEKLAGTYYIKRHNNIVQYIFWTLAKKHKFSVSNLWWQEHLTQPQVKENESAKLMWEIPVQTDVTIVHNRPDIIYTNKTENKTYLIDITVPSDYNIGAKEIEKLSKYHPLKREIARLWKTSTEIIPIVVGATGVVAKSLHRYCTKLDSNINTHIIQKQAAIHTSTIISKVLGDSVFVSGGTEPPFP

SEQ ID NO: 8438 - protein, 1280 aa, Agriopis aurantiaria
MEQNKNEKRLKPLSGGDRRSTFVAGVERRSMLASDSRRTGWSGVGDTGGRGTSLDATAEEPTGDTLRSRETSPASSAGTLALTTGSTSDDARRKWSHTELEELMFCYYRAKAGGAGYIKRLETIYHHRNSQNPKFRKFTGNMLSNQARSVLSRRCISTELLENIKRRAEHSHLTPDVQLPDTPDTISQPAAIQSTDTPDILALTATQSVISQYQITPQHDTLTQHTYDNIEQTLNSEQSQPNTQHTNTTLNNETEAQEVIVNEDQDPIILELLQVLSEVRETPIELRKFLPKPNFNKQFERNLNTINKYLPNLLVTNETLREINDIIYAAAKTLITANQQTPYTPAQVQKPKLDPPWKRRIKRKIDEFRKELGRLVEIKGGANSIKMINIKRKLYEKYKITNKEELNNTIEMLKQKVKALAGRLRRYDEINEKKTQNKMFAENQHKFYRSLDNTQHNPTHIPAKEDIQNFWENILSNPISYNTEATWISDIEKSAENIEQHQFDEIDIDKLETAIRKTQNWKTPGIDKIQNYYLKYLTSTHKYIAKLFDRMIKGLEPIDSWFTTGQVILIPKSDDTRDPKNWRPIACLPTMYKILTSIIANELYIHCDKNDILAPEQRGCRRRVRGCKDHLMINKAILEDAHKCQKNLSMAWVDYRKAFDSMSHEWLLKVLDLYKCPPAIRRFLEIVMPAWNVIMTARGINASATTDPIYIRRGIFQGDSLSPILFCLGINPISQILNKYERKGYQLKDDTIINHLLYMDDLKIYANNKTNLKVLIDSTEIFTRDIGMEFGLNKCNVLHMVSGRRKEHQGEGHALLNGEEFNHLQIDEKYKYLGINESGKIDHGEVRQQIQKEYFRRVKKLTASHLNARNLLKAINIYAVPVLLYTFGIINYKTSDLKKIDVKTRKLLAISKAHQQKADVERLYLPIDEGGRGLTSLETLYKTQMIKYKAYIETEKDYILSAIVEHDKSKDKYSIVKETQTNLEEIGLRQNEKYTDKEIKHAIIKTRIEKIKSKPLHGQFYKAVLEKENIDRAQSFRWLKKQPVSPSLESAIFAIQDQAVMTKQHERDILKKPVDGKCRLCLVKDETTQHIVSGCEKLAGTYYIKRHNNIVQYIFWTLAKKHKFSVSNLWWQEHLTQPQVKENESAKLMWEIPVQTDVTIVHNRPDIIYTNKTENKTYLIDITVPSDYNIGAKEIEKLSKYHPLKREIARLWKTSTEIIPIVVGATGVVAKSLHRYCTKLDSNINTHIIQKQAAIHTSTIISKVLGDSVFVSGGTEPPFP

SEQ ID NO: 8439 - protein, 1298 aa, Crocallis elinguaria
MSGTNTSSTWEGDTCTMKTYKLTKALANPFMEMSNRNVRIWPLPGGDRRGTSGADAGRLSMQTIGGGGNRRRPSVGEPEQCEPTQHIPGDTLRSGDLSPISSAGAPEVTTGSSIINDDARRKWSEPELHELMFCYFKAKAEGPGYIKRFERLFRDRNPENPKIRKFTGNTLSNQARSIISRKYISTQVLDEIKAKAEQSLSQNSHETIADTDQSVPITHMSPVITNAQTIHTQDTEHIIQHPNQDIPHTPTQHIDTPERHTMPDSEIPDIQVDENQDPLILQFLQTLAETREISVESRETLPKPKFSKKFAENLRKINNFLPSLLVTNTSLREINDIIYASAKTLIIANDQIPYTLPNTRKPKRDPPWKTRLKNKTEAFRKELARLIEIKRGNNSRTMQRIRENLFSKYDIRNDKDLDYTIEIHTQKIKALAGKIKRYNDMNERKVQNKLIQENQHKFYRSLNGEQQVPTQIPSEDEIQGFWSSILSQPVPYNTEAPWITEVEEAMENVEEHTFREIDVDKLKIAIRKTHNWKAPGIDKIQNYYLKYLTTTHKYIATLFDKIMKGIEPVDQWFTTGMVILIPKNEQTEDPKNWRPIACLPTMYKLLTSVIANELYIHCDKNDILAPEQRGCRRRARGCKDHLMINKAILEDAQQCMKNLSMAWVDYQKAFDSISHEWLLKVLDIYKCPPAIKCFLERVMPLWNVIMTAYGANTSVTTDPIYIRRGIFQGDSLSPLLFCLGLNPLSLVLNKYESKGYRLKDSGTINHLLYMDDLKLYANNSNNLKVLIDSTEVFTADIGMKFGLNKCNVLHLVRGRRQDHEGRGHVLLSGEEFAHLNSGEQYKYLGVHESGKIDHTEARQQIQKEYFRRVKCLVSSHLNARNLLRSINIYAVPVLLYTFGIINYKTSDLRKIDIKTRKILAMNKAHQQKAEIERLYLPIEEGGRGLTNLEMLYKTQIIKYEKYLASEQDHIITTIVQHDRNRVKYSINKEAQDNLAEIGLGTVENYTDKEITNAVTKTKINKWKAKPLHGQFYKKVIEKENIDKKYSFQWLKKQPVTPGLESSIFAIQDQAVVTRQHERDILKRSVDGRCRLCLVKDETTQHIVSGCEKLAGTYYTRRHNNIVQYIYWTLAKKHKFEVSHLWWKDHLTQPQVKENETAKLMWEIPVQTDTTIVHNRPDIIYINKIENRTYLIDVTVPSDYNIGAKEVEKLSKYHALKTEITRLWKTPTEVIPIVVGATGVVAKSLHRYCSKLDSQINIHIIQKQAAIHTVTIISKVLGDTVFVNRGGNSNEGESEQPFP

SEQ ID NO: 8440 - protein, 1298 aa, Crocallis elinguaria
MSGTNTSSTWEGDTCTMKTYKLTKALANPFMEMSNRNVRIWPLPGGDRRGTSGADAGRLSMQTIGGGGNRRRPSVGEPEQCEPTQHIPGDTLRSGDLSPTSSAGAPEVTTGSSIINDDARRKWSEAELHELMFCYFKAKAEGPGYIKRFERLFRDRNPENPKIRKFTGNTLSNQARSIISRKYISTQILDEIKAKAEQSLSQNSHETIADTDQSIPITHMSPVITNAQTIHTQDTEHITQHSNQDIPNTPTQHINTPERHTIPDSEIPDIQVDENQDPLVLQFLQTLAETREISVESRETLPKPKFSKKFAENLRKINNFLPSLLVTNTSLREINDIIYASAKTLIIANDQIPYTLPNTRKPKRDPPWKTRLQNKTEAFRKELARLIEIKRGNNSRTMQRIRENLFSKYDIRNDKDLDYTIEIHTQKIKALAGRIKRYNDMNERKIQNKLIQENQHKFYRSLNGEQQVPTQIPSEEEIQGFWSSILSQPVPYNTEAPWITEVEEAMENVEEHTFREIDVDKLKTAIRNTHNWKAPGIDKIQNYYLKYLTTTHKYIATLFDRIMKGIEPVDQWFTTGMVILIPKNEKTEDPKNWRPIACLPTMYKLLTSVIANELYIHCDKNDILAPEQRGCRRRARGCKDHLMINKAILEDAQQCMKNLSMAWVDYQKAFDSISHEWLLKVLDIYKCPPAIKCFLERVMPLWNVIMTAYGANSSVTTDPIYIRRGIFQGDSLSPLLFCLGLNPLPLVLNKYESKGYRLKDSGTINHLLYMDDLKLYANNSNNLKVLIDSTEVFTADIGMKFGLNKCNVLHLVRGRRQDHEGRGHVLLSGEEFAHLNSGEQYKYLGVHESGKIDHTEARQQIQKEYFRRVKCLVSSHLNARNLLRSINIYAVPVLLYTFGIINYKTSDLRKIDIKTRKILAMNKAHQQKAEIERLYLPIEEGGRGLTNLEMLYKTQIIKYEKYLASEQDHIITAIVQHDRNRVKYSINKEAQDNLAEIGLGTVENYTDKEITNAVTKTKINKWKAKPLHGQFYKKVLEKENIDTKYSFQWLKKQPVTPGLESSIFAIQDQAVVTRQHERDILKRSVDGRCRLCLVKDETTQHIVSGCEKLAGNYYTRRHNNIVEYIYWTLAKKHKFEVSHLWWKDHLTQPQVKENETAKLMWEIPVQTDTTIVHNRPDIIYINKIENRTYLIDVTVPSDYNIGAKEVEKLSKYHALKTEITRLWKTPTEVIPIVVGATGVVAKSLHRYCSKLDSQINIHIIQKQAAIHTVTIISKVLGDTVFVNRGGNSNEGESEQPFP

SEQ ID NO: 8441 - protein, 1260 aa, Mylon lassia
MENRSNRYRIGPLPGGDRRGTSVAGGGRDRMLASDSRRTGWSRVGDRGVGTSLDATAEESVGVTLRSRGVTPESSAGTLQSTTGSVNEDSRKKWSSVELEELMFCYYKARAGGSGYIKRFEKLFKDRNSHNPKSKKFTGNTLSNQVRAVLSRKSISQQLLDEIKSRAEQFLSSSDTQLPVIPDNNSQTQDNLQITSDTIHITERTQTVQEPTHTIQETLIELSTEHLDNNVDNATETDNIEVNENQDPLILDFLQILAETKHIQIEDRKFLPKPQFSKIFINNLNKINKFLPKVLVSNQSLRDINDIIYAAAKTLIISNNQTPYILSVTNKTKLDPPWKRRLKQKIENFRKELGRLIEIKAGVSSRRMIKIRDILFRKYNINTTEDLISNIEILKQKIKALAGRLRRYEEINGRKIQNNLFTENQHKFYRSLNKNQNKPSEIPTQNEIQNFWSSILSEPISYNREAQWICELEKSAISIQDHSFEEINIDKVKEAIRKTHNWKTPGIDKIQNYYIKYLTSTHKYIAKLYDRIIKGMEPIDTWFVTGQVILIPKDGITTDPKNWRPIACLPTMYKILTSVLANELYIHCDKNDIIGPEQRGCRRDVRGCKDHLMINKTILEDAHKCHKNLSVAWVDYRKAFDSISHEWLLKVLEIYKCSPLIKGFLQMVMPMWNVIMTVRGTTTSVITDPIHIRRGIFQGDSLSPLLFCLGISPITQVLNNYQFKGYKLKDNSIINHLLYMDDLKIYANNKTNLKVLIDSTEIFSRDIGMQFGLNKCSVLHLVAGRMHQHQGSGHVLLSGEEFRHLQADEKYKYLGINEAGNIDHAEIRQQIQKEYFRRVKTLTASYLNARNLLRAINIYAVPVLLYTFGIIHYKTTDLKKIDIKTRKLLAMKKIHQQKSDVERLYLPIEEGGRGLTNIETLYKTQIIKFKAYIETEKDYILRAIAEHDRNKEKYSIFKGARLNLTEIGLNQNENYADREIHKAIVKTKIVKLKAKPLHGQFYKAVLEKDNIDRVQSFRWFKKQSVSPSLESAIFAIQDQAVITRQHERDILKKAIDGKCRLCLVKDETTQHIISGCEKLAGTYYTKRHNNIVQYVFWTLAKKHNFEVSNLWWQEHLTQPQVKENETAKIMWEMPVQTDVTVVHNRPDIIYINKQENQIYLIDISVPSDYNIGAKEIEKLSKYHLLKKELTRLWKRPTTIVPIVIGATGVVAKNLIKYCKTLNSNINITIMQQQAALHTTTILSKILGNSVYAGETESPSP

SEQ ID NO: 8442 - protein, 1228 aa, Hyalothyrus neleus
MESYSSRNRKGPLPGGDRRGTSVAGGGRDRMLASDPRRTGWSGVGDRRGGTSLDATAEEPVGVTLRSRDVSPTSSAGPSQSTTGSVSEDSRKKWSSIELEELMFCYYKARAGGPGYIKRLEKIFKDRNPHNPKSRKFTGNTLSNQVRAVLSRRSISQQVLDEIKHKAELIDNPDMNLSTIPENNTLTHNLHAEYSLQHITPDIIHRPNILQPESTQREHTLSLHNTEQNGLVHNSIETNIAHSDTDIIEEVETHDIVVDEEQDPIILDFLQILSETKEIEIENRSFLPKPNFTKQFIINQHKLNNYLPNLLVTNQSLREINDIVYAAAKTLITNNEQKPYKTINVKRPNQDPPWKRRLKQKIESYRKELGRLIEIKAGVNTRKMINVKQKLYNKYNINNNQDLNNSIEILKQKVKALAGRLRRYDDINKKKIQNKLFAENQHKLYRSLNKTQIKPTQIPTQEEIQNFWTSTLSKPIPYKRDAQWISEIENLTDDIEEHTFEEIDIGKVKEALKRTHNWKTPGLDKIQNYYLKHLTSTHKYIAKLFDRIIKGVEPIDAWFTTGQVILIPKDDNTMDPKNWRPIACLPTMYKILTSILANELYIHCDKNDIIAPEQRGCRRGARGCKDHLMINKSILEDAHKCQKNLSVAWVDYRKAFDSISHEWLLKALEIYKCPPLIKGFLEKVMPMWNVIMTAHGANASVVTDPIHIHRGIFQGDSLSPLLFCLSINPISQILSNYQFKGYKLKDDTTINHLLYMDDLKIYANNKTNLKVLIDSTEIFSRDIGMHFGLNKCNVLHLVAGRRREHQGTGHVLLRGQEFQHLQIDEKYKYLGINEAGKIDHGEIRQQVQKEYFRRVKILAASHLNARNLLRAINVYAVPVLLYTFGIINYKTADLKKIDIKTRKTLTINKAHQQKSDIERLYLPINEGGRGLTNIETLYKTQIIKFKSYIESEKDYILRAIVEHDRNKDKYSIITEAKLNLTELGLNQNEQYIDKELRHAVTKRKIEKLKAKPLHGQFYKAVIEKTNIDRVQSFNWLKKQPVSPSLESAIFAIQDQAVITRQHERDILKRPIDGKCRLCLVKDETTQHIISGCEKLAGTYYVKRHNNIVQYIFWTLAKKHNFKISNLWWQEHLTQPRVEENESAKIMWEIPVQTDVTIVHNRPDIIYINKQEHHTYLIDITVPSDYNIGAKEIEKLSKYHLLKKEITRLWKTPTSIIPIVIGATGITLQ

SEQ ID NO: 8443 - protein, 1036 aa, Crocallis elinguaria
MFCYFKAKAEGPGYIKRFERLFRGRNPENPKIRKFTGNTLSNQARSIISRKYISTQILDEIKTKAEQSLSQLNDIIYASARTLIIANDQIPYTLPNTRKPRRDPPWKTRLKNKTEAFRKELARLIEIKRGNNSRTMQRIRENLFSKYDIRNDKDLDYTIEIHTRKIKALAGRIKRYNDMNERKVQNKLIQENQHKFYRSLNGEQQVPTQIPSEEEIQGFWSSILSQPVPYNTEAPWITEVEEAMENVEEHTFREIDVDKLKIAIRKTHNWKAPGIDKIQNYYLKYLTTTHKYIATLFDRIMKGIEPVDQWFTTGMIILIPKNEQTEDPKNWRPIACLPTMYKLLTSVIANELYIHCDKNDILAPEQRGCRRRARGCKDHLMINKAILEDAQQCMKNLSMAWVDYQKAFDSISHEWLLKVLDIYKCPPAIKCFLERVMPLWNVIMTAYGANTSVTTDPIYIRRGIFQGDSLSPLLFCLGLNPLSLVLNKYESKGYRLKDSGTINHLLYMDDLKLYANNSNNLKVLIDSTEVFTADIGMKFGLNKCNVLHLVRGRRQNHEGRGHVLLSGEEFAHLNSGEQYKYLGVHESGKIDHTEARQQIQKEYFRRVKCLVSSHLNARNLLRSINIYAVPVLLYTFGIINYKTSDLRKIDIKTRKILAMNKAHQQKAEIERLYLPIEEGGRGLTNLEMLYKTQIIKYEKYLASEQDHIITAIVQHDRNRVKYSINKEVQDNLAEIGLGTVENYTDKEITNAVTKTKINKWKAKPLHGQFYKKVIEKENIDKKYSFQWLKKQPVTPGLESSIFAIQDQAVVTRQHERDILKRSVDGRCRLCLVKDETTQHIVSGCEKLAGTYYTRRHNNIVQYIYWTLAKKHKFEVSHLWWKDHLTQPQVKENETAKLMWEIPVQTDTTIVHNRPDIIYINKIENRTYLIDVTVPSDYNIGAKEVEKLSKYHALKTEITRLWKTPTEVIPIVVGATGVVAKSLHKYCSKLDSQINIHIIQKQAAIHTVTIISKVLGDTVFVNRGGNSTEGESEQPFP

SEQ ID NO: 8444 - protein, 1262 aa, Piruna aea
MESTSSKNTSKGSLPGGDRRGTSVAGVGRSSMLASGSRRAGWSGVGDRGVRERSPDVTADEPSGDTLRSRDVYPASSAGTLVSTTGSSPTRDDARRKWSHLEEQELMFCYYRSKAGGPGYMKRLESLFKNRNPHNPKSKKFTGNTLSNQVRSILSRRVISTEVLEEIKRTAEQTSDTTSHTPLTPISEATDSQASHNIQHTSPISTPNRSSDISNVINPLESQIQSNAHNTLVSQIEIQDIQVNEDQDPIILDLLQLLAEVKETPIENRQFLPKPKFNKQFITNLRKINEYLPNLLVTNQSLREINDIIYASAKILITKNNQIPFVPRNINKPKRDPPWKIRLKRKIEDHRKELGRLIEIRGGANSRKMLKIKQNLYIKHKINNEEDLHNTIEILKQKVKATAGRLHRYDDINKRKIHNKLFSENQHKFYRTLHNTQQNPTQIPTRETVEQFWSTILSNPIEYNKNAHWIAEIEKSSEQIEEHNFEEIDVQKVKDAIRKTQNWKTPGIDKIHNYYLKYLTSTHQYIAKVFDKLIKGDELMESWFTTGQVILIPKDENTTDPKNWRPIACLPTMYKILTSIIANELYIHCDKNDIIAPEQRGCRRGARGCKDHLMINKAILEDAHKCQKNLSLAWVDYRKAFDSISHEWLLKILEIYKCPPVIQGFLKMVMPTWNVIMTAHGASTCVTTNPISIRRGIFQGDSLSPLLFCLSINPISQILNKYQFKGYKLKDDSTINHLLYMDDLKIYANNKTNLKVLIDSIEVFTRDVGMQFGLNKCNVLHLVAGRRKEHQGKGHVLLSGDEFKHLQTEEKYKYLGINEAGKIDHNEIRQQTEKEYFRRVKLLTTSHLNARNMLRAINIYAVPVLLYTFGIVNYKTTDLKKIDIKTRKILAINKTHKQKADVERLYLPINQGGRGLTSLETLHKTQIIKYKKYIDSEKDFIISAIAIHDRNKDKYSIIQETRTNLTEIGLNNNAEYTDRELKNAIVKTRIEKIKSKPLHGQFYKAVLEKENIDKHQSFQWLKKLPVSSTLESSIFAIQDQAILTKQHQRDILKTTTDGKCRLCLIKDETTQHIISGCEKLAGTYYTKRHNNIVQYIFWALAKKHKFPVSNLWWQEHLLQPQVKENETAKIMWEIPVQTDVTIVHNRPDIIYINKIENKAYLIDVTVPSDYNIGAKEIEKLSKYHALKVEINRLWKIPTEVIPIVIGATGIVAKSLQRYCSKLDCNININIIQKQAAIHTVTILSKVLGDSVYVTGGTEPPFP

SEQ ID NO: 8445 - protein, 1201 aa, Calydna sturnula
MTQEESGHISNYRNLCTAIIKPRTGGHGYIKRFEKIFKDRNPHNPKSRQFTGNTLSNQVRSILSRRSISTEILNEIKNRAEQTESNLEPYFPTIHETDIASPYYSDNNTEMQLDTTNTPIQLISNTHTLSTTTFNQTPITPVTFHRNDHRTQSNSLPHNISSTQNYIHTQNLTDEIEIQGVQVNEDQDPIILDFLQTLSEIREIPIEDRTYLPKPRFNKHFIESLHKLNKYMPNILETHQSICELNNVIYAAAKTLIMNNNQTPYTTSAIRKPKRDPPWKKRIKCKIEGFRKELGRLVEIKQGSNSRRILNLKRQLFLKYRITNDNDLDNTIEILKQKVRASAGRLRRYDEMNERKLQNKSFSENQHKFYRSLNNTQQIPTQIPSQDEIQNFWTDILSNPIPYNKNSQWIASIENKSKEIVTHTLEEIDVAKVKLAIRKTQNWKTPGIDKIQNYYLKYFTSTHKYLAQSFNRILNGIEPVEQWFTTGRVILIPKDENTQDPKNWRPIACLPTMYKILTSVMANELYIHCDKNDIIAPEQRGCRRGARGCKDHLMINKAIIEDAHKCQKNLSLAWVDYRKAFDSISHEWILKVLDIYKCPPAIRRFLEIVMPTWNVVMTANGANTSVTTNPIYIRRGIFQGDSLSPLLFCLAINPISQILDSYEFKGYRLKDNSIINHLLYMDDLKLYANNKTNLKVLIDTTEIFTRDIGMEFGLNKCNVLHLVAGRANEYRGQGHILLSGDEFRHLQIDEKYKYLGINESGKIDHSEVRQQIQKEYYRRIKSLTKSQLNARNLIRAINTYAVPVLLYTFGIINFKTVDLKKLDIKTRKILAMNKAHQQKADIDRLYLPVEQGGRGLTNIESLYKTQIIKYKYYLATEKDHIIRAIIEHDRNKDKYSIFKDSRQNLTELGLGNENYTDTEIRNAVIKTRTDVIKAKPLHGQFYKAVLDKQNIDRIQSFNWMKKQPVSPSLESAIFAIQDQAVTTRQHERDILKKPIDGKCRLCMAKDETTQHLVSGCEKLAGTYYTKRHNNIVQYIFWTLAKKHKFPVADVWWQEHLTEPQVKENDSAKLMWEIPVQTDVTIVHNRPDIIYINKAENKTYLIDVTVPSDYNIGAKEIEKLSKYHALRVEITRLWKTPTEIIPIVIGATGVIAKNLHRYCDKLDSHIHIPIIQKQAAIHTVTILTKVLGDTVFVRGGTEPPFP

SEQ ID NO: 8446 - protein, 1072 aa, Hestina assimilis
MAQQLFTLQHITPQHTYKFAQPKVTSTQTQSTTQRTVNTQVDKIETQDVEVNEDQDHTILEFLRVLAETKETPIEHRKLLPKPKFNKLFIQNLHTINKYLPNLLEINDSLRDINNIIYAAAKTVIILNDQKPYLPSTVQKPKSDPSWNRRLKRKIEDFRKELGRLVEIKGGARSRKMLKIKQNLYVKYRISSDEQLNNTIETLKQRVKALAGRLRRYDEINERKRQNQMFSENQHKFYRSLNNTQQNSTIQIPTKYEIENFWTEILSNPIEYRREATWLVEIERSAKDIEQHRFEKIDVEKVKEAIRKTQNWKTPGIDKIQNYYLKYLTSTHLYMARLFDRIMKGSEPIQSWFTTGQVILIPKSDNTQDPKNWRPIACLPTMYKILTSIMANELYIHCNKNNILAPEQRGCRRRVRGCKDHLMVNKAILEDAHKCQKNLSMAWVDYRKAFDSMSHEWLLKVLDIYKCPPVIRSFLEKFMPAWKVIMTARGRNASVTTDPIYIRRGIFQGDSLSPLLFCLGINPISQILNKYKFKGYQLTDNTTINHLLYMDDLKIYANNKTNLKVLIESTEIFTRDIGMEFGLSKCNVLHMARGKRSDQLGEGHVLLSGEEFEHLRVGEGYKYLGITEGGKIDHGLVRQKAEKEYLRRVKKLAESHLNARSLFKAINIYAVPVLLYIFGIVNFKTADLKRIDIKTRKTLAMNKAHQQKADVERLYLPVNEGGRGLTNIETLHKTQIIKYRAYLQAHNIDYIQKAIVEHDRNKDKFSILKDTRTNLIEIGLNQSEEYTDKELKIAINKTKVNRIKQKPLHGQFYKAVLDKDNIDTEQSFKWLQKQPVSPSLESMIFAIQDQAVMTKQHQRDILKIDTDGKCRLCLAKDETTQHIISGCEKLAGTYYTKRHNNIVQYVFWAVAKKHNIPVSRLWWEEHLTQPQVRENDTCKLMWEMPVQTDRTIVHNRPDIIYINKTQNKIYLIDVTVPSDYNIGPKEIEKLSKYHALRQEVTRLWKTPAEVIPIVVGATGMVAKSLKRYCGLLDANINIHILQKQAAIHTVTILSKVLGDTVFVGGEAEPPFP

SEQ ID NO: 8447 - protein, 1072 aa, Hestina assimilis
MAQQLFTLQHITPQHTYKFAQPKVTSTQTQSTTQRTVNTQVDKIETQDVEVNEDQDHTILEFLRVLAETKETPIEHRKLLPKPKFNKLFIQNLHTINKYLPNLLEINDSLQDINNIIYAAAKTVIILNDQKPYLPSTVQKPKSDPSWKRRLKRKIEDFRKELGRLVEIKGGARSRKMLKIKQNLYVKYRISSDEQLNNTIETLKQRVKALAGRLRRYDEINERKRQNQMFSENQHKFYRSLNNTQQNSTIQIPTKYEIENFWTEILSNPIEYRREATWLVEIERSAKDIEQHRFEKIDVEKVKEAIRKTQNWKTPGIDKIQNYYLKYLTSTHLYMARLFDRIMKGSEPIQSWFTTGQVILIPKSDNTQDPKNWRPIACLPTMYKILTSIMANELYIHCNKNNILAPEQRGCRRRVRGCKDHLMVNKAILEDAHKCQKNLSMAWVDYRKAFDSMSHEWLLKVLDIYKCPPVIRSFLEKFMPAWKVIMTARGRNASVTTDPIYICRGIFQGDSLSPLLFCLGINPISQILNKYKFKGYQLTDNTTINHLLYMDDLKIYANNKTNLKVLLESTEIFTRDIGMEFGLSKCNVLHMARGKRSDHLGEGHVLLSGEEFEHLRVGEGYKYLGITEGGKIDHGLVRQKAEKEYLRRVKKLAESHLNARSLFKAINIYAVPVLLYIFGIVNFKTADLKRIDIKTRKTLAMNKAHQQKADVERLYLPVNEGGRGLTNIETLHKAQIIKYRAYLQAHNIDYIQKAIVEHDRNKDKFSILKDTRTNLIEIGLNQSEEYTDKELKIAINKTKVNRIKQKPLHGQFYKAVLDKDNIDTEQSFKWLQKQPVSPSLESMIFAIQDQAVMTKQHQRDILKIDTDGKCRLCLAKDETTQHIISGCEKLAGTYYTKRHNNIVQYVFWAVAKKHNIPVSRLWWEEHLTQPQVRENDTCKLMWEMPVQTDRTIVHNRPDIIYINKTQNKIYLIDVTVPSDYNIGPKEIEKLSKYHALRQEVTRLWKTPAEVIPIVVGATGMVAKSLERYCGLLDANINIHILQKQAAIHTVTILSKVLGDTVFVGGEAEPPFP

SEQ ID NO: 8448 - protein, 1279 aa, Telemiades fides
MENNSRSIRKGPLPGGDRRGTSVAGGRRDRMLASDFQRTGWLGVGDRTGGTSLDATADEHVDVTLQSRDTSPTNSVGASQPTTGSTNDDLRRKWSYVELEELMFCYYKARVEGPGYIKRLENIFKNRNPNNPKCRKFTGNTLANQVRVVLSRKSISQQVLDNLKRKAEETQNSIDRNISTILETCTDNNLQTDQSFSQNIETCTSEILRIENTQTHPPFSLQINQHNANKTNTRSLDHLNTEHPSTSIVEEVDEAHDIEVNADQDPIILDFLQILSETKEIKIKDRMFLPKPHFTKKFINNLNKINTYLPKILNTNQSLREINYVIYAAAKTLIINNNQKPYAPIVQKSKRDPPWKKRIKQKIDNNRKELGRLIEIRVGVNTRRMINIKQKLFDKYKINNSEDMNNTIEILKQKVKALAGRLRRYDEINERKVQNKLFTENQHKFYKSLNKTQRNPTVIPTKNEVENFWTTILSNPKSYNKNAQWISEIENLSDKTEEHTFEGIDVNKVKEAIRKTHNWKSPGIDKIQNYYLKYFTSAHKYIARLFDRIIKRNEPIDTWFTTGQVILIPKDDNTIEPKNWRPIACLPTMYKILTSILANELYIHCDKNNIITAEQRGCRRGARGCKDHLMLNKAILEDAHKRKKNLSMAWIDYRKAFDNISHEWLLKVLEIYKCPLIIKSFLEIVMPMWNVIMTAHGTNTSVITDPIYIRRGIFQGDSLSPLLFCLSINPISQILRNYQSKGYKLAGGRTCVNHLLYMDDLKIYANNKVNLKVLVDSVEIFTGDIGMEFGFDKCNVFHLVAGKRGECQSMEHVLLTGEEFKHLQVDQNYKYLGINEAGKIDHAETKQQIQKEYFRRVKSLTNSHLNSRNLLRAINIHAVPVLLYTFGIINYKNTDLKKIDVKTRKMLAMNKLHQHKADVERLYLPIDHGGRGLTNIETLYKTYIIKYKSYIEAGNDYILKAIVEHDKNKDKYSIIKEARSNLAEMGLNINEKYNNRDLKCATIKVRIEKIKLKPLHGQFFKAVLEKENIDKAQSFRWLKKQPVSPSLEAALFAIQDQAIITRQHERDILKRDVDGKCRLCLVKDETVQHIISGCEKLAGTYYTNRHNNVVQYIFWTLAKKHKFDVANLWWQEQLTQPQVKENESAKIMWEIPVQTDVTIVHNRPDIIYVNKTENKTYLIDISIPSDYNIGAKEIEKLSKYHKLKIEITRLWKTNTEVIPIVVGATGIIAKSLHRYCNKLESNINVNIIQKQAAIHTTSIVSKVLGNSVFVNGGTEPPFP

SEQ ID NO: 8449 - protein, 1282 aa, Orses cynisca
MENNSNRNRIWPLPGGDRRGTSVAGGGRDRMLASDSQSTGWLGVGDRGVQGRSLDATADDFTEDTLRSEDVYPITSAGTSVLTTGSINDDARRKWSHAELHELMFCYYQAKADGPGYIKRLEKIFKNRNPDNLKSRKFNGTTLANQVRSILTRKCISIEVLQQIKNAAEQSHNTPITDISLITDTNTDSNQQSINTGASEITHTIFPSQNLHNNDNHLNKTLPPQHINSDFNITHTIPEKPTETENADIIVEHEIDIQEVVVNENQDKIILDFLQILSETKETSIQNRAFLPKPQFNKEFISNLNKINKYLPNILVNNQSLRDINDIIYAAAKTLLISNDQTPYTPLNLQKQKQDPPWKRRIKCNIENYRKELGRLVEIQKGVKNRRMVNIQKKLFNKYTIRNDEELNTTIEILKQKVKALAGRLRRYDDMNKRKIHNKLFAENQHKFYKTLNKTYKRPEQIPARDEIQNYWTTILSNPIPYNKEATWISEIEKSTDHIEEHNFTNIDIEKVQSAIRKTHNWKTPGVDKIQNYYIKYFTSTHKYIAKLFDRILNGTEHLEEWFTTGQVILIPKDDNTHDPKNWRPIACLPTMYKILTSIIANELYIHCDKNKIIAPEQRGCRRGARGCKDHLMLNKAVLEDAHKYKKNLSLAWVDYRKAFDSISHEWLLKVLELYKCPPVIQGFLKLAMPTWNVIMSAYGANASVTTDPIFIRRGIFQGDSLSPLLFCLAINPISQILNKYQLTRYKLKNNNYTVNHLLYMDDLKIYANSKNNLNILIDSTEIFTRDIGMQFGLNKCNVLHLISGKRKEHQGEGHVLLNGEEIKHLQIEEKYKYLGINEAGTINHSEIRQQVQKEYFRRVKSLTVSHLNARNLLRAINVYAVPVLLYTFGIINFKTTDLKKIDIKTRKILSMNKAHQKKADVERLYLPIEEGGRGLVNLETLYKTQIIKYKSYIETEKDYILKAIADHDKNKIKFSVFDETQSNLAEIGLNRNKKYTDRELKNAVIKTKLEKIKAKPLHGQFYKAVIDRENIDKKQSFCWLKKQPVSPSLESSIFAIQDQAIITKQHERDILKKDVDGKCRLCYAKDETIQHITSGCEKLAGTYYTKRHNNIVQYIFWTLARKHKFDISNLWWKEQLTQPQVKENESAKIMWEIPIQTDVTIVHNRPDIIYINKIENKAYLIDITVPSDYNIGAKEIEKLSKYYALKTEITRLWKIPTEVIPIVIGATGVVAKSLHRYCNKLNSNINTNIIQKQAAIHTVTIVRKVLGDTVFVNRDAEPPFP

SEQ ID NO: 8450 - protein, 1410 aa, Zygaena filipendulae
MESQTNRLRKGPLPGVDRRGTSGADAGRFSMQTVSGSLLNRRAGVGEPENATAELNSDIEATLQRRDSPTASAGTSVQTTTSSQLSIDSRKKWSDEELRELMFCYYKAKSQGIGYINRLYNAFKERNPNNPKIHQFSGNTLANQVRSIINRKVISTEVLMRIKTTAEQPDSVQNSVASHNASGENNLATGVTSDSDHRRKWSNIEIHELMFCYFKAKSQGTRYIEKMFQLFKDRNPTNPKIHKLNGSKLSNQARSIISRNVIDTETLNEIKQRAERATTSMTTELTDVHPTSSRAQSPATSPATSRRTVNTPSDTQDTHIPATPTSWKNTFAPQTSPNTAQSLVDGRSELDTLTNDFIIDTDLALTERTQLFEHNPNRDPRPETLSYNLEVNEDTDPLILNFLENYAIVKELCIDDRKYLPKAKFNKLFLQNLFKLNKFLPNIFNTNNTLREINDILYAAALTLITNNNQKPYTPFKKIKPNKDPPWKERIKRKIETLRKELGQLTEIRNGASTRKMNKVKENLYRKYTISSNIEHDNTIETLKQKIKALAGRIKRYDDMSKRKTQNKKFVENQHRFYSNLSDTAKTPIDIPTKTQIETFWNNILSQPESYNKQANWIKELERSNEQIQEHSFSEITVEQIEHSIRKLSNWKSPGNDKVQNYYIKYLTSAHEHIARLYTRLLNGTEPLDEWFTTGRVILIPKDENTADPKNWRPIACLPTMYKLFTSVINNELYEHCSRNNIIAPEQRGCRRHARGCKDHLMVNKAILEDAHTSQKNLSMAWIDYQKAFDSLPHEWLLKVLDIYKCPDAIKEFLKRAMPKWRVIMTAQGIQDSVTTEPIYIRRGIFQGDALSPLLFCIAINPISQLLNKYENKGYKLKESININHLLYMDDLKIYANNKNNLKVLLDTTEVFTKDIGMTFGLKKCNTLMLVAGKRQEYEGEGHILLNGDEFKSLTKNQTYKYLGIHESGKIDHSEIRQQLQKEYFRRLKSLTKSHLSARNLIRAINAYAIPVLLYAFGIINFKHSDLSKIDTKTRKILAINKAHQQKAEVERLYIPVEEGGRGLINVERMHKIQIIKYNQYLENEQDYLIKTIVKHDKNREKYSINKGAGNNLTEIGLISNNTYTDTEIKNAVLKKQINTWKNKPLHGQIVTSVLEKPNIDKEYSFKWLKKQQISPTFESSIFAIQDQAVSTRQHERDIHKKPVSGRCRLCLSKDETVQHLVSGCEKLAGTYYTKRHNNIAQYVHWALAKKHNFTVPKLWWKHNLLEPYTIENESAKILWEIPIHTDITVTHNRPDIIYINKTENKTYLIDITVPSDYNIGAKEIEKLSKYHLLKTELHRLWHTQTTVIPIVIGSTGIIARSLHRYTQALNADINIHIMQKQAAIHSCTIIAKVLGDSVFVNTETGSSFP

SEQ ID NO: 8451 - protein, 1410 aa, Zygaena filipendulae
MESQTNRLRKGPLPGVDRRGTSGADAGRFSMQTVSGSLLNRRAGVGEPENATAELNSDIEATLQRRDSLTASAGTSVQTTISSQPSIDSRKKWSDEELRELMFCYYKAKSQGIGYINRLYNAFKERNPNNPKIHQFSGNTLANQVRSIINRKVISTEVLMRIKQTAEQPDSVQNSVASHNASGESNLATGVTSDSDHRRKWSNIEIHELMFCYFKAKSQGTRYIEKMFQLFKDRNPTNPKIHKLNGSKLSNQARSIISRKVIDTETLNEIKQRAERSTTLMTTELTDVHSTSSRAQSPATSPATSRRTVNTPSDTQDTHIPATPTSWKNTLAPQTSPNTAQSLVDGRSELDTLTNDFIIDTDLALTERTQLFEHNPNRDPRPETLSYNLEVNEDTDPLILNFLENYAIVKELCIDDRKYLPKAKFNKLFLQNLFKLNKFLPNIFNTNNTLREINDILYAAALTLITNNNQKPYTPFKKIKPNKDPPWKERIKRKIETLRKELGQLTEIRNGASTRKMNKVKENLYRKYTISSNIEHDNTIETLKQKIKALAGRIKRYDDMSKRKTQNKKFVENQHRFYSNLSDTTKTPIDIPTKTQIETFWNNILSQPESYNKQANWIKELEHSNEQIQEHSFSEITVEQIEHSIRKLSNWKSPGNDKVQNYYIKYLTSAHEHIARLYTRLLNGTEPLDEWFTTGRVILIPKDENTADPKNWCPIACLPTMYKLFTSVINNELYEHCSRNNIIAPEQRGCRRHARGCKDHLMVNKAILEDAHTSQKNLSMAWIDYQKAFDSLPHEWLLKVLDIYKCPDAIKEFLKRAMPKWRVIMTAQGIQDSVTTEPIYIRRGIFQGDALSPLLFCIAINPISQLLNKYENKGYKLKESININHLLYIDDLKIYANNKNNLKVLLDTTEVFTKDIGMNFGLKKCNTLMLVAGKRQEYEGEGHILLNGDEFKSLTKNQTYKYLGIHESGKIDHSEIRQQLQKEYFRRLKSLTKSHLNARNLIRAINAYAIPVLLYAFGIINFKHSDLSKIDTKTRKILAMNKAHQQKAEVERLYIPVEEGERGLINVERMHKIQIIKYNQYLENEQDYLIKTIVKHDKNREKYSINKGAGNNLTEIGLISNNTYTDTEIKNAVLKKQINTWKNKPLHGQIVTSVLEKPNIDKEYSFKWLKKQQISPTFESSIFAIQDQAVSTRQHERDIHKKPISGRCRLCLSKDETVQHLVSGCEKLAGTYYTKRHNNIAQYVHWALAKKHNFTVSELWWKHNLLEPYTIENESAKILWEIPIHTDITVAHNRPDIIYINKTENKTYLIDITVPSDYNIGAKEIEKLSKYHLLKTELHRLWHTQTTVIPIVIGSTGIIARSLHRYTQALNADINIHIMQKQAAIHSCTIIAKVLGDSVFVNTETGSSSP

SEQ ID NO: 8452 - protein, 1410 aa, Zygaena filipendulae
MESQTNRLRKGPLPGVDRRGTSGADAGRFSMQTVSGSLLNRRAGVGELENATAEHNSDIEATLQRRDSPTASAGTSVQTTTSSQLNIDSRKKWSDEELRELMFCYYKAKSQGIGYINRLYNAFKERNPNNPKIHQFSGNTLANQVRNIINRKVISTEVLMRIKQTAEQPDSVQNSVASHNASGESNLATGVTSDSDHRRKWSNIEIHELMFCYFKAKSQGTRYIEKMFQLFKDRNPTNPKIHKLNGSKLSNQARSIISRKVIDTETLNEIKQRAERSTTSMTTELTDVHSTSSRAQSPATSPATSRRTVNTPSDTQDTHIPATPMSWKNTLAPQTSPNTAQSLVDGRSELDTLTNDFIIDTDLALTERTQLFEHNPNRDPRPETLSYNLEVNEDTDPLILNFLENYAIVKELCIDDRKYLPKAKFNKLFLQNLFKLNKFLPNIFNTNNTLREINDILYAAALTLITNNNQKPYTPFKKIKPNKDPPWKERIKRKIETLRKELGQLTEIRNGASTRKMNKVKENLYRKYTISSNIEHDNTIETLKQKIKALAGRIKRYDDMSKRKTQNKKFVENQHRFYSNLSDTAKTPIDIPTKTQIETFWNNILSQPESYNKQANWIKELEHSNEQIQEHSFSEITVEQIEHSIRKLSNWKSPGNDKVQNYYIKYLTSAHEHIAQLYTRLLNGTEPLDEWFTTGRVILIPKDENTADPKNWRPIACLPTMYKLFTSVINNELYEHCSRNNIIAPEQRGCRRHARGCKDHLMVNKAILEDAHTSQKNLSMAWIDYQKAFDSLPHEWLLKVLDIYKCPDAIKEFLKRAMPKWRVIMTAQGIQDSVTTEPIYIRRGIFQGDALSPLLFCIAINPISQLLNKYENKGYKLKESININHLLYMDDLKIYANNKNNLKVLLDTTEVFTKDIGMNFGLKKCNTLMLVAGKRREYEGEGHILLNGDEFKSLTKNQTYKYLGIHESGKIDHSEIRQQLQKEYFRRLKSLTKSHLNARNLIRAINAYAIPVLLYAFGIINFKHSDLSKIDTKTRKILAMNKAHQQKAEVERLYIPVEEGGRGLINVERMHKIQIIKYNQYLENEQDYLIKTIVKHDKNREKYSINKGAGNNLTEIGLISNNTYTDTEIKNAALKKQINTWKNKPLHGQIVTSVLEKPNIDKEYSFKWLKKQQISPTFESSIFAIQDQAVSTRQHERDIHKKPISGRCRLCLSKDETVQHLVSGCEKLAGTYYTKRHNNIAQYVHWALAKKHNFTVSELWWKHNLLEPYTIENESAKILWEIPIHTDITVAHNRPDIIYINKTENKTYLIDITVPSDYNIGAKEIEKLSKYHLLKTELHRLWHTQTTVIPIVIGSTGIIARSLHRYTQALNADINIHIMQKQAAIHSCTIIAKVLGDSVFVNTETGSSFP

SEQ ID NO: 8453 - protein, 1448 aa, Marasmia exigua
MERQISNVRIGSLPGGDRRGTSGADAGRSSMRTVSGSLLNRRAGVGEPENMTADLTSNTDDTLQRRHSPSASAGPSVLTTTTVYQQEDSRKKWSDEEIKELLFCYYRAKSQGTGYLQRLYRLFTERNPNNPKVNKFTGYTLSNQARAIIKRGSISSELLDIIKENAEQTSTPHHSQDTSLHTSTNIQANQHSNHTPDENDGRRKWTQGEMHELMFCYYKSKTSETGYMGKMYNLFKERNPNNPKVHKFDGAKLANQVSSILKRKAISPEKLDEIKVMAERAQLSLSALNTISDPIENMHDSLDVQSIRSLHARLEVSHSTDFLISGTSSPNMFTPHLTTPLTSDRYFQTSPYTNQHLQTTLTNNVQPIQTLNTSTLSVQNLQITGESNSYIPSTFSDSSLCENTPSSTNSTEYVTDITQIQSDFQNLQVNEDTDPLILQFLQNLAETREIDIDDRHFLPKAKFNKPFFENLCKLNKFIPSILNTKNTIRNINDILYAAAKTLITNNNQKPCKPNVTLKPKSEPPWKVRIRKKIEEMRKEVGQLTERGKGANSNRMIRIKDRLRQKYNINTEIDYQNTVEMLKQKIKALAGRIKRYEDQNKRKTQNQAFKENQHTFYSNLTDTAKSPTEIPNKTQIEEFWKNILSKPVTYNKEAKWIQEIDNLSIDIQETQFEEITIEQVKEAIKKTHNWKSPGNDKVQNFYLKYLTSIHAFLAEVYTKVLSGSELIEEWFTTGRVILIPKDQNTGDPKNWRPIACLPTMYKLLTSIINNVLYNHCTNNSIIAPEQRGCRRYARGCKDHLMVNKAILEDAHNSQKNLSMAWIDYQKAYDSLPHDWLLKVLDMYNCPSAVKRFLGAVMPKWRVIMTARGNNGSVTTEPIHIRRGIFQGDALSPLLFCLAINPLSQILVKYTEKGYQLKESININHLLYMDDLKLYANSRTNLKILLDSTEIFTKDIGMTFGLNKCNILRLIAGKRQEFEGQGHILLNGQEFKHLERDQTYKYLGVHESGKIDHNELRQQLQREYFRRLKALLKSHLYARNLIKAINVYAVPILLYSFGIVNFKNSDLKKVDTKTRKILAMNKVHQQKADIDRLYLPLDEGGRGLINIETLHKTQIIKFKEYLSNEQDHLIKAIVEHDKQRQKYSIHKETQQNLTEIGLTHTDRYTDREIKNAVIETLKAKWKSKPLHGQLINAVLEKPNIDREGSFGWLKKQQIPSSIESSIFAIQDQAVMTRQHERDILKRPVDGKCRLCLAKDETVQHIVSGCERLAGTYYIKRHNNLVQYVHWSLSKKHNFPVPQLWWKHELAQPHTIENDTAKILWEIGIQTDTTVTHNRPDIIYINKPENKTYLIDISVPSDYNIGAKEVEKLSKYHLLKTEIHRLWHTSTTVIPIIVGTTGITAKSLYRYCDILNANIDTCILQKQAAIHTSTILSKVMGDSVFVNNESSSSLP

SEQ ID NO: 8454 - protein, 1310 aa, Zerynthia polyxena
MFCYYKAKSQGIGYIDRFYRIFKDRNPNNPKIHKFTGNTLSNQVRSIINRKTISTELLEQIKIRAEQPDQTPQNSLTSQQNTFDEYNVNLETNFENSDKRRKWSTAEMHELMFCYFKSKLEGTRYIENMFNLFKNRNPTNPKLHTLNGSKLSNQARSILNRKVIDTETLNKIKQRAEQSTSSMSTEQSLTQSTPLNTQSPLYSSSTPENTCNALTTIQDTDIPETNTLWQSDLTQQIIPTIQLSSASQEIEISNEHVMNIDLPMNRQNPVPINSSNIRESQSDGLSTNFEVSEGTDPVILNFLENLAEIKAISIDNRKNLPKAKFCKTFFQNLNKINNFLPNLLVANNSLREINDIIYAAAMTLIYNNNQKPYTLNNNTQPKSDPPWKNRIKRKIESFRRDIGQLTEIGRGVNTRKMIKFKEILYRKHKISNQVDHDNIIEILKQKVKALAARIKRYEDMNKRKTHNKVFIENQHRFYSNLSATTKTHIAIPTKAETETFWKSVLSQSESYNKEASWIKQLEESRGHIEEHQFEEITVEQVKNAIRKIPNWKSPGNDKVQNYYIKYLTSTHDYIAHLYTRLLNGTEEMEEWFSTGRVTLIPKDENTADPKNWRPISCLPTMYKLLTSVINNELYSHCSKNNIIAPEQRGCRRQARGCKDHLMVNKAILEDAHTSNKNLSMAWIDYQKAFDSLPHNWIIKVLDLYKCAPTIRKFLETIMPKWRVIMTARGKQTSVTTDPIYIRRGIFQGDALSPLLFCIAVNPISQLLNQYQKKGYKLKDSININHLLYMDDLKIYANNKNNLKVLLDTIEIFTRDIGMNFGLKKCQIINLVSGKRQEHDGKGHVLLNGQEFKHLSKNETYKYLGIHESGKIDHSEIRQQLQKEYFRRLKALTKSHLNARNLIRAINVYAIPVLLYAFGIINFKETDLKQIDTKTRKILAMNKAHQQKADVGRLYIPIEEGGRGLINIEILHKTQIIKYNQYLHIEQDYLIKAILHHDKKRDKYSINKEANNNLTEIGLRPNNIYTDQEIKNAVIKKQIHDWKCKPLHGQIMTSVLEKSNIDKEYSFKWLKKQQISPTFESSIFAIQDQAVITRQHERDIQKKPISGLCRLCLSKDETVQHIVSGCEKLAGTYYIKRHNNIVKYVHWALATKHSFPVSQLWWKHNLNEPNTIENETAKILWEIPIQTDIAVAHNRPDIIYINKSENKTYLIDITIPSDYNIGAKELEKLSKYHLLKTELHRLWHNQTTVIPIVIGSTGIIAKSLHRYINMLNADINIHIMQKQAAIHTSTIISKVLGDSVFVNSDTVSSTP

SEQ ID NO: 8455 - protein, 1341 aa, Marasmia exigua
MRVCVCVCGKVKRLLDNIRYIYIYIYIYIYIYIYIYIARAIIKRGSISSELLDIIKENAEQTSTPHHSQDTSLHTSTNIQANQHSNHTPDENDGRRKWTQGEMHELMFCYYKSKTSETGYMGKMYNLFKERNPNNPKVHKFDGAKLANQVSSILKRKAISPEKLDEIKVMAERAQLSLSALNTISDPIENMHDSLDVQSIRSLHARLEVSHSTDFLISGTSSPNMFTPHLTTPLTSDRYFQTSPYTNQHLQTTLTNNVQPIQTLNTSTLSVQNLQITGESNSYIPSTFSDSSLCENTPSSTNSTEYVTDITQIQSDFQNLQVNEDTDPLILQFLQNLAETREIDIDDRHFLPKAKFNKPFFENLCKLNKFIPSILNTKNTIRNINDILYAAAKTLITNNNQKPCKPNVTLKPKSEPPWKVRIRKKIEEMRKEVGQLTERGKGANSNRMIRIKDRLRQKYNINTEIDYQNTVEMLKQKIKALAGRIKRYEDQNKRKTQNQAFKENQHTFYSNLTDTAKSPTEIPNKTQIEEFWKNILSKPVTYNKEAKWIQEIDNLSIDIQETQFEEITIEQVKEAIKKTHNWKSPGNDKVQNFYLKYLTSIHAFLAEVYTKVLSGSELIEEWFTTGRVILIPKDQNTGDPKNWRPIACLPTMYKLLTSIINNVLYNHCTNNSIIAPEQRGCRRYARGCKDHLMVNKAILEDAHNSQKNLSMAWIDYQKAYDSLPHDWLLKVLDMYNCPSAVKRFLGAVMPKWRVIMTARGNNGSVTTEPIHIRRGIFQGDALSPLLFCLAINPLSQILVKYTEKGYQLKESININHLLYMDDLKLYANSRTNLKILLDSTEIFTKDIGMTFGLNKCNILRLIAGKRQEFEGQGHILLNGQEFKHLERDQTYKYLGVHESGKIDHNELRQQLQREYFRRLKALLKSHLYARNLIKAINVYAVPILLYSFGIVNFKNSDLKKVDTKTRKILAMNKVHQQKADIDRLYLPLDEGGRGLINIETLHKTQIIKFKEYLSNEQDHLIKAIVEHDKQRQKYSIHKETQQNLTEIGLTHTDRYTDREIKNAVIETLKAKWKSKPLHGQLINAVLEKPNIDREGSFGWLKKQQIPSSIESSIFAIQDQAVMTRQHERDILKRPVDGKCRLCLAKDETVQHIVSGCERLAGTYYIKRHNNLVQYVHWSLSKKHNFPVPQLWWKHELAQPHTIENDTAKILWEIGIQTDTTVTHNRPDIIYINKPENKTYLIDISVPSDYNIGAKEVEKLSKYHLLKTEIHRLWHTSTTVIPIIVGTTGITAKSLYRYCDILNANIDTCILQKQAAIHTSTILSKVMGDSVFVNNESSSSLP

SEQ ID NO: 8456 - protein, 1159 aa, Cephise aelius
MTNGVAMSLSGGRRGTFGAGAERDSMRVASGSSLNRRAGVGEPEDTTADIISDFDDALQNSGTLTSSVGTSMTTTTRSTISDDARRKWSQDELHELMFCYFKAKAEGPGYIKRFEHIFKQRNPNNPKINKYTGNTLSNQARSIINRKFISEEVLQNIKRRAECTHTLSGGGSISSTPNIEASTTNLQSDLNIHPSSVDMLQANADVDCQIVTGNIIPERLRDEGVTDAVEQAQINELTSNIDTSDEQDPIILEFLQILAEVKDMPIDKRQFLPKPKFNKQFFDNLRKLNNFLPTLLVTNCTLRETNNVIYAAAKTLITLNGQKCFPSSTAKRTPKDPPWKRRLKTKIDIIRKELGQLTEIGKGINSRKILKIKDTLYNKYNIFTQQDHVNTVEILKQKLKAIAGRLKRYEDMNDRKIQNNLFSENQHRFYRTMLGQQSKVKDIPAKEEVETFWGNVLAQPVAYNKTASWIGEIEDSALEINEYSFDCITLDQITTTISKLHNWKTPGIDKIQNYYLKYFTSAHEYIVKLFNKLFKGTETVEEWFTTGQVILIPKNTDTGDPKNWRPIACLPTMYKLLTSVIANQLYIHCENNDIIAPEQRGCRRRARGCKDHLMVNKVILEDAHQSQKNLSMGWIDYRKAFDSISHDWLLKALEIYKCPQSIIRFLKLVMPSWNVVMTAHGMNGSITTDPIYIRRGIFQGDSLSPLLFCIAMNPLSQILNKYEFQGYHLKDSVYINHLLYMDDLKIYANNKNSLNILLNSTEIFTQDIGMRFGLDKCNILHLTAGRRSSHEGEGHILLSGEEFQHLQSNETYKYLGVNESGKIDHSEVRQQIQKEYFRRVKCLTRTHLNARNLIKSINTYAVPVLLYSFGVVNFKNSDLKTIDTKTRKLLAINKAQQKKADINRLYIPTEQGGRGLINIEMLYKTQIVQYNRYLKSERDHLIKAIVVHDKNRDKYSIHKEARQFCEEIGIRDRDNYTEKELKTAVVKKHLNNWKTKSLHGQFLRAVLEKENIDTEYSFRWLKKQPVSPTLEASIFSIQDQSVITKQFERDVMKKPVSGKCRICLEKDETVQHIVSGCEKLAGTYYTRRHNNIVQYIHWTIAKKHKFNVKQLWWQETLTQPQVIENETAKLMWEMPVQTNVTVTHNRSDIIYINKQENHI

SEQ ID NO: 8457 - protein, 1257 aa, Autochton zarex
MKRVLRDLQIGPLPGVRRGTLGAGAERDSIRTASGSLLNRRAGVGGPEDTTADIIRDADCTLQSSGSTTISAGTSETTTTRSIISDDARRKWSQDELQELMFCYFKAKAEGPGYIKRFENIFKQRNPNNPKIYKYTGNTLSNQARSIINRKFISEEVLQEIKRQAERTYNLTDTDPVPSTSNTQTSTINTLRDNTLTRNTQQTDEVVTDDINLEHNQREEIIDVAGQQHIHDTIGNIDTSEDQDPIILDLLQILAEVKHTPINERSFLPKPKFNKPFIENLRKINNFLPTLLMTNCTLRETNDVIYAAAKTLIISNGQKPYPPSMTKTPSKDPPWKRRLKTKIDIIRKELGQLTEIGKGVNSRKLFKIKNTLYNKYHIFSQQDHDKMVEILKQKLKAMAGRLKRYEDMNNRKTQNNLFSQNEHKFYRSMSGQQNNNRNIPTKQAIESFWNNILAQPITYNKTATWIKELEQSTLDFNEHNFDSISLEQIKKAINRLHNWKTPGVDKIHNYYLKYLTNTHTYIAKLFDKIFKGTETIDEWFTTGLVILIPKDEGTEDPKNWRPIACLPTMYKLLTSVLADQLYMHCENNNIIAPEQRGCRRRARGCKDHLMLNKTILEDAHQSQKNLSMGWVDYRKAFDSISHDWLLKTLELYRCPKSISTFLKIVMPRWKVIMTAHSMNGSITTDPIYIRRGIFQGDSLSPLLFCLSINPLSQILNKYELNGYHLRDSIYLNHLLYMDDLKLYAKNKNSLKVLIDSTEIFTQDIGMSFGLNKCSILHLTAGRRKGHEGEGHILISGEEFQHLQSHEKYKYLGINESGKIDHSEVRQQIQKEYFRRVKSLTKTHLSSRNLIKSINTYAVPVLLYSFGVINYRNNDLKTIDIKTRKLLAMNKAHQKKADVNRLYIPLEHGGRGLINLEMLYKTQIIKYNKYLKSGKDDLIKAIVNHDRNRDKYSIDKEARQFSEEIGVHDKECYSEKELKTAAIKKHINNWKSKVLHGQFLKSVLEKENIDTEYSFRWLKKQPISPILEASIFAMQDQSIITNQFERDIIKKPVTGKCRICLAKDETVQHIVSGCEKLAGTYYTKRHNNIVQYVHWTIAKKHKFNVNQLWWKETLTQPQVIENETAKLMWEIPVQTDKTITHNRPDIVYINKQENHAYLIDISIPSDYNIGAKEIEKLSKYHPLKNEISRLWKIPSTVIPIIIGTTGIVARSIHKYCSKLDSNINVHIMQKQAAIHTSTILSKILGNSIVIGETESPSP

SEQ ID NO: 8458 - protein, 896 aa, Cabirus procas
MMKAKSTLYNKYNIFNDQDHDYIVEILKQKLKAKSGRLKRYEDMNDRKIQNSNFVENQHKFYRNISGKQQNANEIPTKETIETFWKDILAHPTTYNKTASWIKEIEQTKENIEQHNFDNITLDQVKHAINKLHNWKTPGIDKIHNYYLKYFTSAHVFITKLFNKLFKGKETIEEWFTTGNVILIPKEGDTTDPKNWRPIACLPTMYKLLTSVISDQLYTHCENNNIIAPEQRGCRRATRGCKDHLMINKAILEDAHQSQKTLSMGWVDYRKAFDSISHEWLLKALELYKCPKSIIGFLQMVMPFWKVVMTAHGINSSITTDPIYVRRGIFQGDSLSPLLFCIVINPLSQILNKYDLKGYHLRDSIYINHLLYMDDLKVYANNKNSLKILLDSTEIFTRDIGMSFGLNKCNILHLTLGRRSGLEGKGHILLNGEEFQHLQNNEKYKYLGIHESGKIDHSEVRQQIQKEYFRRIKSLAKTHLTSRNLIKSINTFAIPVLLYSFGIVNFKNNDLKTIDVKTRKLLTIHKAHQQKADVNRLYLPVQHGGRGLISVEMLYKTQIIKFNQYLKSGHDDLIKAIVTHDKSRDKYSIYKEARQFSDELEIQNRDIFTEKELKIAIEKKHQNNWKSKALHGQFFRSVLEKENIDTDYSFRWLKTQPVSPTLEAAVFSIQDQSVVTNQFERDIIKKPVDGKCRICLAKDETIQHIISGCEKLAGTYYTKRHNNIVQYVHWTIAKKHNFDVNRLWWKETLTQPQVIENETAKLMWEMPVQTDITVTHNRPDIIYVNKQENHAYLIDVTVPSDYNIGAKEIEKLSKYHLLRTEITRLWKIPTTVIPIVIGATGVIAKSLHRYCKKLDSNINIHIIQKQAAIYTSTITSKVLGNNAFEGVAESSSPYRS

SEQ ID NO: 8459 - protein, 1264 aa, Codatractus alcaeus
MKRVLRDLRFGPLPGVRRGTLGAGAERDSIRAASGSSLIRRTGVGETEDTTADIISDADCALQSSGSTTISVGTSETTTTRSCISEDARRKWSQDELEELMFCYFKAKAEGPGYIKRFERIFKQRNPNNPKINKYTGNTLSNQARSIINRKFISEEVLHDIKRRAEQTLSAINPDSNSITTHTQTYTNQIQTHNSNIQQPNIHLVETNSSIRIVTDETALETFQVEEITDADEQQQIDDLTGNIDTSEDQDPIILGLLQTLAEVKDTPIDKRYFLPKPKFNKKFINNLSIINNFLPNLLITNCTLRETNNVIYAAAKTLITTNGQKPYPPSITIKSTKDPPWKRRLKTKIDLIRKELGQLTEINKGVNSRKMLKIKNTLYNKYKIFCKQDHDKVVEILKQKLKAMAGRLKRYEDINGRKIQNNLFAENQHKFYRSMSGHQNKANKIPTKEALENFWNNILGQPTAYNKSATWLKEIEQSALDINEHNFDSISLDQIKIAINKLHNWKTPGVDKIHNYYLKYFTNAHEFIAKLFDKIFKGTETIDEWFTTGQVILIPKDADTEDPKNWRPIACLPTMYKLLTSIIADQLYTHCESNDIIAPEQRGCRRRARGCKDHLMVNKAILEDAHQSQKNLSMGWVDYHKAFDSISHDWLLKVLELYRCPKSISRFLQTVMPSWNVVMTAHSTNGSVTTNPIFIRRGIFQGDSLSPLLFCLSINPLSQTLNKYDLKGYHLRDSVYINHLLYMDDLKLYAKNKNCLKVLLDSTEIFTQDIGMSFGLNKCSILHLTAGRRKYCEGERHILLSGEEFQHLKNHETYKYLGINETGKINHSEVRQQIQKEYFRRIKCLTRTHLNSRNLIKSINTYAIPVLLYSFGIVNYKNNDLKTIDTKTRKLLAINKAHQKKTNINRLYIPIEYGGRGLINIETLYKVQIIKYKQYLKSGKDYLIRAIVDHDKSRDKYSIHKEARQFREDIRIECKEFYTEKELKIAVVKEHINNWKSKVLHGQFLRAVLEKENIDTEYSFRWLKKQPVSSILEASIFSIQDQSVITNQFERDIMKKPVTGKCRICSAKDETVQHIVSGCEKLAGTYYTKRHNNIVQYVHWTIAKKHQFNVNQLWWKENLTQPQVIENETAKLMWEMPVQTDKTIIHNRPDIIYINKQENHAYLIDVSIPSDYNIGAKEIEKLSKYHLLKNEITRLWKIPTTIIPIIIGTTGIVARSLHKYCNKLDSNINIHILQKQAAIHTNTILSKILGNSLFIGETESPSP

SEQ ID NO: 8460 - protein, 1188 aa, Dyscophellus porcius
MTTTRSTISDDARRKWSQEELEELMFCYFKAKSEGPGYIKRFERIFKERNPDNPKINKYTGNTLSNQARSIINRKFISEEVLQEIKRRAEQPIATESSTLHHQNTVTNTNSLSTTHNTYTPEIDTNIHEPNTRTRVNSEINVEIATDQDEEVTNLATQQDINDLTRNIDTSEDQDPIILDFLQILAEVKEISIDQRHFLPKPKFNKQFFDNLRKINDFLPSLLITNCKLRETNDVIYAAAKTLIILNGQKPYPPSMTRKPPKDPPWKRRMKSQIDIIRKELGQLTEIGKGINSKKLLKTKYILYNKYNILSQKDHDSVVEILKQKLKAKAGRLKRYEDMNDRKIQNNLFSENQHKFYRNVSGKFNIASDLPTKEAIETFWKEILEQPETYNKTATWVKDIEQTARDINEHKFDSIELDQLKVAINKLHNWKTPGIDKIHNYYLKYFTSSHEYIAKLFDKIFKGSETIEEWFTTGQVILIPKDVNTKDPKNWRPIACLPTMYKLLTSVIADQLYAHCENNDIIAPEQRGCRRRARGCKDHLMVNKAILEDAHQSQKNLSTGWVDYRKAFDSISHEWLLKILELYRCPKSIRNFLEIVIPKWKVVMTAHGTTDSITTGPINVRRGIFQGDSLSPLLFCIGVNPLSQILNKYDLKGYHLKDSVYINHLIYMDDLKIYAKDKNSLKVLLDSTEIFTRDIGMSFGLNKCNILHLTAGRRSSHEGEGHILLSGEEFKHLKNNEKYKYLGIHESGKIDHSEARQQIQKEYFKRLKCLMRTHLNSRNLIKSINTYAIPILLYSFGIVNYKNSDIKAIDTKTRKLLAINKAQQKKADVSRLYIPIEQGGRGLINIEMLYKTQIIKYKRYLKTEKDHLIKAIVVHDKNREKYSIHKEARQFSEEIGIQDRDDCTEKELKTAVIRKHVNNWKSKSIHGQFLRTVLEKENIDTEYSFRWLKKQPVSPTLEASIFSIQDQSVITNQFERDIMKKPVSGKCRICSAKDETVQHIVSGCEKLAGTYYTKRHNNIVQYIHWTIAKKHKFNVNPLWWKEHLTQPQVIENESAKLMWEMPVQTDRTVAHNRPDIIYINKQHNHTYLIDITIPSDYNIGAKELEKLSKYHLLKTEITRLWKTPTTIIPIVIGSTGVVARSLHRYCDKLDSHINIHILQKQAAIHTTTILSKILGNSIFAGETESSSP

SEQ ID NO: 8461 - protein, 1277 aa, Niconiades incomptus
MANGALVTFMMKRQLRNLRQGPLPGERRGTLGADAERDSIRTVSGSSLNRRARVGEPEDTTADINRDADDALQSTGSPASSAGASEETTTSSMTSEDARRKWSQEELQELMFCYFKARAEGPGYIKRFERLFKQRNRNNPKVAKFTGNTLSNQARSIINRKFLSLEVLDEIKQRAEQGTINTQLIAAPSVAPNTYTHQSSLNVHNQIDIDVGDVNRDSNISERNEYADITEIREINDLTSNIDTSEDQDLIILKFLRSFAEIKDIPIAERKILPKPKFNSQFFDNLRKINNFIPNLLITNHSLREINNVIYAAAKTLIIENKQEPYMQNTKTKILSDPPWKRRLKNKIDVIRKELGQFTEIGRGLNSKKLLKAKDKLYTKYNIFSKQDHDNIVEILKQKLKAKAGRLKRYEDMNARKTQNKQFLENQHKFYRNLAKTQHRTTEIPTQEAVETFWKNIISQPITYNKSAHWIRDIEESNKNIEIHTFDSITVEQVKQAISKLHNWKTPGIDQIHNYYLKYLTSTHKFIAKLFDKIFKGTENIEEWFTTGIVILIPKDGDTNEPKNWRPIACLPTMYKLLTSIISNELYTHCSNNDIIAPEQRGCRRRARGCKDHLMINKAILEDAHQSQKNLSMGWVDYQKAFDSISHDWLLRVLSLYKCPESIINFLRFVMPYWKVIMTARGTTNSITTEPIHIRRGIFQGDSLSPLLFCIGINPLSQILNKYELKGYHLKDSVYINHLLYMDDLKIYANNKNSLRVLLDSTEIFTRDIGMSFGLNKCNILHLTAGTKSGQEGDGHILLSGEEFEHLKSSERYKYLGINESGKIDHSEVRQQIQKEYFRRVKCLTRTHLNSRNLIKSINTYAMPVLLYTFGVVNYKNSDLKAIDTKTRKLLNIYKAHHQKADVDRLYIPIDQGGRGLVNIEMLYKTQIIKYNKYLKSENDHLLKAIVVHDKMRDKYSICKESKQFCEELGLRNEERYTDKEIKNLVVKKHVNSWKNKALHGQFLKAVLERENVDTEFSFRWLKKQQISPTLEASIFAIQDQSIVTNQFERDIIKKAVDGKCRVCLEKDETVQHIVSGCEKLAGTYYTKRHNNIVQYVHWTIARKHNFNVNQLWWKETLVRPQVIENETAKLMWEMPVQTDITVTHNRPDIIYINKQDNHAYLIDITVPSDYNIGAKEIEKLSKYHLLKTEITRLWKMPTTVVPIVIGATGVIAKSLHRYCSKIDSNLNIHIMQKQAAIYTNTILSKVLGNVPNFCWGNRISFFLSVSGWELRKFTHH

SEQ ID NO: 8462 - protein, 1262 aa, Camptopleura auxo
MESNCNRYRIGPLPGGDRRGTSVAGGGRDSMLASDPRRTGWSGVGDRRGGTSLDATAEESVGVTLRSRGISPLSSAGSLQSTTGSINEDSRKKWSTVELEELMFCYYKAKAGGSGYIKRFEKLFKDRNPHNPKSKKFTGNTLATQVRAVLSRRSISQQVLDEIKNKAEQDLTSTNTQLPTIPENNTQTRNHSIHAISDTIHLTEGTQMEQEHIHTSQDYSIQSNAEQTDTGIDNNTTEINYVEVNENQDPLILDFLEILAETKETQLEDRPFLPKPKFSKLFINNLDKINKYLPKLLVTNQSVRQINDIIYAAARTLIINNNQTPFKASTAKKTNLDPPWKRRLKQKIENYRQELGRLIEIRAGVSTRRMTNIKQKLFSKYNINNNEDLNNNIEIIKQKVKALAGRLRRYDEINGRKMQNNLFTENQHKFYRSLSNSQHKPDQIPTQTEIQTFWSSILSEPISYNKEAQWISEIEKSATDIQEHNFEEIDIDKVKEAIRKTHNWKTPGIDKIQNYYIKYLTSTHKFIANLYNKIIKGLEPIDTWFVTGQVILIPKDGNTTDPKNWRPIACLPTMYKILTSVIANELYIHCVKNDILAPEQRGCRRGVRGCKDHLMINKAILEDAHKCQKNLSVAWVDYRKAFDSISHEWLLKVLEIYKCPPIIKVFLQMVMPKWNVTMAAHGATTSVITDPIYIRRGIFQGDSLSPLLFCLGINPISQILSNYHFKGYKLKDNSIINHLLYMDDLKIYANNRTNLKVLIDSTEIFSRDIGMQFGLNKCNVLHLVAGKRYQHQGNGHVLLSGEEFRHLQEDEKYKYLGINEAGTIDHAEVRQQIQKEYFRRVKSLTTSYLNARNLIRAINTYAVPVLLYTFGIVNYKSTDIKKIDVKTRKLLAMKKIHQQKSDIERLYLPIEEGGRGLTNIEILYKTQIIKFKSYIETEKDYLLRAIVEHDRNKDKYSIHKEARLYLTDLGLDQNKNYIDRDLNKAIIKTKVGKLKAKPLHGQFYKSVLEKENIDRVQSFRWFRKQSVPPSLESAIFAIQDQAVITRQHERDILKKAIDGKCRLCLEKDETAQHIISGCEKLAGTYYIKRHNNIVQYVFWTLSKKHNFEVSNLWWQEHLTQPQVKENATAKLMWEMPVQTDTTIIHNRPDIIYVNKQENHIYLIDITVPSDYNIGAKEIEKLSKYHSLKNEITRLWKRPTTIVPIVVGATGVVAKNLERYCKLLNSHININIMQKQAALHTTTILSKILGNSAYIGETESPSP

SEQ ID NO: 8463 - protein, 1277 aa, Ectomis octomaculata
MEKSNSISKRKGPLPGGDRRGTSVAGGRRDRMLASDSQRTGWLGVRDRIGGTSLDATAEEHVDVTLRSRDVSPMGSAGASQLTTGSIKDDLRRKWSNIELEELMFCYYKARVEGPGYIKRLEKIFKNRNSHNPKSRKFNGNTLSTQVRTVLSRQAISQQTLDLIKRKAEESYNLLDRNITTTTGSNSEAYNISQIDQNTPQNIHTQDVIGTEVTQEAHTQISSRNTECNINDVPTITLGQSNSQRVDEETEEPRDIEVNEDQDPIILDFLQILAETRDTQIENRPFLPKPIFTKTFINNLNQINSYLPTVLKTSQTLREINDVIYAAAKTLIVNNNQRPYIPLSVQNPKRDPPWKRRIKKKIEESRKELGRLVEIRVGVNSKRMVNIKQKLFNKYNINNNDDLNNIIEILKQKIKALAGRLRRYDEVNERKTQNKIFAENQHKFYRSLNKTQQNSTVVPTKNEIENFWTTILSKPISYNKNAQWISEIEHSSNGIEEHRFEEIDAEKVKEAINKTQNWKSPGIDKIQNYYLKYLTSTHKFIAKSYDRIIKRSETIDTWFTTGRVILIPKDNNSVEPKNWRPIACLPTMYKILTSIIANELYIHCDKNDIIALEQRGCRRATRGCKDHLMINKAIIEDAHKCQKNLSLAWIDYQKAFDSISHEWLLKVLELYKCPPIIKSFLEMVMPMWNVIMTAHDGTMSITTDPIYVRRGIFQGDSLSPLLFCLGINPISQILSNYQLKGYKLTDDTIINHLLYMDDLKIYANNKSNLKVLIDTTEIFTRDIGMEFGLSKCKVLHLVAGKRGEHQGMGHILLSGQEFKHLKTDETYKYLGISEAGKIDHGEVKQQIQKEYFHRVKSITTSHLNSRNLLRAINVYAVPVLLYTFGIINYKNSDLKKIDIKTRKFLAMNKLHQQKADVERLYLPVHQGGRGLTNIETLYKTQIIKYKSYIETENDYLLGAIAEYNRNKDKYSIIKEGRLNLGEIGLNPNKKYVEKDLKNTIIKVRVEKLKSKPLHGQFYKAVLEKENIDKVQSFRWFKNQPISPSLEAAIFAIQDQAVITKQHERDILKRDVDGKCRVCLVKDETTQHIISGCEKLAGNYYTKRHNSIVQYVFWTLAKKHKFDVHNLWWQEHLKQPQVKENEHAKVMWEIPVQTDVTIVHNRPDIIYINKVENKTYLIDISVPSDYNIGAKELEKLSKYHKLKIEISRLWKTTTEVIPIVVGATGVIARNLQRYCNRLNSDININIIQKQAAIHTVTIVNKVLGDSVFVSRTTEPPFP

SEQ ID NO: 8464 - protein, 893 aa, Ebrietas anacreon
MNIIKQKLFSKYNINNNEELSNNIEIIKQKVKALAGRLRRYDEINGRKIQNNLFTENQHKFYRSLNSRQILPNQIPTQTEIQTFWSSILSEPISYNKEAQWIPEIEKSATDILEHKFEEIDIDKVKEAIRKTHNWKTPGIDKIQNYYIKYLTSTHKFIANLYDRIIRGVEPIDTWFVTGQVILIPKDNNTVDPKNWRPIACLPTMYKILTSIIANELNIHCVKNDILAPEQRGCRRGVRGCKDHLMINKAILEDAHKCQKNLSVAWVDYRKAFDSISHEWLLKVLEIYKCPSIIKGFLQMVMPMWNVVMAAHGATTSVVTDPIHIRRGIFQGDSLSPLLFCLGINPISQILSNYHFKGYKLKDNSIINHLLYMDDLKIYANNKTNLKVLIDSTEIFSRDIGMQFGLNKCNVLHLVAGRRHQHQGAGHVLLSGEEFRHLQENEKYKYLGINEAGNIDHAEVRQQIQKEYFRRVKSLTTSYLNARNLLRAINMYAVPVLLYTFGIINYKSSDIKKIDIKTRKMLAMKNTHQQKSDIERLYLPIEEGGRGLTNIETLYKTQIIKFKAYIETEKDYLLTAIAEHDRNKDKYSLHKEAGLYITELGLEQNKSYIDRDINKAIIKTRVGKLKAKPLHGQFYKSVLEKENIDRVQSFRWLRKQSVPPSLESAIFAIQDQAVITRQHERDILKKAIDGKCRLCLAKDETAQHIISGCEKLAGTYYTKRHNNIVQYVFWTLGKKHNFNVSNLWWQDHLTQPQVKENGTAKLMWEMPVQTDTTITHNRPDIIYVNKEENHIYLIDITVPSDYNIGAKEIEKLSKYHPLKNEITRLWKRPTTIVPIVVGATGVVAKNLQRYCKLLNSNININIMQKQAALHTTTILSKILGNSAYIGETESPSP

SEQ ID NO: 8465 - protein, 1371 aa, Plutella xylostella
MINNDTSTGPLPGGDRRGTSGAGAGRGSMRTASGSLLNRRARVGETEGTTAELIWDSDDTLQSGASPTSSAGTSEQDTTSSHTNNEDERRKWSDEEVRELMFCYFKTKAQGSGYIRRLEKLFKERNPTNPKASKFTGNTLSNQARSVIKKNTLPEQELELIKQQAEEINSQTDTQQTDTRTEPETRNIEQTSPGSNRSTIDRNAKNKWSDDEMKELMWCYFKAKSEGAGYIKRLERLFKERNPTNPKIHKFNGNTLSNQVRVILSRKALSDLVLDEIRKQAQENSEPTHVIPQSPTPSTRTDTQSPINVNITPEHTPIQTRIPNTNTSENSLPHITDSTDIEVNEETDPLILTFLQVLAETKEGSIEDRKYLPKPTFCKQFYSNLQKLNEYLPIVLATNSSLREVNDIIYATAKTLILTNNQKPYHPTNTAKKNREPPWKRRIKKKIEVLRKELGRFTEIKRGVTSRKMNKQKDKLYEKYNIFNEQDHDNTAETIKQRIKAYAGRIKRYEDMSNRKAQNKLFHENQHKFYRNLDRKTEPPERIPNKDEIEGFWSSILSQPIPYNRQAPWISEISQANANIQQSDFEEISIDMVKAAIRKTHNWKAPGIDKIQNYYLKYLTNTHEHLTKLYNNILKGAEEIEDWFTTGKVILIPKSEETQNSKNWRPIACLPTMYKLLTSVIANELYRHCESNNIIAPEQRGCRRRARGCKDHLMINKSILEDAHTSKKNLSTAWVDYRKAFDSVSHEWLLKVLDLYECPDAVKSFLLMVMPKWRVVMTAQGAHDTVETDHIYIRRGIFQGDSLSPLLFCLAINPLSQILNKYDTKGYRLKDRTTVNHLLYMDDLKVYAKTKEGLKVLLDSTEIFTKDIGMSFGLDKCNTLHITAGRRKSHQGEGHVLLSGEEFTHLGIGQSYKYLGINEAGKIEHNEIRQQTEKEYFKRVKKLLNSHLNSRNLIKAINIYAVPVLLYTFGIINYKQSDLKKIDTKTRKLLAMNKAHQQKAEVERLYLPLEEGGRGLTNVEMLHKTQIIKYKEYLDQETDYIIKATVEHDKTKDKYSIYKDSQENLQELQLDSQNRYTDKEIKSAVIKKRVNTWKEKPLHGQFCKAVLQKDNIDRELSFRWLKKQPVSSTLEASIFAIQDQAVITRQHERDILRKEIDGRCRLCATKDETIQHITSGCDKLAGTYYTKRHNNIVQYVHWSLLIKHNLHSTDLWWKEDLTQPQVKENEEAKVMWEMPVQTDVTVTHNRPDIIYTDKAENKTYLIDITIPSDYNIGAKEIEKLSKYHLLKKEIARLWNTDTQIIPIVIGATGIVAKSLHRYSVSHYSMWKLIIYIFYLLYIYTYILLIIFLFFLHSWRKIYTDTWEGDPGSVGL

SEQ ID NO: 8466 - protein, 1362 aa, Plutella xylostella
MINNDTSTGPLPGGDRRGTSGAGAGRGSMRTASGSLLNRRARVGETEGTTAELIWDSDDTLQSGASPTSSAGTSEQDTTSSHTNNEDERRKWSDEEVRELMFCYFKTKAQGSGYIRRLEKLFKERNPTNPKASKFTGNTLSNQARCVIKKNTLPEQELELIKQQAEEINSQTDTQQTDTRTEPETRNIEQTSPGSNRSTIDRNAKNKWSDEEIKELMWCYFKAKSEGAGYMKRLERLFKERNPTNPKIHKFNGNTLSNQVRVILSRKALSDLVLDEIRKQAQENSEPTHVIPQSPTPSTRTDTQSPINVNITPEHTPIQTRISNTNTSENSLPHITDSTDIEVNEETDPLILTFLQVLAETKEGSIEDRKYLPKPTFCKQFYSNLQKLNEYLPIVLATNSSLREVNDIIYATAKTLILTNNQKPYHPTNTAKKNREPPWKRRIKKKIEVLRKELGRFTEIKRGVTSRKMNKLKDKLYEKYNIFNEQDHDNTAETIKQRIKAYAGRIKRYEDMSNRKAQNKLFHENQHKFYRNLDRKTEPPERIPNKDEIEGFWSSILSQPIPYNRQAPWISEISQANTNIQQSDFEEISIDMVKAAIRKTHNWKAPGIDKIQNYYLKYLTNTHEHLTKLYNNILKGAEEIEDWFTTGKVILIPKSEETQNPKNWRPIACLPTMYKLLTSVITNELYRHCESNNIIAPEQRVCRRRARGCKDHLMINKSILEDAHTSKKNLSTAWVDYRKAFDSVSHEWLLKVLDLYECPDAVKSFLLMVMPKWRVVMTAQGAHDTVETDHIYIRRGIFQGDSLSPLLFCLAINPLSQILNKYDTKGYRLKDRTTVNHLLYMDDLKVYAKTKEGLKVLMDRTEIFTKDIGMSFGLDKCNTLHITAGRRKSHQGEGHVLLSGEEFTHLGIGQSYKYLGINEAGKIEHNEIRQQTEKEYFKRVKKLLNSHLNSRNLIKAINIYAVPVLLYTFGIINYKQSDLKKIDTKTRKLLAMNKAHQQKAEVERLYLPLEEGGRGLTNVEMLHKTQIIKYKEYLDQETDYIIKATVEHDKTKDKYSIYKDSQENLQELQLDSQNRYTDKEIKSAVIKKRVNTWKEKPLHGQFCKAVLQKDNIDRELSFRWLKKQPVSSTLEASIFAIQDQAVITRQHERDILRKEIDGRCRLCATKDETIQHITSGCDKLAGTYYTKRHNNVVQYVHWSLLKKHNLHSTDLWWKEDLTQPQVKENEEAKVMWEMPVQTDVTVTHNRPDIIYTDKAENKTYLIDITIPSDYNIGAKEIEKLSKYHLLKKEIARLWNTDTYIIPIVIGATGIVAKSLHRYCNKLETKINIHIMQKQAAIHTSTIVSKVLGDSVFVHGDTDAPLL

SEQ ID NO: 8467 - protein, 1362 aa, Plutella xylostella
MINNDTSTGPLPGGDRRGTSGAGAGRGSMRTASGSLLNRRARVGETEGTTAELIWDSDDTLQSGASPTSSAGTSEQDTTSSHTNNEDERRKWSDEEVRELMFCYFKTKAQGSGYIRRLEKLFKERNPTNPKASKFTGNTLSNQARSVIKKNTLPEQELELIKQQAEEINSQTDTQQTDTRTEPETRNIEQTSPGSNRSTIDRNAKNKWSDDEMKELMWCYFKAKSEGAGYIKRLERLFKERNPTNPKIHKFNGNTLSNQVRVILSRKALSDLVLDEIRKQAQENSEPTHVIPQSPTPSTRTDTQSPINVNITPEHTPIQTRIPNTNTSENSLPHITDSTDIEVNEETDPLILTFLQVLAETKEGSIEDRKYLPKPTFCKQFYSNLQKLNEYLPIVLATNSSLREVNDIIYATAKTLILTNNQKPYHPTNTAKKNREPPWKRRIKKKIEVLRKELGRFTEIKRGVTSRKMNKQKDKLYEKYNIFNEQDHDNTAETIKQRIKAYAGRIKRYEDMSNRKAQNKLFHENQHKFYRNLDRKTEPPERIPNKDEIEGFWSSILSQPIPYNRQAPWISEISQANANIQQSDFEEISIDMVKAAIRKTHNWKAPGIDKIQNYYLKYLTNTHEHLTKLYNNILKGAEEIEDWFTTGKVILIPKSEETQNSKNWRPIACLPTMYKLLTSVIANELYRHCESNNIIAPEQRGCRRRARGCKDHLMINKSILEDAHTSKKNLSTAWVDYRKAFDSVSHEWLLKVLDLYECPDAVKSFLLMVMPKWRVVMTAQGAHDTVETDHIYIRRGIFQGDSLSPLLFCLAINPLSQILNKYDTKGYRLKDRTTVNHLLYMDDLKVYAKTKEGLKVLLDSTEIFTKDIGMSFGLDKCNTLHITAGRRKSHQGEGHVLLSGEEFTHLGIGQSYKYLGINEAGKIEHNEIRQQTEKEYFKRVKKLLNSHLNSRNLIKAINIYAVPVLLYTFGIINYKQSDLKKIDTKTRKLLAMNKAHQQKAEVERLYLPLEEGGRGLTNVEMLHKTQIIKYKEYLDQETDYIIKATVEHDKTKDKYSIYKDSQENLQELQLDSQNRYTDKEIKSAVIKKRVNTWKEKPLHGQFCKAVLQKDNIDRELSFRWLKKQPVSSTLEASIFAIQDQAVITRQHERDILRKEIDGRCRLCATKDETIQHITSGCDKLAGTYYTKRHNNIVQYVHWSLLIKHNLHSTDLWWKEDLTQPQVKENEEAKVMWEMPVQTDVTVTHNRPDIIYTDKAENKTYLIDITIPSDYNIGAKEIEKLSKYHLLKKEIARLWNTDTQIIPIVIGATGIVAKSLHRYCNKLEAKINIHIMQKQAAIHTSTIVSKVLGDSVFVHGDTDAPLL

SEQ ID NO: 8468 - protein, 1362 aa, Plutella xylostella
MINNDTSTGPLPGGDRRGTSGAGAGRGSMRTASGSLLNRRARVGETEGTTAELIWDSDDTLQSGASPTSSAGTSEQDTTSSHTNNEDERRKWSDEEVRELMFCYFKTKAQGSGYIRRLEKLFKERNPTNPKASKFTGNTLSNQARSVIKKNTLPEQELELIKQQAEEINSQTDIQQTDTRTEPETRNIEQTSPGSNRSTIDRNAKNKWSDDEIKELMWCYFKAKSEGAGYIKRLERLFKERNPTNPKIHKFNGNTLSNQVRVILSRKALSDLVLDEIRKQAQENSEPTDVIPQSPTPSTRTDTQSPINVNITPEHTPIQTRISNTNTPENSLPHITDSTDIEVNEETDPLILTFLQVLAETKEGSIEDRKYLPKPTFCKQFYSNLQKLNEYLPIVLATNSSLREVNDIIYATAKTLILTNNQKPYHPTNTAKKNREPPWKRRIKKKIEVLRKELGRFTEIKRGVTSRKMNKQKDKLYEKYNIFNEQDHDNTAETIKQRIKAYAGRIKRYEDMSNRKAQNKLFHENQHKFYRNLDRKTEPPERIPNKDEIEGFWSSILSQPIPYNRQAPWISEISQTNANIQQSDFEEISIDMVKVAIRKTHNWKAPGIDKIQNYYLKYLTNTHEHLTKLYNNILKGAEDIEDWFTTGKVILIPKSEETQNPKNWRPIACLPTMYKLLTSVIANELYRHCESNNIIAPEQRGCRRRARGCKDHLMINKSILEDAHTSKKNLSTAWVDYRKGFDSVSHEWLLKVLDLYECPDAVKSFLLMVMPKWRVVMTAQGAHDTVETDHIYIRRGIFQGDSLSPLLFCLAINPLSQILNKYDTKGYRLKDRTTVNHLLYMDDLKVYAKTKEGLKVLLDSTEIFTKDIGMSFGLDKCNTLHITAGRRKSQQGEGHVLLSGEEFTHLGIGQSYKYLGINEAGKIEHNEIRQQTEKEYFKRVKKLLNSHLNSRNLIKAINIYAVPVLLYTFGIINYKQSDLKKIDTKTRKLLAMNKAHQQKAEVERLYLPLEEGGRGLTNVEMLHKTQIIKYKEYLDQETDYIIKATVEHDKTKDKYSIYKDSQENLQELQLDSQNRYTDKEMKSAVIKKRVNTWKEKPLHGQFCKAVLQKDSIDRELSFRWLKKQPVSSTLEASIFAIQDQAVITRQHERDILRKEIDGRCRLCATKDETIQHITSGCDKLAGTYYTKRHNNVVQYVHWSLLKKHNLHSTDLWWKEHLTQPQVKENEEAKVMWEMPVQTDVTVTHNRPDIIYTDKAENKTYLIDITIPSDYNIGAKEIEKLSKYHLLKKEIARLWNTDTQIIPIVIGATGIVAKSLHRYCNKLEAKINIHIMQKQAAIHTSTIVSKVLGDSVFVHGDTDAPLL

SEQ ID NO: 8469 - protein, 1343 aa, Plutella xylostella
MPSPSPTLTSGSTIRSTWEGDTCKKKTYTLKGYGNPYGVMINNDTSTGPLPGGDRRGTSGAGAGRGSMRTASGSLLNRRARVGETEGTTAELIWDSDDTLQSGASPTSSAGTSEQDTTSSHTNNEDERRKWSDEEVRELMFCYFKTKAQGSGYIRRLEKLFKERNPTNPKASKFTGNTLSNQARCVIKKNTLPEQELELIKQQAEEINSQTDTQQTDTRREPETRNIEQTSPGSNRSTIDRNAKNKWSDDEIKELMWCYFKAKSEGAGYIKRLERLFKERNPTNPKIHKFNGNTLSNQVRVILSRKALSDLVLDEIRKQAQENSEPTHVISQSPTPSTRTDTQSPINVNITPEHTPIQTRISNTNTSENSLPHITDSTIIEVNEETDPLILTFLQVLAETKESSIEDRKYLPKPTFCKQFYSNLQKLNEYLPILLATNSSLREVNDIIYATAKTLILTNNQKPYHPTNTAKKNREPPWKRRIKKKIEVLRKELGRFTEIKRGVTSRKMNKQKDKLYEKYNIFNEQDHDNTAETIKQRIKAYAGRIKRYEDMSNRKAQNKLFHENQHKFYRNLDRKTEPPERIPNKDEIEGFWSSILSQPIPYNRQAPWISEISQTNANIQQSDFEEISIDMVKVAIRKTHNWKAPGIDKIQNYYLKYLTNTHEHLTKLYNNILKGAEDIEDWFTTGKVILIPKSEETQNPKNWRPIACLPTMYKLLTSVIANELYRHCESNNIIAPEQRGCRRRARGCKDHLMINKSILEDAHTSKKNLSTAWVDYRKAFDSVSHEWLLKVLDLYECPDAVKSFLLMVMPKWRVVMTAQGAHDTVETDHIYIRRGIFQGDSLSPLLFCLAINPLSQILNKYDTKGYRLKDRTTVNHLLYMDDLKVYAKTKEGLKVLLDSTEIFTKDIGMSFGLDKCNTLHITAGRRKSQQGEGHVLLSGEEFTHLGIGQSYKYLGINEAGKIEHNEIRQQTEKEYFKRVKKLLNSHLNSRNLIKAINIYAVPVLLYTFEIINYKQSDLKKIDTKTRKLLAMNKAHQQKAEVDRLYLPLEEGGRGLTNVEMLHKTQIIKYKEYLDQETDYIIKATVEHDKTKDKYSIYKDSQENLQELQLDSQNRYTDKEMKSAVIKKRVNTWKEKPLHGQFCKAVLQKDNIDRELSFRWLKKQPVSSTLEASIFAIQDQAVITRQHERDILRKEIDGRCRLCATKDETIQHITSGCDKLAGTYYTKRHNNVVQYVHWSLLKKHNLHSTDLWWKEHLTQPQVKENEEAKVMWEMPVQTDVTVTHNRPDIIYTDKAENKTYLIDITIPSDYNIGAKEIEKLSKYHLLKKEIARLWNTLSLSLSLL

SEQ ID NO: 8470 - protein, 1362 aa, Plutella xylostella
MINNDTSTGPLPGGDRRGTSGAGAGRGSMRTASGSLLNRRARVGETEGTTAELIWDSDDTLQSGASPTSSAGTSEQDTTSSHTNNEDERRKWSDEEVRELMFCYFKTKAQGSGYIRRLEKLFKERNPTNPKASKFTGNTLSNQARNVIKKNTLPEQELELIKQQAEEINSQTDTQQTDTRTEPETRNIEQTSPGSNRSTIDRNAKNKWSDDEIKELMWCYFKAKSEGAGYIKRLERLFKERNPSNPKIHKFNGNTLSNQVRVILSRKALSDLVLDEIRKQAQENSEPTDVIPQSPTPSTRTDTQSPINVNITPEHTPIQTRISNTNTPENSLPHITDSTDIEVNEETDPLILTFLQVLAETKEGSIEDRKYLPKPTFCKQFYSNLQKLNEYLPIVLATNSSLREVNDIIYATAKTLILTNNQKPYHPTNTAKKNREPPWKRRIKKKIEVLRKELGRFTEIKRGVTSRKMNKQKDKLYEKYNIFNEQDHDNTAETIKQRIKAYAGRIKRYEDMSNRKAQNKLFHENQHKFYRNLDRKTEPPERIPNKDEIEGFWSSILSQPIPYNRQAPWISEISQANANIQQSDFEEISIDMVKAAIRKTHNWKAPGIDKIQNYYLKYLTNTHEHLTKLYNNILKGAEEIEDWFTTGKVILIPKNEETQNPKNWRPIACLPTMYKLLTSVIANELYRHCESNNIIAPEQRGCRRRARGCKDHLMINKSILEDAHTSKKNLSTAWVDYRKAFDSVSHEWLLKVLDLYACPDAVKSFLLMVMPKWRVVMTAQGAHDTVETDHIYIRRGIFQGDSLSPLLFCLAINPLSQILNKYDTKGYRLKDRTTVNHLLYMDDLKVYAKTKEGLKVLLDSTEIFTKDIGMSFGLDKCNTLHITAGRRKSHQGEGHVLLSGEEFTHLGIGQSYKYLGINEAGKIEHNEIRQQTEKEYFKRVKKLLNSHLNSRNLIKAINIYAVPVLLYTFGIINFKQSDLKKIDTKTRKLLAMNKAHQQKAEVERLYLPLEEGGRGLTNVEMLHKTQIIKYKEYLDQETDYIIKATVEHDKTKDKYSIYKDSQENLQELQLDSQNRYTDKEIKNAVIKKRVNTWKEKPLHGQFCKAVLQKDNIDRELSFRWLKKQPVSSTLEASIFAIQDQAVITRQHERDILRKEIDGRCRLCATKDETIQHITSGCDKLAGTYYTKRHNNVVQYVHWSLLKKHNLHSTDLWWKENLTQPQVKENEEAKLMWEMPVQTDVTVTHNRPDIIYTDKAENKTYLIDITIPSDYNIGAKEIEKLSKYHLLKKETARLWNTDTHIIPIVIGATGIVAKSLHRYCNKLEAKINIHIMQKQAAIHTSTIVSKVLGDSVFVHGDTDAPLL

SEQ ID NO: 8471 - protein, 1362 aa, Plutella xylostella
MINNETSTGPLPGGDRRGTSGAGAGRGSMRTASGSLLNRRARVGETEGTTAELIWDSDDTLQSGASPTSSAGTSEQDTTSSHTNNEDERRKWSDEEVRELMFCYFKTKAQGSGYIRRLEKLFKERNPTNPKASKFTGNTLSNQARCVIKKNTLPEQELELIKQQAEEINSQTDTQQTDTRTEPETRNIERTSPGSNRSTIDRNAKNKWSDDEIKELMWCYFKAKSEGAGYIKRLERLFKERNPTNPKIHKFNGNTLSNQVRVILSRKALSDLVLDEIRKQAQENSEPTHVIPQSPTPSTRTDTQSPINVNITPEHTPIQTRTSNTSTPENSLPHITDSTDIEVNEETDPLILTFLQVLAETKEGSIEDRKYLPKPTFCKQFYNNLQKLNEYLPIVLATNSSLREVNDIIYATAKTLILTNNQKPYHPTNTAKKNREPPWKRRIKKKIEVLRKELGRFTEIKRGVTSRKMNKLKDKLYEKYNIFNEQDHDNTAETIKQRIKAYAGRIKRYEDMSNRKAQNKLFHENQHKFYRNLDRKTEPPERIPNKDEIEGFWSSILSQPIPYNRQAPWISEISQANANIQQSDFEEISIDMVKAAIRKTHNWKAPGIDKIQNYYLKYLTNTHEHLTKLYNKILKGAEEIEDWFTTGKVILIPKSEETQNPKNWRPIACLPTMYKLLTSVIANELYRHCESNNIIAPEQRGCRRRARGCKDHLMINKSILEDAHTSKKNLSTAWVDYRKAFDSVSHEWLLKVLDLYECPDAVKSFLLMVMPKWRVVMTAQGAHDTVETDHIYIRRGIFQGDSLSPLLFCLAINPLSQILNKYDTKGYRLKDRTTVNHLLYMDDLKVYAKTKEGLKVLLDSTEIFTKDIGMSFGLDKCNTLHITAGRRKSHQGEGHVLLSGEEFTHLGIGQSYKYLGINEAGKIEHNEIRQQTEKEYFKRVKKLLNSHLNSRNLIKAINIYAVPVLLYTFGIINYKQSDLKKIDTKTRKLLAMNKAHQQKAEVERLYLPLEEGGRGLTNVEMLHKTQIIKYKEYLDQETDYIIKATVEHDKTKDKYSIYKDSQENLQELQLDSQNRYTDKEIKSAVIKKRVNTWKEKPLHGQFCKAVLQKDNIDRELSFRWLKKQPVSSTLEASIFAIQDQAVITRQHERDILRKEIDGRCRLCATKDETIQHITSGCDKLAGTYYTKRHNNVVQYVHWSLLKKHNLHSTDLWWKEDLTQPQVKENEEAKVMWEMPVQTDVTVTHNRPDIIYTDKAENKTYLIDITIPSDYNIGAKEIEKLSKYHLLKKEIARLWNTDTQIIPIVIGATGIVAKSLHRYCNKLEAKINIHIMQKQAAIHTSTIVSKVLGDSVFVHGDTDAPLL

SEQ ID NO: 8472 - protein, 1041 aa, Clostera curtula
MSWVTLNQIIESSDTALHDSPDGQDPNDIILDFLQTLSETKETLITDRKHLPKPKFNKQFIHNLNQINEYIPKILNTESNLREINDVIYATAKTLIIKNGQVPFTPSKTIKPKADPPWKRRITEKIGNIRKEIGQLVEIRKGTNSRHMQKIKYKLYNKYNIFTQQDLDYEIEILEQKLKALAGRIKRYDEINRRKEQNRMFHQNQHTFYRTLNREQQAPRNIPSKNSIQDFWTTLLSQPITYNKNAPWIVDVETETTGFSQHNFNTIDKNKLVTALKKLQNWKTPGIDKVQNYYIKYLTNTHEHIVRIYNRILNRTEPLEEWFTMGQVILIPKNENTREPQNWRPIACLPTLYKILTSIISNELYIHCENNEILQPEQRGCRRHVRGCKDHLMVNKAILEDAHKSKKNLSMGWIDYRKAFDSMSHEWLIKILSIYKSPQIIIDFLQLVMPTWKVIMTARGTNDYITTDPIFIRRGIFQGDSLSPLLFCIGLNPLSQILNKYQSKGYKIKDNIHINHLLYMDDLKIYANNKHNLKVMLHSTEIFTRDIGMEFGLDKCNILHLDSGKRSEHQGGGHVLLSGDEFRHLNAGQHYKYLGINESGKIDHSEVRQQIQKEYFHRIKRLTNSHLNSRNLLKAINIYAVPVLMYTFGIINFKTSDLKKIDTKTRKLLAINKAQKQKADVGRLYLPLEEGGRGLTNIEMLHKTQIIKYKYYLQQKTDHIIETILNSDRTKDKYSIHKEARSNLEEIGLNSSGTYIDKEIRNAVTKTEINKWKSKALHGQFRKSVLEKENIDKEYSFRWLKKQPISPTLESSVFAIQDQAIVTRQHERDIQKKAVDGKCRLCSTKDETIQHIVSGCEMLAGTYYTKRHNNIVQYIYWTLCKKHNFEVSNLWWQQHLTKPEVKENDSAKLMWEIPVQTDVTVSHNRPDIIYINKTENKIYLIDITVPSDYNIGPKEIEKLSKYNLLKNEVTRLWKMPTEVIPIVIGSTGVIAKSLHRYIDTLNSNINIHIIQKQAAIHTITIVNKVMGNTMFVGREPGIASP

SEQ ID NO: 8473 - protein, 1292 aa, Clostera curtula
MMMERNNGKRIGSLPGGERRGTSRADAGRDSMRTVSGSLLNRRARAGDPEETTAELIRSVDDALQSGESSPTNSAGTSTETTTRSILNDDARRKWSQEELEELMFCYFKAKAQGSGYIKRFYKLFTDRNPHNPKITKFTGNTLSNQARSIITRKMLSTEILNEIKSRAEQLITSATNTTTTQTLIETPVAYIDTVQHHQILDQGTTLPNNDIIPNNNIQPTYTEINTQSENILQTSTQHTADSEIASQYEHMSWVTLNQIIESSDTALHDSPDGQDPNDIILDFLQTLSETKETLITDRKHLPKPKFNKQFIHNLNQINEYIPKILNTESNLREINDVIYATAKTLIIKNGQVPFTPSKTIKPKADPPWKRRITEKIGNIRKEIGQLVEIRKGTNSRHMQKIKYKLYNKYNIFTQQDLDYEIEILEQKLKALAGRIKRYDEINRRKEQNRMFHQNQHTFYRTLNREQQAPRNIPSKNTIQDFWTTLLSQPITYNKNAPWIVDVETETTGFSQHNFNTIDKNKLVTALKKLQNWKTPGIDKVQNYYIKYLTNTHEHIVRIYNRILNRTEPLEEWFTMGQVILIPKNENTREPQNWRPIACLPTLYKILTSIISNELYIHCENNKILQPEQRGCRRHVRGCKDHLMVNKAILEDAHKSKKNLSMGWIDYRKAFDSMSHEWLIKILSIYKSPQIIIDFLQLVMPTWKVIMTARGTNDYITTDPIFIRRGIFQGDSLSPLLFCIGLNPLSQILNKYQSKGYKIKDNIHINHLLYMDDLKIYANNKHNLKVMLHSTEIFTRDIGMEFGLDKCNILHLDSGKRSEHQGGGHVLLSGDEFRHLNAGQHYKYLGINESGKIDHSEVRQQIQKEYFHRIKRLTNSHLNSRNLLKAINIYAVPVLMYTFGIINFKTSDLKKIDTKTRKLLAINKAQKQKADVGRLYLPLEEGGRGLTNIEMLHKTQIIKYKYYLQQKTDHIIETILNSDRTKDKYSIHKEARSNLEEIGLNSSGTYIDKEIRNAVTKTEINKWKSKALHGQFRKSVLEKENIDKEYSFRWLKKQPISPTLESSVFAIQDQAIVTRQHERDIQKKAVDGKCRLCSTKDETIQHIVSGCEMLAGTYYTKRHNNIVQYIYWTLCKKHNFEVSNLWWQQHLTKPEVKENDSAKLMWEIPVQTDVTVSHNRPDIIYINKTENKIYLIDITVPSDYNIGPKEIEKLSKYNLLKNEVTRLWKMPTEVIPIVIGSTGVIAKSLHRYIDTLNSNINIHIIQKQAAIHTITIVNKVMGNTMFVDREPGIASP

SEQ ID NO: 8474 - protein, 1292 aa, Clostera curtula
MMMERNNGKRIGSLPGGERRGTSRADAGRDSMRTVSGSLLNRRARAGDPEETTAELIRSVDDALQSGESSPTNSAGTSTETTTRSILNDDARRKWSQEELEELMFCYFKAKAQGSGYIKRFHKLFTDRNPHNPKITKFTGNTLSNQARSIITRKMLSTEILSEIKLRAEQSITSATNTTTTQTLIETPVAYIDTVQRHQIIDQGPTLPNNDIIPNNNIQPTYTEINTQSENILQTSTQHTADSEIASQYEHMSWVTLNQIIESSDTALHDSPDGQDPNDIILDFLQTLSETKETLITDRKHLPKPKFNKQFIHNLNQINEYIPKILNTESNLREINDVIYATAKTLIIKNGQVPFTPSKTIKPKTDPPWKRRITEKIGNIRKEIGQLVEIRKGTNSRHMQKIKYKLYNKYNIFTQQDLDYEIEILEQKLKALAGRIKRYDEINRRKEQNRMFHQNQHTFYRTLNREQQAPRNIPSKNTIQDFWTTLLSQPITYNQNAPWIVDLETETTGFSQHNFNTIDINKLVTALKKLQNWKTPGIDKVQNYYIKYLTNTHEHIVRIYNRILNRTEPLEEWFTMGQVILIPKNENTREPQNWRPIACLPTLYKILTSIISNELYIHCENNEILQPEQRGCRRHVRGCKDHLMVNKAILEDAHKSKKNLSMGWIDYRKAFDSMSHEWLIKILSIYKSPQIIIDFLQLVMPTWKVIMTARGTNDYITTDPIFIRRGIFQGDSLSPLLFCIGLNPLSQILNKYQSKGYKIKDNIHINHLLYMDDLKIYANNKHNLKVMLHSTEIFTRDIGMEFGLDKCNILHLDSGKRSEHQGEGHVLLSGDEFRHLNAGQHYKYLGINESGKIDHSEVRQQIQKEYFHRIKRLTNSHLNSRNLLKAINIYAVPVLMYTFGIINFKTSDLKKIDTKTRKLLAINKAQKQKADVGRLYLPLEEGGRGLTNIEMLHKTQIIKYKYYLQQKTDHIIETILNSDRTKDKYSIHKEARSNLEEIGLNSSRTYIDKEIRNAVTKTEINKWKSKALHGQFRKSVLEKENIDKEYSFRWLKKQPISPTLESSVFAIQDQAIVTRQHERDIQKKAVDGKCRLCSTKDETIQHIVSGCEMLAGTYYTKRHNNIVQYIYWTLCKKHNFEVSNLWWQQHLTKPEVKENDSAKLMWEIPVQTDVTVSHNRPDIIYINKTENKIYLIDITVPSDYNIGPKEIEKLSKYNLLKNEVTRLWKMPTEVIPIVIGSTGVIAKSLHRYIDTLNSNINIHIIQKQAAIHTITIVNKVMGNTMFVDREPGIASP

SEQ ID NO: 8475 - protein, 1292 aa, Clostera curtula
MMMERNNGKRIGSLPGGERRGTSRADAGRDSMRTVSGSLLNRRARAGDPEETTAELIRSVDDALQSGESSPTNSAGTSTETTTRSILNDDARRKWSQEELEELMFCYFKAKAQGSGYIKRFHKLFTDRNPHNPKITKFTGNTLSNQARSIITRKMLSTEILSEIKLRAEQSITSATNTTTTQTLIETPVAYIDTVQRHQVIDQGPTLPNNDIIPNNNIQPTYTEINTQSENILQTSTQHTADSEIASQYEHMSWVTLNQIIESSDTALHDSPDGQDPNDIILDFLQTLSETKETLITDRKHLPKPKFNKQFIHNLNQINEYIPKILNTESNLREINDVIYATAKTLIIKNGQVPFTPSKTIKPKTDPPWKRRITEKIGNIRKEIGQLVEIRKGTNSRHMQKIKYKLYNKYNIFTQQDLDYEIEILEQKLKALAGRIKRYDEINRRKEQNRMFHQNQHTFYRTLNREQQAPRNIPSKNTIQDFWTTLLSQPITYNQNAPWIVDLETETTGFSQHNFNTIDINKLVTALKKLQNWKTPGIDKVQNYYIKYLTNTHEHIVRIYNRILNRTEPLEEWFTMGQVILIPKNENTREPQNWRPIACLPTLYKILTSIISNELYIHCENNEILQPEQRGCRRHVRGCKDHLMVNKAILEDAHKSKKNLSMGWIDYRKAFDSMSHEWLIKILSIYKSPQIIIDFLQLVMPTWKVIMTARGTNDYITTDPIFIRRGIFQGDSLSPLLFCIGLNPLSQILNKYQSKGYKIKDNIHINHLLYMDDLKIYANNKHNLKVMLHSTEIFTRDIGMEFGLDKCNILHLDSGKRSEHQGEGHVLLSGDEFRHLNAGQHYKYLGINESGKIDHSEVRQQIQKEYFHRIKRLTNSHLNSRNLLKAINIYAVPVLMYTFGIINFKTSDLKKIDTKTRKLLAINKAQKQKADVGRLYLPLEEGGRGLTNIEMLHKTQIIKYKYYLQQKTDHIIETILNSDRTKDKYSIHKEARSNLEEIGLNSSRTYIDKEIRNAVTKTEINKWKSKALHGQFRKSVLEKENIDKEYSFRWLKKQPISPTLESSVFAIQDQAIVTRQHERDIQKKAVDGKCRLCSTKDETIQHIVSGCEMLAGTYYTKRHNNIVQYIYWTLCKKHNFEVSNLWWQQHLTKPEVKENDSAKLMWEIPVQTDVTVSHNRPDIIYINKTENKIYLIDITVPSDYNIGPKEIEKLSKYNLLKNEVTRLWKMPTEVIPIVIGSTGVIAKSLHRYIDTLNSNINIHIIQKQAAIHTITIVNKVMGNTMFVDREPGIASP

SEQ ID NO: 8476 - protein, 1292 aa, Clostera curtula
MMMERNNGKRIGSLPGGERRGTSRADAGRDSMRTVSGSLLNRRARAGDPEETTAELIRSVDDALQSGESSPTNSAGTSTETTTRSILNDDARRKWSQEELEELMFCYFKAKAQGSGYIKRFHKLFTDRNPHNPKITKFTGNTLSNQARSIITRKMLSTEILSEIKLRAEQSITSATNTTTTQTLIETPVAYIDTVQRHQIIDQGPTLPNNDIIPNNNIQPTYTEINTQSENILQTSTQHTADSEIASQYEHMSWVTLNQIIESSDTALHDSPDGQDPNDIILDFLQTLSETKETLITDRKHLPKPKFNKQFIHNLNQINEYIPKILNTESNLREINDVIYATAKTLIIKNGQVPFTPSKTIKPKTDPPWKRRITEKIGNIRKEIGQLVEIRKGTNSRHMQKIKYKLYNKYNIFTQQDLDYEIEILEQKLKALAGRIKRYDEINRRKEQNRMFHQNQHTFYRTLNREQQAPRNIPSKNTIQDFWTTLLSQPITYNQNAPWIVDLETETTGFSQHNFNTIDINKLVTALKKLQNWKTPGIDKVQNYYIKYLTNTHEHIVRIYNRILNRTEPLEEWFTMGQVILIPKNENTREPQNWRPIACLPTLYKILTSIISNELYIHCENNEILQPEQRGCRRHVRGCKDHLMVNKAILEDAHKSKKNLSMGWIDYRKAFDSMSHEWLIKILSIYKSPQIIIDFLQLVMPTWKVIMTARGTNDYITTDPIFIRRGIFQGDSLSPLLFCIGLNPLSQILNKYQSKGYKIKDNIHINHLLYMDDLKIYANNKHNLKVMLHSTEIFTRDIGMEFGLDKCNILHLDSGKRSEHQGEGHVLLSGDEFRHLNAGQHYKYLGINESGKIDHSEVRQQIQKEYFHRIKRLTNSHLNSRNLLKAINIYAVPVLMYTFGIINFKTSDLKKIDTKTRKLLAINKAQKQKADVGRLYLPLEEGGRGLTNIEMLHKTQIIKYKYYLQQKTDHIIETILNSDRTKDKYSIHKEARSNLEEIGLNSSRTYIDKEIRNAVTKTEINKWKSKALHGQFRKSVLEKENIDKEYSFRWLKKQPISPTLESSVFAIQDQAIVTRQHERDIQKKAVDGKCRLCSTKDETIQHIVSGCEMLAGTYYTKRHNNIVQYIYWTLCKKHNFEVSNLWWQQHLTKPEVKENDSAKLMWEIPVQTDVTVSHNRPDIIYINKTENKIYLIDITVPSDYNIGPKEIEKLSKYNLLKNEVTRLWKMPTEVIPIVIGSTGVIAKSLHRYIDTLNSNINIHIIQKQAAIHTITIVNKVMGNTMFVDREHGIASP

SEQ ID NO: 8477 - protein, 1292 aa, Clostera curtula
MMMERNNGKRIGSLPGGERRGTSRADAGRDSMRTVSGSLLNRRARAGDPEETTAELIRSVDDALQSGESSPTNSAGTSTETTTRSILNDDARRKWSQEELEELMFCYFKAKAQGSGYIKRFHKLFTNRNPHNPKITKFTGNTLSNQARSIITRKMLSTEILSEIKLRAEQSITSATNTTTTQTLIETPVAYIDTVQRHQIIDQGPTLPNNDIIPNNNIQPTYTEINTQSENILQTSTQHTADSEIASQYEHMSWVTLNQIIESSDTALHDSPDGQDPNDIILDFLQTLSETKETLITDRKHLPKPKFNKQFIHNLNQINEYIPKILNTESNLREINDVIYATAKTLIIKNGQVPFTPSNTIKPKTDPPWKRRITEKIGNIRKEIGQLVEIRKGTNSRHMQKIKYKLYNKYNIFTQQDLDYEIEILEQKLKALAGRIKRYDEINRRKEQNRMFHQNQHTFYRTLNREQQAPRNIPSKNTIQDFWTTLLSQPITYNQNAPWIVDLETETTGFSQHNFNTIDKNKLVTALKKLQNWKTPGIDKVQNYYIKYLTNTHEHIVRIYNRILNRTEPLEEWFTMGQVILIPKNENTREPQNWRPIACLPTLYKILTSIISNELYIHCENNEILQPEQRGCRHHVRGCKDHLMVNKAILEDAHKSKKNLSMGWIDYRKAFDSMSHEWLIKILSIYKSPQIIIDFLQLVMPTWKVIMTARGTDDYITTDPIFIRRGIFQGDSLSPLLFCIGLNPLSQILNKYQSKGYKIKDNIHINHLLYMDDLKIYANNKHNLKVMLHSTEIFTRDIGMEFGLDKCNILHLDSGKRSEHQGEGHVLLSGDEFRHLNAGQHYKYLGINESGTIDHSEVRQQIQKEYFHRIKRLTNSHLNSRNLLKAINIYAVPVLMYTFGIINFKTSDLKKIDTKTRKLLAINKAQKQKADVGRLYLPLEEGGRGLTNIEMLHKTQIIKYKYYLQQKTDHIIETILNSDRTKDKYSIHKEARSNLEEIGLNSSRTYIDKEIRNAVTKTEINKWKSKALHGQFRKSVLEKENIDKEYSFRWLKKQPISPTLESSVFAIQDQAIVTRQHERDIQKKAVDGKCRLCSTKDETIQHIVSGCEMLAGTYYTKRHNNIVQYIYWTLCKKHNFEVSNLWWQQHLTKPEVKENDSAKLMWEIPVQTDVTVSHNRPDIIYINKTENKIYLIDITVPSDYNIGPKEIEKLSKYNLLKNEVTRLWKMPTEVIPIVIGSTGVIAKSLHRYIDTLNSNINIHIIQKQAAIHTITIVNKVMGNTMFVDREPGIASP

SEQ ID NO: 8478 - protein, 1292 aa, Clostera curtula
MMMERNNGKRIGSLPGGERRGTSRADAGRDSMRTVSGSLLNRRARAGDPEETTAELIRSVDDALQSGESSPTNSAGTSTETTTRSILNDDARRKWSQEELEELMFCYFKAKAQGSGYIKRFHKLFTDRNPHNPKITKFTGNTLSNQARSIITRKMLSTEILSEIKLRAEQSITSATNTTTTQTLIETPVAYIDTVQRHQIIDQGPTLPNNDIIPNNNIQPTYTEINTQSENILQTSTQHTADSEIASQYEHMSWVTLNQIIESSDTALHDSPDGQDPNDIILDFLQTLSETKETLITDRKHLPKPKFNKQFIHNLNQINEYIPKILNTESNLREINDVIYATAKTLIIKNGQVPFTPSKTIKPKTDPPWKRRITEKIGNIRKEIGQLVEIRKGTNSRHMQKIKYKLYNKYNIFTQQDLDYEIEILEQKLKALAGRIKRYDEINRRKEQNRMFHQNQHTFYRTLNREQQAPRNIPSKNTIQDFWTTLLSQPITYNQNAPWIVDLETETTGFSQHNFNTIDKNKLVTALKKLQNWKTPGIDKVQNYYIKYLTNTHEHIVRIYNRILNRTEPLEEWFTMGQVILIPKNENTREPQNWRPIACLPTLYKILTSIISNELYIHCENNEILQPEQRGCRRHVRGCKDHLMVNKAILEDAHKSKKNLSMGWIDYRKAFDSMSHEWLIKILSIYKSPQIIIDFLQLVMPTWKVIMTARGTNDYITTDPIFIRRGIFQGDSLSPLLFCIGLNPLSQILNKYQSKGYKIKDNIHINHLLYMDDLKIYANNKHNLKVMLHSTEIFTRDIGMEFGLDKCNILHLDSGKRSEHQGEGHVLLSGDEFRHLNAGQHYKYLGINESGKIDHSEVRQQIQKEYFHRIKRLTNSHLNSRNLLKAINIYAVPVLMYTFGIINFKTSDLKKIDTKTRKLLAINKAQKQKADVGRLYLPLEEGGRGLTNIEMLHKTQIIKYKYYLQQKTDHIIETILNSDRTKDKYSIHKEARSNLEEIGLNSSRTYIDKEIRNAVTKTEINKWKSKALHGQFRKSVLEKENIDKEYSFRWLKKQPISPTLESSVFAIQDQAIVTRQHERDIQKKAVDGKCRLCSTKDETIQHIVSGCEMLAGTYYTKRHNNIVQYIYWTLCKKHHFEVSNLWWQQHLTKPEVKENDSAKLMWEIPVQTDVTVSHNRPDIIYINKTENKIYLIDITVPSDYNIGPKEIEKLSKYNLLKNEVTRLWKMPTEVIPIVIGSTGVIAKSLHRYIDTLNSNINIHIIQKQAAIHTITIVNKVMGNTMFVDREHGIASP

SEQ ID NO: 8479 - protein, 1292 aa, Clostera curtula
MMMERNNGKRIGSLPGGERRGTSRADAGRDSMRTVSGSLLNRRARAGDPEETTAELIRSVDDALQSGESSPTNSAGTSTETTTRSILNDDARRKWSQEELEELMFCYFKAKAQGSGYIKRFHKLFTDRNPHNPKITKFTGNTLSNQARSIITRKMLSTEILSEIKLRAEQSITSATNTTTTQTLIETPVAYIDTVQRHQIIDQGPTLPNNDIIPNNNIQPTYTEINTQSENILQTSTQHTADSEIASQYEHMSWVTLNQIIESSDTALHDSPDGQDPNDIILDFLQTLSETKETLITDRKHLPKPKFNKQFIHNLNQINEYIPKILNTESNLREINDVIYATAKTLIIKNGQVPFTPSKTIKPKTDPPWKRRITEKIGNIRKEIGQLVEIRKGTNSRHMQKIKYKLYNKYNIFTQQDLDYEIEILEQKLKALAGRIKRYDEINRRKEQNRMFHQNQHTFYRTLNREQQAPRNIPSKNTIQDFWTTLLSQPITYNQNAPWIVDLETETTGFSQHNFNTIDINKLVTALKKLQNWKTPGIDKVQNYYIKYLTNTHEHIVRIYNRILNRTEPLEEWFTMGQVILIPKNENTREPQNWRPIACLPTLYKILTSIISNELYIHCENNEILQPEQRGCRRHVRGCKDHLMVNKAILEDAHKSKKNLSMGWIDYRKAFDSMSHEWLIKILSIYKSPQIIIDFLQLVMPTWKVIMTARGTNDYITTDPIFIRRGIFQGDSLSPLLFCIGLNPLSQILNKYQSKGYKIKDNIHINHLLYMDDLKIYANNKHNLKVMLHSTEIFTRDIGMEFGLDKCNILHLDSGKRSEHQGEGHVLLSGDEFRHLNAGQHYKYLGINESGKIDHSEVRQQIQKEYFHRIKRLTNSHLNSRNLLKAINIYAVPVLMYTFGIINFKTSDLKKIDTKTRKLLAINKAQKQKADVGRLYLPLEEGGRGLTNIEMLHKTQIIKYKYYLKQKTDHIIETILNSDRTKDKYSIHKEARSNLEEIGLNSSRTYIDKEIRNAVTKTEINKWKSKALHGQFRKSVLEKENIDKEYSFRWLKKQPISPTLESSVFAIQDQAIVTRQHERDIQKKAVDGKCRLCSTKDETIQHIVSGCEMLAGTYYTKRHNNIVQYIYWTLCKKHNFEVSNLWWQQHLTKPEVKENDSAKLMWEIPVQTDVTVSHNRPDIIYINKTENKIYLIDITVPSDYNIGPKEIEKLSKYNLLKNEVTRLWKMPTEVIPIVIGSTGVIAKSLHRYIDTLNSNINIHIIQKQAAIHTITIVNKVMGNTMFVDREPGIASP

SEQ ID NO: 8480 - protein, 1189 aa, Clostera curtula
MFCYFKAKAQGSGYIKRFYKLFTDRNPHNPKITKFTGNTLSNQARSIITRKMLSTEILSEIKLRAEQSITSATNTTTTQTLIETPVAYIDTVQRHQIIDQGPTLPNNDIIPNNNIQPTYTEINTQSENILQTSTQHTADSEIASQYEHMSWVTLNQIIESSDTALHDSPDGQDPNDIILDFLQTLSETKETLITDRKHLPKPKFNKQFIHNLNQINEYIPKILNTESNLREINDVIYATAKTLIIKNGQVPFTPSKTIKPKTDPPWKRRITEKIGNIRKEIGQLVEIRKGTNSRHMQKIKYKLYNKYNIFTQQDLDYEIEILEQKLKALAGRIKRYDEINRRKEQNRMFHQNQHTFYRTLNREQQAPRNIPSKNTIQDFWTTLLSQPITYNQNAPWIVDLETETTGFSQHNFNTIDKNKLVTALKKLQNWKTPGIDKVQNYYIKYLTNTHEHIVRIYNRILNRTEPLEEWFTMGQVILIPKNENTREPQNWRPIACLPTLYKILTSIISNELYIHCENNEILQPEQRGCRRHVRGCKDHLMVNKAILEDAHKSKKNLSMGWIDYRKAFDSMSHEWLIKILSIYKSPQIIIDFLQLVMPTWKVIMTARGTNDYITTDPIFIRRGIFQGDSLSPLLFCIGLNPLSQILNKYQSKGYKIKDNIHINHLLYMDDLKIYANNKHNLKVMLHSTEIFTRDIGMEFGLDKCNILHLDSGKRSEHQGGGHVLLSGDEFRHLNAGQHYKYLGINESGKIDHSEVRQQIQKEYFHRIKRLTNSHLNSRNLLKAINIYAVPVLMYTFGIINFKTSDLKKIDTKTRKLLAINKAQKQKADVGRLYLPLEEGGRGLTNIEMLHKTQIIKYKYYLQQKTDHIIETILNSDRTKDKYSIHKEARSNLEEIGLNSSGTYIDKEIRNAVTKTEINKWKSKALHGQFRKSVLEKENIDKEYSFRWLKKQPISPTLESSVFAIQDQAIVTRQHERDIQKKAVDGKCRLCSTKDETIQHIVSGCEMLAGTYYTKRHNNIVQYIYWTLCKKHNFEVSNLWWQQHLTKPEVKENDSAKLMWEIPVQTDVTVSHNRPDIIYINKTENKIYLLDITVPSDYNIGPKEIEKLSKYNLLKNEVTRLWKMPTEVIPIVIGSTGVIAKSLHRYIDTLNSNINIHIIQKQAAIHTITIVNKVMGNTMFVDREPGIASP

SEQ ID NO: 8481 - protein, 1292 aa, Clostera curtula
MMMERNNGKRIGSLPGGERRGTYRADAGRDSMRTVSGSLLNRRARAGDPEETTAELIRSVDDALQSGESSPTNSAGTPTETTTRSILNDDARRKWSQEELEELMFCYFKAKAQGSGYIKRFHKLFTDRNPHNPKITKFTGNTLSNQARSIITRKMLSTEILSEIKLRAEQSITSATNTTTTQTLIETPVAYIDTVQRHQIIDQGTTLPNNDIIPNNNIQPTYTEINTQSENILQTSTQHTADSEIASQYEHMSWVTLNQIIESSDTALHDSPDGQDPNDIILDFLQTLSETKETLITDRKHLPKPKFNKQFIHNLNQINEYIPKILNTESNLREINDVIYATAKTLIIKNGQVPFTPSKTIKPKADPPWKRRITEKLGNIRKEIGQLVEIRKGTNSRHMQKIKYKLYNKYNIFTQQDLDYEIEILEQKLKALAGRIKRYDEINRRKEQNRMFHQNQHTFYRTLNREQQAPRNIPSKNSIQDFWTTLLSQPITYNKNAPWIVDVETETTGFSQHNFNTIDKNKLVTALKKLQNWKTPGIDKVQNYYIKYLTNTHEHIVRIYNRILNRTEPLEEWFTMGQVILIPKNENTREPQNWRPIACLPTLYKILTSIISNELYIHCENNEILQPEQRGCRRHVRGCKDHLMVNKAILEDAHKSKKNLSMGWIDYRKAFDSMSHEWLIKILSIYKSPQIIIDFLQLVMPTWKVIMTARGTNDYITTDPIFIRRGIFQGDSLSPLLFCIGLNPLSQILNKYQSKGYKIKDNIHINHLLYMDDLKIYANNKHNLKVMLHSTEIFTRDIGMEFGLDKCNILHLDSGKRSEHQGGGHVLLSGDEFRHLNAGQHYKYLGINESGKIDHSEVRQQIQKEYFHRIKRLTNSHLNSRNLLKAINIYAVPVLMYTFGIINFKTSDLKKIDTKTRKLLAINKAQKQKADVGRLYLPLEEGGRGLTNIEMLHKTQIIKYKYYLQQKTDHIIETILNSDRTKDKYSIHKEARSNLEEIGLNSSGTYIDKEIRNAVTKTEINKWKSKALHGQFRKSVLEKENIDKEYSFRWLKKQPISPTLESSVFAIQDQAIVTRQHERDIQKKAVDGKCRLCSTKDETIQHIVSGCEMLAGTYYTKRHNNIVQYIYWTLCKKHNFEVSNLWWQQHLTKPEVKENDSAKLMWEIPVQTDVTVSHNRPDIIYINKTENKIYLIDITVPSDYNIGPKEIEKLSKYNLLKNEVTRLWKMPTEVIPIVIGSTGVIAKSLHRYIDTLNSNINIHIIQKQAAIHTITIVNKVMGNTMFVDREPGIASP

SEQ ID NO: 8482 - protein, 1292 aa, Clostera curtula
MMMERNNGKRIGSLPGGERRGTYRADAGRDSMRTVSGSLLNRRARAGDPEETTAELIRSVDDALQSGESSPTNSAGTSTETTTRSILNDDARRKWSQEELEELMFCYFKAKAQGSGYIKRFYKLFTDRNPHNPKITKFTGNTLSNQARSIITRKMLSTEILNEIKSRAEQLITSATNTTTTKTLIETPVAYIDTVQHHQILDQGTTLPNNDIIPNNNIQPTYTEINTQSENILQTSTQHTADSEIASQYEHMSWVTLNQIIESSDTALHDSPDGQDPNDIILDFLQTLSETKETLITDRKHLPKPKFNKQFIHNLNQINEYIPKILNTESNLREINDIIYATAKTLIIKNGQVPFTPSKTIKPKADPPWKRRITEKIGNIRKEIGQLVEIRKGTNSRHMQKIKYKLYNKYNIFTQQDLDYEIEILEQKLKALAGRIKRYDEINRRKEQNRMFHQNQHTFYRTLNREQQAPRNIPSKNTIQDFWTTLLSQPITYNKNAPWIVDVETETTGFSQHNFNTIDKNKLVTALKRLQNWKTPGIDKVQNYYIKYLTNTHEHIVRIYNRILNRTEPLEEWFTMGQVILIPKNENTREPQNWRPIACLPTLYKILTSIISNELYIHCENNEILQPEQRGCRRHVRGCKDQLMVNKAILEDAHKSKKNLSMGWIDYRKAFDSMSHEWLIKILSIYKSPQIIIDFLQLVMPTWKVIMTARGTNDYITTDPIFIRRGIFQGDSLSPLLFCIGLNPLSQILNKYQSKGYKIKDNIHINHLLYMDDLKIYANNKHNLKVMLHSTEIFTRDIGMEFGLDKCNFLHLDSGKRSEHQGGGHVLLSGDEFRHLNAGQHYKYLGINESGKIDHSEVRQQIQKEYFHRIKRLTNSHLNSRNLLKAINIYAVPVLMYTFGIINFKTSDLKKIDTKTRKLLAINKAQKQKADVGRLYLPLEEGGRGLTNIEMLHKTQIIKYKYYLQQKTDHIIETILNSDRTKDKYSIHKEARSNLEEIGLNSSGTYIDKEIRNAVTKTEINKWKSKALHGQFRKSVLEKENIDKEYSFRWLKKQPISPTLESSVFAIQDQAIVTRQHERDIQKKAVDGKCRLCSTKDETIQHIVSGCEMLAGTYYTKRHNNIVQYIYWTLCKKHNFEVSNLWWQQHLTKPEVKENDSAKLMWEIPVQTDVTVSHNRPDIIYINKTENKIYLIDITVPSDYNIGPKEIEKLSKYNLLKNEVTRLWKMPTEVIPIVIGSTGVIAKSLHRYIDTLNSNINIHIIQKQAAIHTITIVNKVMGNTMFVDREPGIASP

SEQ ID NO: 8483 - protein, 1292 aa, Clostera curtula
MMMERNNGKRIGSLPGGERRGTSRADAGRDSMRTVSGSLLNRRARAGDPEETTAELIRSVDDALQSGESSPTNSAGTSTETTTRSILNDDARRKWSQEELEELMFCYFKAKAQGSGYIKRFHKLFTDRNPHNPKITKFTGNTLSNQARSIITRKMLSTEILNEIKSRAEQSITSATNTTTTQTLIETPVAYIDTVQHHQILDQGITLPNKDIIPNNNIQPTYTEINTQSENILQTSTQHTADSEIASQYEHMSWVTLNQIIESSGTALHDSPDGQDPNDIILDFLQTLSETKETLITDRKHLPKPKFNKQFIHNLNQINEYIPKILNTESNLREINDVIYATAKTLIIKNGQVPFTPSKTIKPKADPPWKRRITGKIGNIRKEIGQLVEIRKGTNSRHMQKIKYKLYNKYNIFTQQDLDYEIEILEQKLKALAGRIKRYDEINRRKEQNRMFHQNQHTFYRTLNREQQAPRNIPSKNTIQDFWTTLLSQPITYNKNAPWIVDVETETAGFSQHNFNTIDKNKLVTALKKLQNWKTPGIDKVQNYYIKYLTNTHEHIVRIYNRILNRTEPLEEWFTMGQVILIPKNENTREPQNWRPIACLPTLYKILTSIISNELYIHCENNEILQPEQRGCRRHVRGCKDHLMVNKAILEDAHKSKKNLSMGWIDYRKAFDSMSHEWLIKILSIYKSPQIIIDFLQLVMPTWKVIMTARGTNDYITTDPIFIRRGIFQGDSLSPLLFCIGLNPLSQMLNKYQSKGYKIKDNIHINHLLYMDDLKIYANNKHNLKVMLHSTEIFTRDIGMEFGLDKCNILHLDSGKRSEHQGGGHVLLSGDEFRHLNAGQHYKYLGINESGKIDHSEVRQQIQKEYFHRIKRLTNSHLNSRNLLKAINIYAVPVLMYTFGIINFKTSDLKKIDTKTRKLLAINKAQKQKADVGRLYLPLEEGGRGLTNIEMLHKTQIIKYKYYLQQKTDHIIETILNSDRTKDKYSIHKEARSNLEEIGLNSSGTYIDKEIRNAVTKTEINKWKSKALHGQFRKSVLEKENIDKEYSFRWLKKQPISPTLESSVFAIQDQAIVTRQHERDIQKKAVDGKCRLCSTKDETIQHIVSGCEMLAGTYYTKRHNNIVQYIYWTLCKKHNFEVSNLWWQQHLTKPEVKENDSAKLMWEIPVQTDVTVSHNRPDIIYINKTENKIYLIDITVPSDYNIGPKEIEKLSKYNLLKNEVTRLWKMPTEVIPIVIGSTGVIAKSLHRYIDTLNSNINIHIIQKQAAIHTITIVNKVMGNTMFVDREPGIASP

SEQ ID NO: 8484 - protein, 1293 aa, Clostera curtula
MMMERNNGKRIGSLPGGERRGTSRADAGRDSMRTVSGSLLNRRARAGDPEETTAELIRSVDDALQSGESSPTNSAGTSTETTTRSILNDDARRKWSQEELEELMFCYFKAKAQGSGYIKRFYKLFTDRNPHNPKITKFTGNTLSNQARSIITRKMLSTEILNEIKSRAEQLITSATNTTTTQTLIETPVAYIDTVQHHQILDQGTTLPNNDIIPNNNIQPTYTEINTQSENILQTSTQHTADSEIASQYEHMSWVTLNQIIESSDTALHDSPDGQDPNDIILDFLQTLSETKETLITDRKHLPKPKFNKQFIHNLNQINEYIPKILNTESNLREINDVIYATAKTLIIKNGQVPFTPSKTIKPKADPPWKRRITEKIGNIRKEIGQLVEIRKGTNSRHMQKIKYKLYNKYNIFTQQDLDYEIEILEQKLKALAGRIKRYDEINRRKEQNRMFHQNQHTFYRTLNREQQAPRNIPSKNTIQDFWTTLLSQPITYNKNAPWIVDVETETTGFSQHNFNTIDKNKLVTALKRLQNWKTPGIDKVQNYYIKYLTNTHEHIVRIYNRILNRTEPLEEWFTMGQVILIPKNENTREPQNWRPIACLPTLYKILTSIISNELYIHCENNEILQPEQRGCRRHVRGCKDQLMVNKAILEDAHKSKKNLSMGWIDYRKAFDSMSHEWLIKILSIYKSPQIIIDFLQLVMPTWKVIMTARGTNDYITTDPIFIRRGIFQGDSLSPLLFCIGLNPLSQILNKYQSKGYKIKDNIHINHLLYMDDLKIYANNKHINLKVMLHSTEIFTRDIGMEFGLDKCNILHLDSGKRSEHQGGGHVLLSGDEFRHLNAGQHYKYLGINESGKIDHSEVRQQIQKEYFHRIKRLTNSHLNSRNLLKAINIYAVPVLMYTFGIINFKTSDLKKIDTKTRKLLAINKAQKQKADVGRLYLPLEEGGRGLTNIEMLHKTQIIKYKYYLQQKTDHIIETILNSDRTKDKYSIHKEARSNLEEIGLNSSGTYIDKEIRNAVTKTEINKWKSKALHGQFRKSVLEKENIDKEYSFRWLKKQPISPTLESSVFAIQDQAIVTRQHERDIQKKAVDGKCRLCSTKDETIQHIVSGCEMLAGTYYTKRHNNIVQYIYWTLCKKHNFEVSNLWWQQHLTKPEVKENDSAKLMWEIPVQTDVTVSHNRPDIIYINKTENKIYLIDITVPSDYNIGPKEIEKLSKYNLLKNEVTRLWKMPTEVIPIVIGSTGVIAKSLHRYIDTLNSNINIHIIQKQAAIHTITIVNKVMGNTMFVDREPGIASP

SEQ ID NO: 8485 - protein, 1288 aa, Clostera curtula
MYNGKRIGSLPGGERRGTSRADAGRDSMRTVSGSLLNRRARAGDPEETTAELIRSVDDALQSGESSPTNSAGTSTETTTRSILNDDARRKWSQEELEELMFCYFKAKAQGCGYIKRFHKLFTDRNPHNPKITKFTGNTLSNQARSIITRKMLSTEILSEIKLRAEQSITSATNTTTTQTLIETPVAYIDTVQRHQIIDQGPTLPNNDIIPNNNIQPTYTEINTQSENILQTSTQHTADSEIASQYEHMSWVTLNQIIESSDTALHDSPDGQDPNDIILDFLQTLSETKETLITDRKHLPKPKFNKQFIHNLNQINEYIPKILNTESNLREINDVIYATAKTLIIKNGQVPFTPSKTIKPKADPPWKRRITEKIGNIRKEIGQLVEIRKGTNSRHMQKIKYKLYNKYNIFTQQDLDYEIEILEQKLKALAGRIKRYDEINRRKEQNRMFHQNQHTFYRTLNREQQAPRNIPSKNSIQDFWTTLLSQPITYNKNAPWIVDVETETTGFSQHNFNTIDKNKLVTALKKLQNWKTPGIDKVQNYYIKYLTNTHEHIVRIYNRILNRTEPLEEWFTMGQVILIPKNENTREPQNWRPIACLPTLYKILTSIISNELYIHCENNEILQPEQRGCRHHVRGCKDHLMVNKAILEDAHKSKKNLSMGWIDYRKAFDSMSHEWLIKILSIYKSPQIIIDFLQLVMPTWKVIMTARGTNDYITTDPIFIRRGIFQGDSLSPLLFCIGLNPLSQILNKYQSKGYKIKDNIHINHLLYMDDLKIYANNKHNLKVMLHSTEIFTRDIGMEFGLDKCNILHLDSGKRSEHQGGGHVLLSGDEFRHLNAGQHYKYLGINESGKIDHSEVRQQIQKEYFHRIKRLTNSHLNSRNLLKAINIYAVPVLMYTFGIINFKTSDLKKIDTKTRKLLAINKAQKQKADVGRLYLPLEEGGRGLTNIEMLHKTQIIKYKYYLQQKTDHIIETILNSDRTKDKYSIHKKARSNLEEIGLNSSRTYIDKEIRNAVTKTEINKWKSKALHGQFRKSVLEKENIDKEYSFRWLKKQPISPTLESSVFAIQDQAIVTRQHERDIQKKAVDGKCRLCSTKDETIQHIVSGCEMLAGTYYTKRHNNIVQYIYWTLCKKHNFEVSNLWWQQHLTKPEVKENDSAKLMWEIPVQTDITVSHNRPDIIYINKTENKIYLIDITVPSDYNIGPKEIEKLSKYNLLKNEVTRLWKMPTEVIPIVIGSTGVIAKSLHRYIDTLNSNINIHIIQKQAAIHTITIVNKVMGNTMFVDREPGIASP

SEQ ID NO: 8486 - protein, 1055 aa, Furcula furcula
MVPILQTYTLTEEYDSQITNVRDTTHNTNIPQRVSTDDVDPLILDFMQVLAETKETPIAEREFLPKPNFTKKFIHNLNQINNYLPNLLISNYTLREINDLIYAAAKTLILNNEQKPYKQPTTIKSKHDPPWKKRIKIKLEIVRKELGRLIEIKRGTNSRHMQRIKDKLFDKYNIFTDQDLDNQIECLKQRTKALAGRIKRYEEINDRKEQNKLFHQNRHKFFRSLNSQQQVPTELPPKPVVQEFWASLLSTPVTYNKDATWIRELEDNTQNIEEYDFKEIDIDKLNIALKKLQNWKTPGLDKIQNYYLKYFTNIHEHLVKLFNRILNGSEHLEEWFTTGQVILIPKNDNTQEPQNWRPIACLPTIYKLLTSIISNELYVHCENNNILEPEQRGCRRRVRGCKDHLMMNKAILEDAHQWQKNLSMGWIDYRKAFDTISHEWLLKVLSLYRCPKVIINFLEQVMPTWNVIMTARGANTSITTEPISIRRGIFQGDSLSPLLFCIGINPLSQILHKYQSKGYTLKDNSSINHLLYMDDLKVYANNKNNLKVLLHSTEIFTKDIGMQFGLDKCNVLHLTGGRRRSDHQGGGHILLSGQEFEHLKAEQKYKYLGISEAGKIDHNEIRQQVEKEYYSRIKRITNSQLNSRNLLMAINSYAVPVLMYTFGIINYKDSDLKKIDIKTRKLLAMSKAQQQKADVGRLYLPVDEGGRGLTNIESLYKTQIIKYKKYLDSEKDHIIKAIVRNDKKKEKYSINKEARKNITEIGLSLQGEYNDRDIKNAVIKKEINKWKAKPLHGQLYKAVLDKENIDREYSFKWLKKHPVSPTLESSIFAIQDQAIVTRQHERDIQKKPVDGKCRLCSSKDETIQHIVSGCDRLAGTYYTKRHNNIVQYVYWALCKKNNIPVSNLWWQQHLSQPEVKENDNAKLMWEIPVQTDITVLHNRPDIIYINKTENKIYLIDITVPSDYNIGSKEIEKLSKYHLLRTEITRLWKMPAEIIPIVIGATGIVAKSLHRYIKKLDANINIHIMQKQAAIHTVTIVSKVMGDTVFVGGNSEPTSL

SEQ ID NO: 8487 - protein, 1270 aa, Hydriomena furcata
METMSNRNSRIWSLPGGDRRGASGADAGRYSIRTIGDGGLRGRPSVGEPEQSETTQPMPGDTLRSREISPTSSAGAPEVTTGSSTTVSDDARRKWSEVELHELMFCFFKAKVGGAGYIKRFEKLFKDRNPDNPKVQKFTGNMLANQARSILTRKILSTQVLDQIKDRAEESSIQNLNENIDSTLDSNIQTPPRITPTQTSIANITPNSITHTQQYQTVTESDEQISTENNVDQVGAPAEVVVDENQDPIIIQFLEILAETKEISVENRENLPKPNFNKQFIQNLNIINNFLPSLLITNTSLREINDIIYASAKTLISNNNQNSYTNPSTRKPKQDPPWKTRLKNKIDDLRKELARLIEIKRGNNSRTMNRVRLKLFNKYNIINEKDLDYRIELHTQKVKAIAGRIKRYSDMNDRKLQNKLFQENQRKFYRSLNGEQQVPTQIPTKSEIQQFWSSILSEPVPYNTGARWIKEVEESMDEVGEEHTFREIDIDKLKTAIRKIRNWKAPGLDKIQNYYLKYLTSTHKYIAQLFDRIIKGIEPVDSWFTTGMVVLIPKNENTEDPKNWRPIACLPTMYKLLTSVIANELYKHCDENDILAPEQRGCRRRARGCKDHLMINKAILEDAHQCNKNLSMGWVDYQKAFDSISHEWLLKVLDIYKCPPVIKGFLEIVMPTWNVVMKAYGANASVTTDSIYIRRGIFQGDSLSPLLFCLGLNPLSLVLNTYNLKGYKLKDNCTINHLLYMDDLKLYANTPNNLKILIDSTEIFTEDIGMKFGLSKCNVLHLAKGRRQEHDGRGHVLLSGEEFEHLKSDEQYKYLGIQESGKIDHHQTRQKIQKEYFRRVKCLNKSHLNSRNLLRSINIYAVPVLLYTFGIINYKTSDLKKIDVKTRKILTMNKAHQQKAEVERLYLPIEEGGRGLTNLEMLYKTQIIKYKKYLENEQDHIIKAIVKHDKNRVKYSIHKESKVNLAEIGLRCEENYTDRELSNAVINTKINKWKTKPLHGQFHKKVLDKENIDKTFSFKWIKKQPVTPGLESSIFAIQDQAVVTRQHERDIFKRAVDGKCRLCLTKDETTQHIVSGCEKLAGTYYIKRHNNIVQYVYWTLAKKHSFEVSSMWWKEHLTQPQVKENDTAKLMWEIPVQTDVTIVHNRPDIIYINKLEKKTYLIDVTVPSDYNIGAKEIEKLSKYHALKTEITRLWKTPTEVIPIVVGATGIIAKSLHRYCNKLDSHINIHIIQKQAAIHTVTIITKVLGDTVFINRGANNSSERESEQPFP

SEQ ID NO: 8488 - protein, 1274 aa, Furcula furcula
MESTSNIRIGPLPGGERRGTSRAGAGRGSMRTASGSLLNRRARAGEPEENTADITRDADDALQDRETSPISLAGTSDETTTRSNISDDARRKWSQDELEELMFCYYRAKAGGAGYIKRLEKTFKDRNPNNPKVNRYTGNTLSNQARSIITRKFMSIEVLNEIKLIAERSLLAPNNNATLAEIATSRFQVDFTIENTSDTNVISQILCSSSPIETQHTHDPMVPILQTYTLTEEYDSQITNVRDTTHNTNIPQRVSTDDVDPLILDFMQVLAETKETPIAEREFLPKPNFTKKFIHNLNQINNYLPNLLISNYTLREINDLIYAAAKTLILNNEQKPYKQPTTIKSKHDPPWKKRIKIKLEIVRKELGRLIEIKRGTNSRHMQRIKEKLFDKYNIFTDQDLDNQIECLKQRIKALAGRIKRYEEINDRKEQNKLFHQNRHKFFRSLNSQQQVPTELPPKPVVQEFWASLLSTPVTYNKDATWIRELEDNTQNIEEYDFKEIDIDKLNIALKKLQNWKTPGLDKIQNYYLKYFTNIHEHLVKLFNRILNGSEHLEEWFTTGQVILIPKNDNTQEPQNWRPIACLPTIYKLLTSIISNELYVHCENNNILEPEQRGCRRRVKGCKDHLMMNKAILEDAHQWQKNLSMGWIDYRKAFDTISHEWLLKVLSLYRCPKVIINFLEQVMPTWNVIMTARGANTSITTEPISIRRGIFQGDSLSPLLFCIGINPLSQILHKYQSKGYTLKDNSSINHLLYMDDLKVYANNKNNLKVLLHSTEIFTKDIGMQFGLDKCNVLHLTGGKRSDHQGGGHILLSGQEFEHLKAEQKYKYLGISEAGKIDHNEIRQQVEKEYYSRIKRITNSQLNSRNLLMAINSYAVPVLMYTFGIINYKDSDLKKIDIKTRKLLAMSKAQQQKADVGRLYLPVDEGGRGLTNIESLYKTQIIKYKKYLDSEKDHIIKAIVRNDKKKEKYSINKEARKNITEIGLSLQGEYNDRDIKNAVIKKEINKWKAKPLHGQLYKAVLDKENIDREYSFKWLKKHPVSPTLESSIFAIQDQAIVTRQHERDIQKKPVDGKCRLCSSKDETIQHIVSGCDRLAGTYYTKRHNNIVQYVYWALCKKNNIPVSNLWWQQHLSQPEVKDNDNAKLMWEIPVQTDITVLHNRPDIIYINKTENKIYLIDITVPSDYNIGSKEIEKLSKYHLLRTEITRLWKMPAEIIPIVIGATGIVAKSLHRYIKKLDANINIHIMQKQAAIHTVTIVSKVMGDTVFVGGNSEPTFL

SEQ ID NO: 8489 - protein, 1276 aa, Bombyx mori
MENNLNNERIGPLPGGDRRGTSVAGGGRGRMLASDSRRTGWSGVGDRGVWGRSPDATAEEFNDVALRGRDMSPTCSAGTSSSTTGSINDDARRKWSRTELDELMFCFYLAKAGGPGYIKRLEKIFKDRNSHITKFKKFTGNTLSNQARSILSHNYISKEVLEEIKSKAEQAYLLPDVYSRTALPETITQTTANTLPEPIYTADLLHQENFTQQTQHIHPPPNTDTQEQTLTFTQIEPTTQLTDTIADEGNEIGEVVVDENQDPLVLDFLQILAETKEIPIDNRTFLPKPKFNKHFIKNLQTINNYIPTLLETNQSLREINDVIYAAAKTLIINNKQTPYTPPTMQKPKHEPPWKRRLKQKIEDHRKELGRLVEVKAGSNSNKMRNIKNKLYEKFKIHNDQDLNNTIEILKQKVKALAGRLRRYDEINQRKIQNKQFAENQHKFFRSLNNSQHNPTQIPSQSEIENFWTTILSNPISYNKEAHWITQIANSSNEIEEHIFEEIDVGKLRTAIRKSQNWKSPGIDKIHNYYLKYLTSTHKYIAKLFDRIIKGTEVIDSWFTRGRVVLIPKDENTQDPKNWRPIACLPTMYKILTSIIANELYKHCDKNNIIALEQRGCRRGARGCKDHLMINKAILEDAHKCQKNLSTAWIDYRKAFDSISHEWLLKVLELYKCPPVVRNFLRLVMPMWSVVMTARGADGSVTTEPIYIRRGIFQGDSLSPLLFCLGINPISQILNQYQLKGYTLKDNNIINHLLYMDDLKIYSNSKTNLKVLIDSAEIFTGDIGMQFGLKKCNILHLVAGRRKEHRGRGHVLLSGDEFRHLRLDEKYKYLGIDEAGKIDHNEVRQQIQKEYFRRVKSVTGSQLNARNILRALNIYAVPVLLYTFGIINYKTVDLKKIDVKTRKILAMNKAHQQKADVDRLYIPIDQGGRGLTNLETLYKTQIIKYKSYIETEKDHILRAIVEHDKNKSKYSIFKETRSNLNEIGLQQNEKYTDKELKNAVVKTKIEVIKAKPLHGQFYKAVLEKENIDRAQSFQWFKRQPVSPALESAIFAIQDQAVVTRQHERDIMKRQVDGRCRLCCIKDETTQHIVSGCEKLAGTYYTKRHNNIVQYVFWSLAKKHAFQVSGLWWREHLTQPQVRENEGAKIMWEIPVQTDVTIVHNRPDIIYINKTDNKTYLIDVTVPSDYNIGAKEIEKLSKYHALKTEITRLWKTHTEIVPIVIGATGVIAKSLQKYLDKLDANINPHIMQKQAAIHTVTIITKVLGDTVFVGGETEPPFP

SEQ ID NO: 8490 - protein, 1276 aa, Bombyx mori
MENNLNNERIGPLPGGDRRGTSVAGGGRGRMLASDSRRTGWSGVGDRGVWGRSPDATAEEFNDVALRGRDMSPTCSAGTSSSTTGSINDDARRKWSRTELDELMFCFYLAKAGGPGYIKRLEKIFKDRNSHITKFKKFTGNTLSNQARSILSHNYISKEVLEEIKSKAEQAYLLPDVYSRTALPETITQTTANTLPEPIYTADLLHQENFTQQTQHIHPPPNTDTQEQTLTFTQIEPTTQLTDTIADEGNEIGEVVVDENQDPLVLDFLQILAETKEIPIDNRTFLPKPKFNKHFIKNLQTINNYIPTLLETNQSLREINDVIYAAAKTLIINNKQTPYTPPTMQKPKHEPPWKRRLKQKIEDHRKELGRLVEVKAGSNSNKMRNIKNKLYEKFKIHNDQDLNNTIEILKQKVKALAGRLRRYDEINQRKIQNKQFAENQHKFFRSLNSSQHNPTQIPSQSEIENFWTTILSNPISYNKEAHWITQIANSSNEIEEHTFEEIDVGKLRTAIRKSQNWKSPGIDKIHNYYLKYLTSTHKYIAKLFDRIIKGTEVIDSWFTRGRVVLIPKDENTQDPKNWRPIACLPTMYKILTSIIANELYKHCDKNNIIALEQRGCRRGARGCKDHLMINKAILEDAHKCQKNLSTAWIDYRKAFDSISHEWLLKVLELYKCPPVVRNFLRLVMPMWSVVMTARGADGSVTTEPIYIRRGIFQGDSLSPLLFCLGINPISQILNQYQLKGYTLKDNNIINHLLYMDDLKIYSNSKTNLKVLIDSAEIFTGDIGMQFGLKKCNILHLVAGRRKEHRGRGHVLLSGDEFRHLRLDEKYKYLGIDEAGKIDHNEVRQQIQKEYFRRVKSVTGSQLNARNILRALNIYAVPVLLYTFGIINYKTADLKKIDVKTRKILAMNKAHQQKADVDRLYIPIDQGGRGLTNLETLYKTQIIKYKSYIETEKDHILRAIVEHDKNKSKYSIFKETRSNLNEIGLQQNEKYTDKELKNAVVKTKIEIIKAKPLHGQFYKAVLEKENIDRAQSFQWFKRQPVSPALESAIFAIQDQAVVTRQHERDIMKRQVDGRCRLCCIKDETTQHIVSGCEKLAGTYYTKRHNNIVQYVFWSLAKKHAFQVSDLWWREHLTQPQVRENEGAKIMWEIPVQTDVTIIHNRPDIIYINKTDNKTYLIDVTVPSDYNIGAKEIEKLSKYHALKTEITRLWKTHTEIVPIVIGATGVIAKSLQKYLDKLDANINPHIMQKQAAIHTVTIITKVLGDTVFVGGETEPPFP

SEQ ID NO: 8491 - protein, 1274 aa, Furcula furcula
MESTSNIRIGPLPGGERRGTSRAGAGRGSMRTASGSLLNRRARAGEPEENTADITRDADDALQDRETSPISLAGTSDETTTRSNISDDARRKWSQDELEELMFCYYRAKAGGAGYIKRFEKTFKDRNPNNPKVNRYTGNTLSNQARSIITRKFMSIEVLNEIKLKAERSLLAPNNNATLAEIATSRFQVDFTIENTSDTNVISPILCSSSPIETQHTHDPMVPILETYTLTEEYDSQITNVRDTTQNTNIPQRVSTDDVDPLILDLMQVLAETKETPIAEREFLPKPNFTKKFIHNLNQINNYLPNLLVTNNTLREINDLIYAAAKTLILNNEQKPYKQPTTIKSKHDPPWKKRIKIKLETVRKELGRLIEIKRGTNSRHMQRIKEKLFDKYNIFTDQDLDNQIECLKQRTKALAGRIKRYEEINDRKEQNKLFHQNRHKFFRSLNSQQQVPTELPPKPVVQEFWATLLSTPVTYNKDATWIRELEDNTQNIEECDFKEIDIDKLNIALKKLQNWKTPGLDKIQNYYLKYFTNIHEHLVKLFNRIVSGSEPLEEWFTTGQVILIPKNENTQEPQNWRPIACLPTIYKLLTSIISNELYVHCDNNNILEPEQRGCRRRVRGCKDHLMMNKAILEDAHQWQKNLSMGWIDYRKAFDTISHEWLLKVLSLYRCPKVIINFLEQVMPTWNVIMTARGANTSITTEPIFIRRGIFQGDSLSPLLFCIGINPLSQILHKYQSKGYTLKDNSSINHLLYMDDLKVYANNKNNLKILLHSTEIFTKDIGMQFGLDKCSVLHLTGGRRSDHQGEGHILLSGQEFEHLKAEQKYKYLGISEAGKIDHNEIRQQVEKEYYSRIKRITNSQLNSRNLLMAINSYAVPVLMYTFGIINYKDSDLKKIDIKTRKLLAMSKAQQQKADVGRLYLPVDEGGRGLTNIESLYKTQIIKYKKYLDSEKDHIIKAIVRNDKKKEKYSINKEARKNITEIGLNLEGDYNDRDIKNAVITKEVNKWKAKLLHGQLYKAVLDKENIDREYSFKWLKKHPVSPTLESSIFAIQDQAIVTRQHERDIQKKPVDGKCRLCSSKDETIQHIVSGCDRLAGTYYTKRHNNIVQYVYWALCKKNNIPVSNLWWQQHLSQPEVKENDNAKLMWEIPVQTDITVLHNRPDIIYINKIENKIYLIDITVPSDYNIGAKEIKKLSKYHLLRTEITRLWKMPAEIIPIVIGATGIVAKSLHRYVKKLDANINIHIMQKQAAIHTVTIVSKVMGDTVFVGGNSEPTSL

SEQ ID NO: 8492 - protein, 1060 aa, Potamanaxas melicertes
MPQTEQEHLYTIQETQSDLNTEQVDIVDISVDNITEAHSIEVNENQDSLILDFLQVLAETKDLQIEDRTVLPKPQFNSLFINNLNKLNKFLPNLLATNQSLREINDIIYAAAKTLIINNNQIPYKPSIEKKTKLDPPWKRRLKIKIENHRKELGRLIELKAGVNTKRMINIKHKLFQKYNINNNEELNNNIEILKQKVKALAGRLRRYDEIIGRKTQNSLFAENQHKFYRSLNNSQHNPSQIPTQNEIQNFWTSILSEPISYNKEAQWISEIERNASNIQEHIFEEIDIDKVKEAIRKTQNWKTPGIDKIQNYYIKYLTSTHKYIAKLYDRIIKGTEPVHTWFVTGQVILIPKDNDTMDPKNWRPIACLPTMYKILTSVVANELYIHCDKNDIIAPEQRGCRRRFRGCKDHLMINKAILEDAYKCKKNLSVAWVDYRKAFDSISHEWLLKILEIYKCSPVIRGFLKIVMPMWNVVMTAHGTAASVITNPISIRRGIFQGDSLSPLLFCLGINPISQILSTYQFKGYKLKDNSIINHLLYMDDLKIYANNKTNLKVLIDSTEIFSRDIGMQFGLNKCNVLHLVAGRRHQHQGSGHVLLNGEEFRHLQIDEKYKYLGINEAGNIDHAEVRQQIQKEYFRRVKALADSYLNARNLLRAINTYAIPVLLYTFGIINYKTADLKKIDVKTRKLLAIKKIHQQKSDVERLYLPIEEGGRGLTNIETLHKTQIIKFKAYIESGKDYILRAIAEHDRNKDKYSIYKEARLNLTEIGLSQNEKYIDKEINRAIIKTRIGKLKAKPLHGQFYKAVLEKENIDRVQSFRWLKKQTVPPSLESAIFAIQDQAVTTRQHERDILKKAIDGKCRVCMAKDETTQHIISGCEKLAGTYYTKRHNNIVQYVFWALAKKHSFEVSNLWWQEHLTQPQVKENETAKIMWEMPVQTDVTVVHNRPDIIYINKQENYIYLIDITVPSDYNIGAKEIEKLSKYHLLKKEITRLWKRPTKIIPIVVGATGIVAKNLKTYCKTLDCKININIMQKQAALHTTTILSKILGSSVHAGETESPSP

SEQ ID NO: 8493 - protein, 1267 aa, Thymelicus sylvestris
MENTFNSTRIGPLPGGDRRGTSVAGVGRLSMLASGSRRTGWSGVGDRGVRERSPDATADETTGDTLQSRDVSPASSAGTLGSTTGSSPSRDDARRKWSNSEHQELMFCYYRAKAGGPGYMKRLESLFKNRNPHNPKSRKFTGNTLSNQVRSILSRRCISTEVLEEIKRKAEQTSDPSIATHTQLTTVLETNDTQTAHNDLSPVLTTPMQSPSTFENENNQQHNPLATQTHINTYTTLISETEVHDIQVNEDQEKIILDLLQSLAEVKETPIENRPFLPKPQFNKQFITNLNKINKYLPNLLATNQSLREINDIIYASAKTLIISNKQVPFLPPTVKKANRDPPWKIRLKRKIEDFRKELGRFIEIRGGSNSKKMTKIKQKLYNKYQINNEDDLHKTIEILKQKVKALAGRLHRYDDINKRKLHNKLFSENQHKFFRTLNNTQQNPTQIPTKETIEQFWSNILSNPITYNKNASWISEIEKLNEQIEGHNFEEIDVEKVKHAVNKIQNWKTPGIDKVHNYYLKYLTSTHQYIAKLFDKIIKGVEPIESWFTTGQVILIPKNQDTVDPKNWRPIACLPTMYKILTSIIANELYKHCDKNNIIAPEQRGCRRGARGCKDHLMINKAILEDANKCQKNLSLAWIDYRKAFDSISHEWLIKVLELYKCPPVIANFLRLIMPTWNVIMTAQGANSCTTTRPIYIRRGIFQGDSLSPLLFCLSINPISQILNKYQFKGYKLKDDSTINHLLYMDDLKIYANNKSNLKVLIDSTEIFTKDIGMQFGLDKCNVLHLVSGRRKEHQGDGHVLLSGYEFRHLQMEEKYKYLGINEAGKIDHNEIRQQTQKEYYRRVKSLTTSHLNARNLLRAINIYAVPVLLYTFGIINYKTTDLKKIDVKTRKILAMNKAHRQKADIERLYLPINQGGRGLINLETLHKTQIIKFKTYIESEKDHILSAIAEHDRNKDKYSIIKETRSIITEIGLDNNKVYTDKELKNAVVKNRVDKIKAKPLHGQFYKAILEKENIDKLQSFIWLKKQPVSATLESSIFAIQDQAILTKQHQRDILKTTADGKCRLCLSKDETTQHIISGCEKLAGTYYTKRHNNIVQYIFWTLAKKHKFQVSNLWWQEQLTQPRVIENETAKIMWEIPVQTDVTVIHNRPDIIYINKIENKVYLIDATVPSDYNIGPKEIEKLSKYHPLKIEIARLWKIPTEVIPIVIGATGVVAKSLHRYCEKLNSNINTHIIQKQAAIHTVTILSKVLGDSVFLTGGTEPPFP

SEQ ID NO: 8494 - protein, 1274 aa, Furcula furcula
MESTSNIRIGPLPGGERRGTSRAGAGRGSMRTASGSLLNRRARAGEPEENTADITRDADDALQDRETSPISLAGTSDETTTRSNISDDARRKWSQDELEELMFCYYRAKAGGAGYIKRFEKTFKDRNPNNPKVNRYTGNTLSNQARSIITRKFMSIEVLNEIKLIAERSLLAPNNNATLAEIATSRFQVDFTIENTSDTNVISQILCSSSPIETQHTHDPMVPILETYTLTEEYDSQITNVRDTTQNTNIPQRVSTDDVDPLILDLMQVLAETKETPIAEREFLPKPNFTKKFMHNLNQINNYLPNLHVTNNTLREINDLIYAAAKTLILNNEQKPYKQPTTIKSKHDPPWKKRIKIKLETVRKELGRLIEIKRGTNSRHMQRIKEKLFDKYNIFTDQDLDNQIECLKQRTKALAGRIKRYEEINDRKEQNKLFHQNRHKFFRSLNSQQQVPTELPPKPVVQEFWASLLSTPVTYNKDATWIRELEDNTQNIEEYDFKEIDIDKLNIALKKLQNWKTPGLDKIQNYYLKYFTNIHEHLVKLFNRILNGSEHLEEWFTTGQVILIPKNDNTQEPQNWRPIACLPTIYKLLTSIISNELYVHCENNNILEPEQRGCRRRVRGCKDHLMMNKAILEDAHQWQKNLSMGWIDYRKAFDTISHEWLLKVLSLYRCPKVIINFLEQVMPTWNVIMTARGANTSITTEPISIRRGIFQGDSLSPLLFCIGINPLSQILHKYQSKGYTLKDNSSINHLLYMDDLKVYANNKNNLKVLLHSTEIFTKDIGMQFGLDKCNVLHLTGGRRSDHQGGGHILLSGQEFEHLKAEQKYKYLGISEAGKIDHNEIRQQVEKEYYSRIKRITNSQLNSRNLLMAINSYAVPVLMYTFGIINYKDSDLKKIDIKTRKLLAMSKAQQQKADVGRLYLPVDEGGRGLTNIESLYKTQIIKYKKYLDSEKDHIIKAIVRNDKKKEKYSINKEARKNITEIGLSLQGEYNDRDIKNAVIKKEINKWKAKPLHGQLYKAVLDKENIDREYSFKWLKKHPVSPTLESSIFAIQDQAIVTRQHERDIQKKPVDGKCRLCSSKDETIQHIVSGCDRLAGTYYTKRHNNIVQYVYWALCKKNNIPVSNLWWQQHLSQPEVKENDNAKLMWEIPVQTDITVLHNRPDIIYINKTENKIYLIDIAVPSDYNIGSKEIEKLSKYHLLRTEITRLWKMPAEIIPIVIGATGIVAKSLHRYSKKLDANINIHIMQKQAAIHTVTIVSKVMGDTVFVGGNSEPTSL

SEQ ID NO: 8495 - protein, 1246 aa, Bombyx mori
MLASDSRRTGWSGVGDRGVWGRSPDATAEEFNDVALRGRDMSPTCSAGTSSSTTGSINDDARRKWSRTELDELMFCFYLAKAGGPGYIKRLEKIFKDRNSHITKFKKFTGNTLSNQARSILSHNYISKEVLEEIKSKAEQAYLLPDVYSRTALPETITQTTANTLPEPIYTADLLHQENFTQQTQHIHPPPNTDTQEQTLTFTQIEPTTQLTDTIADEGNEIGEVVVDENQDPLVLDFLQILAETKEIPIDNRTFLPKPKFNKHFIKNLQTINNYIPTLLETNQSLREINDVIYAAAKTLIINNKQTPYTPPTMQKPKHEPPWKRRLKQKIEDHRKELGRLVEVKAGSNSNKMRNIKNKLYEKFKIHNDQDLNNTIEILKQKVKALAGRLRRYDEINQRKIQNKQFAENQHKFFRSLNSSQHNPTQIPSQSEIENFWTTILSNPISYNKEAHWITQIANSSNEIEEHIFEEIDVGKLRTAIRKSQNWKSPGIDKIHNYYLKYLTSTHKYIAKLFDRIIKGTEVIDSWFTRGRVVLIPKDENTQDPKNWRPIACLPTMYKILTSIIANELYKHCDKNNIIALEQRGCRRGARGCKDHLMINKAILEDAHKCQKNLSTAWIDYRKAFDSISHEWLLKVLELYKCPPVVRNFLRLVMPMWSVVMTARGANGSVTTEPIYIRRGIFQGDSLSPLLFCLGINPISQILNQYQLKGYTLKDNNIINHLLYMDDLKIYSNSKTNLKVLIDSAEIFTGDIGMQFGLKKCNILHLVAGRRKEHRGRGHVLLSGDEFRHLRLDEKYKYLGIDEAGKIDHNEVRQQIQKEYFRRVKSVTGSQLNARNILRALNIYAVPVLLYTFGIINYKTADLKKIDVKTRKILAMNKAHQQKADVDRLYIPIDQGGRGLTNLETLYKTQIIKYKSYIETEKDHILRAIVEHDKNKSKYSIFKETRSNLNEIGLQQNEKYTDKELKNAVVKTKIEIIKAKPLHGQFYKAVLEKENIDRAQSFQWFKRQPVSPALESAIFAIQDQAVVTRQHERDIMKRQVDGRCRLCCIKDETTQHIVSGCEKLAGTYYTKRHNNIVQYVFWSLAKKHAFQVSDLWWREHLTQPQVRENEGAKIMWEIPVQTDVTIVHNRPDIIYINKTDNKTYLIDVTVPSDYNIGAKEIEKLSKYHALKTEITRLWKTHTEIVPIVIGATGVIAKSLQKYLDKLDANINPHIMQKQAAIHTVTIITKVLGDTVFVGGETEPPFP

SEQ ID NO: 8496 - protein, 1274 aa, Furcula furcula
MESTSNIRIGPLPGGERRGTSRAGAGRGSMRTAGGSLLNRRARAGEPEENTADITRDADDALQDRETSPISLAGTPDETTTRSNISDDARRKWSQDELEELMFCYYRAKAGGAGYIKRFEKTFKDRNPNNPKVNRYTGNTLSNQARSIITRKFMSIEVLNEIKLKAERSLLAPNNNATLAEIATSRFQVDFTIENTSDTNVISPILCSSSPIETQHTHDPMVPILETYTLTEEYDSQITNVRDTTQNTNIPQRVSTDDVDPLILDLMQVLAETKETPIAEREFLPKPNFTKKFIHNLNQINNYLPNLLVTNNTLREINDLIYAAAKTLILNNEQKPYKQPTTIKSKHDPPWKKRIKIKLETVRKELGRLIEIKRGTNSRHMQRIKEKLFDKYNIFTDQDLDNQIECLKQRTKALAGRIKRYEEINDRKEQNKLFHQNRHKFFRSLNSQQQVPTELPPKPVVQEFWATLLSTPVTYNKDATWIRELEDNTQNIEECDFKEIDIDKLNIALKKLQNWKTPGLDKIQNYYLKYFTNIHEHLVKLFNRIVSGSEPLEEWFTTGQVILIPKNENTQEPQNWRPIACLPTIYKLLTSIISNELYVHCDNNNILEPEQRGCRRRVRGCKDHLMMNKAILEDAHQWQKNLSMGWIDYRKAFDTISHEWLLKVLSLYRCPKVIINFLEQVMPTWNVIMTARGANTSITTEPIFIRRGIFQGDSLSPLLFCIGINPLSQILHKYQSKGYTLKDNSSINHLLYMDDLKVYANNKNNLKILLHSTEIFTKDIGMQFGLDKCSVLHLTGGRRSDHQGEGHILLSGQEFEHLKAEQKYKYLGISEAGKIDHNEIRQQVEKEYYSRIKRITNSQLNSRNLLMAINSYAVPVLMYTFGIINYKDSDLKKIDIKTRKLLAMSKAQQQKADVGRLYLPVDEGGRGLTNIESLYKTQIIKYKKYLDSEKDHIIKAIVRNDKKKEKYSINKEARKNITEIGLNLEGDYNDRDIKNAVITKEVNKWKAKPLHGQLYKAVLDKENIDREYSFKWLKKHPVSPTLESSIFAIQDQAIVTRQHERDIQKKPVDGKCRLCSSKDETIQHIVSGCDRLAGTYYTKRHNNIVQYVYWALCKKNNIPVSNLWWQQHLSQPEVKENDNAKLMWEIPVQTDITVLHNRPDIIYINKIENKIYLIDITVPSDYNIGAKEIEKLSKYHLLRTEITRLWKMPAEIIPIVIGATGIVAKSLHRYVKKLDANINIHIMQKQAAIHTVTIVSKVMGDTVFVGGNSEPTSL

SEQ ID NO: 8497 - protein, 1206 aa, Bombyx mori
MSPTCSAGTSSSTTGSINDDARRKWSRTELDELMFCFYLAKAGGPGYIKRLEKIFKDRNSHITKFKKFTGNTLSNQARSILSHNYISKEVLEEIKSKAEQAYLLPDVYSRTALPETITQTTANTLPEPIYTADLLHQENFTQQTQHIHPPPNTDTQEQTLTFTQIEPTTQLTDTIADEGNEIGEVVVDENQDPLVLDFLQILAETKEIPIDNRTFLPKPKFNKHFIKNLQTINNYIPTLLETNQSLREINDVIYAAAKTLIINNKQTPYTPPTMQKPKHEPPWKRRLKQKIEDHRKELGRLVEVKAGSNSNKMRNIKNKLYEKFKIHNDQDLNNTIEILKQKVKALAGRLRRYDEINQRKIQNKQFAENQHKFFRSLNSSQHNPTQIPSQSEIENFWTTILSNPISYNKEAHWITQIANSSNEIEEHIFEEIDVGKLRTAIRKSQNWKSPGIDKIHNYYLKYLTSTHKYIAKLFDRIIKGTEVIDSWFTRGRVVLIPKDENTQDPKNWRPIACLPTMYKILTSIIANELYKHCDKNNIIALEQRGCRRGARGCKDHLMINKAILEDAHKCQKNLSTAWIDYRKAFDSISHEWLLKVLELYKCPPVVRNFLRLVMPMWSVVMTARGANGSVTTEPIYIRRGIFQGDSLSPLLFCLGINPISQILNQYQLKGYTLKDNNIINHLLYMDDLKIYSNSKTNLKVLIDSAEIFTGDIGMQFGLKKCNILHLVAGRRKEHRGRGHVLLSGDEFRHLRLDEKYKYLGIDEAGKIDHNEVRQQIQKEYFRRVKSVTGSQLNARNILRALNIYAVPVLLYTFGIINYKTADLKKIDVKTRKILAMNKAHQQKADVDRLYIPIDQGGRGLTNLETLYKTQIIKYKSYIETEKDHILRAIVEHDKNKSKYSIFKETRSNLNEIGLQQNEKYTDKELKNAVVKTKIEIIKAKPLHGQFYKAVLEKENIDRAQSFQWFKRQPVSPALESAIFAIQDQAVVTRQHERDIMKRQVDGRCRLCCIKDETTQHIVSGCEKLAGTYYTKRHNNIVQYVFWSLAKKHAFQVSDLWWREHLTQPQVRENEGAKIMWEIPVQTDVTIVHNRPDIIYINKTDNKTYLIDVTVPSDYNIGAKEIEKLSKYHALKTEITRLWKTHTEIVPIVIGATGVIAKSLQKYLDKLDANINPHIMQKQAAIHTVTIITKVLGDTVFVGGETEPPFP

SEQ ID NO: 8498 - protein, 1274 aa, Furcula furcula
MESTSNIRIGPLPGGERRGTSRAGAGRGSMRTASGSLLNRRAMAGEPEENTADITRDADDALQDRETSPISLAGTSDETTTRSNISDDARRKWSQDELEELMFCYYRAKAGGAGYIKRFEKTFKDRNPNNPKVNRYTGNTLSNQARSIITRKFMSIEVLNEIKLIAERSLLAPNNNATLAEIATSRFQVDFTIENTSDTNVISQILCSSSPIETQHTHDPMVPILETYTLTEEYDSQITNVRDTTQNTNIPQRVSTDDVDPLILDLMQVLAETKETPIAEREFLPKPNFTKKFMHNLNQINNYLPNLLVTNNTLREINDLIYAAAKTLILNNEQKPYKQPTTIKSKHDPPWKKRIKIKLDTVRKELGRLIEIKRGTNSRHMQRIKEKLFDKYNIFTDQDLDNQIECLKQRTKALAGWIKRYEEINDRKEQNKLFHQNRHKFFRSLNSQQQVPTELPPKPVVQEFWATLLSTPVTYNKDATWIRELEDNTQNIEECDFKEIDIDKLNIALKKLQNWKTPGLDKIQNYYLKYFTNIHEHLVKLFNRILSGSEPLEEWFTTGQVILIPKNENTQEPQNWRPIACLPTIYKLLTSIISNELYVHCDNNNILEPEQRGCRRRVRGCKDHLMMNKAILEDAHQWQKNLSMGWIDYRKAFDTISHEWLLKVLSLYRCPKVIINFLEQVMPTWNVIMTARGANTSITTEPIFIRRGIFQGDSLSPLLFCIGINPLSQILHKYQSKGYTLKDNSSINHLLYMDDLKVYANNKNNLKILLHSTEIFTKDIGMQFGLDKCSVLHLTGGRRSDHQGEGHILLSGQEFEHLKAEQKYKYLGISEAGKIDHNEIRQQVEKEYYSRIKRITNSQLNSRNLLMAINSYAVPVLMYTFGIINYKDSDLKKIDIKTRKLLAMSKAQQQKADVGRLYLPVDEGGRGLTNIESLYKTQIIKYKKYLDSEKDHIIKAIVRNDKKKEKYSINKEARKNITEIGLNLEGDYNDRDIKNAVIKKEVNKWKAKPLHGQLYKAVLDKENIDREYSFKWLKKHPVSPTLESSIFAIQDQAIVTRQHERDIQKKPVDGKCRLCSSKDETIQHIVSGCDRLAGTYYTKRHNNIVQYVYWALCKKNNISVSNLWWQQHLSQPEVKENDNAKLMWEMPVQTDITVLHNRPDIIYINKIENKIYLIDITVPSDYNIGAKEIEKLSKYHLLRTEITRLWKMPAEIIPIVIGATGIVAKSLHRYVKKLDANINIHIMQKQAAIHTVTIVSKVMGDTVFVGGNSEPTSL

SEQ ID NO: 8499 - protein, 1267 aa, Thymelicus sylvestris
MENTFNSTRIGPLPGGDRRGTSVAGVGRLSMLASGSRRTGWSGVGDRGVRERSPDATADETTGDTLQSRDVSPSSSAGTLGSTTGSSPSRDDARRKWSNSEHQELMFCYYRAKAGGPGYMKRLESLFKNRNPHNPKSRKFTGNTLSNQVRSILSRRCISTEVLEEIKKKAEQTSDALIATHTQLTTVLETNDTQTAHNDLSPVLTTPMQSPSTFENENNQQHNPLATQTHINTYTTLISETEVHDIQVNEDQEKIILDLLQSLAEVKETPIENRPFLPKPQFNKQFITNLNKINKYLPNLLATNQSLREINDIIYASAKTLIISNKQVPFLPPTVKKAKRDPPWKIRLKRKIEDFRKELGRFIEIRGGSNSKKMTKIKQKLYNKYQINNEDDLHKTIEILKQKVKALAGRLHRYDDINKRKLHNKLFSENQHKFFRTLNNTQQNPTQIPTKETIEQFWSNILSNPITYNKNASWISEIEKLNEQIEGHNFEEIDVEKVKHAVNKIQNWKTPGIDKVHNYYLKYLTSTHQYIAKLFDKIIKGVEPIESWFTTGQVILIPKNQDTVDPKNWRPIACLPTMYKILTSIIANELYKHCDKNNIIASEQRGCRRGARGCKDHLMINKAILEDANKCQKNLSLAWIDYRKAFDSISHEWLIKVLELYKCPPVIANFLRLIMPTWNVIMTAHGANSCTTTRPIYIRRGIFQGDSLSPLLFCLSINPISQILNKYQFKGYKLKDDSIINHLLYMDDLKIYASNKSNLKVLIDSTEIFTKDIGMQFGLDKCNVLHLVSGRRKEHQGDGHVLLSGDEFRHLQMEEKYKYLGINEAGKIDHNEIRQQMQKEYYRRVKSLTTSHLNARNLLRAINIYAVPVLLYTFGIINYKNTDLKKIDVKTRKILAMNKAHRQKADIERLYLPINQGGRGLINLETLHKTQIIKFKTYIESEKDHILSAIAEHDRNKDKYSIIKETTSIITEIGLDNNKVYTDKELKNAVVKNRVDKIKAKPLHGQFYKAILEKENIDKLQSFIWLKKQPVSATLESSIFAIQDQAILTKQHQRDILKTTADGKCRLCLSKDETTQHIISGCEKLAGTYYTKRHNNIVQYIFWTLAKKHKFQVSNLWWQEQLTQPRVIENETAKIMWEIPIQTDVTVVHNRPDIIYINKIEYKAYLIDATVPSDYNIGPKEIEKLSKYHPLKIEIARLWKIPTEVIPIVIGATGVVAKSLHRYCEKLNSNINTHIIQKQAAIHTVTILSKVLGDSVFLTGGTEPPFP

SEQ ID NO: 8500 - protein, 1274 aa, Furcula furcula
MESTSNIRIGPLPGGERRGTSRAGAGRGSMRTAGGSLLNRRARAGEPEENTADITRDADDALQDRETSPISLAGTSDETTTRSNISDDARRKWSQDELEELMFCYYRAKAGGAGYIKRFEKTFKDRNPNNPKVNRYTGNTLSNQARSIITRKFMSIEVLNEIKLKAERSLLAPNNNATLAEIATSRFQVDFTIENTSDTNVISQILCSSSPIETQHTHDPMVPILETYTLTEEYDSQITNVRDTTQNTNIPQRVSTDDVDPLILDLMQVLAETKETPIAEREFLPKPNFTKKFIHNLNQINNYLPNLLVTNNTLREINDLIYAAAKTLILNNEQKPYKQPTTIKSKHDPPWKKRIKIKLETVRKELGRLIEIKRGTNSRHMQRIKEKLFDKYNIFTDQDLDNQIECLKQRTKALASRIKRYEEINDRKEQNKLFHQNRHKFFRSLNSQQQVPTELPPKPVVQEFWATLLSTPVTYNKDATWIRELEDNTQNIEECDFKEIDIDKLNIALKKLQNWKTPGLDKIQNYYLKYFTNIHEHLVKLFNRIVSGSEPLEEWFTTGQVILIPKNENTQEPQNWRPIACLPTIYKLLTSIISNELYVHCDNNNILEPEQRGCRRRVRGCKDHLMMNKAILEDAHQWQKNLSMGWIDYRKAFDTISHEWLLKVLSLYRCPKVIINFLEQVMPTWNVIMTARGANTSITTEPIFIRRGIFQGDSLSPLLFCIGINPLSQILHKYQSKGYTLKDNSSINHLLYMDDLKVYANNKNNLKILLHSTEIFTKDIGMQFGLDKCSVLHLTGGRRSDHQGEGHILLSGQEFEHLKAEQKYKYLGISEAGKIDHNEIRQQVEKEYYSRIKRITNSQLNSRNLLMAINSYAVPVLMYTFGIINYKDSDLKKIDIKTRKLLAMSKAQQQKADVGRLYLPVDEGGRGLTNIESLYKTQIIKYKKYLDSEKDHIIKAIVRNDKKKEKYSINKEARKNITEIGLNLEGDYNDRDIKNAVITKEVNKWKAKPLHGQLYKAVLDKENIDREYSFKWLKKHPVSPTLESSIFAIQDQAIVTRQHERDIQKKPVDGKCRLCSSKDETIQHIVSGCDRLAGTYYTKRHNNIVQYVYWALCKKNNIPVSNLWWQQHLSQPEVKENDNAKLMWEIPVQTDITVLHNRPDIIYINKIENKIYLIDITVPSDYNIGAKEIEKLSKYHLLRTEITRLWKMPAEIIPIVIGATGIVAKSLHRYVKKLDANINIHIMQKQAAIHTVTIVSKVMGDTVFVGGNSEPTSL

SEQ ID NO: 8501 - protein, 933 aa, Bombyx mori
MQKPKHEPPWKRRLKQKIEDHRKELGRLVEVKAGSNSNKMRNIKNKLYEKFKIHNDQDLNNTIEILKQKVKALAGRLRRYDEINQRKIQNKQFAENQHKFFRSLNSSQHNPTQIPSQSEIENFWTTILSNPISYNKEAHWITQIANSSNEIEEHTFEEIDVGKLRTAIRKSQNWKSPGIDKIHNYYLKYLTSTHKYIAKLFDRIIKGTEVIDSWFTRGRVVLIPKDENTQDPKNWRPIACLPTMYKILTSIIANELYKHCDKNNIIALEQRGCRRGARGCKDHLMINKAILEDAHKCQKNLSTAWIDYRKAFDSISHEWLLKVLELYKCPPVVRNFLRLVMPMWSVVMTARGADGSVTTEPIYIRRGIFQGDSLSPLLFCLGINPISQILNQYQLKGYTLKDNNIINHLLYMDDLKIYSNSKTNLKVLIDSAEIFTGDIGMQFGLKKCNILHLVAGRRKEHRGRGHVLLSGDEFRHLRLDEKYKYLGIDEAGKIDHNEVRQQIQKEYFRRVKSVTGSQLNARNILRALNIYAVPVLLYTFGIINYKTADLKKIDVKTRKILAMNKAHQQKADVDRLYIPIDQGGRGLTNLETLYKTQIIKYKSYIETEKDHILRAIVEHDKNKSKYSIFKETRSNLNEIGLQQNEKYTDKELKNAVVKTKIEIIKAKPLHGQFYKAVLEKENIDRAQSFQWFKRQPVSPALESAIFAIQDQAVVTRQHERDIMKRQVDGRCRLCCIKDETTQHIVSGCEKLAGTYYTKRHNNIVQYVFWSLAKKHAFQVSDLWWREHLTQPQVRENEGAKIMWEIPVQTDVTIVHNRPDIIYINKTDNKTYLIDVTVPSDYNIGAKEIEKLSKYHALKTEITRLWKTHTEIVPIVIGATGVIAKSLQKYLDKLDANINPHIMQKQAAIHTVTIITKVLGDTVFVGGETEPPFP

SEQ ID NO: 8502 - protein, 1263 aa, Thymelicus lineola
MESRFNSTRIGPLPGGDRRGTSVAGVGRLSMLASGSRRAGWSGVGDRGVRERSPDATADETTSDTLQSRDVPPASSAGTLGSTTGSSPSRDDARRKWSNSEHQELMFCYYRAKAGGPGYMKRLESLFKNRNPQNPKSRKFTGNTLSNQVRSILSRRCISTEVLEEIKRNAEETSDTSVTTHAQLTTVVETNDTQTTHNNLSTVSTIPVQSPSTSENENNQLVTQIHIDTNTTLPNETEVHDIQVNEDQEKIILDLLQSLAEVRETPIENRSFLPKPQFNKQFITNLNKINKYLPSLLATNQSLREINDIIYASAKTLITSNKQIPFLPPTIKKVKKDPPWKIRLKRKIEDFRKELGRFIEIRAGSNSKKMNKIKQKLYNKYEINNEDDLHKTIEILKQKVKAVAGRLHRYDDINKRKLHNKLFTENQHKFFRTLNNTQQNPTQIPTQETIEQFWSTILSNPITYNKNANWISEIEKLNERIEEHSFEEIDVEKVKLAVNKTHNWKTPGIDKVHNYYLKYLTSTHQYIAKLFDKIIKGVEPIENWFTTGQVILTPKNENTADPKNWRPIACLPTMYKILTSIIANELYKHCDKNNIIAPEQRGCRRGARGCKDHLMINKAILEDAHKCQKNLSLAWVDYRKAFDSISHEWLLKVLELYKCPPVITNFLRLIMPTWNVIMTTHGANTCVTTRPIYIRRGIFQGDSLSPLLFCLSINPISQILNKYQFKGYKLKDDSTINHLLYMDDLKIYANNKSNLKVLIDSTEIFTRDIGMQFGLDKCNVLHLVSGRRKEHQGNGHVLLSGDEFRHLQMEEKYKYLGINEAGKIDHNEISQQMQKEYYRRIKVLTTSHLNARNLLRAINIYAVPVLLYTFGIINYKTTDLKKIDVKTRKILAMNKAHRQKADIERLYLPINQGGRGLINLETLHKTQIIKFKTYIETEKDHILSAIAEHDRNKDKYSIIKETRSILTEIGLDSNKVYTDKELKNAVVKTRIDKIKAKPLHGQFYKAVLEKENIDKVHSFLWLKKQPVSATLESSIFAIQDQAILTKQHQRDILKTTADGKCRLCLSKDETIQHIISGCEKLAGTYYTKRHNNIVQYIFWTLAKKHKFQVSNLWWQEQLTQPRVIENETAKIMWEIPVQTDITIVHNRPDIIYINKIENKAYLIDATVPSDYNIGPKEIEKLSKYHPLKIEIARLWKIPTEVIPIVIGATGIVAKSLHRYSEKLNSNINTHIIQKQAAIHTVTILSKVLGDSVFVTGGTEPPFP

SEQ ID NO: 8503 - protein, 1246 aa, Bombyx mori
MLASDSRRTGWSGVGDRGVWGRSPDATAEEFNDVALRGRDMSPTCSAGTSSSTTGSINDDARRKWSRTELDELMFCFYLAKAGGPGYIKRLEKIFKDRNSHITKFKKFTGNTLSNQARSILSHNYISKEVLEEIKSKAEQAYLLPDVYSRTALPETITQTTANTLPEPIYTADLLHQENFTQQTQHIHPPPNTDTQEQTLTFTQIEPTTQLTDTIADEGNEIGEVVVDENQDPLVLDFLQILAETKEIPIDNRTFLPKPKFNKHFIKNLQTINNYIPTLLETNQSLREINDVIYAAAKTLIINNKQTPYTPPTMQKPKHEPPWKRRLKQKIEDHRKELGRLVEVKAGSNSNKMRNIKNKLYEKFKIHNDQDLNNTIEILKQKVKALAGRLRRYDEINQRKIQNKQFAENQHKFFRSLNNSQHNPTQIPSQSEIENFWTTILSNPISYNKEAHWITQIANSSNEIEEHTFEEIDVGKLRTAIRKSQNWKSPGIDKIHNYYLKYLTSTHKYIAKLFDRIIKGTEVIDSWFTRGRVVLIPKDENTQDPKNWRPIACLPTMYKILTSIIANELYKHCDKNNIIALEQRGCRRGARGCKDHLMINKAILEDAHKCQKNLSTAWIDYRKAFDSISHEWLLKVLELYKCPPVVRNFLRLVMPMWSVVMTARGADGSVTTEPIYIRRGIFQGDSLSPLLFCLGINPISQILNQYQLKGYTLKDNNIINHLLYMDDLKIYSNSKTNLKVLIDSAEIFTGDIGMQFGLKKCNILHLVAGRRKEHRGRGHVLLSGDEFRHLRLDEKYKYLGIDEAGKIDHNEVRQQIQKEYFRRVKSVTGSQLNARNILRALNIYAVPVLLYTFGIINYKTADLKKIDVKTRKILAMNKAHQQKADVDRLYIPIDQGGRGLTNLETLYKTQIIKYKSYIETEKDHILRAIVEHDKNKSKYSIFKETRSNLNEIGLQQNEKYTDKELKNAVVKTKIEIIKAKPLHGQFYKAVLEKENIDRAQSFQWFKRQPVSPALESAIFAIQDQAVVTRQHERDIMKRQVDGRCRLCCIKDETTQHIVSGCEKLAGTYYTKRHNNIVQYVFWSLAKKHAFQVSDLWWREHLTQPQVRENEGAKIMWEIPVQTDVTIVHNRPDIIYINKTDNKTYLIDVTVPSDYNIGAKEIEKLSKYHALKTEITRLWKTHTEIVPIVIGATGVIAKSLQKYLDKLDANINPHIMQKQAAIHTVTIITKVLGDTVFVGGETEPPFP

SEQ ID NO: 8504 - protein, 1276 aa, Bombyx mori
MENNLNNERIGPLPGGDRRGTSVAGGGRGRMLASDSRRTGWSGVGDRGVWGRSPDATAEEFNDVALRGRDMSPTCSAGTSSSTTGSINDDARRKWSRTELDELMFCFYLAKAGGPGYIKRLEKIFKDRNSHITKFKKFTGNTLSNQARSILSHNYISKEVLEEIKSKAEQAYLLPDVYSRTALPETITQTTANTLPEPIYTADLLHQENFTQQTQHIHPPPNTDTQEQTLTFTQIEPTTQLTDTIADEGNEIGEVVVDENQDPLVLDFLQILAETKEIPIDNRTFLPKPKFNKHFIKNLQTINNYIPTLLETNQSLREINDVIYAAAKTLIINNKQTPYTPPTMQKPKHEPPWKRRLKQKIEDHRKELGRLVEVKAGSNSNKMRNIKNKLYEKFKIHNDQDLNNTIEILKQKVKALAGRLRRYDEINQRKIQNKQFAENQHKFFRSLNNSQHNPTQIPSQSEIENFWTTILSNPISYNKEAHWITQIANSSNEIEEHTFEEIDVGKLRTAIRKSQNWKSPGIDKIHNYYLKYLTSTHKYIAKLFDRIIKGTEVIDSWFTRGRVVLIPKDENTQDPKNWRPIACLPTMYKILTSIIANELYKHCDKNNIIALEQRGCRRGARGCKDHLMINKAILEDAHKCQKNLSTAWIDYRKAFDSISHEWLLKVLELYKCPPVVRNFLRLVMPMWSVVTTARGADGSVTTEPIYIRRGIFQGDSLSPLLFCLGINPISQILNQYQLKGYTLKDNNIINHLLYMDDLKIYSNSKTNLKVLIDSAEIFTGDIGMQFGLKKCNILHLVAGRRKEHRGRGHVLLSGDEFRHLRLDEKYKYLGIDEAGKIDHNEVRQQIQKEYFRRVKSVTGSQLNARNILRALNIYAVPVLLYTFGIINYKTADLKKIDVKTRKILAMNKAHQQKADVDRLYIPIDQGGRGLTNLETLYKTQIIKYKSYIETEKDHILRAIVEHDKNKSKYSIFKETRSNLNEIGLQQNEKYTDKELKNAVIKTKIEIIKAKPLHGQFYKAVLEKENIDRAQSFQWFKRQPVSPALESAIFAIQDQAVVTRQHERDIMKRQVDGRCRLCCIKDETTQHIVSGCEKLAGTYYTKRHNNIVQYVFWSLAKKHAFQVSDLWWREHLTQPQVRENEGAKIMWEIPVQTDVTIVHNRPDIIYINKTDNKTYLIDVTVPSDYNIGAKEIEKLSKYHALKTEITRLWKTHTEIVPIVIGATGVIAKSLQKYLDKLDANINPHIMQKQAAIHTVTIITKVLGDTVFVGGETEPPFP

SEQ ID NO: 8505 - protein, 933 aa, Bombyx mori
MQKPKHEPPWKRRLKQKIEDHRKELGRLVEVKAGSNSNKMRNIKNKLYEKFKIHNDQDLNNTIEILKQKVKALAGRLRRYDEINQRKIQNKQFAENQHKFFRSLNSSQHNPTQIPSQSEIENFWTTILSNPISYNKEAHWITQIANSSNEIEEHTFEEIDVGKLRTAIRKSQNWKSPGIDKIHNYYLKYLTSTHKYIAKLFDRIIKGTEVIDSWFTRGRVVLIPKDENTQDPKNWRPIACLPTMYKILTSIIANELYKHCDKNNIIALEQRGCRRGARGCKDHLMINKAILEDAHKCQKNLSTAWIDYRKAFDSISHEWLLKVLELYKCPPVVRNFLRLVMPMWSVVMTARGADGSVTTEPIYIRRGIFQGDSLSPLLFCLGINPISQILNQYQLKGYTLKDNNIINHLLYMDDLKIYSNSKTNLKVLIDSAEIFTGDIGMQFGLKKCNILHLVAGRRKEHRGRGHVLLSGDEFRHLRLDEKYKYLGIDEAGKIDHNEVRQQIQKEYFRRVKSVTGSQLNARNILRALNIYAVPVLLYTFGIINYKTADLKKIDVKTRKILAMNKAHQQKADVDRLYIPIDQGGRGLTNLETLYKTQIIKYKSYIETEKDHILRAIVEHDKNKSKYSIFKETRSNLNEIGLQQNEKYTDKELKNAVVKTKIEIIKAKPLHGLFYKAVLEKENIDRAQSFQWFKRQPVSPALESAIFAIQDQAVVTRQHERDIMKRQVDGRCRLCCIKDETTQHIVSGCEKLAGTYYTKRHNNIVQYVFWSLAKKHAFQVSDLWWREHLTQPQVRENEGAKIMWEIPVQTDVTIVHNRPDIIYINKTDNKTYLIDVTVPSDYNIGAKEIEKLSKYHALKTEITRLWKTHTEIVPIVIGATGVIAKSLQKYLDKLDANINPHIMQKQAAIHTVTIITKVLGDTVFVGGETEPPFP

SEQ ID NO: 8506 - protein, 1278 aa, Furcula furcula
MESTSNIRIGPLPGGERRGTSRAGAGRGSMRTASGSLLNRRARAGEPEENTADITRDADDALQDRETSPISLVGTSDETTTRSNISDDARRKWSQDELEELMFCYYRAKAGGAGYIKRFEKTFKDKNPNNPKVNRHTGNTLSNQARSVITRKFMSIEVLNEIKLKAERSLLTPNNNATLAEIATNNQVLNIQVDFTIENTSDTNMISQILCSSSPIETQHTHDTMVPILETYTLTEEYDSQITNVRDTTQNTNIPQRVSTDDVDPLILDLMQVLAETKETPIAEREFLPKPNFTKKFIHNLNQINNYLPNLLISNYTLREINDLIYAAAKTLILNNEQKPYKQPTTIKSKHDPPWKKRIKIKLEIVRKELGRLIKIKRGTNSRHMQRIKEKLFDKYNIFTDQDLDNQIECLKQRTKALAGRIKRYEEINDRKEQNKLFHQNRHKFFRSLNSQQQVPTELPPKPVVQEFWASLLSTPVTYNKDATWIRELEDNTQNIEEYDFKEIDIDKLNIALKKLQNWKTPGLDKIQNYYLKHFTNIHEHLVKLFNRILNGSEHLEEWFTTGQVILIPKNDNTQEPQNWRPIACLPTIYKLLTSIISNELYVHCENNNILEPEQRGCRRRVRGCKDHLMMNKAILEDAHQWQKNLSTGWIDYRKAFDTISHEWLLKVLSLYRCPKVIINFLEQVMPTWNVIMTARGANTSITTEPISIRRGIFQGDSLSPLLFCIGINPLSQILHKYQSKGYTLKDNSSINHLLYMDDLKVYANNKNNLKVLLHSTEFFTKDIGMQFGLDKCNVLHLTAGRRSDHQGGGHILLSGQEFEHLKAEQKYKYLGISEAGKIDHNEIRQQVEKEYYSRIKRITNSQLNSRNLLMAINSYAVPVLMYTFGIINYKNNDLKKIDIKTRKLLAMRKAQQQKADVGRLYLPVDEGGRGITNIESFYKTQIIKYKKYLDSEKDHIFKAIVRNDKKKEKYSINKEARKNITEIGLNLEGEYNDRDIKNAVIKKEINKWKAKPLHGQLYKAVLDKENIDREYSFKWLKKHPVSPTLESSIFAIQDQAIVTRQHERDIQKKPVDGKCRLCSSKDETIQHIVSGCDRLAGTYYTKRHNNIVQYVYWALCKKNNIPVSNLWWQQHLSQPEVKENDNAKLMWEIPVQTDITVLHNRPDIIYINKTENKIYLIDITVPSDYNIGSKETEKLSKYHLLRTEITRLWKMPAEIIPIVIGATGIVAKSLHRYIKKLDANINIHIMQKQAAIHTVTIVSKVMGDTVFVGGNSEPTSL

SEQ ID NO: 8507 - protein, 1266 aa, Euriphellus phraxanor
MESCSNSISKGPLPGGDRRGTSVAGDGRDRMLASDPRRTGWSGVGDTRGGTSLDATAEELVGVTLRSRDVSPTSSAGTSQSTTGSISDDMRRKWSREEQEELMFCYYKARVGGPGYIKRLQTIFKTRNPDNPKARKFTGNTLSNQVRSLLTRKAISKQLLDEIKRKAEETDTAVDTHISAATEYNIQSHNNIQMTPQIPEIEHTQFFSSENTDHNVQETSSLVASNAQSTHTSASIVEQIETQDIEVNEDQDPIILEFLQILSETREIQIENRMFLPKPKLTNHFINNLDKINKFLPKLLTTNQSLREINDIIYAAAKTLIIKNNQTPYIPLTTQNPKKDPPWKRRLKHKIDHNRKELGRLIEIKGGVNSRRMINIKQKLFDKYKINNNEDLNNAIEIQKQKVKALAGRLRRYDEINERKVQNKMFAENQHKFYRSLNDMPQNPHKIPTKDEIQIFWTTILSNPISYNKDAQWITELKQSANDIEEQIFEEIDTSKVREAIRKTQNWKAPGIDKIQNYYLKYLTSTHKYIALLFDRIIKRTEPIDTWFTTGRVILIPKDDKTEDPKNWRPIACLPTMYKILTSVIANELYNHCEKNNIISPEQRGCRRGARGCKDHLMINKAILEDAHKCQKNLSLAWIDYRKAFDSISHEWLLKVLEIYKCTPMIRGFLEMVMPMWNVVMTAQGTNTSVTSDPIYIRRGIFQGDSLSPLLFCLGINPISQILNNYQNIGYKLKDNNAINHLLYMDDLKIYANNKINLKVLIDSVEIFTKDIGMQFGLNKCNVLHLVAGRRGEYQGKGHVLLSGEEFRHLQIDEKYKYLGIDEAGRIDHGEVRQQTEKEYIRRVKSLTTSQLSARNLLRAINVYAVPVLLYTFGIINYKNTDLKKLDIRTRKILAMNKSHQQKADVERLYLPIDHGGRGLINLEMLHKTQIIKYKSYIESEKDHMISTIAEHDRNKTKHSIIKEAKTNLIEIGLSQNENYIDKEIKNAIIKTKVDKIKSKPLHGQFYKSVLEKENIDRAKSFHWLKKQPVSPSLESAIFGIQDQAVTTKQHERDILKKAVDGKCRLCLEKDETTQHIISGCKKLAGTYYTKRHNNIVQYIFWTLAKKHKFQVSDLWWQEHLTQPQVRENETAKIMWEIPVQTDITIVHNRPDIIYINKTENKAYLIDITVPSDYNIGAKEIEKLSKYHKLKLEITRLWKMTTEVIPIVIGATGIIAKSLHRYCDKLNSHININIIQKQAAIHTVTILSKVLGDSVFVSGGTEPPFP

SEQ ID NO: 8508 - protein, 894 aa, Thymelicus sylvestris
MTKIKQKLYNKYQINNEDDLHKTIEILKQKVKALAGRLHRYDDINKRKLHNKLFSENQHKFFRTLNNTQQNPTQIPTKETIEQFWSNILSNPITYNKNASWISEIEKLNEQIEGHNFEEIDVEKVKHAVNKIQNWKTPGIDKVHNYYLKYLTSTHQYIAKLFDKIIKGVEPIESWFTTGQVILIPKNQDTVDPKNWRPIACLPTMYKILTSIIANELYKHCDKNNIIAPEQRGCRRGARGCKDHLMINKAILEDANKCQKNLSLAWIDYRKAFDSISHEWLIKVLELYKCPPVIANFLRLIMPTWNVIMTAQGANSCTTTRPIYIRRGIFQGDSLSPLLFCLSINPISQILNKYQFKGYKLKDDSTINHLLYIDDLKIYANNKSNLKVLIDSTEIFTKDIGMQFGLDKCNVLHLVSGRRKEHQGDGHVLLSGYEFRHLQMEEKYNYLGINEAGKIDHNEIRQQMQKEYYRRVKSLTTSHHNARNLLRAINIYAVPVLLYTFGIINYKTTDLKKIDVKTRKILAMNKAHRQKADIERLYLPINQGGRGLINLETLHKTQIIKFKTYIESEKDHILSAIAEHDRNKDKYSIIKETRSIITEIGLDNNKVYTDKELKNAVVKNRVDKIKAKPLHGQFYKAILEKENIDKLQSFIWLKKQPVSATLESSIFAIQDQAILTKQHQRDILKTTADGKCRLCLSKDETTQHIISGCEKLAGTYYTKRHNNIVQYIFWTLAKKHKFQVSNLWWQEQLTQPRVIENETAKIMWEIPVQTDVTVIHNRPDIIYINKIENKVYLIDATVPSDYNIGPKEIEKLSKYHPLKIEIARLWKIPTEVISIVIGATGVVAKSLHRYCEKLNSNINTHIIQKQAAIHTVTILSKVLGDSVFLTGGTEPPFP

SEQ ID NO: 8509 - protein, 1194 aa, Dalla cyprius
MESRLNSTRKLPLLGGDRRGTSVAGDGRLSMLASGSRRTGWSGVGDRGVRGRSPDATADETTGDTLQSRDVFPASSAGSLGSTTGSSPSRDDARRKWSHLEHQELMFCYYRAKAGGPGYIKRLESLFKNRNPHNPKSRKFTGNTLSNQVRSILSRRCIATEVLEEIKRKAQQISDAPSQMQLTPNSEIINTQATHNDLLATSTVPTRSQTSQNENSQHHHPSVLQTQFNINITPTIDTEAQDIQVNEDQETIILDLLQSLAEVKETPIEKRPFLPKPQFNKQFITNLNKINKYLPNLLVTNQSLREINDIIYASAKVLITSNKQVPFIPPSIQKPKRDPPWKIRLKRKIEDYRKELGRLTEIKGGANSKKMFKIKQQLYNKYNINNENDLHNAIEILKQKVKAIAGRLHRYDDINKRKIHNKLFSENQHKFYRTLNKSQQNPTDIPTQETIEQFWSNILSNPITYNKEARWISEIEKSSEQIEEHNFEEINVEQVKNAIKRAQNWKTPGIDKIHNYYLKYLTSTHQYIATLFDRIIKGIEPIENWFTTGQVILIPKNENTADPKNWRPIACLPTMYKILTSLIANELYIHCDKNDIIAPEQRGCRRGARGCKDHLMINKAILEDAHKCQKNLSLAWVDYKKAFDSISHEWLLKVLEIYRCPPIIQGFLKMVMPTWNVIMTAHGANACVTTNPICIRRGIFQGDSLSPLLFCLSINPISQILDKYQFKGYKLKDDSTINHLLYMDDLKIYANNKTNLKVLIDSTEIFTRDIGMQFGLDKCNVLHLVAGRRKEHHGEGHVLLSGDEFKHLQIEEKYKYLGINEAGKIDHNEIRQQIQKEYFRRVKTLTTSHLHARNLLRAINIYAVPVLLYTFGIVNYKTTDLKKIDVKTRKILAINKAHRQKADVERLYLPIDQGGRGLINLETLHKTQIIKYKSYIETEKDHILTAIAEHDRNKEKYSIIQDTRSNLTEIGLNNNIVYTDKELKNAIVKTRIEKIKAKPLHGQFYKAVLEKENIDRIQSFSWLKKQPVSPTLESSIFAIQDQAVLTKQHQRDILKTTSDGKCRLCQIKDETTQHIISGCEKLAGTYYIKRHNNVVQYIFWTLAKKHKFQVSNLWWQEHLTEPLVIENETAKIMWEMPVQTDVTIVHNRPDIIYINKIENKAYLIDATVPSDYNIGAKEIEKLSKYHALKVEITR

SEQ ID NO: 8510 - protein, 1264 aa, Thymelicus sylvestris
MENTFNSTRIGPLPGGDRWGTSVAGVGRLSMLASGPRRAGWSGVGDRGVRERSPDATADETTGDTLQSRDVSPASSAGTLGSTTGSSPSRDDARRKWSNSEHQELMFCYYRAKAGGPGYMKRLESLFKNRNPHNPKSRKFTGNTLSNQVRSILSRRCISTEVLEEIKRKAEQTSDAIIATHTQLTTVLETNDTQTAHNDLSPVLTTPMQSPSTFENENNHQHNPLATQTHINTYTTLNSETEVHDIQVNEDQEKIILDLLQSLAEVKETPIENRPFLPKPQFNKQFITNLNKINKYLPNLLATNQSLREINDIIYASAKTLIISNKQVLFLPPTVKKAKRDPPWKIRLKRKIEDFRKELGRFIEIRGGSNSKKMTKIKQKLYNKYQINNEDDLHKTIEILKQKVKALAGRLHRYDDINKRKLHNKLFSENQHKFFRTLKNTQQNPTQIPTKETIEQFWSNILSNPITYNKNASWISEIEKLNEQIEGHNFEEIDVAKVKHAVNKIQNWKTPGIDKVHNYYLIYLTSTHQYIAKLFDKIIKGVEPIESWFTTGQVILIPKNQDTVDPKNWRPIACLPTMYKILTSIIANELYKHCDKNNIIASEQRGCRRGARGCKDHLMINKAILGDANKCQKNLSLAWIDYRKAFDSISHEWLIKVLEVYKCPPVIANILRLIMPTWNVIMTAHGANSCTTTRPIYIRRGIFQGDSLSPLLFCLSINPISQILNKYQFKGYKLKDDSIINHLLYMDDLKIYANNKSNLKVLIDSTEIFTKDIGMQFGLDKCNVLHLVSGRRKEHQGGGHILLSGDKFRHLQMEEKYKYLGINEAGKIDHNEIRQQMQKEYYRRVKSLTTSHLNARNLLRAINIYAVPVLLYTFGIINYKNTDLKKIDVKTRKILAMNKAHRPKADIERLYLPINQGGRGLINLETLHKTQIIKFKTYIESEKDHILSAIAEHDRNKDKYSIIKETRSIITEIGLDNNKVYTDKELKNAVVKNRVDKIKAKPLHGQFYKAILEKENIDKLQSFIWLKKQPVSATLESSIFAIQDQAILTKQHQRDILKTTADGKCRLCLSKDETTQHIISGCEKLAGTYYTKRHNNIVQYIFWTLAKKHKFQVSNLWWQEQLTQPRVIENETAKIMWEIPIQTDVTVVHNRPDIIYINKIENKAYLIDATVPSDYNIGPKEIEKLSKYHPLKIEIARLWKIPTEVIPIVIGATGVVAKSLHRYCEKLNSNINSKHTHHTKTSSHTHSNHSLQGVRRFCVSHGGN

SEQ ID NO: 8511 - protein, 894 aa, Furcula furcula
MQRIKEKLFDKYNIFTDQDLDNQIECLKQRTKALAGRIKRYEEINDRKEQNKLFHQNRHKFFRSLNSQQQVPTELPPKPVVQEFWASLLSTPVTYNKDATWIRELEDNTQNIEEYDFKEIDIDKLNIALKKLQNWKTPGLDKIQNYYLKYFTNIHEHLVKLFNRILNGSEHLEEWFTTGQVILIPKNDNTQEPQNWRPIACLPTIYKLLTSIISNELYVHCDNNNILEPEQRGCRRRVRGCKDHLMMNKAILEDAHQWQKNLSMGWIDYRKAFDTISHEWLLKVLSLYRCPKVIINFLEQVMPTWNVIMTARGANTSITTEPISIRRGIFQGDSLSPLLFCIGINPLSQILHKYQSKGYTLKDNSSINHLLYMDDLKVYANNKNNLKVLLHSTEIFTKDIGMQFGLDKCNVLHLTGGRRSDHQGGGHILLSGQEFEHLKAEQKYKYLGISEAGKIDHNEIRQQVEKEYYSRIKRITNSQLNSRNLLMAINSYAVPVLMYTFGIINYKDSDLKKIDIKTRKLLAMSKAQQQKADVGRLYLPVDEGGRGLTNIESLYKTQIIKYKKYLDSEKDHIIKAIVRNDKKKEKYSINKEARKNITEIGLNLEGEYNDRDIKNAVIKKEINKWKAKPLHGQLYKAVLDKENIDREYSFKWLKKHPVSPTLESSIFAIQDQAIVTRQHERDIQKKPVDGKCRLCSSKDETIQHIVSGCDRLAGTYYTKRHNNIVQYVYWALCKKNNIPVSNLWWQQHLSQPEVKENDNAKIMWEIPVQTDITVLHNRPDIIYINKTENKIYLIDITVPSDYNIGSKEIEKLSKYHLLRTEITRLWKMPAEVIPIVIGATGIVAKSLHRYVKKLDANINIHIMQKQAAIHTVTIVSKVMGDTVFVGGNFEPTSL

SEQ ID NO: 8512 - protein, 1270 aa, Hydriomena furcata
METMSNRNSRIWSLPGGDRRGASGADAGRYSIRTIGDGGLRGRPSVGEPEQSETTQPMPGDTLRSREISPTSSAGAPEVTTGSSTTVSDDARRKWSEVELHELMFCFFKAKVGGAGYIKRFEKLFKDRNPDNPKVQKFTGNMLANQARSILTRKILSTQVLDQIKDRAEESSIQNLNENIDSTLDSNIQTPPRITPTQTSIANITPNSITHTQQYQTVTESDEQISTENNVDQVGAPAEVVVDENQDPIIIQFLEILAETKEISVENRENLPKPNFNKQFIQNLNIINNFLPSLLITNTSLREINDIIYASAKTLISNNNQNSYTNPSTRKPKQDPPWKTRLKNKIDDLRKELARLIEIKRGNNSRTMNRVRLKLFNKYNIINEKDLDYRIELHTQKVKAIAGRIKRYSDMNDRKLQNKLFQENQRKFYRSLNGEQQVPTQIPTKSEIQQFWSSILSEPVPYNTGARWIKEVEESMDEVGEEHTFREIDIDKLKTAIRKIRNWKAPGLDKIQNYYLKYLTSTHKYIAQLFDRIIKGIEPVDSWFTTGMVVLIPKNENTEDPKNWRPIACLPTMYKLLTSVIANELYKHCDENDILAPEQRGCRRRARGCKDHLMINKAILEDAHQCNKNLSMGWVDYQKAFDSISHEWLLKVLDIYKCPPVIKGFLEIVMPTWNVVMKAYGANASVTTDSIYIRRGIFQGDSLSPLLFCLGLNPLSLVLNTYNLKGYKLKDNCTINHLLYMDDLKLYANTPNNLKILIDSTEIFTEDIGMKFGLSKCNVLHLAKGRRQEHDGRGHVLLSGEEFEHLKSDEQYKYLGIQESGKIDHHQTRQKIQKEYFRRVKCLNKSHLNSRNLLRSINIYAVPVLLYTFGIINYKTSDLKKIDVKTRKILTMNKAHQQKAEVERLYLPIEEGGRGLTNLEMLYKTQIIKYKKYLENEQDHIIKAIVKHDKNRVKYSIHKESKVNLAEIGLRCKENYTDRELSNAVINTKINKWKTKPLHGQFHKKVLDKENIDKTFSFKWIKKQPVTPGLESSIFAIQDQAVVTRQHERDIFKRAVDGKCRLCLTKDETTQHIVSGCEKLAGTYYIKRHNNIVQYVYWTLAKKHSFEVSSMWWKETLTQPQVKENDTAKLMWEIPVQTDVTIVHNRPDIIYINKLEKKTYLIDVTVPSDYNIGAKEIEKLSKYHALKTEITRLWKTPTEVIPIVVGATGIIAKSLHRYCNKLDSHINIHIIQKQAAIHTVTIITKVLGDTVFINRGANNSSERESEQTFP

SEQ ID NO: 8513 - protein, 1415 aa, Spilarctia lutea
MERNNKRKRLMPLPGGDRWGTSGADAGRDSIRTVSGSLLNRRAGAGELENATADLNRDADDTLQNRDVPIGSAGTSESTTTSSQNTQDTRRKWSKDEIQELMFCYFKTRAQGVGFIKRLEKLFKERNPDNSKIHKFTGNTLSNQARSIITHNWLSTEQLDHIKQKAEQSNTPADIHIHSDAQHTEIQSTVPNQTDTNTQISVASVQSVSSVRTPETTTTNSQDTNDARRKWSKAEIRELMFCYYKAKSQGAGFIKRLEKLFKERNPDNPKIHKFTGNTLSNQARSIITHNWLSTEVLDLIKQKAEQSNTPADTHTRVHSDAQDREVQSIVPNQTDTNTQISVTQHTNSTPHTLSHENFNSFSYSQPTGFETLHHPDLDDLTQDTMQQTHNPYTQNTEDLDPIIIQFLQTLAETKEVPLEHRKFLPKPRFNKTYINNLHKINNYLPIILNTHSTLRELNDTIYAAAKALITINGQKAFTPPATIKPKREPPWKLRIKKKLEDIRKELGRLIEIKRGANSRRMLNIKDKLYDKYNIFTDLDHDNTVEILNQKVKALAGRIKRYEDMNNRKNQNKMFNENQHSFYRSLNGNLKAPTELPTKEAVQKFWTSILSQPITYNRDARWIADEENKANNINTHTFEEINIDMVKEALSKTHNWKTPGIDKIQNYYLKYLTKTHSYITQIFNRILNETETIEDWFTTGQVILIPKNENTQDPQNWRPIACLPTLYKLLTSVIANELYIHCENNNIIAPEQRGCRRRARGCKDHLMINKAILEDAHQYQKNLSMGWVDYRKAFDSISHEWLLKVLNMYKCPHIIISFLQKVMPSWKVIMTARGENVSVTTDYIYIRRGIFQGDSLSPLLFCLGINPLSNVLNKYHTKGYTLKDSSVINHLLYMDDLKVYAKNKNSLNILLDSTEIFTRDIGMEFGLNKCNVLHLTAGRINEYRGEGHILLSGLKFEHLKKDESYKYLGINEAGKIEHNDIREQVKREYFRRIKCITNTHLNARNLIKAINTYAVPVLLYTFGIINYKNIDLNKIDVKTRKLLAINKAHAQKADIERLYLPTEEGGRGLLNIEMLHKTQIIKYKTYLETQKDYILQTIVEHDSHKEKYSIFKETELNLTEIGLRQNTKYTDKELKQAVVKTRLNKIKSKPLHGQFYRSVLEKENIDRIQSFRWIKKQPVSPTLESSIFAIQDQAIVTRQHERDIFKRAVDGKCRLCSVKDETAQHIVSGCEKLAGTYYTKRHNNIVQYIFWSLCKKHKIPVAKLWWLEHLTQPQVKENESAKIMWEIPVQTDVTIIHNRPDIIYVNKTENKTYLIDVTVPSDYNIGPKEIEKLSKYHSLKTEISRLWNTHTETIPIVIGTTGVVAKSLHRYINKLDSNINIPIIQKQAAIHSSTILIKVLGDTVFLNSRESEPPLL

SEQ ID NO: 8514 - protein, 1274 aa, Furcula furcula
MESTSNIRIGPLPGGERRGTSRAGAGRGSMRTASGSLLNRRARAGEPEENTADITRDADDALQDRETSPISLAGTSDETTTRSNISDDARRKWSQDELEELMFCYYRAKAGGAGYIKRFEKTFKDRNPNNPKVNRYTGNTLSNQARSIITRKFMSIEVLNEIKLKAERSLLAPNNNATLAEIATSRFQVDFTIENTSDTNVISQILCSSSPIETQHTHDPMVPILETYTLTEEYDSQITNVRDTTQNTNIPQRVSTDDVDPLILDLMQVLAETKETPIAEREFLPKPNFTKKFIHNLNQINNYLPNLLVTNNTLREINDLIYAAAKTLILNNEQKPYKQPTTIKSKHDPPWKKRIKIKLETVRKELGRLIEIKRGTNSRHMQRIKEKLFDKYNIFTDQDLDNQIECLKQRTKALAGRIKRYEEINDRKEQNKLFHQNRHKFFRSLNSQQQVPTELPPKPVVQEFWATLLSTPVTYNKDATWIRELEDNTQNIEECDFKEIDIDKLNIALKKLQNWKTPGLDKIQNYYLKYFTNIHEHLVKLFNRIVSGSEPLEEWFTTGQVILIPKNENTQEPQNWRPIACLPTIYKLLTSIISNELYVHCDNNNILEPEQRGCRRRVRGCKDHLMMNKAILEDAHQWQKNLSMGWIDYRKAFDTISHEWLLKVLSLYRCPKVIINFLEQVMPTWNVIMTARGANTSITTEPIFIRRGIFQGDSLSPLLFCIGINPLSQILHKYQSKGYTLKDNSSINHLLYMDDLKVYANNKNNLKILLHSTEIFTKDIGMQFGLDKCSVLHLTGGRRSDHQGEGHILLSGQEFEHLKAEQKYKYLGISEAGKIDHNEIRQQVEKEYYSRIKRITNSQLNSRNLLMAINSYAVPVLMYTFGIINYKDSDLKKIDIKTRKLLAMSKAQQQKADVGRLYLPVDEGGRGLTNIESLYKTQIIKYKKYLDSEKDHIIKAIVRNDKKKEKYSINKEARKNITEIGLNLEGDYNDRDIKNAVITKEVNKWKAKPLHGQLYKAVLDKENIDREYSFKWLKKHPVSPTLESSIFAIQDQVIVTRQHERDIQKKPVDGKCRLCSSKDETIQHIVSGCDRLAGTYYTKRHNNIVQYVYWALCKKNNIPVSNLWWQQHLSQPEVKENDNAKLMWEIPVQTDITVLHNRPDIIYINKIENKIYLIDITVPSDYNIGAKEIEKLSKYHLLRTEITRLWKMPAEIIPIVIGATGIVAKSLHRYVKKLDANINIHIMQKQAAIHTVTIVSKVMGDTVFVGGNSEPTSL

SEQ ID NO: 8515 - protein, 1276 aa, Bombyx mori
MENNLNNERIGPLPGGDRRGTSVAGGGRGRMLASDSRRTGWSGVGDRGVWGRSPDATAEEFNDVALRGRDMSPTCSAGTSSSTTGSINDDARRKWSRTELDELMFCFYLAKAGGPGYIKRLEKIFKDRNSHITKFKKFTGNTLSNQARSILSHNYISKEVLEEIKSKAEQAYLLPDVYSRTALPETITQTTANTLPEPIYTADLLHQENFTQQTQHIHPPPNTDTQEQTLTFTQIEPTTQLTDTIADEGNEIGEVVVDENQDPLVLDFLQILAETKEIPIDNRTFLPKPKFNKHFIKNLQTINNYIPTLLETNQSLREINDVIYAAAKTLIINNKQTPYTPPTMQKPKHEPPWKRRLKQKIEDHRKELGRLVEVKAGSNSNKMRNIKNKLYEKFKIHNDQDLNNTIEILKQKVKALAGRLRRYDEINQRKIQNKQFAENQHKFFRSLNSSQHNPTQIPSQSEIENFWTTILSNPISYNKEAHWITQIANSSNEIEEHTFEEIDVGKLRTAIRKSQNWKSPGIDKIHNYYLKYLTSTHKYIAKLFDRIIKGTEVIDSWFTRGRVVLIPKDENTQDPKNWRPIACLPTMYKILTSIIANELYKHCDKNNIIALEQRGCRRGARGCKDHLMINKAILEDAHKCQKNLSTAWIDYRKAFDSISHEWLLKVLELYKCPPVVRNFLRLVMPMWSVVMTARGADGSVTTEPIYIRRGIFQGDSLSPLLFCLGINPISQILNQYQLKGYTLKDNNIINHLLYMDDLKIYSNSKTNLKVLIDSAEIFTGDIGMQFGLKKCNILHLVAGRRKEHRGRGHVLLSGDEFRHLRLDEKYKYLGIDEAGKIDHNEVRQQIQKEYFRRVKSVTGSQLNARNILRALNIYAVPVLLYTFGIINYKTADLKKIDVKTRKILAMNKAHQQKADVDRLYIPIDQGGRGLTNLETLYKTQIIKYKSYIETEKDHILRAIVEHDKNKSKYSIFKETRSNLNEIGLQQNEKYTDKELKNAVVKTKIEIIKAKPLHGQFYKAVLEKENIDRAQSFQWFKRQPVSPALESAIFAIQDQAVVTRQHERDIMKRQVDGRCRLCCIKDETTQHIVSGCEKLAGTYYTKRHNNIVQYVFWSLAKKHAFQVSDLWWREHLTQPQVRENEGAKIMWEIPVQTDVTIVHNRPDIIYINKTDNKTYLIDVTVPSDYNIGAKEIEKLSKYHALKTEITRLWKTHTEIVPIVIGATGVIAKSLQKYLDKLDANINPHIMQKQAAIHTVTIITKVLGDTVFVGGETEPPFP

SEQ ID NO: 8516 - protein, 1278 aa, Furcula furcula
MESTSNIRIGPLPGGERRGTSRAGAGRGSMRTASGSLLNRRARAGEPEENTADITRDADDALQDRETSPISLAGTSDETTTRSNISDDARRKWSQDELEELMFCYYRAKAGGAGYIKRFEKTFKDRNPNNPKVNRYTGNTLSNQARSVITRKFMSIEVLNEIKLKAERSLLTPNNNATLAEIATNNQVLNIQVDFTIENTSDTNMISQILCSSSPIETQHTHDTMVPILETYTLTEEYDSQITNVRDTTQNTNIPQRVSTDDVDPLILDLMQVLAETKETPIAEREFLPKPNFTKKFIHNLNQINNYLPNLLISNYTLREINDLIYAAAKTLILNNEQKPYKQPTTIKSKHDPPWKKRIKIKLEIVRKELGRLIEIKRGTNSRHMQRIKEKLFDKYNIFTDQDLDNQIECLKQRTKALAGRIKRYEEINDRKEQNKLFHQNRHKFFRSLNSQQQVPTELPPKPVVQEFWASLLSTPVTYNKDATWIRELEDNTQNIEEYDFKEIDIDKLNIALKKLQNWKTPGLDKIQNYYLKYFTNIHEHLVKLFNRILNGSEHLEEWFTTGQVILIPKNDNTQEPQNWRPIACLPTIYKLLTSIISNELYVHCDNNNILEPEQRGCRRRVRGCKDHLMMNKAILEDAHQWQKNLSMGWIDYRKAFDTISHEWLLKVLSLYRCPKVIINFLEQVMPTWNVIMTARGANTSITTEPISIRRGIFQGDSLSPLLFCIGINPLSQILHKYQSKGYTLKDNSSINHLLYMDDLKVYANNKNNLKVLLHSTEIFTKDIGMQFGLDKCNVLHLTGGRRSDHQGGGHILLSGQEFEHLKAEQKYKYLGISEAGKIDHNEIRQQVEKEYYSRIKRITNSQLNSRNLLMAINSYAVPVLMYTFGIINYKDSDLKKIDIKTRKLLAMSKAQQQKADVGRLYLPVDEGGRGLTNIESLYKTQIIKYKKYLDSEKDHIIKAIVRNDKKKEKYSINKEARKNITEIGLNLEGEYNDRDIKNAVIKKEINKWKAKPLHGQLYKAVLDKENIDREYSFKWLKKHPVSPTLESSIFAIQDQAIVTRQHERDIQKKPVDGKCRLCSSKDETIQHIVSGCDRLAGTYYTKRHNNIVQYVYWALCKKNNIPVSNLWWQQHLSQPEVKENDNAKIMWEIPVQTDITVLHNRPDIIYINKTENKIYLIDITVPSDYNIGSKEIEKLSKYHLLRTEITRLWKMPAEVIPIVIGATGIVAKSLHRYVKKLDANINIHIMQKQAAIHTVTIVSKVMGDTVFVGGNFEPTSL

SEQ ID NO: 8517 - protein, 1013 aa, Chiomara georgina
MFCYYKAKAGGSGYTKRLEKIFKERNTQNPKFKKFTANTLSTQARAVLSRKKISQQVLDVIKNKAEHTFNLTNTQLSSTPENYTQTQDNTMQIISGTISMTEITQTEQENIHTIPENITQLNIDESDINIAPETGTYNIEVNENLDPIILDFLQILAETKEIEIKSRDFLPKPQFTKLFINNLNKINKYLPNLLDTNQSLREINDIIYAAAKTLVINNNQTTYKPINVKKTKLDPPWKRRLKQKIENHRKELGRLIEIKAGINTPRMVNIKRKLFSKYNINNNEELNNNIELLKQKVKALAGRLRRYDEINGRKTQNNLFTENQHKFYRSLNNRQHNPAQIPTKNEIENFWSSILSKPISYNEDAQWISEIVKSASNIQEHSFEEIDVDKVKEAIRKSHNWKTPGIDKIQNYYIKYLTSTHKYIAHLYDRIIKGVEPIDSWFATGQVILIPKDDDTVDPKNWRPIACLPTMYKILTSVIANELNIHCDKNNIIAPEQRGCRRGARGCKDHLMINKAILEDAHKCQKNLSVAWVDYQKAFDTISHEWLLKILEIYKVSPVIRGFLQMVMPLWNVTMTAHGVSASVITDPIYIRRGIFQGDSLSPMLFCIGINPISQILSTYQFKGYKLKGNSIINHLLYMDDLKLYANNITNLKVLIDSTEIFSRDIGMQFGLNKCNVLHLVAGRRHEHQGSGNALLSGEEFRHLQTDEKYKYLGINEAGNIDHAEVRQQVQKEYLRRVKTRTTSHLNSRNLLRAINTYAVPVLLYTFGIINYKTADLKKIDIKTRKLLAIKKIHHQKSDVERLYLPIDDGGRGLTNIETLYKTQTIKLKAYIETEKDYILRAIAEHDRNKEKYSIFKEAKLNLIELGLDPNKNYKDRELNKAVIKSKIVKLKAKPLHGQFYRAVLEKENIDRIQSFRWFKKQTVTPSIVSSIFAIQDQAVVTRQHERDILKREIDGKCRLCLTKDETAQHIISGCEKLAGTYYTKRHNNIVQYVFWTLSKKHNFEVSNLWWQE

SEQ ID NO: 8518 - protein, 1142 aa, Piruna pirus
MESRPNSTSKGPLPGGDRRGTSVAGVGRLSMLASGSRRAGWSRVGDRGVRERSPDATADESAGVTLRSRDVSPASSAGTLGSTTTSSAISNDARRKWSQEELHELMFCYFKARSEGPGYIKRFEQLFKQRNQNNPKISKFTGNTLSNQARSIINRKFISAELLDQIKQQAENTNESTETTPASFILDRFIDTNTQPQINPNSPQSNINTQQSNSNTNEDIINSEEAEIPLDTEEQHQIDDLTENININEDQDPIIMELLQTVAEVKYTPIAERSALPKPRFNKQFFDNLRKINNFLPNLLVTNNTLRETNNIIYAAAKTLIITNNQKPFNKMNTKKQTSDPPWKRRLKSKIDSIRKELGQLIEIGKGVNSRKILKTKDKLYNKYNILNRQNHDNIVEILKQKLKAKAGRLKRYEDIDDRKNHNKQFVENQHKFYRNMSGNQQLTADIPTKEAIETFWKNIIGEPITYNKNATWIKEIEQSNLNTEEHAFENINLDQVKLALRKLQNWKTPGIDKIHNYYLKYFTSTHKFLAKLLDRIFKGTETLEDWFTTGQVVLIPKEGDSKDPKNWRPIACLPTMYKLLTSIVADQLYAHCDSNDLLAPEQRGCRRRVRGCKDHLMVNKAILEDAHQSQKNLSMGWIDYRKAFDSISHDWLLKILELYRCPESIQNFLRLVIPNWKVIMTAYGTNGAVTTDPIHIRRGIFQGDSLSPLLFCIGINPLSQILNKYELQGYQLKNNIYINHLLYMDDLKVYASNKNNLKVLLDSTEIFTKDIGMSFGLNKCNILHLTGGRRREVEGEGHLLLSGEEFKHLQNNEKYKYLGICESGKIDHSEVRQQIQKEYFKRVKSLTKTHLNSRNLIKSINTYATPVLLYSFGIVNFKINDLKAIDIKTRKILAMNKAHQQKADVNRLYIPIDQGGRGLINIEMLYKTQIIKYSKYLKEGNDDLLKAIVTHDKSKDKYSIDKEGRIFSEEIGIQDRNSYTDRELKTAVIKKHINIWKSKALHGQFLKGVLEKENIDTEFSFRWMKKQPISPTLEASIFSIQDQSVVTNQFERDIIKKPVDGKCRVCLSKDETVQHIVSGCEKLAGTYYTKRHNNVVQYVHWTLAKKHKFQVHQLWWKESLTQPQVIENETAKLMWEMPVQT

SEQ ID NO: 8519 - protein, 1261 aa, Cycloglypha thrasibulus
MENNSSSYRIGPLPGGDRRGTSVAGGGRDSMLASDPRRTGWSGVGDRRGGTSLDATAEESVGVTLRSRGISPLSSAGSLQSTTGSVNEDSRRKWSSIELEELMFCYYKAKAGGSGYIKRFEKLFKDRNSQNPKSTKFTGNTLANQVRAVLSRRSISQQVLNEIKNKAEQELTSTNTQLNSIHDNNTQAQNHSIYAISDTGHHTEITQMEQEHIHTSQVTFTQSNVEQVDIGVDSSAETHYVEVNENQDSIILDFLQILAETKETQLEDRPFLPKPNFTKLFIKNLNTINKYLPNLLATNPSVRQINDIIYAAARTLIINNNQIPFKPSNVKKTNLDPPWKRRLKQKIENYRKELGRLIEVRAGVSTRRMNNIKQKLFSKYNINTNEELNNNIEIIKQKVKALAGRLRRYEEINGRKIQNNLFTENQHKFYRSLNGSQIKPNQIPTQTEIQTFWSSILSEPISYNRQAQWISEIEKSATDIQEHKFEEIDIDKVKKAIAKTHNWKTPGIDKIQNYYIKYLTSTHKFIANLFDRIIKGIEPIDTWFVTGQVILIPKDNNTVDPKNWRPIACLPTMYKILTSVLAEELNTHCVKNDILAPEQRGCRRGVRGCKDHLMINKAILEDAHKCQKNLSVAWVDYRKAFDSISHEWLLKVLEIYKCPSIIKGFLQMVMPMWNVVMAAHGATTSVVTDPIYIRRGIFQGDSLSPLLFCLGINPISQILNNYYFKGYKLKDDSIINHLLYMDDLKIYANNKTNLKVLIDSTEIFSRDIGMQFGLNKCNVLHLVAGRRYQHQGSGHVLLSGEEFRHLQENEKYKYLGINEAGNIDHAEVRQQIQKEYFRRVKSLTTSYLNARNLLRAINTYAVPVLLYSFGIINYKSSDIRKIDVKTRKLLAMKNTHQQKSDVERLYLPIEEGGRGLTNIETLYKTQIIKFKAYIETEKDYLLRAIAEHDRNKDKYSIHKEAGSYLTDLGLEQNKNYVNRDINKAIIRTRVGKLKAKPLHGQFYKSVLEKGNIDRAQSFRWFRKQSVPPSLESAVFAIQDQAVITRQHERDILKKAIDGKCRLCLAKDETAQHIISGCEKLAGTYYTKRHNNIVQYVFWTLGKKHNFNVSNLWWQDHLTQPLVKENATAKLMWEMPVQTDTTITHNRPDIIYINKEENHTYLIDITIPSDYNIGAKEIEKLSKYHPLKNEITRLWKRPTTIVPIVVGATGVVAKNLHSYCKLLNSNININIMQKQAALHTTTILSKILGNSAYIGETESPSP

SEQ ID NO: 8520 - protein, 1284 aa, Hydriomena furcata
METMSNRNSRIWSLPGGDRRGASGADAGRYSIRTIGDGGLRGRPSVGEPEQSETTQQMPGDTLRSREISPTSSAGAPEVTTGSSTTVSDDARRKWSEVELHELMFCFFKAKVGGAGYIKRFEKLFKDRNPDNPKVQKFTGNMLANQARSILTRKILSTQVLDQIKDRAEESSIQNLNENIDSTLDSNIQTPPRITPTQTSIANITPNSITHTQQYQTVTESDEQISPENNVDQVYQTVTESDEQISPENNVDQVGAPAEVVVDENQDPIIIQFLEILAETKEISVENRENLPKPNFNKQFIQNLNIINNFLPSLLITNTSLREINDIIYASAKTLISNNNQNSYTNPSTRKPKQDPPWKTRLKNKIDDLRKELARLIEIKRGNNSRTMNRVRLKLFNKYNIINETDLDYRIELHTQKVKAIAGRIKRYSDMNDRKLQNKLFQENQRKFYRSLNGEQQVPTQIPTKGEIQQFWSSILSEPVPYNTGARWIKEVEESMDEVGEEHTFREIDIDKLKTAIRKIRNWKAPGLDKIQNYYLKYLTSTHKYIAQLFDRIIKGTEPVDSWFTTGMVVLIPKNENTEDPKNWRPIACLPTMYKLLTSVIANELYKHCDENDILAPEQRGCRRRARGCKDHLMINKAILEDAHQCNKNLSMGWVDYQKAFDSISHEWLLKVLDIYKCPPVIKGFLEIVMPTWNVVMKAYGANASVTTDSIYIRRGIFQGDSLSPLLFCLGLNPLSLVLNTYNLKGYKLKDNCTINHLLYMDDLKLYANTPNNLKILIDSTEIFTEDIGMKFGLSKCNVLHLAKGRRQEHDGRGHVLLSGEEFEHLKSDEQYKYLGIQESGKIDHHQTRQKIQKEYFRRVKCLNKSHLNSRNLLRSINIYAVPVLLYTFGIINYKTSDLKKIDIKTRKILTMNKAHQQKAEVERLYLPIEEGGRGLTNLEMLYKTQIIKYKKYLENEQDHIIKAIVKHDKNRVKYSIHKESKVNLAEIGLRCEENYTDRELSNAVINTKINIWKTKPLHGQFHKKVLDKENIDKPFSFKWIKKQPVTPGLESSIFAIQDQAVVTRQHERDIFKRAVDGKCRLCLTKDETTQHIVSGCEKLAGTYYIKRHNNIVQYVYWTLAKKHSFEVSSMWWKETLTQPQVKENDTAKLMWEIPVQTDVTIVHNRPDIIYINKLEKKTYLIDVTVPSDYNIGAKEIEKLSKYHALKTEITRLWKTPTEVIPIVVGATGIIAKSLHRYCNKLDSHINIHIIQKQAAIHTVTIITKVLGDTVFINRGANNSSERV

SEQ ID NO: 8521 - protein, 1292 aa, Clostera curtula
MMMERNNGKRIGSLPGGERRGTSRADAGRDSMRTVSGSLLNRRARAGDPEETTAELIRSVDDALQSGESSPTNSAGTSTETTTRSILNDDARRKWSQEELEELMFCYFKAKAQGSGYIKRFHKLFADRNPHNPKITKFTGNTLSNQARSIITRKMLSTEILSEIKLRAEQSITSATNTTTTQTLIETPVAYIDTVQRHQIIDQGPTLPNNDIIPNNNIQPTYTEINTQSENILQTSTQHTADSEIASQYEHMSWVTLNQIIESSDTALHDSPDGQDPNDIILDFLQTLSETKETLITDRKHLPKPKFNKQFIHNLNQINEYIPKILNTESNLREINDVIYATAKTLIIKNGQVPFTPSKTIKPKTDPPWKRRITEKIGNIRKEIGQLVEIRKGTNSRHMQKIKYKLYNKYNIFTQQDLDYEIEILEQKLKALAGRIKRYDEINRRKEQNRMFHQNQHTFYRTLNREQQAPRNIPSKNTIQDFWTTLLSQPITYNQNAPWIVDLETETTGFSQHNFNTIDKNKLVTALKKLQNWKTPGIDKVQNYYIKYLTNTHEHIVRIYNRILNRTEPLEEWFTMGQVILIPKNENTREPQNWRPIACLPTLYKILTSIISNELYIHCENNEILQPEQRGCRRHVRGCKDHLMVNKAILEDAHKSKKNLSMGWIDYRKAFDSMSHEWLIKILSIYKSPQIIIDFLQLVMPTWKVIMTARGTNDYITTDPIFIRRGIFQGDSLSPLLFCIGLNPLSQILNKYQSKGYKIKDNIHINHLLYMDDLKIYANNKHNLKVMLHSTEIFTRDIGMEFGLDKCNILHLDSGKRSEHQGEGHVLLSGDEFRHLNAGQHYKYLGINESGKIDHSEVRQQIQKEYFHRIKRLTNSHLNSRNLLKAINIYAVPVLMYTFGIINFKTSDLKKIDTKTRKLLAINKAQKQKADVGRLYLPLEEGGRGLTNIEMLHKTQIIKYKYYLQQKTDHIIETILNSDRTKDKYSIHKEARSNLEEIGLNSSGTYLDKEIRNAVTKTEINKWKSKALHGQFRKSVLEKENIDKEYSFRWLKKQPISPTLESSVFAIQDQAIVTRQHERDIQKKAVDGKCRLCSTKDETIQHIVSGCEMLAGTYYTKRHNNIVQYIYWTLCKKHNFEVSNLWWQQHLTKPEVKENDSAKLMWEIPVQTDVTVSHNRPDIIYINKTENKIYLIDITVPSDYNIGPKEIEKLSKYNLLKNEVTRLWKMPTEVIPIVIGSTGVIAKSLHRYIDTLNSNINIHIIQKQAAIHTITIVNKVMGNTMFVDREPGIASP

SEQ ID NO: 8522 - protein, 1292 aa, Clostera curtula
MMMERNNGKRIGSLPGGERRGTSRADAGRDSMRTVSGSLLNRRARAGDPEETTAELIRSVDDALQSGESSPTNSAGTSTETTTRSILNDDARRKWSQEELEELMFCYFKAKAQGSGYIKRFHKLFADRNPHNPKITKFTGNTLSNQARSIITRKMLSTEILSEIKLRAEQSITSATNTTTTQTLIETPVAYIDTVQRHQIIDQGPTLPNNDIIPNNNIQPTYTEINTQSENILQTSTQHTADSEIASQYEHMSWVTLNQIIESSDTALHDSPDGQDPNDIILDFLQTLSETKETLITDRKHLPKPKFNKQFIHNLNQINEYIPKILNTESNLREINDVIYATAKTLIIKNGQVPFTPSKTIKPKADPPWKRRITEKIGNIRKEIGQLVEIRKGTNSRHMQKIKYKLYNKYNIFTQQDLDYEIEILEQKLKALAGRIKRYDEINRRKEQNRMFHQNQHTFYRTLNSEQQAPRNIPSKNSIQDFWTTLLSQPITYNKNAPWIVDVETETTGFSQHNFNTIDKNKLVTALKKLQNWKTPGIDKVQNYYIKYLTNTHEHIVRIYNRILNRTEPLEEWFTMGQVILIPKNENTREPQNWRPIACLPTLYKILTSIISNELYIHCENNEILQPEQRGCRRHVRGCKDHLMVNKAILEDAHKSKKNLSMGWIDYRKAFDSMSHEWLIKILSIYKSPQIIIDFLQLVMPTWKVIMTARGTNDYITTDPIFIRRGIFQGDSLSPLLFCIGLNPLSQILNKYQSKGYKIKDNIHINHLLYMDDLKIYANNKHNLKVMLHSTEIFTRDIGMEFGLDKCNILHLDSGKRSEHQGGGHVLLSGDEFRHLNAGQHYKYLGINESGKIDHSEVRQQIQKEYFHRIKRLTNSHLNSRNLLKAINIYAVPVLMYTFGIINFKTSDLKKIDTKTRKLLAINKAQKQKADVGRLYLPLEEGGRGLTNIEMLHKTQIIKYKYYLQQKTDHIIETILNSDRTKDKYSIHKEARSNLEEIGLNSSGTYIDKEIRNAVTKTEINKWKSKALHGQFRKSVLEKENIDKEYSFRWLKKQPISPTLESSVFAIQDQAIVTRQHERDIQKKAVDGKCRLCSTKDETIQHIVSGCEMLAGTYYTKRHNNIVQYIYWTLCKKHNFEVSNLWWQQHLTKPEVKENDSAKLMWEIPVQTDVTVSHNRPDIIYINKTENKIYLIDITVPSDYNIGPKEIEKLSKYNLLKNEVTRLWKMPTEVIPIVIGSTGVIAKSLHRYIDTLNSNINIHIIQKQAAIHTIKIVNKVMGNTMFVDREPGIASP

SEQ ID NO: 8523 - protein, 1292 aa, Clostera curtula
MMMERNNGKRIGSLPGGERRGTSRADAGRDSMRTVSGSLLNRRARAGDPEETTAELIRSVDDALQSGESSPTNSAGTSTETTTRSILNDDARRKWSQEELEELMFCYFKAKAQGSGYIKRFYKLFTDRNPHNPKITKFTGNTLSNQARSIITRKMLSTEILNEIKSRADQLITSATNTTTTQTLIETPVAYIDTVQHHQILDQGTTLPNNDIIPNNNIQPTYTEINTQSENILQTSTQHTADSEIASQYEHMSWVTLNQIIESSDTALHDSPDGQDPNDIILDFLQTLSETKETLITDRKHLPKPKFNKQFIHNLNQINEYIPKILNTESNLREINDVIYATAKTLIIKNGQVPFTPSKTIKPKADPPWKRRITEKIGNIRKEIGQLVEIRKGTNSRHMQKIKYKLYNKYNIFTQQDLDYEIEILEQKLKALAGRIKRYDEINRRKEQNRMFHQNQHTFYRTLNREQQAPRNIPSKNTIHDFWTTLLSQPITYNKNAPWIVDVETETTGFSQHNFNTIDKNKLVTALKKLQNWKTPGIDKVQNYYIKYLTNTHEHIVRIYNRILNRTEPLEEWFTMGQVILIPKNENTREPQNWRPIACLPTLYKILTSIISNELYIHCENNEILQPEQRGCRRHVRGCKDHLMVNKAILEDAHKSKKNLSMGWIDYRKAFDSMSHEWLIKILSIYKSPQIIIDFLQLVMPTWKVIMTARGTNDYITTDPIFIRRGIFQGDSLSPLLFCIGLNPLSQILNKYQSKGYKIKDNIQINHLLYMDDLKIYANNKHNLKVMLHSTEIFTRDIGMEFGLDKCNILHLDSGKRSEHQGGGHVLLSGDEFRHLNAGQHYKYLGINESGKIDHSEVRQQIQKEYFHRIKRLTNSHLNSRNLLKAINIYAVPVLMYTFGIINFKTSDLKKIDTKTRKLLAINKAQKQKADVGRLYLPLEEGGRGLTNIEMLHKTQIIKYKYYLQQKTDHIIETILNSDRTKDKYSIHKEARSNLEEIGLNSSGTYIDKEIRNAVTKTEINKWKSKALHGQFRKSVLEKENIDKEYSFRWLKKQPISPTLESSVFAIQDQAIVTRQHERDIQKKAVDGKCRLCSTKDETIQHIVSGCEMLAGTYYTKRHNNIVQYIYWTLCKKHNFEVSNLWWQQHLTKPEVKENDSAKLMWEIPVQTDVTVSHNRPDIIYINKTENKIYLIDITVPSDYNIGPKEIEKLSKYNLLKNEVTRLWKMPTEVIPIVIGSTGVIAKSLHRYIDTLNSNINIHIIQKQAAIHTITIVNKVMGNTMFVDREPGIASP

SEQ ID NO: 8524 - protein, 1292 aa, Clostera curtula
MMMERNNGKRIGSLPGGERRGTSRADAGRDSMRTVSGSLLNRRARAGDPEETTAELIRSVDDALQSGESSPTNSAGTSTETTTRSILNDDARRKWSQEELEELMFCYFKAKAQGSGYIKRFHKLFTDRNPHNPKITKFTGNTLSNQARSIITRKMLSTEILSEIKLRAEQSITSATNTTTTQTLIETPVAYIDTVQRHQIIDQGPTLPNNDIIPNNNIQPTYTEINTQSENILQTSTQHTADSEIASQYEHMSWVTLNQIIESSDTALHDSPDGQDPNDIILDFLQTLSETKETLITDRKHLPKPKFNKQFIHNLNQINEYIPKILNTESNLREINDVIYATAKTLIIKNGQVPFTPSKTIKPKADPPWKRRITEKIGNIRKEIGQLVEIRKGTNSRHMQKIKYKLYNKYNIFTQQDLDYEIEILEQKLKALAGRIKRYDEINRRKEQNRMFHQNQHTFYRTLNREQQAPRNIPSKNTIQDFWTTLLSQPITYNKNAPWIVDVETETTGFSQHNFNTIDKNKLVTALKKLQNWKTPGIDKVQNYYIKYLTNTHEHIVRIYNRILNRTEPLEEWFTMGQVILIPKNENTREPQNWRPIACLPTLYKILTSIISNELYIHCENNEILQPEQRGCRRHVRGCKDHLMVNKAILEDAHKSKKNLSMGWIDYRKAFDSMSHEWLIKILSIYKSPQIIIDFLQLVMPTWKVIMTARGTNDYITTDPIFIRRGIFQGDSLSPLLFCIGLNPLSQILNKYQSKGYKIKDNIHINHLLYMDDLKIYANNKHNLKVMLHSTEIFTRDIGMEFGLDKCNILHLDSGKRSEHQGEGHVLLSGDEFRHLNAGQHYKYLGINESGKIDHSEVRQQIQKEYFHRIKRLTNSHLNSRNLLKAINIYAVPVLMYTFGIINFKTSDLKKIDTKTRKLLAINKAQKQKADVGRLYLPLEEGGRGLTNIEMLHKTQIIKYKYYLQQKTDHIIETILNSDRTKDKYSIHKEARSNLEEIGLNSSRTYIDKEIRNAVTKTEINKWKSKALHGQFRKSVLEKENIDKEYSFRWLKKQPISPTLESSVFAIQDQAIVTRQHERDIQKKAVDGKCRLCSTKDETIQHIVSGCEMLAGTYYTKRHNNIVQYIYWTLCKKHNFEVSNLWWQQHLTKPEVKENDSAKLMWEIPVQTDVTVSHNRPDIIYINKTENKIYLIDITVPSDYNIGPKEIEKLSKYNLLKNEVTRLWKMPTEVIPIVIGSTGVIAKSLHRYIDTLNSNINIHIIQKQAAIHTITIVNKVMGNTMFVDREPGIASP

SEQ ID NO: 8525 - protein, 1292 aa, Clostera curtula
MMMERNNGKRIGSLPGGERRGTSRADAGRDSMRTVSGSLLNRRARAGDPEETTAELIRSVDDALQSGESSPTNSAGTSTETTTRSILNDDARRKWSQEDLEELMFCYFKAKAQGSGYIKRFHKLFTDRNPHNPKITKFTGNTLSNQARSIITRKMLSTEILSEIKLRAEQSITSATNTTTTQTLIETPVAYIDTVQRHQVIDQGPTLPNNDIIPNNNIQPTYTEINTQSENILQTSTQHTADSEIASQYEHMSWVTLNQIIESSDTALHDSPDGQDPNDIILDFLQTLSETKETLITDRKHLPKPKFNKQFIHNLNQINEYIPKILNTESNLREINDVIYATAKTLIIKNGQVPFTPSKTIKPKTDPPWKRRITEKIGNIRKEIGQLVEIRKGTNSRHMQKIKYKLYNKYNIFTQQDLDYEIEILEQKLKALAGRIKRYDEINRRKEQNRMFHQNQHTFYRTLNREQQAPRNIPSKNTIHDFWTALLSQPITYNQNAPWIVDLETETTGFSQHNFNTIDKNKLVTALKKLQNWKTPGIDKVQNYYIKYLTNTHEHIVRIYNRILNRTEPLEEWFTMGQVILIPKNENTREPQNWRPIACLPTLYKILTSIISNELYIHCENNEILQPEQRGCRRHVRGCKDHLMVNKAILEDAHKSKKNLSMGWIDYRKAFDSMSHEWLIKILSIYKSPQIIIDFLQLVMPTWKVIMTARGTNDYITTDPIFIRRGIFQGDSLSPLLFCIGLNPLSQILNKYQSKGYKIKDNIHINHLLYMDDLKIYANNKHNLKVMLHSTEIFTRDIGMEFGLDKCNILHLDSGKRSEHQGEGHVLLSGDEFRHLNAGQHYKYLGINESGKIDHSEVRQQIQKEYFHRIKRLTNSHLNSRNLLKAINIYAVPVLMYTFGIINFKTSDLKKIDTKTRKLLAINKAQKQKADVGRLYLPLEEGGRGLTNIEMLHKTQIIKYKYYLQQKTDHIIETILNSDRTKDKYSIHKEARSNLEEIGLNSSRTYIDKEIRNAVTKTEINKWKSKALHGQFRKSVLEKENIDKEYSFRWLKKQPISPTLESSVFAIQDQAIVTRQHERDIQKKAVDGKCRLCSTKDETIQHIVSGCEMLAGTYYTKRHNNIVQYIYWTLCKKHNFEVSNLWWQQHLTKPEVKENDSAKLMWEIPVQTDVTVSHNRPDIIYINKTENKIYLIDITVPSDYNIGPKEIEKLSKYNLLKNEVTRLWKMPTEVIPIVIGSTGVIAKSLHRYIDTLNSNINIHIIQKQAAIHTITIVNKVMGNTMFVDREPGIASP

SEQ ID NO: 8526 - protein, 894 aa, Clostera curtula
MQKIKYNLYNKYNIFTKQDLDYEIEILEQKLKALAGRIKRYDEINRRKEQNRMFHQNQHTFYRTLNREQQAPRNIPSKNTIQDFWTTLLSQPITYNQNAPWIVDLETETTGFSQHNFNTIDKNKLVTALKKLQNWKTPGIDKVQNYYIKYLTNTHEHIVRIYNRILNRTEPLEEWFTMGQVILIPKNENTREPQNWRPIACLPTLYKILTSIISNELYIHCENNEILQPEQRGCRRHVRGCKDHLMVNKAILEDAHKSKKNLSMGWIDYRKAFDSMSHEWLIKILSIYKSPQIIIDFLQLVMPTWKVIMTARGTNDYITTDPIFIRRGIFQGDSLSPLLFCIGLNPLSQILNKYQSKGYKIKDNIHINHLLYMDDLKIYANNKHNLKVMLHSTEIFTRDIGMEFGLDKCNILHLDSGKRSEHQGEGHVLLSGDEFRHLNAGQHYKYLGINESGKIDHSEVRQQIQKEYFHRIKRLTNSHLNSRNLLKAINIYAVPVLMYTFGIINFKTSDLKKIDTKTRKLLAINKAQKQKADVGRLYLPLEEGGRGLTNIEMLHKTQIIKYKYYLQQKTDHIIETILNSDRTKDKYSIHKEARSNLEEIGLNSSRTYIDKEIRNAVTKTEINKWKSKALHGQFRKSVLEKENIDKEYSFRWLKKQPISPTLESSVFAIQDQAIVTRQHERDIQKKAVDGKCRLCSTKDETIQHIVSGCEMLAGTYYTKRHNNIVQYIYWTLCKKHNFEVSNLWWQHHLTKPEVKENDSAKLMWEIPVQTDVTVSHNRPDIIYINKTENKIYLIDITVPSDYNIGPKEIEKLSKYNLLKNEVTRLWKMPTEVIPIVIGSTGVIAKSLHRYIDTLNSNINIHIIQKQAAIHTITIVNKVMGNTMFVDREPGIASP

SEQ ID NO: 8527 - protein, 1292 aa, Clostera curtula
MMMERNNGKRIGSLPGGERRGTSRADAGRDSMRTVSGSLLNRRARAGDPEETTAELIRSVDDALQSGESSPTNSAGTSTETTTRSILNDDARRKWSQEELEELMFCYFKAKAQGSGYIKRFHKLFTDRNPHNPKITKFTGNTLSNQARSIITRKMLSTEILSEIKLRAEQSITSATNTTTTQTLIETPVAYIDTVQRHQIIDQGPTLPNNDIIPNNNIQPTYTEINTQSENILQTSTQHTADSEIASQYEHMSWVTLNQIIESSDTALHDSPDGQDPNDIILDFLQTLSETKETLITDRKHLPKPKFNKQFIHNLNQINEYIPKILNTESNLREINDVIYATAKTLIIKNGQVPFTPSKTIKPKTDPPWKRRITEKIGNIRKEIGQLVEIRKGTNSRHMQKIKYKLYNKYNIFTQQDLDCEIEILEQKLKALAGRIKRYDEINRRKEQNRMFHQNQHTFYRTLNREQQAPRNIPSKNTIQDFWTTLLSQPITYNQNAPWIVDLETETTGFSQHNFNTIDKNKLVTALKKLQNWKTPGIDKVQNYYIKYLTNTHEHIVRIYNRILNRTEPLEEWFTMGQVILIPKNENTREPQNWRPIACLPTLYKILTSIISNELYIHCENNEILQPEQRGCRRHVRGCKDHLMVNKAILEDAHKSKKNLSMGWIDYRKAFDSMSHEWLIKILSIYKSPQIIIDFLQLVMPTWKVIMTARGTNDYITTDPIFIRRGIFQGDSLSPLLFCIGLNPLSQILNKYQSKGYKIKDNIHINHLLYMDDLKIYANNKHNLKVMLHSTEIFTRDIGMEFGLDKYNILHLDSGKRSEHQGEGHVLLSGDEFRHLNAGQHYKYLGINESGKIDHSEVRQQIQKEYFHRIKRLTNSHLNSRNLLKAINIYAVPVLMYTFGIINFKTSDLKKIDTKTRKLLAINKAQKQKADVGRLYLPLEEGGRGLTNIEMLHKTQIIKYKYYLQQKTDHIIETILNSDRTKDKYSIHKEARSNLEEIGLNSSRTYIDKEIRNAVTKTEINKWKSKALHGQFRKSVLEKENIDKEYSFRWLKKQPISPTLESSVFAIQDQAIVTRQHERDIQKKAVDGKCRLCSTKDETIQHIVSGCEMLAGTYYTKRHNNIVQYIYWTLCKKHNFEVSNLWWQQHLTKPEVKENDSAKLMWEIPVQTDVTVSHNRPDIIYINKTENKIYLIDITVPSDYNIGPKEIEKLSKYNLLKNEVTRLWKMPTEVIPIVIGSTGVIAKSLHRYIDTLNSNINIHIIQKQAAIHTITIVNKVMGNTMFVDREPGIASP

SEQ ID NO: 8528 - protein, 907 aa, Dryas iulia
MQRIKENLYYKYNISNNQELENTIENLKQKTKALAGRIKRYEDMNNRKVQNKMFQENQHKFYQSLNGKQHIPKEIPTKDSIETFWSNLLSNPIPYNKNATWLTELESRSKNINQCNFQSIDINKLKIALKKLSNWKTPGIDKIQNYYLKNLTNLHEPITNVYNRILNRTESIEEWFTTGHVILIPKTDHTQEPQNWRPIACLPTMYKLLTSIIANELYIHCDNNNIIEPEQRGCRRHVRGCKDHLMINKLILEDSHKCQKNLSMGWVDYRKAFDSISHEWLIKVLNLYKCPHIIIEFLEMVMSMWNVIMTARGANDYVTTDSIFIRRGIFQGDSLSPLLFCIGINPLSQILNKYVTKGYKLEDGTIINHLLYMDDLKLYANNKNNLKILLHSTEIFTQDIGMQFGLNKCNILHLKSGRRNEFSGEDGHVLLSGEEFEHLKVGQKYKYLGINEDGTIDHSEIRQQLQKEYNRRIKCITNSHLNSRNLIKAINTYAVPVLLYSFGVINYTTKDLSKIDTKTRKILAMNEAQRQKADVGRLYLAIEEGGRGLTNIETLHRTQIIKYRKYLEGQKDYIIKAIINNDKNKDKYSIYKQGKKNLTYIGLHAEGNYTDKEIKNSITKKEISKWKAKPLHGQFYKAVLERENIDREFSFKWLKKQPVSPKLESSIFALQDQAVMTKQFERDIIKKSVDGKCRLCLAKDETVRHIVSGCEKLAGSYYTKKHNNIVKYIYWALLKKHEFDISPLWWKYDLIQPEVKENEAAKLMWEIPVQTDVTVNHNRPDIIYINKVENKIYLIDITIPTDYNIDAKEIEKLSKYHLLKTEITRLWKMPTEVIPVVIGATGIVAKGIHRYVNKLDANINIHIIQKQAAIHTVTILSKVLGDSGDFSFLKRNPNLLFPEGLRVEVRN

SEQ ID NO: 8529 - protein, 1204 aa, Blastobasis lacticolella
MRRSNRIKHKSTAQSPTAAGNGSAENSSSSPISSTQSLFASPSSSPQWFQDPPSSKSTTVSPMSSDVAQDFLVPISDSNIAAIPFMEVNNSNLHMWPLPGGDRRGTSGADAGRDSLRTVGGGGSRGRPSVGEYEKRESAQCPGVTLRSGDISPISSAGMPEVTTGSSNLNDDARRKWSEPELHELMFCYFKAKAEGPGYIKRFERLFKERNPGNPKVRKFTGNTLSNQARSIITRKCLSSQVLDEIKSQAENIALERHEYHIPSLPVSQITPISHPITNTPMSDEHTNDINTQSLETLITNTPTQHSVTSINLHTIPEAIADQPTFTPDIEVDENQDPLIMQLLQILAETKEITIENRKTLPKPNFTKQFIQNLNSINKYLPRLLETNTSLREINDIIYASAKTLIINNNQKPYTPSSNRQSKRDPPWKIRLRKKIDVFRKELARLIEIKRGNNSRAMNRIKQELFTKYSIINDQDLDYTIELHTQKVKALAGRIKRYNDMNESKTQNTLFHQNQHKFYRSLNGEQLAPTEIPSKDAVQDFWSHILSDPISYNSGAQWISEVEQSVDQVDTHTFTEIDVEMLKVAIKKTHNWKAPGVDKIQNYYIKYLTSTHTYIAKLFDRIMKGAEQVDHWFTTGMVVLIPKNENTRDPRNWRPIACLPTMYKLLTSILANELYIHCERNNVLAPEQRGCRRRVRGCKDHLMINKAILEDAHQNQKSLSMGWIDYRKAFDSISHEWLLKVLDIYQCPPAIKGFLKIVMPYWKVVMTACGANNSITTDPIYIRRGIFQGDSLSPLLFCLGLNPLSQILNNYNTKGYKLKDNGHINHLLYMDDLKLYANNKNNLKVLIDSTEIFTKDIGMKFGLDKCNVLHLVKGRRQDTNGRGHILLNGEEFEQLKIGDKYKYLGVHESGKIDHNEARQQVQKEYIRRVKCLTNSHLNARNMLKSINTYAVPVLLYTFGIINYKNSDLKKIDIKTRKLLSISKAHQQKADIERLYLPIEEGGRGLMNLEMLHKTQIIKYKKYLDIEQDHIIKAIVKHDINKDKYSISKESQSNLQEIGLTSEGEYSDKQIKDAVIKTKINIWKVKPLHGQFYRKVIEKENIDKDHSFKWLKKQSISARLESSVFAIQDQAVVTKQHERDVLKRAVDGRCRLCLAKDETAQHIASGCEKLAGTYYTKRHNNIVQYVYWTLAKKHKFDVSHLWWKE

SEQ ID NO: 8530 - protein, 993 aa, Blastobasis lacticolella
MSDEHTNDINTQSLETLITNTPTQHSVTSIHLHTIPEAIADQPTFTPDIEVDGNQDPLIMQLLQILAETKEITIENRKTLPKPNFTKQFIQNLNSINKYLPRLLETNTSLREINDIIYASAKTLIVNNNQKPYTPSSNRQSKRDPPWKIRLRKKVDVFRKELARLIEIKRGNNSRAMNRIKQELFTKYSIINDQDLDYTIELHTQKVKALAGRIKRYNDMNESKTQNTLFHQNQHKFYRSLNGEQLAPTEIPSKDAVQDFWSHILSEPISYNSGAQWISEVEQSVDQVDTHTFTEIDVEMLKVAIKKTHNWKAPGVDKIQNYYIKYLTSTHTYIAKLFDRIMKGAEQVDHWFTTGMVVLIPKNENTRDPRNWRPIACLPTMYKLLTSILANELYIHCERNNVLAPEQRGCRRRVRGCKDHLMINKAILEDAHQNQKSLSMGWMSYRKAFDSISHEWLLKVLDIYQCPPAIKGFLKIVMPYWKVVMTACGANNSITTDPIYIRRGIFQGDSLSPLLFCLGLNPLSQILNNYNTKGYKLKDNGHINHLLYMDDLKLYANNKNNLKVLIDSTEIFTKDIGMKFGLDKCNVLHLVKGRRQDHNGRGHILLNGEEFEQLKIGDKYKYLGVHESGKIDHNEARQQVQKEYIRRVKCLTNSHLNARNMLKSINTYAVPVLLYTFGIINYKNSDLKKIDIKTRKLLSISKAHQQKADIERLYLPIEEGGRGLMNLEMLHKTQIIKYNKYLDIEQDHIIKAIVKHDINKDKYSISKESQSNLQEIGLTSEGEYSDKQIKDAVIKTKINIWKVKPLHGQFYRKVIEKENIDKDHSFKWLKKQSISARLESSVFAIQDQAVVTKQHERDVLKRAVDGRCRLCLAKDETAQHIASGCEKLAGTYYTKRHNNIVQYVYWTLAKKHKFDVSHLWWKEELKQPQVKENDTAKLMWDIPVQTDRTIVHNRPDIIYTNKLKNKTYLIDIYLFYLFKTSCTLQYNGGLKAT

SEQ ID NO: 8531 - protein, 1359 aa, Blastobasis lacticolella
MRRSNRIKHKSTAQSPTAAGNGSAENSSSSPISSTQSLFASPSSSPQWFQDPPSSKSTTVSPMSSDVAQDFLVPISDSNIAAIPFMEVNNSNLHMWPLPGGDRRGTSGADAGRDSLRTVGGGGSRGRPSVGEYEERESDQCPGVTLRSGDISPISSAGMPEVTTGSSNLNDDARRKWSEPELHELMFCYFKAKAEGPGYIKRFERLFKERNPGNPKVRKFTGNTLSNQARSIITRKFLSSQVLDEIKSQAENIALERHEYHIPSLPVSQITPISHPITNTPMSDEHTNDINTQSLETFITNTPTQHSVTSINLHTIPEAIADQPTFTPDIEVDENQDPLIMQLLQILAETKEITIENRKTLPKPNFTKQFIQNLNSINKYLPRLLETNTSLREINDIIYASAKTLIINNNQKPYTPSSNRQSKRDPPWKIRLRKKVDVFRKELARLIEIKRGNNSRAMNRIKQELFTKYSIINDQDLDYTIELHTQKVKALAGRIKRYNDMNESKTQNTLFHQNQHKFYRSLNGEQLAPTEIPSKDAVQDFWSHILSDPISYNSGAQWISEVEQSVDQVDTHTFTEIDVEMLKVAIKKTHNWKAPGVDKIQNYYIKYLTSTHTYIAKLFDRIMKGAEQVDHWFTTGMVVLIPKNENTRDPRNWRPIACLPTMYKLLTSILANELYIHCERNNVLAPEQRGCRRRVRGCKDHLMINKAILEDAHQNQKSLSMGWIDYRKAFDSISHEWLLKVLDIYQCPPAIKGFLKIVMPYWKVVMTACGANNSITTDPIYIRRGIFQGDSLSPLLFCLGLNPLSQILNNYNTKGYKLKDNGHINHLLYMDDLKLYANNKNNLKVLIDSTEIFTKDIGMKFGLDKCNVLHLVKGRRQETNGRGHILLNGEEFEQLKIGDKYKYLGVHESGKIDHNEARQQVQKEYIRRVKCLTNSHLNARNMLKSINTYAVPVLLYTFGIINYKNSDLKKIDIKTRKLLSISKAHQQKADIERLYLPIEEGGKGLMNLEMLHKTQIIKYKKYLDIEQDHIIKAIVKHDINKDKYSISKESQSNLQEIGLTSEGEYTDKQIKDAVIKTKINIWKVKPLHGQFYRKVIEKENIDKDHSFKWLKKQSISARLESSVFAIQDQAVVTKQHERDVLKRAVDGRCRLCLAKDETAQHIASGCEKLAGTYYTKRHNNIVQYVYWTLAKKHKFDVSHLWWKEELKQPQVKENDTAKLMWEIPVQTDRTIVHNRPDIIYTNKLENKTYLIDITVPSDYNIGAKEIEKLSKYHALKTEVTRLWNTPTEVIPIVVGATGMIAKSLHRYCDKLDSHINIHIIQKQAAIHTVTIMSKVLGDTVFVNRGGISNNEEESEQPFP

SEQ ID NO: 8532 - protein, 1359 aa, Blastobasis lacticolella
MRRSNRIKNKNTAQFPTAAGNGSAENSSSSPISSTQSLFASPSSSPQWFQDPPSSKSTTVSPMSSDVAQDFLLPISDSNLAAIPFMEVNNSNLHMWPLPGGDRRGTSGADAGRDSLRTVGGGGSRGRPSVGEYEERESAQCPGVTLRSGDISPISSAGMPEVTTGSSNLNDDARRKWSEPELHELMFCYFKAKAEGPGYIKRFERLFKERNPGNPKVRKFTGNTLSNQARSIITRKFLSSQVLGEIKSQAENIALERHEYHIPSLPVSQITPILHPITNTPMSDEHTNDINTQSLETLITNTPTQHSVTSINLHTIPETIADQPTFTPDIEVDENQDPLIMQLLQILAETKEITIENRKTLPKPNFTKQFIHNLNSINKYLPRLLETNTSLREINDIIYASAKTLIINNNQKPYTPSSNRQSKRDPPWKIRLRKKVDVFRKELARLIEIRRGNNSRAMNRIKQELFTKYSIINYHDLDYTIELHTQKVKALAGRIKRYNDMNESKTQNKLFHQNQHKFYRSLNGEQLAPTEIPSKDAVQDFWSHILSEPISYNSGAQWISEVEQSVDQVDTHTFTEIDVEMLKVAIKKTHNWKAPGVDKIQNYYIKYLTSTHTYIGKLFDRTMKGAEQVDHWFTTGMVVLIPKNENTRDPRNWRPIACLPTMYKLLTSILANELYIHCERNNVLAPEQRGCRRRVRGCKDHLMINKAILEDAHQNQKSLSMGWIDYRKAFDSISHEWLLKVLDIYQCPPAIKGFLKIVMPYWKVVMTACGANNSITTDPIYIRRGIFQGDSLSPLLFCLGLNPLSQILNNYNTKGYKLKDNGHINHLLYMDDLKLYANNKNNLKVLIDSTEIFIKDIGMKFGLDKCNVLHLVKGRRQDTNGRGHILLNGEEFDQLKIGDKYKYLGVHESGKIDYNEARQQVQKEYIRRVKCLTNSHLNARNMFKSINTYAVPVLLYTFGIINYKNSDLKNIDIKTRKLLSISKAHQQKADIERLYLPIEEGGRGLMNLEMLHKTQIIKYKKYLDIEQDHIIRAIVKHDINKDKYSISKESQSNLQEIGLTSEGEYTDKQIKDAVIKTKINIWKVKPLHGQVYRKVIEKENIDKDHSFKWLKKQSISARLESSVFAIQDQAVVTKQHERDVLKRAVDGRCRLCLAKDETAQHIASGCEKLAGTYYTKRHNNIVQYVYWTLAKKHKFDVSHLWWKEELKQPQVKENDTAKLMWEIPVQTDRTIVHNRPDIIYTNKLDNKTYLIDITVPSDYNIGAKEIEKLSKYHALKTEVTRLWNTPTEVIPIVVGATGMIAKSLHRYCDKLGSHINIHIIQKQAAIHTVTIMSKVLGDTVFVNRGGIANNEEESEQPFP

SEQ ID NO: 8533 - protein, 1359 aa, Blastobasis lacticolella
MRRSNRIKHKNTAQSPTAAGNGSAENSSSSPISSTQSLFASPSSSPQWFQDPPSSKSTTVSPMSTDVAQDFLVPISDSNIAAIPFMEVNNSNLHMWPLPGGDRRGTSGADAGRDSLRTVGGGGSRGRPSVGEYEERESAQCPGVTLRSGDISHISSAGMPEVTTGSSNLNDDARRKWSEPELHELMFCYFKAKAEGPGYIKRFERLFKERNPGNPKVRKFTGNTLSNQARSIITRKFLSSQVLGEIKSQAENIALERHEYHIPSLPVSQITPISHPITNTPMSHEHTNDINTQSLETLITNTPTQHSVTSINLHTIPEAIADQPTFTPDIEVDENQDPLIMQLLQILAETKEITIENRKTLPKPNFTKQFIQNLNSINKYLPRLLETNTSLREINDIIYASAKTLIINNNQKPYTPSSNRQSKRDPPWKIRLRKKVDVFRKELARLIEIKRGNNSRAMNRIKQELFTKYSIINDQDLDYTIELHTQKVKALAGRIKRYNDMNESKTQNTLFHQNQHKFYRSLNGEQLAPTDIPSKDAVQDFWSHILSEPISYNSGAQWISEVEQSVDQVDTHTFTEIDVEMLKVAIKKTHNWKAPGVDKIQNYYIKYLTSTHTYIAKLFDRIMKGAEQVDHWFTTGMVVLIPKNENTRDPRNWRPIACLPTMYKLLTSILANELYIHCERNNVLAPEQRGCRRRVRGCKDHLMINKAVLEDAHQNQKSLSMGWIDYRKAFDSISHEWLLKVLDIYQCPPAIKGFLKIVMPYWKVVMTACGANNSITTDPIYIRRGIFQGDSLSPLLFCLGLNPLSQILNNYNTKGYKLKDNGHINHLLYMDDLKLYANNKNNLKVLIDSTEIFTKDIGMKFGLDKCNVLHLVKGRRQDTNGRGHILLNGEEFEQLKIGDKYKYLGVHESGKIDHNEARQQVQKEYIRRVKCLTNSHLNARNMLKSINTYAVPVLLYTFGIINYKNSDLKKIDIKTRKLLSISKAHQQKADIERLYLPIEEGGRGLMNLEMLHKTQIIKYKKYLDIEQDHIIKAIVKHDINKDKYSISKESQSNLQEIGLSSEGEYSDKQIKDAVIKTKINIWKVKPLHGQFYRKVIEKENIDKDHSFKWLKKQSISARLESSVFAIQDQAVVTKQHERDVLKRAVDGRCRLCLAKDETAQHIASGCEKLAGTYYTKRHNNIVQYVYWTLAKKHKFDVSHLWWKEELKQPQVKENDTAKLMWEIPVQTDRTIVHNRPDIIYTNKLENKTYLIDITVPSDYNIGAKEIEKLSKYHALKTEVTRLWNTPTEVIPIVVGATGMIAKSLHRYCDKLDSHINIHIIQKQAAIHTVTIMSKVLGDTVFVNRGGISNNEEESEQPFP

SEQ ID NO: 8534 - protein, 1226 aa, Colias croceus
MHCTLQMTHNTLYTQNNEGTDNREEPFQVSNTQQQQVDDTLRNRDIILTNSAGTLNITTELLNKDARIKWTHTELQELMFCYYKAKAEGPGYIKRLEKLFKDRNLDTKFQKFTGYTLSNQVRTILKRQSISTELLNEIKSRAEQTTESSFFNIHTTTLSEHNNIQVDGTYTTGNSTQITHPVENENTYIQEANITINQEAQTPDITVNEDLDPLILEFLQTLSETKETTIERRALLPKPKFNKTFINNLNKINKYLPYILETNQSLREINNIIYAAAKTLIHINQQKSYVLPDVSRPKIDPPWKRRIKRKIDDIRKELGWFVEIKSGVSSRKMIKIKRSLFEKYRIINEGDLDYNVEILKQKLKAQSGRLIRYDAINQKKVQNSQFTENQHKFFRSLNNKKNVPDKIPSKEDIENFWASILSNPITYNKEAPWIADIHNSADDYEQHSFEEISEDKVKDAIRKTKNWKTPGLDKIQNYYLKTLTNTHKYIAKLFNQILKGQEPIEQWFTTGQVILIPKNDNTQDPKNWRPIACLPTMYKVFTSIIANELYTHCDINKLIAPEQRGCRKRARGCKDHLMINKAILEDAHRNKKNLSMAWVDYRKAFDSISHDWLFKVLEFYKCPAAIGDFLKIVMPMWNVVMTARGLNSSVTTDPIRIRRGIFQGDSLSPLLFCLALNPISQILNRYNNKGYKLKDDTVINHLLYMDDLKIYANNEINLRVLIDSTEIFTRDIGMEFGLNKCNILHMVAGRKTEHYGNGHLLLSGEEFKHLQADENYKYLGINEAGKIDHHTIRLQIQHEYFRRVKSLTSSQLNARNLPKAINIYAVPVLLYTFGVINYKTSDLRKIDVKTRKILAMKKAQQQKAEVERLYLPLEHGGRGLTCLETLHKTQIIKYKTYLENETDRIIKAIFNHDKTKEKYSIVKETQINLTEIGLNQFEIYRDKQLKEAIIRTRITKIKAKPLHGQFYRSVLDKENIDKNQSFRWLNKQKVSPSLESSIFSIQDQAVITRQHERDILKKAVDGKCRLCVVKDETVQHIISGCEKLAGTYYIKRHNNLVQYIFWALAKKHNIEVSKQWWLEHLTLPQVKENMTAKIMWEIPIQTDQTIVHNRPDIIYINKTDNKTYLIDITVPSDYNIGPKEIEKLSKYHPLKNEIARLWNTSAEIIPVVIGATGIVAKSINKYLDKLDANINIQILQKQAAIHSVTIISKVLGNTVFINRDSEPPLP

SEQ ID NO: 8535 - protein, 1414 aa, Colias croceus
MRGSAMVDRLSLATRGNQMKRNNGKHSSYMAGGDSQDATASHVRRSTRLRLNRVGSIEIRSRSSSVTTDELTDDTLQSRDLSPTSSAGTSESTTDTLNENSKQKWSRSEIYELLYCYYIAKRGGPGYIRRLEKIFKDRNADNPKSRRFTGYTLSNQIRSILARQKISLEILQEIQHRAEHTHLTNDTHMHCTLQMTHNTLYTQNNEGTDNREEPFQVSNTQQQQVDDTLRNRDIILTNSAGTLNITTELLNKDARIKWTHTELQELMFCYYKAKAEGPGYIKRLEKLFKDRNLDTKFQKFTGYTLSNQVRTILKRQSISTELLNEIKSRAEQTTESSFFNIHTTTLSEHNNIQVDGTYTTGNSTQITHPVENENTYIQEANITINQEAQTPDITVNEDLDPLILEFLQTLSETKETTIERRALLPKPKFNKTFINNLNKINKYLPYILETNQSLREINNIIYAAATTLIHINQQKSYVLPDVSRPKIDPPWKRRIKRRIDDIRKELGWFVEIKSGVSSRKMIKIKRSLFEKYRIINEGDLDYNVEILKQKLKAQSGRLIRYDAINQKKVQNSQFTENQHKFFRSLNNKKNVPDKIPSKEDIENFWASILSNPITYNKEAPWIADIHNSADDYEQHSFEEISEDKVKDAIRKTKNWKTPGLDKIQNYYLKTLTNTHKYIAKLFNQILKGQEPIEQWFTTGQVILIPKNDNTQDPKNWRPIACLPTMYKVFTSIIANELYTHCDINKLIAPEQRGCRKRTRGCKDHLMINKAILEDAHRNKKNLSMAWVDYRKAFDSISHDWLFKVLEFYKCPAAIGDFLKIVMPMWNVVMTARGLNSSVTTDPIRIRRGIFQGDSLSPLLFCLALNPISQILNRYNNKGYKLKDDTVINHLLYMDDLKIYANNEINLRVLIDSTEIFTRDIGMEFGLNKCNILHMVAGRKTEHYGNGHLLLSGEEFKHLQADENYKYLGINEAGKIDHHTIRLQIQHEYFRRVKSLTSSQLNARNLLKAINIYAVPVLLYTFGVINYKTSDLRKIDVKTRKILAMKKAQQQKAEVERLYLPLEHGGRGLTCLETLHKTQIIKYKTYLENETDRIIKAIFNHDKTKEKYSIVKETQINLTEIGLNQFEIYRDKQLKEAIIRTRITKIKAKPLHGQFYRSVLDKENIDKNQSFRWLNKQKVSPSLESSIFSIQDQAVITRQHERDILKKAVDGKCRLCVVKDETVQHIISGCEKLAGTYYIKRHNNLVQYIFWALAKKHNIEVSKQWWLEHLTLPQVKENMTAKIMWEIPIQTDQTIVHNRPDIIYINKTDNKTYLIDITVPSDYNIGPKEIEKLSKYHPLKNEIARLWNTSAEIIPVVIGATGIVAKSINKYLDKLDANINIQILQKQAAIHSVTIISKVLGNTVFINRDSEPPLP

SEQ ID NO: 8536 - protein, 902 aa, Blastobasis lacticolella
MNRIKQELFTKYSIINDKDLDYTIELHTQKVKALAGRIKRYNDMNESKTQNTLFHQNQHKFYRSLNGEQLAPTEIPSKDAVQDFWSHILSEPISYNSGAQWISEVEQSVDQVDTHTFTEIDVEMLKVAIKKTHNWKAPGVDKIQNYYIKYLTSTHTYIAKLFDRIMKGAEQVDHWFTTGMVVLIPKNENTRDPRNWRPIACLPTMYKLLTSILANELYIHCERNNVLAPEQRGCRRRVRGCKDHLMINKAILEDAHQNQKSLSMGWIDYRKAFDSISHEWLLKVLDIYQCPPAIKGFLKIVMPYWKVVMTACGANNSITTDPIYIRRGIFQGDSLSPLLFCLGLNPLSQILNNYNTKGYKFKDNGHINHLLYMDDLKLYANNKYNLKVLIDSTEIFTKDIGMKFGLDKCNVLHLVKGRRQDINGRGHILLNGEEFEQLKIGDKYKYLGVHESGKIDHNEARQQVQKEYIRRVKCLTNSHLNARNMLKSINTHAVPVLLYTFGIINYKNSDLKKIDIKTRKSLSISKAHQQKADIERLYLPIEEGGRGLMNLEMLHKTQMIKYKKYLDIEQDHIIKAIVKHDINKDKYSISKESQSNLQEIGLTSEGEYSDKQIKDAVIKTKINIWKVKPLHGQFYRKVIEKENIDKDHSFKWLKKQSISARLESSVFAIQDQAVVTKQHERDVLKRAVDGRCRLCLAKDETAQHIASGCEKLAGTYYTKRHNNIVQYVYWTLAKKHKFDVSHLWWKEELKQPQVKENDTAKLMWEIPVQTDRTIVHNRPDIIYTNKLENKTYLIDITVPSDYNIGAKEIEKLSKYHALKTEVTRLWNTPTEVIPIVVGATGMIAKSLHRHCDKLDSHINIHIIQKQAAIHTVTIMSKVLGDTVFVNRGGISNNEEESEQPFP

SEQ ID NO: 8537 - protein, 1359 aa, Blastobasis lacticolella
MRRSNRIKHKSTAQSPTAAGNGSAENSSSSPISSTQSLFASPSSSPQWFQDPPSSKSTTVSPMSSDVAQDFLVPISDSKIAAIPFMEVNNSNLHMWPLPGGDRRGTSGADAGRDSLRTVGGGGSRGRPSVGEYEERESAQCPGVTLRSGDISPISSAGMPEVTTGSSNLNDDARRKWSEPELHELMFCYFKAKAEGPGYIKRFERLFKERNPGNPKVRKFTGNTLSNQARSIITRKFLSSQVLDEIKSQAENIALERHEYHIPSLPVSQITPISHPITNTPMSDEHTNDINTQSLETLITNTPTQHSVTSINLHTIPEAIADQPTFTPDIEVDENQDPLIMQLLQILAETKEITIENRKTLPKPNFTKQFIQNLNSINKYLPRLLETNTSLREINDIIYASAKTLIINNNQKPYTPSSNRQSKRDPPWKIRLRKKVDVFRKELARLIEIKRGNNSRAMNRIKQELFTKYSIINDQDLDYTIELHTQKVKALAGRIKRYNDMNESKTQNTLFHQNQHKFYRSLNGEQLAPTEIPSKDAVQDFWSHILSDPISYNSGAQWISEVEQSVDQVDTHTFTEIDVEMLKVAIKKTHNWKAPGVDKIQNYYIKYLTSTHTYMAKLFDRIMKGAEQVDHWFTTGMVVLIPKNENTRDPRNWRPIACLPTMYKLLTSILANELYIHCERNNVLAPEQRGCRRRVRGCKDHLMINKAILEDAHQNQKSLSMGWIDYRKAFDSISHEWLLKVLDIYQCPPAIKGFLKIVMPYWKVVMTACGANNSITTDPIYIRRGIFQGDSLSPLLFCLGLNPLSHILNNYNTKGYKLEDNGHINHLLYMDDLKLYANNKNNLKVLIDSTEIFTKDIGMKFGLDKCNVLHLVKGRRQDTNGRGHILLNGEEFEQLKTGDKYKYLGVHESGKIDHNEARQQVQKEYIRRVKCLTNSHLNARNMLKSINTYAVPVLLYTFGIINYKNSDLKKIDIKTRKLLSISKAHQQKADIERLYLPIEEGGRGLMNLEMLHKTQIIKYKKYLDIEQDHIIKAIVKHDINKDKYSISKESQSNLQEIGLTSEGEYSDKQIKDAVIKTKINIWKVKPLHGQFYRKVIEKENIDKYHSFKWLKKQSISARLESSVFAIQDQAVVTKQHERDVLKRAVDGRCRLCLAKDETAQHIASGCEKLAGTYYTKRHNNIVQYVYWTLAKKHKFDVSHLWWKEELKQPQVKENDTAKLMWEIPVQTDRTIVHNRPDIIYTNKLENKTYLIDITVPSDYNIGAKEIEKLSKYHALKTEVTRLWNTPTEVIPIVVGATGMIAKSLHRYCDKLDSHINIHIIQKQAAIHTVTIMSKVLGDTVFVNRGGISNNEEESEQPFP

SEQ ID NO: 8538 - protein, 1202 aa, Blastobasis lacticolella
MRGREPRARWAPAFERRAQASERLAAAGGARVARHAAAANRPKRARRCGPRTCRVSVRHTNQFTGNTLSNQARSIITRKFLSSQVLDEIKSQAENIALERHEYHIPSLPVSQITPISHPITNTPMSDEHTNDINTQSLETLITNTPTQHSVTSINLHTIPEAIADQPTFTPDIEVDENQDPLIMQLLQILAETKEITIENRKTLPKPNFTKQFIQNLNSINKYLPRLLETNTSLREINDIIYASAKTLIINNNQKPYTPSSNRQSKRDPPWKIRLRKKVDVFRKELARLIEIKRGNNSRAMNRIKQELFTKYSIINDQDLDYTIELHTQKVKALAGRIKRYNDMNESKTQNTLFHQNQHKFYRSLNGEQLAPTEIPSKDAVQDFWSHILSDPISYNSGAQWISEVEQSVDQVDTHTFTEIDVEMLKVAIKKTHNWKAPGVDKIQNYYIKYLTSTHTYMAKLFDRIMKGAEQVDHWFTTGMVVLIPKNENTRDPRNWRPIACLPTMYKLLTSILANELYIHCERNNVLAPEQRGCRRRVRGCKDHLMINKAILEDAHQNQKSLSMGWIDYRKAFDSISHEWLLKVLDIYQCPPAIKGFLKIVMPYWKVVMTACGANNSITTDPIYIRRGIFQGDSLSPLLFCLGLNPLSQILNNYNTKGYKLKDNGHINHLLYMDDLKLYANNKNNLKVLIDSTEIFTKDIGMKFGLDKCNVLHLVKGRRQDTNRRGHILLNGEEFEQLTTGDKYKYLGVHESGKIDHNEARQQVQKEYIRRVKCLTNSHLNARNMLKSINTYAVPVLLYTFGIINYKNSDLKKIDIKTRKLLSISKAHQQKADIERLYLPIEEGGRGLMNLEMLHKTQIIKYKKYLDIEQDHIIKAIVKHDINKDKYSISKESQSNLQEIGLTSEGEYSDKQIKDAVIKTKINIWKVKPLHGQFYRKVIEKENIDKYHSFKWLKKQSISARLESSVFAIQDQAVVTKQHERDVLKRAVDGRCRLCLAKDETAQHIASGCEKLAGTYYTKRHNNIVQYVYWTLAKKHKFDVSHLWWKEELKQPQVKENDTAKLMWEIPVQTDRTIVHNRPDIIYTNKLENKTYLIDITVPSDYNIGAKEIEKLSKYHALKTEVTRLWNTPTEVIPIVVGATGMIAKSLHRYCDKLDSHINIHIIQKQAAIHTVTIMSKVLGDTVFVNRGGISNNEEESEQPFP

SEQ ID NO: 8539 - protein, 1357 aa, Blastobasis lacticolella
MRRSNRIKHKNTAQSPTAAGNGSAENSSSSPISSTQSLFASPSSSPQWFQDPPSSKSTTVSPMSTDVAQDFLVPISDSNIAAIPFMEVNNSNLHMWPLPGGDRRGTSGADAGRDSLRTVGGGGSRGRPSVGEYEERESAQCPGVTLRSGDISPISSAGMPEVTTGSSNLNDDARRKWSEPELHELMFCYFKAKAEGPGYIKRFERLFKERNPGNPKVRKFTGNTLSNQARSIITRKFLSSQVLGEIKSQAENIALERHEYHIPSLPVSQITPISHPITNTPMSDEHTNDINRQSLETLITNTPTQHSVTSINLHTIPEAIADQPTFTPDIEVDENQDPLIMQLLQILAETKEITIENRKTLPKPNFTKQFIQNLNSINKYLPRLLETNTSLREINDIIYASAKTLIINNNQKPYTPSSNRQSKRDPPWKIRLRKKVDVFRKELARLIEIKRGNNSRAMNRIKQELFTKYSIINDQDLEYTIELHTQKVKALAGRIKRYNDMNESKTQNTLFHQNQHKFYRSLNGEQLAPTEIPSKDAVQDFWSHILSEPISYNSGAPWISEVEQSVDQVDTHTFTEIDVEMLKVAIKKTHNWKAPGVDKIQNYYIKYLTSTHTYIAKLFDRIMKGAEQVDHWFTTGMVVLIPKNENTRDPRNWRPIACLPTMYKLLTSILANELYIHCERNNVLAPEQRGCRRRVRGCKDHLMINKAILEDAHQNQKSLSMGWIDYRKAFDSISHEWLLKVLDIYQCPPAIKGFLKIVMPYWKVVVTACSANNSITTDPIYIRRGIFQGDSLSPLLFCLGLNPLSQILNNYNTKGYKLKDNGQINHLLYMDDLKLYANNKNNLKVLIDSTEIFTKDIGMKFGLDKCNVLHLVKGRRQDINGRGHILLNGEEFEQLKIGDKYKYLGVHESGKIDHNEARQQVQKEYIRRVKCLTNSHLNARNMLKSINTYAVPVLLYTFGIINYKNSDLKKIDIKTRKLLSISKAHQQKADIERLYLPIEEGGRGLMNLEMLHKTQIIKYKKYLDIEQDHIIKAIVKHDINKDKYSISKESQSNLQEIGLTSEGEYSDKQIKDAVIKTKTNIWKVKPLHGQFYRKVIEKENIDKDHSFKWLKKQSISARLESSVFAIQDQAVVTKQHERDVLKRAVDGRCRLCLAKDETAQHIASGCEKLAGTYYTKRHNNIVQYVYWTLAKKHKFDVSHLWWKEELKQPQVKENDTAKLMWEIPVQTDRTIVHNRPDIIYTNKFENKTYLIDITVPSDYNIGAKEIEKLSKYHALKTEVTRLWNTPTEVIPIVVGATGMIAKSLHRYCDKLDSHINIHIIQKQAAIHTVTIMSKVLGDTVFVNRGGIANNEEEQPFP

SEQ ID NO: 8540 - protein, 992 aa, Endotricha flammealis
MLPKAKINKQFLNNLHEINKYLPALFEINQSLQDTNHIIYAAAKTLITNNNQKPYTNRNTMKPRQDPPWKRRIANKIEGFRKEVGRLTEIGKGVTSRHMVKIRRKLYDKYEIFTEIDRERTIEILKQKIKALAGRIKRYEDMNTKKIQNNMFLENQHKLYRNISGQQKLPTTIPSREEIQDFWSPILSEPISYNKQAQWINDIEESTEHVQERHMEEITIEQVKAATQKIHNWKTPGIDKIQNYYLKYFTSSHIQIAKIYTRILKKQEEMEDWFTTGQVILIPKNDKTENPKNWRPIACLPSMYKLLTSILANELYLHCDRNDLLAPEQRGCRRHVRGCKDHLMVNKAILEDAHLAQKNLSMAWIDYRKAFDSISHEWLLKTLDLYKCPSAIKDFLKIVMPKWKVVMNARGINNSITTEPIYVRRGIFQGDSLSPLLFCLAINPITQILNKYNTKGYKLKDSVWINHLLYMDDLKLYANNKNNLKVLIDSTEIFTNDIGMSFGLDKCNILHLQSGRRSDVAGEGHVLISGETFEHLKEKDKYKYLGIHEAGTIEHEQLRAQIQKEYFKRVKHLTNTHLNSRNLIRAINTYAVPVLLYSFGIVNYKTSDLKKIDTKTRKLLAINKIHRQKAEVERLYIPIEEGGRGLMNIEMLHKTQIIKYKEYLDKKDDYLIEAVVQHDRNRTKYSIYKECQSNLDELGLQQDNTYTDAELKDAILKKRITTWKAKPLHGQFRNQVLEKANVDRELSFSWTKKQQISPTLESTIYAIQDQAVVTRQHERDILKKAVDGKCRICLQKDETAQHVISGCEKLAGNYYVKRHNNVVQYVHWTLAKKHNFDVSPFWWKQYLTQPQAIENSEAKLMWEIPVQTDRTVISNRPDIIYINKYTNNTYLIDVTVPSDYNIGAKEIEKLQKYHLLKTEITRLWNTTTTVVPIVIGATGIVAKSLKRYCDSLDSRINIGIMQKQAAMHTSNIITKVLGDTIFVGGDAEPPFP

SEQ ID NO: 8541 - protein, 1153 aa, Protographium marcellus
MYCYYKAKSGGAGYIKRLEIIFKERNPNNPKSNKFTGKTLSNQVRSILSRKSISTELLEQIKRKAEYEQSSSNTLLLDVPEIISQPTDNPDITESSSSRSNQVTDIIYCDNLQQTLTHEEIQLNIQCEEITIINETGTHEVVVNEIQDPIIQKLLQILSEVKETPVEQRKFLPKPNFNQKFLNNFNIINTFLPKLLATNESLREINDIIYAAAKTLIIANQQTPYTPSTTLKLMQDPPWKKRIKQKIENLRKQLGRLLEIKTGINSRRMLKIKQALFAKFKITNEEELNNSVEMLKQKVKALAGRLRRYNEMNEKKKQNKLFAENQHKFFRTLSHNRIKPSIIPKCEDIQNFWTKILSNSISYNTEATWIPEIEKSAENIEPHKFEEINIEKFREAIRKTQNWKTPGIDKIQNYYLKHFTHAHKYIANLFDRIIKHVEPIDSWFTTGQVILIPKNDNTQDPKNWRPIACLPTMYKILTSILANELHVHCEKNEILAPEQRGCRRRARGCKDHLMINKAILEDAHKSQKNLSMAWVDYRKAFDSIPHEWLLKVLDLYKCPPAIRRFLEVVMPTWKVIMTAHGANASVTTGPIHIRRGIFQGDSFSPLLFCLGVNPISQILNKYNFKGYRLKDRTIVNHLLYMDDLKIYANNKTNLKVLIDSTEIFTKDIGMDFGLDKCNVLHLVAGKRKEHLGEGHVLLSGEVFKYLRADQKYKYLGINESGEIHHGDVRQQLEKEYLRRVKNISASRLNARNLFKAINVYAVPVLLYSFGIVNYKISDLKKIDVKTRKLLTAYKIHQQKADKERLYLPIDEGGRGLTNLETLHKIQTIKYKRYLETEKDYILKAILEHDRRKDKYSIVKETNLNLEEIGLRWNENYTEKEITQAIVKTRFEKIKAKPLHGQFYKDVLEKDNIDKVQSFQWLKKQPILPALESTIFAIQDQAITTKQYERDILKKIVNGKCRLCLVKDETAQHIVAGCEKLAGTYYTKRHNNIAQYIFWTLTKKHKFSVGDKWWLEHLTQPVVKENNTGKIMWEIPVQTDVTITHNRPDIIYINKIVNKTYLIDISVPSDYNIGAKEIEKLSKYHALKREITRLWKTPTEVIPIIVGATGIIAKSLHRYCSKLDSNININIIQKQASIHTSTIVSKVLGDTVFI

SEQ ID NO: 8542 - protein, 885 aa, Hemaris fuciformis
MINIKRSLFKKYNINDEIELNKTIELLKQKVKASAGRLRRYEEINDRKNQNTLFAQNQHKFYRSLDNTQHITTQIPAKQDIQNFWTNILSNSIPYNRNATWIEDLENSTDNIDTHQFEGISEEKVKESVRKTQNWKTPGIDKIQNFYLKYFTSTHKYIAKLFDRIIEGSEPIDSWFTTGQVILIPKNDDTFDPKNWRPIACLPTMYKILTSIIANELYIHCDINHIIAPEQRGCRRRVRGCKDHLMINKAILEDAHKCQKNLSMAWVDYRKAFDSMSHEWLLRVLDLYKCPSVIKKFLEIVMPTWNVIMTARGANTSVTTDPIYIRRGIFQGDSLSPLLFCLGINPISQILRKYVLKGYRLKEDTTINHLLYMDDLKIYANSKTNLKVLIDCTEIFTRDIGMEFGLSKCNVLHLIAGRRKQHQGEGHVLLSGEEFKHLQIDKKYKYLGINEAGKIDHGEVRQHIQKEYFRRVKKLSASHLNARNLLRAINIYAVPVLLYTFGVINYKTIDLKNIDIKTRKILAMSKAHQQKAEVERLYLPIEEGGRGLTNLETLHKTQKIKYKSYLETEVDYILKAIVEHDRNKDKYSITKEAQIYQEEIGLRQDENYTDKEIKHAIVKTRIQKIKSKPLHGQFYKAVLEKENIDRVQSFQWLKKQQISPTLESTVFAIQDQAIITRQHERDIMKKPVEGKCRLCLLKDETIQHIISGCEKLAGTYYTKRHNNIVQYIFWTLAKKHKFPISNLWWQEHLLQPQVKENNSAKLMWEIPVQTDNTIVNNRPDIIYINKLQNKTYLIDITVPSDYNIGAKEIEKLSKYHPLKREIARLWKTHTEIIPIVVGATGVVAKSLHRYCSKLDSDININIIQKQASIHTSTIVSKVLGDSIFN

SEQ ID NO: 8543 - protein, 1260 aa, Timochares trifasciata
MENNSYRYRKGPLPGGDRRGTSVAGGGRDRMLASDPRRTGWSGVGDRRGGTSLDATAEESVGVTLRSRGISPSSSAGSLQSTTESVNEDSRKKWSSVELEELMFCYYKAKAGGSGYIKRFEKFFKDRNPHNPKSKKFTGNTLANQVRAVLSRRSISQQILDEIKNKAEQELTLTDTQLSTIPENNTPTQNRSIHAIADTIHIREGTQIVQEHIYTSQETLIQLNAEHIDNMDNSTETHCIEINENQDPIILDFLQILAETKEIQLEDRPFLPKPQFSKLFINNLNKINKYLPTLLNTDQSVREINDVIYAAARTLIINNNQTPFKPSNVKKIKLDPPWKRRLKQKIENFRKELGRLIEIRAGVSSQRMTIIKQKLFSKYNINTNEELNNNIEIIKQKVKALAGRLRRYDEINGRKIQNNLFTENQHKFYRSLNNSQNKPDQIPTQTELQKFWTSILSEPISYNREAQWISEIEKSVTDIQEHNFEEIDVDKVKEAIRKTHNWKTPGIDKVQNYYIKYLTSTHKFIANLYDRIIKGMEPIDSWFVTGQVILIPKDGNTMDPKNWRPIACLPTMYKILTSIIANELNIHCTKNDILAPEQRGCRQGVRGCKDHLMINKAILEDAHKYQKNLSVAWVDYRKAFDSISHEWLLKVLEIYKCPPAIKGFLQMVMPMWNVVMAAHGTTTSVVTDPIYIRRGIFQGDSLSPLLFCLGINPISQILSSYKFKGYKLKDNSIINHLLYMDDLKIYANNKTNLKVLIDSTEIFSRDIGMQFGLNKCNVLHLVGGRRHQHQGHGHSLLSGEEFRHLQEGEKYKYLGINEAGNIDHAEVRQQIEKEYFRRVKSLTNSYLNARNLLRAINTYAVPVLLYTFGIINYKSTDIKKIDIKTRKLLAMKKIHQQKSDIERLYLPIEEGGRGLTNIETLYKTQIIKYKAYIETEIDYLLRVIAEHDRNKDKYSISKDARLYLTDLGLDQNENYIDREISKAIVRTKVGKLKAKPLHGQFYKKVLEKENIDRIQSFRWLRKQSVPPSLESAIFAIQDQAVITRQHERDILKKAIDGKCRLCLTNDETAQHIISGCEKLAGTYYTKRHNNIVQYVFWTLGKKHNFEVSNLWWQDHLTQPQVKENATAKLMWEMPVQTDTTIIHNRPDIIYINKQENHIYLIDITVPSDYNIGAKEIEKLSKYHSLKNEITRLWKRPTTVVPIVVGATGIVAKNLHRYCKLLDSNININIMQKQAALHTTTILSKILGNSAYIGETESPSP

SEQ ID NO: 8544 - protein, 1261 aa, Entheus sp.
MESNSNCNRKGPLPGGDRRGTSVAGGGRDRMLASDPRRTGWSGVGDRACGTSLDATAEEPVDVTLQRGDVFLTSSAGTSQSTTESESEDLRKKWSSIELEELMFCYYKAKAEGPGYIKRFEKLFKDRNPNNAKSRKFSGNTLSNQVRAVLKRRSISEQLLDKIKRKAEQIHNSPNLSLTIIHESDNQIQDLQTDSGSEQIHSYTHSQQHSNYITQEIITHSPIQPNTYHANTVDEIERNTIEVNDEQESIILEFLQILSETKEIQIGNRDFLPKPKFTKQFFVDLHKINKYLPNLLETNQSLREINDIIYAAAKTLIINNNQTPYKQSFIKKAKQDPPWKRRLKQKIESYRKELGRLIETKVEVNTKRMINIKQKLYDKYAINNNEDLNNTIEILKQKVKALAGRLRRYNDINERKIQNKLFSENQHNFYRSLSKTQQNPTQLPTQDQIENFWTSILSKPISYNTHAQWISEIEKSSDNIEEHIFTEIDIDKVKEAIKRTQNWKTPGIDKIQNFYLKYLTSTHIYIAKLFDRIIKGAESVDTWFTTGQVILIPKNNDTIDPKNWRPIACLPTMYKVLTSIIANELYTHCANNDIIAPEQRGCRRKARGCKDHLMINKAILEDAHKCQKNLSLAWIDYRKAFDSISHEWLLKVLEIYKCPPIIKGFLQLIMPMWNVTMKAHGTNVTVITDPIYIRRGIFQGDSLSPLLFCLGINPISHILNNYRFNGYKLKDNNTINHLLYMDDLKIYANNKTNLKVLIDSIEIFSRDIGMQFGLNKCNVLHLVGGRRNYYQGTGHILLSGEEFRHLQANEKYKYLGINEAGKIDHSEVRQQTQKEYFRRVKCLAASHLNARNLLRAINTNAVPVLLYTFGIINYKTADLKKIDVKTRKILSMNKAHQQKSDIERLYLSIEEGGRGLTNIETLYKTQIIKLKSYIDAKQDYIIKTIADHDKHKDKYSITKEAKSNLLEIGLNQTEKYLDRELKSAVTKSKLEKLKSKPLHGQFYKSVLEKANIDKIQSFCWLKKQSVSPTLESALFAIQDQAVITRQFERDILKKAVDGKCRLCLVKDETVQHIISGCEKLAGTYYIKRHNNIVQYIFWTLAKKHNFTVSNLWWQEHLMQPQVKENESAKIMWEIPVQTDVTVMHNRPDIIYINKEEKHTYLIDVTVPSDYNIGAKELEKLSKYHPLKNEIVRLWKTPTTIIPIVVGATGIIGNSLHRYCNKLNSYININIIQKQAAIHTTTILSKILGNSVNAGETESSFP

SEQ ID NO: 8545 - protein, 1340 aa, Spialia phlomidis
MMKRQLRNLRPGPLPGGRRGTLGADAERDSMRTVSGSSLNRRAGVGESEDTTAENTCNADDALQNRASPTYSAGASEMTTTSSAISNDARRRWSQEELHELMYCYFKARSEGPGYIKKFEQLFKERNPNNTKIANFTGNTLSNQARSIIKRKFISTELLEQIKQNAENTNVTDTNIHLDTQQTLNTTTHTLNFAQNPNSPSFNHNSQVENINLEEEEPMNENIDTTQIDNLTRNIYISEDQDPVILEFLQELAEVKETPISERHSLPKPKINKQFIENLRKINDFLPNLLIVNNTLRETNNIIYAAAKTLIQSNGQKPFYTDRIKNQAPNAPWKRRLKSKIEILRKEIGQLTEIGRGTNSRKIVKIKNKLYNKYNIFSQKEHDNTVEILTQKLKAKAGRLRRYEDMNDRKIHNTLFVENEHKFYRNLTKKQQLATEIPTKEAIELFWQNIIGKPIEYNKTATWIKEIEVDLDTEEQTFENISIEQTKKALNKLNNWKTPGIDRIHNYYLKYFTSTHEHITKLFDKIFKGTETFEEWFTTGQVILIPKDGDTKDPKNWRPIACLPTMYKLLTSIVADELYSHCDKNDILAPEQRGCRRRTRGCKDHLMVNKAVLEDAHQSQKNLSMAWIDYQKAFDSISHEWLLKALELYRCPKSIQSFLRLIIPHWKVTMTAYGNNGAITTNSIRIRRGIFQGDSLSPLLFCIGLNPLSQILNKYDMQGFHLKNSIYINHLLYMDDLKIYASNKNNLKVMIDSTEIFTNDIGMNFGLNKCNILHIIGGKRSDIEGEGHVLLSGEEFKHLQNQNTYKYLGINESGKIDHNEVRQQIQKEYFKRVKSLAKTHLNSRNLIKSINTFAIPVLLYSFGIVNYKISDLKAIDTKTRKLLAINKAQQQKADVNRLYIPIDQGGRGLTNIEMLYKSQIIKYNRYLKSEKDHLVKAIEEHDKIRDKYSIHKESKTYCEEIGIQDGVSYTEKELKTAIIKKQVNSWKNKALHGQFLKNVLEKENIDTEFSFRWFKKQPISPTLEASIFSIQDQSIITNQFERDILKKPVSGKCRICQVKDETVQHIVSGCEKLAGTYYTKRHNNLVQYVHWTIAKKHKFEVNKLWWKETLTQPQVIENDTAKIMWEMPVQTDITVTHNRPDIIYINKIENHTYLIDISVPSDYNIGAKEIEKLSKYHLLKTEITRLWKTPTTIIPIIIGGTGIIAKSLHRYCSKIESKINIHILQKQAAIHTSTILSKVLGDTVFVHNTQTQNTQDTQTSPNNQQHSQDTSQAANTQTPSNTHTHNTQTILNTHTSQDTQHSSHALSTSFTNSTMTTQQTTESKPLRRKRGRRRRSRSYT

SEQ ID NO: 8546 - protein, 1349 aa, Spialia ferax
MMKRQLRNLRPGPLPGGRRGTLGADAERDSMRTVSGSSLNRRAGVGESEDTTAEIICDADDALQNRASPTYSAGASETTTTSSAISNDARRRWSQEELYELMYCYFKARSEGPGYIKKFEQLFKERNPNNIKIANFTGNTLSNQARSIIKRKFISTELLEKIKQIAENTNVTDTNIISSIQQTHNTTTQIINCEQNPNTPTLNENSQVENININIEEEEPNNENIDTMQINNLTRNIEINEDQDPIILEFLQVLAEVKETPISERHFLPKAKINKQFIQNMRKINDYLPNLLIVNNTLRETNNIIYAAAKTLIQSNAQTPFYTDKIKNQVPNTPWKRRLKSKIEILRKEIGQLIEIGRGINSRKILKIKNKLYNKHNIFSQKDHDNTVEILTQKLKAKAGRLRRYEDMNERKIHNKQFVENEHKFYRNLTRKQQLASEIPTKEAIESFWQNIIGKPIEYNKKATWIKEIEVDLNIEEHTFENINIEQVKKALNKLNNWKTPGIDRIHNYYLKYFTSTHEHITKLFNKIFKGTETFEEWFTTGQVILIPKDGDTKDPKNWRPIACLPTMYKLLTSIVADELYSHCDKNDILAPEQRGCRRRTRGCKDHLMVNKAVLEDAHQSQKNLSMAWIDYQKAFDSISHEWLLKALELYRCPKSILSFLRLVIPHWKVTMTAYGNNEVITTNPIHIRRGIFQGDSLSPLLFCIGLNPLSQILNKYDMQGFHLKNSIYINHLLYMDDLKIYASNKNNLKVMLDSTEIFTHDIGMNFGLNKCNILNIIGGKRSDVEGEGHVLLSGEEFKHLQNQNTYKYLGINESGKIDHSEVRQQIQKEYFKRIKSLAKTHLNSRNLIKSINTFAVPVLLYSFGIINYKISDLKAIDTKTRKLLAINKAQQQKADVNRLYIPIDQGGRGLTNIEMLYKSQIIKYNRYLKSEKDHLVKAIEEHDKIRDKYSIHKESKTFCEEIGIQDRINYTEKELKTAVIKKHVNIWKSKALHGQFLKNVLEKENIDTEFSFRWLKKQPISPTLEASIFSIQDQSIITNQFERDILKKPVSGKCRICQAKDETVQHIISGCEKLAGTYYTKRHNNLVQYVHWTIAKKHQFEVNKLWWKETLTQPQVIENDTAKLMWEMPVQTDITVNHNRPDIIYINKIENHTYLIDISIPSDYNIGAKEIEKLSKYHLLRTEITRLWKTQTTIIPIIIGGTGIIAKSLHRYCNKIDSKINIHILQKQAAIHTSTILSKVLGDTVFVHNTQTQSTQDNTTEMIPNTQQQSQDIPHTTNTQTTSNAPNTRNIQILSNTHSPQNTQHLSHALSTSSTNSTTNTQHTPRQQLQRRKRGRRRERRIELEVEK

SEQ ID NO: 8547 - protein, 1313 aa, Spialia osthelderi
MMKRQLRNLRPGPLPGGRRGTLGADAERDSMRTVSGSSLNRRAGVGESEDTTAENTCNADDALQNRASPTYSAGASEMTTTSSAISNDARRRWSQEELHELMYCYFKARSEGPGYIKKFEQLFKERNPNNTKIANFTGNTLSNQARSIIKRKFISTELLEQIKQNAENTNVTETNIHLDTQQTLNTTTHTLNYAQNPNSPSFNHNSQVENINLEEEEPMNENIDTTQIDNLTRNIYISEDQDPVILEFLQELAEVKETPISERHSLPKAKINKQFIENLRKINDFLPNLLIVNNTLRETNNIIYAAAKTLIQSNGQKPFYTDRIKNQAPNAPWKRRLKSKIEILRKEIGQLTEIGRGTNSRKIVKIKNKLYNKYNIFSQKEHDNTVEILTQKLKAKAGRLRRYEDMNDRKIHNILFVENEHKFYRNLTKKQQLATEIPTKEAIELFWQNIIGKPIEYNKTATWIKEIEVDLDTEEQTFENISIEQTKKALNKLNNWKTPGIDRIHNYYLKYFTSTHEHITKLFDKIFKGTETFEEWFTTGQVILIPKDGDTKDPKNWRPIACLPTMYKLLTSIVADELYSHCDKNDILAPEQRGCRRRTRGCKDHLMVNKAVLEDAHQSQKNLSMAWIDYQKAFDSISHEWLLKALELYRCPKSIQSFLRLIIPHWKVTMTAYGNNGAITTNPIHIRRGIFQGDSLSPLLFCIGLNPLSQILNKYDMQGFHLKNSIYINHLLYMDDLKIYASNKNNLKVMLDSTEIFTNDIGMNFGLNKCNILHIIGGKRSDIEGEGHVLLSGEEFKHLQNQNTYKYLGINESGKIDHNEVRQQIQKEYFKRVKSLAKTHLNSRNLIKSINTFAIPVLLYSFGIVNYKISDLKAIDTKTRKLLAINKAQQQKADVNRLYIPIDQGGRGLTNIEMLYKSQIIKYNRYLKSEKDHLVKAIEEHDKIRDKYSIHKESKTYCEEIGIQDGVSYTEKELKTAIIKKQVNSWKNKALHGQFLKNVLEKENIDTEFSFRWFKKQPISPTLEASIFSIQDQSIITNQFERDILKKPVSGKCRICQVKDETVQHIVSGCEKLAGTYYTKRHNNLVQYVHWTIAKKHKFEVNKLWWKETLTQPQVIENDTAKIMWEMPVQTDITVTHNRPDIIYINKIENHTYLIDISVPSDYNIGAKEIEKLSKYHLLKTEITRLWKTPTTIIPIIIGGTGIIAKSLHRYCSKIESKINIHILQKQAAIHTSTILSKVLGDTVFVHNTQTQNTQDTQTSPNNQQHSQDTSQAANTQTPSNTHTHNTQTILNTHTSQDTQHSSHALSTSFTNS

SEQ ID NO: 8548 - protein, 1261 aa, Hasora chromus
MIIMERKLKNLRQGPLPGERRGTLGAGAERDSIRTASGSSLNRRAGAGEPEVTTAEVFRDANDALQSRESPTNSAGTLEATTTRSLSTDDARRKWSQEELHELMFCYFKARSQGSGYIKRFEQLFKQRNYNNPKVNKFNGNTLSNQARSIINRNIISQEVLNDIKCRAEEAVSTEHITQLPDTTHTYTNPLHNQHTNPDIQQPTLNNTHSTPDFQVTNISIAENNVRHVEETQTNHMTRNIDTSENQNPLILDFLQILAETKETPINERNFLPKPKFNKQFFDNLHKINEFLSDLLKTNNNLVDTNNIIYAAAKTLIIANGQKPYSTNKNMKPARDPPWKRRLKSKMEIIRKELGQFTEIKNGVKSRKILKAKNNLYNKYNIFTNQEHDNTVEILKQKLKAKSGRLKRYEDMNNRKTQNKLFQENEHKFYRTQSKKQQEVSEIPTKEETEKFWTDILSQPVSFNKTAAWIKETERNNTNIQEHKFDSITTVHVKKALKKAHNWKTPGIDKIQNYYLKYLTSTHEFIAQIFDNILKGKETTDEWFTTGNVILIPKSSNTHDPNNWRPIACLPTMYKLLTSVIADQLYVHCENNHIIAPEQRGCRRHTRGCKDHLMINKAILEDAHLSQKNLSMGWIDYRKAYDSISHEWILYVLDLYKCPKSIKSFLQIVMPSWKVVMTARCNNHSITTDPITVRRGIFQGDSLSPLLFCMAINPLSQILNKYEFKGYHLKDSIYVNHLLYMDDLKVYANNKNNLKVLLDSTEIFTKDIGMIFGLNKCNVLHLTAGRRSGYEGEGHVLLSGEEFQQLQRNETYKYLGINESGKINHNEVRQQIQKEYFNRVKQITKSHLNARNLIKAINTFAIPTLLYSFGIVNYKNSDLKSIDIKTRKILAMNKAQQQKAEVTRLYIPIEAGGRGLINIEMMYKTQIIKYRTYLDTERDELIRAIAVHDKNRETYSIYKEATDFCEELRIQAKSEYTDKELKTAVTLKLINQWKSKSVHGQFLRTVLQKDNIDIQYSFRWLKKQPISPILEASTFSIQDQAIITNQFERDILKKPVDGKCRLCLAKDETVQHLVSGCEKLAGTYYTKRHNNIVQYIHWTLAKKHKFDVNSLWWKQTLTKPQVIENDTAKLMWEMPVQTDRTVPHNRPDIIYIDKEQNHAYLIDVSVPSDYNIGPKEIEKLSKYHLLKTEINRLWKMSATVVPVVVGATGIVAKSIHRYCNKLDAEINIHIIQKQAAIHTNNILSKTLGNCLFSGDPELPSP

SEQ ID NO: 8549 - protein, 1348 aa, Spialia mafa
MMKRQLRNLRPGPLPGGRRGTLGADAERDSMRTVSGSSLNRRAGVGETEDTTAEIMCNADDALQNRASPTYSAGASDMTTTSSAISNDARRRWSQEELHELMYCYFKARSEGPGYIKKFEQLFKERNPNNAKIANFTGNTLSNQARSIIKRKFISTELLEQIKQNAENTNVTDTNIISYTQPVHITTTQSLNDEQNTNTSSLNQNLQVENYNINNNVEEEEPMIQNIDAIEINNLTRNIEINEDQEPIILEFLQVLAEVKETPIFERHSLPKAKINKQFLENMRKINDYLPNLLIVNNTLRETNNIIYSAAKTLMQSNGQKPFNTEKIKNQVPNAPWKRRLKSKIDILRKEIGQLIEIGRGINSRKILKIKEKLYNKHNIFSQKDHDNTVEILKQKLKAKAGRLRRYEDMNERKIHNRQFVENEHKFYRNLTRKQQLASEIPTKEAIESFWQNIIGKPIEYNKTATWIKEIEVELNTEENTFENINIEQIKKALNKLSNWKTPGIDRIHNYYLKYLTSTHEHITKLFDKIYKGTETFEEWFTTGQVILIPKDGDTKDPKNWRPIACLPTMYKLLTSIVADELYSHCEKNDILAPEQRGCRRHTRGCKDHLMVNKAVLEDAHQSQKNLSMAWIDYQKAFDSISHEWLLKALEIYHCPKSIQSFLRLVIPHWKVTMTAYGNNEVVTTNPIHIRRGIFQGDSLSPLLFCIGLNPLSQILNKYDMQGFHLKNSIYINHLLYMDDLKIYASNKNNLKVMLDSTEIFTHDIGMNFGLNKCNILHITGGKRSDIEGEGHVLLSGEEFKHLQNQNTYKYLGINESGKIDHSEVRQQIQKEYFKRVKSLVKTHLNSRNLIKSINTFAIPVLLYSFGIINYKISDLKAIDTKTRKLLAINKAQQQKADVNRLYIPVDQGGRGLTNIEMLYKSQIIKYNRYLKSGKDHLVKAIEEHDKVRDKYSIHKESKKYCEEIGLKDRISYTEKELKTAIIKKHINIWKSKALHGQFLKNVLEKENIDTEFSFRWLKKQSISPTLEASIFSIQDQSIVTNQFERDILKKPVSGKCRICQEKDETVQHIISGCEKLAGTYYTKRHNNIVQYVHWTIAKKHKFEVNKLWWKETLTQPQVIENDTAKIMWEMPVQTDITVQHNRPDIIYINKTENHTYLIDISIPSDYNIGAKEIEKLSKYHLLRTEITRLWKTQTTIIPIIVGGTGIIAKSLHRYCNKLDSKINIHILQKQAAIHTSTILSKVLGDTVFVHNAQTESTQDNNIQTSPNTQQQSQDISHTTNTQTTHNTTNTRNTHLSPNTHESQSTQHLSHDLSTPSTNSTANTQHTPKSQQQRRNRGRRKGSRNNNI

SEQ ID NO: 8550 - protein, 1257 aa, Pholisora mejicanus
MMKRQLRNSRTGPLPGGRRGTLGADAERDSMRTVSGSSLSRRAGVGEAESTTAENISNADDALRNRAQPTCSAGASELTTTSSVISDDARRKWSQEELHELMFCYFKARSEGPGYIKRFEQLFKQRNLNNQKIAKFTGNTLSNQARSIINRKFISAELLDQIKHKAEHSSETDTNLFSTTLTVSNTHITQTHTNETNTNITVGNQNSNVENNRNLEEELRVVDTEEQQQIESLIRNIEISEDQDPVILEFLQTLAEVKDMEISERPSLPKAKLNKQFFENLSKINNFLPSLLIINNTLRETNNIIYAAAKTLIQSNGQKPYCTNNIKKQVPNTPWKRRLKSIIEILRKEIGQLTEIGKGITTRKVLKTKDKLYNKYNIFTQQDHDNIVEVLTQKLKAKAGRLRRYEDMNDRKNHNKLFLESEHKFYRSLTGKHQVATEVPTKEAIESFWQNIIGKPINYNNTATWIKEIEESNLDTEELPFESINVEQTKQALSKLSNWKTPGIDKIHNYYLKYLTSTHEHIAKLFDNIFKGTEALEEWFTTGQVILIPKDEDTKDPKNWRPIACLPTLYKLLTSIVAEQLYAHCDKNDILAPEQRGCRRRTRGCKDHLMVNKAILEDAHQSQKNLSMAWIDYRKAFDSISHEWLLKALELYRCPKSIQSFLKLVIPHWKVTMTAYGSNGTITTDPIHIRRGIFQGDSLSPLLFCIGINPLSQILNKYDLQGYQLKNSIFVNHLLYMDDLKVYASNKNNLKVMLDSTEIFTQDIGMSFGLNKCNVLHLTGGRRREIEGEGHILLSGEEFQPLQKNNTYKYLGINESGKIDHSEVRQQIQKEYLKRVKSLVKTHLNSRNLIKSINTFAIPILLYSFGIVNFKISDLKAIDTKTRKLLAINKAHHQKADVNRLYLPTDNGGRGLINIEMLYKTQIIKYNTYLKSGKDHLIKAIVTHDKCRDKYSIQKEGKEYCQEIGIQDRVSYTDKELKAAVIKKHTNSWKSKALHGQFLKGVLEKENIDTEYSFRWIKKQPISPTLEASIFSIQDQSVVTNQFERDIIKKPVDGKCRVCLAKDETVQHIVSGCEKLAGTYYTKRHNNVVQYVHWTLAKKHKFEVNPLWWKQQLTQPQVIENDTAKLMWEMPVQTDITVTHNRPDIIYINKQENHAYLIDVSIPSDYNIGGKEIEKLSKYHLLRTEVTRLWKLPTTIIPIVIGGTGVIAKSLHRYCNKLDSKINIHIMQKQAAIHTSTILTKVLGNSIFAGESDSPSP

SEQ ID NO: 8551 - protein, 893 aa, Zopyrion sandace
MLKVKSVLYSKYNINNRQEHVNTVEILKQRLKAKAGRLKRYEDMNNRKVENKNFIENQHKFYRNMSEKQQVLVETPSKEAIEIFWKNILAQPIAYNKSASWIKEIEENSSEIEETTFDTITIEQVKFAINKLKNWKTPGIDKIHNYYLKYLTSTHEFITKLYNKIFKGQDTIEEWFTTGNVILIPKEGDTKDPKNWRPIACLPTMYKLLTAVIANQLYIHCETNNIIAPEQRGCRRRARGCKDHLMINKAILEDAHQSQKNLSMGWVDYRKAFDSISHEWLLKALDLYKCPEAIKIFLQNMMPSWKVVMTARGQNGTITTDSICVQRGIFQGDSLSPLLFCIAINPLSHILNKYFLKGYHLKESVYINHLLYMDDLKVYAHNKNSLKVLLDSTEIFTRDIGMSFGLNKCNILHLKAGRRSGQEGEGHVLLSGEEFKELQINEKYKYLGINESGKIDHSEVRQQIQKEYLKRVKMLTKTHLNSRNLIKSINTYAIPVLLYTFGVVNFKINDLKAIDTKTRKLLAINKAHQQKADVNRLYIPIEKGGRGLINVEMLYKTQIIKYKNYLKSEKDHIIKAIVVHDKARNKYSIYKEASQFSEEIELQNKDSFTDKELKSAVVGKHLKTWKSKALHGQFLKSVLEKENIDTEFSFRWLKKQSISPTLEAAIFSIQDQSVVTNQFERDIIKKPVDGKCRICLAKDETVQHIVSGCEKLAGTYYTRRHNNIVQYIYWTLAKKHNFDVNPLWWKETLTQPQVIENNTAKIMWEMPVQTDITVAHNRPDIIYTNKQENHTYLIDITVPSDYNIGAKEIEKLSKYHLLKTEVTRLWKTPTTVIPIVIGATGIIAKSLHRYCNRLDSKINIHIIQKQAAIHTSTILSKVLGNSVFVGETESPSP

SEQ ID NO: 8552 - protein, 1274 aa, Oechydrus chersis
MANGALVTYISMKRQLRNLRTGPLPGGRRGTLGAGAERDSIRAASGSSLNRRARVGETEYTTADKNHNSDDILQSRDNPTSSAGALEQTTTSSNENRSDDGRRKWSEKELHELMFCYFRAKAEGPGYIKRFEILFKQRNVNNPKINKFTGNTLSTQARSIINRKFLSQEVLEEIRKRAELSVLATDTNTAIMTPNIQTITGHYQNISHTSTLTSEAVIHQQQNNSSITTNNPCVQNYEEAINTLEPQNINDLVQNVDASENQEPIILELLQTLAEIKDIPIAERKSLPKAKFNKQFFENLTKINNFLPNLLATNTTLKETNDVIYAAAKTLIIANGQTPFVISSRERVSRDPPWKRRLKTKIDIIRKELGQFTEISKGVNSKKMLKAKSKLYTKYNILNSQDHDNIVEVLKQKLKAKAGRLKRYEDINNRKTQNQLFKENEHKFYRNMSQKKQTVKETPTKEAIETFWKDILGQPITYNKTASWIKQLEETDIEETDFDSITIEQVKFAINKLKNWKTPGIDKIHNYYLKYFTNTHKFITKLLDRLFKGTETIEEWFTTGNVILIPKEGDNRDPKNWRPIACLPTMYKLLTSVIANQLYIHCETNDIIAPEQRGCRRRARGCKDHLMINKAILEDAHQSQKNLSMGWIDYRKAFDSISHEWLLSALDLYKCPKSIKGFLQNIMPSWKVVMTAYGQNGPITTDSIYVRRGIFQGDSLSPLLFCISINPLSQILEKYILKGYHLKDSVFVNHLLYMDDLKVYAHNKNSLKVLLDSIEIFTRDIGMSFGLNKCNILHLKAGKRYAGAGEGHVLLSGEEFQHLQSSDRYKYLGIHESGKIDHIEVRQQIQKEYFKRIKSLAKAHLNSINLIKSINTYAIPVLLYAFGIVNFKTSDLKAIDTKTRKLLAIHKAHQQKADVNRLYIPRDEGGRGLMNVEMLYKSQIIKYSKYLKSEKDHIIKAIVIHDKTRDKYSIEKEARQFYEEIDLQRRDKYTDKELKTAVVKKQINKWKSKALHGQFLRSVLEKENIDTEFSFRWLKKQPISPTLEAAIFSIQDQSVVTNQFERDIMKRPVDGKCRICLAKDETVQHIVSGCEKLAGTYYTRRHNNIVQYIHWTIAKKHNFNVNNLWWQQNLTKPQVIENDTAKVMWEMPVQTDITVTHNRPDIIYINKQENHAYLIDITVPSDYNIGAKEIEKLSKYHLLRTEVTRLWKIPTTVIPIVIGATGIIAKSLHRYCNKLNSNINVHIIQKQAAIHTSTILSKVLGNSIFAGETESPSP

SEQ ID NO: 8553 - protein, 1254 aa, Ernsta colotes
MMKRQFRNLRQGPLPGERRGTLGADAERDSIRTVSGSLLNRRAGVGETEDTTAENNRNADDALQNRVSPTCSAGASEPTTTSSTISNDARRKWSQEELHELMYCYYKARSEGPGYIKKFEQLFKQRNPNNQKIAKFTGNTLSNQARSIINRKFISTELLEQIKRKAECTDVTDANTLSNTQQQHTQNNTTHTLCLEETPNTSPFTQENINLEHEEQINNDTEELQQIDSLTRNIEISEDQDPIIMEFLQVLAEVKDTPISEREFLPKAKINKKFIENLNKINNFLPNLLIVNNTLRETNNIIYAAAKTLIKSNGQKPFRTDKIKKQEPNTPWKRRLKSSIEIIRKELGQLVEIGKGINSRKILKIKDKLYQKYNIFSQQDHDNTVELLTQKLKAKAGRLRRYEDINDRKIHNKLFVENEHKFYRNLGKSQQITTDIPSKEAIESFWENVIGKPIDYNKEATWIKEIDQSNLNTEEHTFEKIDIEQTKKALHKLSNWKTPGIDRIHNYYLKYLTSSHEYITKLLDKIFRGTENLEEWFTTGQVILIPKDGDTKDPKNWRPIACLPTMYKLLTSIVAEELYAHCDKNDILAPEQRGCRRRTRGCKDHLMVNKAVLEDAHQSQKNLSMAWIDYQKAFDSISHEWLLKSLELYRCPKSILSFLRLIMPHWKVTMTAYSNNSSVTTDPIHIRRGIFQGDSLSPLLFCLGVNPISQILNKYDLQGYHLKNNIFINHLLYMDDLKIYASNKNYLKVMLDSTEIFTRDIGMNFGLSKCNILHLIGGKRRETEGEGHMLLSGEEFQHLKNHDTYKYLGINESGKIDHSEVRQQIQKEYYKRVKCLVKTHLNSRNLIKSINTYAIPVLLYSFGIVNFKISDLKAIDTKTRKILALNKAHQQKADVNRLYIPIDKGGRGLINIEMLYKSQIIKYNRYLKSGNDHLIKAIEEHDKTRDKYSIQKEGKEYCEEIGIQDRFNYTDRELKTAIVKKHVNIWKSKALHGQFLKGVLEKENIDTEFSFRWLKKQPISPTLEASIFSIQDQSIVTNQFERDIIKKPVDGKCRVCLAKDETVQHIISGCEKLAGTYYTRRHNNVVQYIHWTIAKKHKFQVNPLWWKEQLTQPQVIENDTAKLMWEMPVQTDITVTHNRPDIIYINKQENHCYLIDISIPSDYNIGAKEIEKLSKYHLLRTEVTRLWKIPTTVIPVIVGATGVIAKSLHRYCNKLNSNINIHIIQKQSAIHTNTILSKVLGNSIFAGESESPSP

SEQ ID NO: 8554 - protein, 1256 aa, Pellicia arina
MMKRKLRNLSTGPLPGGRRGTLGAGADRDSMRAASGSLLIRRAGVGETEYTTAENIRKVDDALQSRALPTCSAGASELITTSSAISDDARRKWSQEELHELMFCYFKARSGGSGYIKRFEQLYKQRNQNNPKIAKFTGNTLANQARSIINRKFISAELLEQIKQNAENTNVSDTDTTSTLSITFTQRQDKEPTSLNTNTLSFYSNVRPENGNLEEEELRPTNIEEQQQIDNFTQDIEVNEDQDFIILDLLQTIAEVKDTPISERPFLPKAKLNKQFIENTRKINNFLPKLLITNNTLREINNIIYAAAKTLIISNKQKPFFKSNFKKQVPNPPWKRRLKSVIEILRKEIGQLTEIGKGISSRKMLKTKDKLYNKYNIFSQQDHNNIAEILKQKLKAKAGRLKRYEDMNARTNNNKQYIENEHKFYRSLVTKHHVATETPTKEAIELFWQNIIGKTTSYNKQATWIKEIDELYLETEEHNFENINLEQTKAAIRKLSNWKAPGIDKIHNYYLKYLTSTHEHITKLFDKIYNDIETLEDWFTTGQVILIPKDNDTKDPKNWRPIACLPTMYKLLTSIIAEELYRHCDKNQILALEQRGCRRHVRGCKDHLMVNKAILEDAHQSQKNISMGWIDYRKAFDSIPHEWILKALEIYRCPKSIQSFLRLVIPHWKVIMTAHGSNGAVTTDPIHFHRGIFQGDSLSPLLFCLSINPLSYILNKYNCQGYHLKNSIYINHLLYMDDLKIYANNKNNLKVMIDSTEIFTQDIGMSFGLNKCNILHLTRGRRSKIEGENHILLSGEEFQYLQKSNSYKYLGINESGKINHTEVRQQIQKEYFKRVKALVKTHLNSRNLIKSINTFAIPVLLYSFGIVNFKITDLKTIDTKTRKLLALNKAHHQKADVNRLYIPINQGGRGLINAEMLYKIQIIKYNKYLKSDKDHLIKTILAHDKFKDKYSIHKESIEYCKEVGIQDRVSYTDSELKTAVIKKHINSWKSKALHGQFLKRVLEKENIDIDFSFRWLKKQPISPSLEASIFSIQDQSVVTNQFERDIIKKPVDGKCRVCLVKDETVQHIVSGCEKLAATYYTRRHNNIVQYIYWTIANKHEFEINPLWWKEQLNQPKVIENETAKIMWEIPVQTDIEVTHNRPDIIYINKQESHVYLIDVSIPSDYNIGAKEIEKLSKYHVLKIEVTRLWKMPTTIIPIVVGGTGVIAKSLHRYCNKLNSNINIHIMQKQAAIHTNTILSKVLGNSIFAGESESSSP

SEQ ID NO: 8555 - protein, 1103 aa, Muschampia tersa
MMKRQLRNLRPGPLPGDRRGTLGADAERDSIRTVSGSSLNRRAGVGETENTTAENTCNADDALQSGALPTSSAGALELTTTSSEIIGDARRRWSQEELSELMYCYYKARSEGPGYIKRFEQLFKQRNPNSTKIAKFTGNTLSNQARSIINRKFISAELLEQIRQRAEDDNATNTNILSHTQHTTNDINTQIQSNEQSLDTITYNHLHEEHINLENEELMNNDTKELQRIDSLIRNIEINEDQDPIILEFLQVLAEVKDTPISERNYLPKAKINKQFIENLRKINDFLPNLLIISNTLRETNNIIYAAAKTLIKSNGQKPFYMNNIKKQVRNNPWKRRLKSTIEILRKEIGQLTEINKGINSRKILKTRDKLYVKYNIFSKQDHDYVLEILTQKLKAKAGRLKRYEDINERKIHNKQFVENEHKFYRNLVGKQQVASEIPSKEAIESFWQNIIGKPIDYNKTAAWIKEIDQANLDTEEHTFENINVEQTKKALSKLCNWKTPGVDRIHNNYLKYLTSTHEYIAKLLDKIFKGTETLEEWFTTGQVILIPKNEDTKDPKNWRPIACLPTMYKLLTSIIAEELYAHCDKNDILAPEQRGCRRRTRGCKDHLMVNKAILEDAHQSQKNLNMAWIDYQKAFDSISHDWLLKALELYRCPKSIQSFLRLVIPHWKVIMTAYGSNGTITTDPMHIRRGIFQGDSLSPLLFCIGVNPLSQILNKYNLQGYHLKNSIYINHLLYMDDLKIYASNKNNLKVMLDSTEIFTHDIGMNFGLDKCNILHLTRGKRSEMEGEGHVLLSGEEFQHLKNYNTYKYLGINESGKIDHSEVRQQIQKEYFKRVKSLLKTHLNSRNLIKSINTFAIPVLLYSFGVINFKISDLKAIDTKTRKLLAINKAHHQKADVNRLYIPIDEGGRGLINIEMLYKTQIIKYNRYLKPNNDHLIKAIVEHDKIRDKYSIYKEGKEYCEEIGIRDRFSYTERELKNAVIKKHINIWKSKALHGQFLKGVLDKDNIDTEFSFRWLKKQPISPTLEASIFSIQDQSVITNQFERDIIKKPVDGKCRVCLSKDETVQHIVSGCEKLAGTYYTRRHNNIVQYIHWTIAKKHQFQI

SEQ ID NO: 8556 - protein, 1265 aa, Butleria flavomaculatus
MKRQLRNLRPGPLPGERRGTLGAGAERDSIRTASGSSLNRRAGVGEPEVTTAGIISDADDALQSRASPTSSVGASEATTTSSATSDDARRKWSQEELYELMFCYFKARSEGPGYIKRFEQLFKRRNLNNPKISKFTGNTLSNQARSIINRKFISAELLEQIKQQAEHAPATTDPDLYSLTQIRFIITNTQQSHLSINQINMPLGTQQPNSDVDSEIDTNNIYSEQNRQLIDIEEQQHIDDFTRNINIDEDQDPIILELLQILAEVKDTPIAERKSLPKPKFNKQFFDNLRKINDFLPNLLITNNTLRETNNIIYAAAKSLIISNGQKPYCTTNSRKPPTDPPWKRRLKSKIDIIRKELGQLTEIGKGVNSRKMLKAKDTLYNKYNIFSQQDHDNTVEILKQKLKAKAGRLKRYDDINDRKNHNKQFIDNQHKFYRTLSEKQQAALETPTKEAIETFWTNIIAQPITYNKSAPWITEVEESNSDKEELNFENINVDQVKHSIRKLHNWKTPGLDKIHNYYLKYFTSTHEYIAKLLDKIFKGTETLEEWFTTGQVILIPKEGDTKDPKNWRPIACLPTMYKLLTSVIADQLYTHCENNDIIAPEQRGCRRHARGCKDHLMVNKSILEDAHQSQKNLSMGWIDYRKAFDSISHEWLLKVLDLYRCPKSIKNFLRLVMPNWKVVMTAYGKSGAITTDPINIRRGIFQGDSLSPLLFCIGINPLSQILNKYDLKGYQLKNSIYINHLLYMDDLKVYASNKNNLKVLLDTTEIFTEDIGMSFGLNKCSVLHLTAGRRSEIEGEGHILISGEEFQHLQTHERYKYLGINESGKIDHSEVRQQIQKEYFKRVKSLTKTHLNSRNLIKSINTFAIPVLLYSFGIVNYKNSDLKTIDTKTRKLLAINKAHHQKADVNRLYIPIEQGGRGLTNIEMLYKTQIIKYKKYLNSGSDHLLKTIVAHDKTRDKYSINKEGREFSEEIGIQDTGSYTDSELKNAVVKKQINIWKSKPLHGQFLKGVLDKENIDTEFSFRWLKKQPVSPTLEASIFSIQDQSIVTNQFERDIIKKPVDGKCRVCLAKDETVQHIISGCEKLAGTYYTRRHNNIVQYVHWTIAKKHKFNVNKLWWKETLTQPQVIENESAKIMWEMPVQTDITVTHNRPDIIYINKQENHAYLIDITIPSDYNIGGKEIEKLSKYHLLKTEITRLWKIPTTVIPIVIGSTGVIAKSLHRYCNRLDTNINIHIMQKQAAIHSNTILSKVLGNSIFAGESESPSP

SEQ ID NO: 8557 - protein, 1166 aa, Urbanus velinus
MFCFFKAKAEGPGYIKRFENLFKQRNANNPKINKYTGNTLSNQARSIINRKFISEEVLQEIKRRAEQTLNVISTDTVTITSHTQAYTSNDHIHNSIINLTNTSTQQTNYAVNIEVVTEEIISENNHNEGIIDAAEQQHIHNITETIDTSEDQDKIILDLLQTLSEVKHTPIDERDFLPKPKFNKSFINNLRKINNFLPNLLMTNCTLRETNDVIYAAAKTLIISNDQKSYPPSMTKKPSKDPPWKRRLKTKIDIIRKELGQLTEIGKGVTSKKINKIKNTLYNKYNIFNQQDHDKMVEIIKQKLKAMAGRLKRYEDINDRKTHNKLFSENEHKFYRSISGQQNIADNIPTKQAIENFWNNIFSKPITYNKTATWIKEIEQSTLDFVANNFDGINLDQVKTAINKLHNWKTPGIDKIHNYYLKYLTNAHVFIANLFDKIFKGIETIEEWFTTGQVILIPKDKDTEDPKNWRPIACLPTMYKLLTSVISDQLYTHCEINNIIAPEQRGCRRRSRGCKDHLMVNKAILEDAHQSQKNLSMGWVDYRKAFDSISHDWLLKALELYRCPNSIIRFLQIVMPRWKVVMTAHSIKGSITTEPIFIRRGIFQGDSLSPLLFCLSINPLSQILNKYELKGYHLRDSIYLNHLLYMDDLKLYAKNRNSLKVLLDSTEIFTQDIGMSFGLNKCSILHLIAGRRKGHEGEGHILLSGQEFQHLQINEKYKYLGINESGKIDHSEVRQQIQKEYFKRVKFLTKTHLSSRNLIKSINTYAVPVLLYSFGVVNFKNSDLKTIDTKTRKLLAINKAHQKKADVDRLYIPIDHGGRGLINLEMLYKTQIIKYNIYLKSGKDDLIKAIVSHDKNRDKYSIHKEARQFREEIGLQDKEYYTEKELKVAVIKKHTNNWKSKALHGQFLKAVLEKENIDTEYSFRWLKKQPISPTLEASIFAIQDQSVITNQFERDIIKKPVTGKCRICLAKDETVQHIVSGCEKLAGTYYTKRHNNIVQYVHWTLAKKHKFDVNQLWWKETLTQPQVLENDTAKLMWEIPVQTDKTITHNRPDIIYINKQENHAYLIDISIPSDYNIGAKEIEKLSKYHPLKIEINRLWKIPTTVIPVIIGTTGIVAKSLHKYCNRLDSNINVHILQKQAAIHTSTILSKILGNSIIAGETESPSP

SEQ ID NO: 8558 - protein, 1262 aa, Pyrgus malvae
MMKRQLRNLRTGSLPGGRRGTLGAGAERDSMRDASGSSLSRRAGVRETEYATADTNQNPDDTLQSRESPIDLAGTLEQTTTSSTENISDDSRRKWSQQELHELMFCYFKAKAEGPGYIKRFEKLFKTRNLSNPKVKKFTGNTLSNQARSIINRKFISEEVLEEIKTRAEQSLSLSVTDTNREVITPITHTIAPQITTPDNHTTNHTSIQTIQIGTDIHNTVNFEEPIDTSATQQVNNLVQNVDASENQDPIILELLQIFAEIKDIPIIERKSLPKPKFHKQFFENLRKINNFLPSLFVTNETLRGINDIIYAAATTLITINGQKAYSSIRGRRPPIDPPWKRRLKTKIDVIRKELGQFTEIAKGVNSRKMIKVKTTLYTKYNINNNQEHVNTVEILKQKLKAIAGRLKRYEDMSDRKNHNKLFAENQHKFYRNMSGVQQAIVEAPTKEAIESFWENILARPISYNKSATWIKEIEESNSEIEETDFDNITIEQVKIAINKLHNWKTPGIDKIHNYYLKYFTSAHEYITKLYNKLIKCQETHEEWFTTGNVILIPKEGDTRDPKNWRPIACLPTMYKLLTSVIANQLYVHCESNDIIAPEQRGCRRRARGCKDHLMINKAILEDAHLSQKSLSMGWVDYRKAFDSISHEWVLKTLDLYKCPKTIKTFLQIIMPSWKVVMTAYGQNGPITTETINVRRGIFQGDSLSPLLFCLCINPLSQILNKYSLKGYQLKDSIYINHLLYMDDLKVYAHNKNSLNVLLDSTEIFTRDIGMSFGLNKCNVLHLKAGRCSGREGEGHVLLSGEEFQHLQSNDRYKYLGIHESGKIDHTEVRQQIQKEYISRVKTLAKTHLNSRNLIKSINTYAIPVLLYSFGIVNFKTSDLKAIDTKTRKVLAIHKAHQQKADVSRLYIPIEEGGRGLINVEMMYKTQIIKYNKYLKSEKDHLIKAIVVHDKLRDKYSIHKEARQFSEEIELQNRNDYTEKELKTAVVRKHINTWKSKALHGQFLKSVLEKENIDTEFSFRWFKKQPISPTLEASIFCIQDQSIITKQFERDIMKKTVDGKCRICQAKDETVQHIISGCEKLAGTYYIRRHNNIVQYIHWTLAKKHKFEVNSLWWKETLTQPQVIENDTAKIMWEMPVQTDITVANNRPDIIYINKKENHTYLIDITVPSDYNIGAKEIEKLSKYHLLRTEITRLWKTSTTIIPIVIGATGVIAKSLHRYCNRLDSNINIHIIQKQAAIHTSTILSKVLGNSVFTGETDSPSP

SEQ ID NO: 8559 - protein, 1272 aa, Signeta flammeata
MMKRQLKNLRPGPLPGERRGTLGAGAERDSMQTTSDSLLSRRAGVGEPEVTTADIISDADDALQSRVSPTSSVGASERATTSSVQSDDARRKWSQEELCELMFCYFKARSQGPGYIKRFEKLFRHRNQNNPKISKFTGNTLSNQARSIINRKFLSTELLEEIKQRAELTPATTDSESICLIDLGHTETIPNLQKNNSNTDKEIRNRQHTNLNNSAVIVTDRQTIVHTILEKDDEEHTDIIEQQQINDLTRNIDTSENQDPIILKLLQILSEIKETPIADRKLLPKPKFNKQFFDNLHKINDFLPSLLITNDTLREINNIIYAAAKTLIVANGQKPYPPITTRKPPIDPPWKRRLKSNIDIIRKELGQLTEIGKGLNSKKILKAKITLYNKYNIFNQQDHDNIVEILKQKLQAKAGRLKRYDDINARKTQNKQFVENEHKFYRNMARKEQTLTETPTKEAIESFWKNIIDQPTTYNKTALWIKEIDESNIDIQEHTFDSINLDQVKRAISKLHNWKTPGIDKIHNYYLKYFTSIHTFIAKLYDKILKGTEPIEEWFTTGQVILIPKEGDTRDPKNWRPIACLPTMYKLLTSVIADQLYTHCENNDIIAPEQRGCRRHVRGCKDHLMINKAILEDAHQSQKNLSVGWIDYRKAFDSISHEWLLKVLDLYRCPKSISNFLRLVMPNWKVVMTTYGMSGSITTDPIHIRRGIFQGDSLSPLLFCIGINPLSQILNKYELKGYHLKDSIFVNHLIYMDDVKIYANNKNSLKVLLDSIEIFTQDIGMSFGLNKCNILHLTAGQTSVQDGKGHILLSGEEFQHLQKNERYKYLGIHESGKIDHSEVRQQIQKEYFRRVKCLTRTHLNSRNLIKSINTYAIPVLLYSFGIVNFKNKDLKTIDTKTRKLLAINKAHQYKADVDRLYIPLEEGGRGLINVEMLYKTQIIKYKKYLKSGNDHLLKAIVAHDKIKDKYSIYKDAKQFSEEIELQDRNSYTEQELKIAVIRKHVKSWKSKPLHGQFLKSVLEKDNIDTEFSFRWLKKQPVSPTLEAAIFSIQDQSVITNQFERDIMKKPVDGKCRVCFAKDETVQHIVSGCEKLAGTYYTKRHNNIVQYVHWTIAKKHKFNVHQLWWKETLKQPQVIENETAKLMWEIPVQTDITVTHNRPDIIYINKQENHAYLIDVTIPTDYNIGAKEIEKLSKYHLLKTEITRLWKIPTTIIPIVIGATGIVAKSLHRYCNRLDSNINIHIMQKQAAIYTNTILSKVLGNAIFAGESESPSP

SEQ ID NO: 8560 - protein, 1262 aa, Pyrgus malvae
MMKRQLRNLRTGSLPGGRRGTLGAGAERDSMRDASGSSLSRRAGVRETEYATADTNQNSDDTLQSRESPIDLAGTLEQTTTSSTENISDDSRRKWSQQELHELMFCYFKAKAEGPGYIKRFEKLFKTRNLSNPKVKKFTGNTLSNQARSIINRKFISEEVLEEIKTRAEQSLSLSVTDTNREVITPITHTIAPQITTPDNHTTNHTSIQTIQIGTDIHNTVNFEEPIDTSETQQVNDLVQNVDASENQDPIILELLQILAEIKDIPIIERKSLPKPKFNKQFFENLRKINNFLPSLFVTNETLRGINDIIYAAATTLITINGQKAYSSIRGRRPPIDPPWKRRLKTKIDVIRKELGQFAEIAKGVNSRKMIKVKTTLYTKYNINNNQEHANTVEILKQKLKAIAGRLKRYEDMSDRKNHNKLFAENQHKFYRNMSGVQQAVVEAPTKEAIESFWENILARPISYNKSATWIKEIEESNSEIEETDFDNITIEQVKIAINKLHNWKTPGIDKIHNYYLKYFTSAHEYITKLYNKLIKCQETHEEWFTTGNVILIPKEGDTRDPKNWRPIACLPTMYKLLTSVIANQLYVHCESNDIIAPEQRGCRRRARGCKDHLMINKAILEDAHLSQKSLSMGWVDYRKAFDSISHEWVLKTLDLYKCPKTIKTFLQIIMPSWKVVMTAYGQNGPITTETISVRRGIFQGDSLSPLLFCLCINPLSQILNKYSLKGYHLKDSIYINHLLYMDDLKVYAHNKNSLNVLLDSTEIFTRDIGMSFGLNKCNVLHLKAGRCSGREGEGHVLLSGEQFQHLQSNDRYKYLGIHESGKIDHTEVRQQMQKEYISRVKTLAKTHLNSRNLIKSINTYAIPVLLYSFGIVNFKTSDLKAIDTKTRKVLAIHKAHQQKADVSRLYIPIEEGGRGLINVEMMYKTQIIKYNKYLKSEKDHLIKAIVVHDKVRDKYSIHKEARQFSEEIELQNRKDYTEKELKTAVVRKHINTWKSKALHGQFLKSVLEKENIDTEFSFRWFKKQPISPTLEASIFCIQDQSIITKQFERDIMKKTVDGKCRICQAKDETVQHIISGCEKLAGTYYIRRHNNIVQYIHWTLAKKHKFEVNSLWWKETLTQPQVIENDTAKIMWEMPVQTDITVVNNRPDIIYINKKENHTYLIDITVLSDYNIGAKEIEKLSKYHLLRTEITRLWKTSTTIIPIVIGATGVIAKSLHRYCNRLDSNINIHIIQKQAAIHTSTILSKVLGNSVFTGETDSPSP

SEQ ID NO: 8561 - protein, 1257 aa, Thymelicus lineola
MKRQLRNLRQGPLPGGRRGTFGADAERDSIRTVSGSSLNRRARVGEPEDTTADTNRDADNALQSTEPPASSAGVSETTTTSSLTTDDARRKWSQEELHELMFCYFKARAEGPGYIKRFERIFKERNQNNPKVAKFTGNTLSNQARSIINRKFISTELLDKIKQQAEQGSTNTQLVASLSVTQNLSTHILSNLQQNNTNIHNQTNRDTEEVSNYIIPEDNMLADTEELQQINDLTSDIDTSEDQDPVILKFLQSLAEVKEIPIAERNSLPKPKFNHNFFENLRKINNFLPKLLITNYTLRELNNIIYAAAKTLILENKQTPYAQKTTTKPPSDPPWKRRLKSKIDIIRKELGQLTEIGKGLNSKKLLKAKDKLYTKYNIFSKQEHDNIVEILKQKLKAKAGRLKRYDDINTRKIQNKQFLENQHKFYRRMSEKQHITNETPTKEAIETFWKNIISQPITYNKEASWIRDIEETNKHIEEHSFDRITVEQVKHAISKLHNWKTPGIDQIQNYYLKYFTSTHKFIAKLFDRIFKGTETIEEWFTTGLVILIPKNGDTSDPKNWRPIACLPTMYKLLTSVISNELYIHCSNNDILAPEQRGCRRRARGCKDHLMINKAILEDAHQSQKNLSMGWIDYRKAFDSISHDWLLKVLSLYKCPESITNFLRLVMPNWNVIMTAHGTNNTITTEPIYIRRGIFQGDSLSPLLFCIGINPLSQILNKYELKGYHLKDSVYVNHLLYMDDLKVYASNKNSLKILLDSTEIFTRDIGMSFGLNKCNILHLIAGKRSEQEGERHILLSGEEFEHLQSNQRYKYLGINESGKIDHNEVRQQIQKEYFKRVKCLTRTHLNSRNLIKSINTYAVPVLLYSFGVVNYKNSDLKTIDTKTRKLLAIHKAHHQKADVNRLYIPIDQGGRGLINLEILYKTQIIKYNRYLKSGNDYLLKAIVVHDKMRDKYSIHKESKQFSEEIGLRNEDNYTEKEIKNLVVKKHVNSWKNKALHGQFLKEVLEKENIDTEFSFRWFKKQPVSPTLEASIFSIQDQSIITNQFERDIMKKPVDGKCRICLAKDETVQHIVSGCEKLAGSYYTKRHNNIVQYVHWTIARKHNFKVSQLWWKETLEKPQVIENETAKLMWEIPVQTDITVTHNRPDIIYINKQENHAYLIDVTIPSDYNIGAKELEKLSKYHLLKKEINRLWKIPTTVIPIVIGATGVIAKSLHRYCNSINSNINIHIMQKQAAIHTSTILSKVLGNVIFAGETESPSP

SEQ ID NO: 8562 - protein, 1276 aa, Pseudonascus paulliniae
MKRVLRELRSGSLPGGRRGMLGAGAERDSIRTASDSSLNRRAGVGEPEVTTADIFSDADDALQSSGSPTNFAGTSEMTTTRSMISEDARRKWSEDELYELMFCYFKAKSEGPGYIKRFERIFKQRNPNNPKINKYTGNTLSNQARSIINRKFISQEVLQEIRRQAEHTLTVTTDAQQQAAVIRIESISGKRNTQSHTTNPQRCNAKTHKPNPLSQQENSDVNVDVRTGNDILDHFQSEEVIDAATQQQIDDLTRIIDTSEDQDPIILELLQTLAEVKETPIDERYFLPKPKFNKLFFDNLRKINDFLPTLLITNNTLRETNDVIYAAAKTLIIINGQKPYSPSLIRKKSKDPPWKRRIKCKIDIIRKELGQLTEIGKGINSKRILNVKNTLYNKYNIFSQKDHDNIVEILKQKLKAKAGRLKRYEDIASKKIQNNLFAENQHKFYRNISGKMNKASDIPTKEAIETFWSNILGEPVTYNRTATWIKEIEESSLDIQEHNFDSINLQQIKIAINKLHNWKMPGIDKIHNYYLKYFTNAHEFITKLFNKILKGLETIEEWFTTGQVILIPKNTDTKDPKNWRPIACLPTMYKLLTSVIADQLYIHCENNDIIAPEQRGCRRRARGCKDHLMVNKAILEDAHHSQKNLSMGWVDYRKAFDSISHDWLLKALELYKCPKHITNFLQMVIPNWRVVMTAHGINGSITTDPIYIRRGIFQGDSLSPLLFCIGINPLSQILNKYELKGYHLKDSVYINHLLYMDDLKIYAKNKNSLKILIDSTEIFTQDIGMSFGLDKCNILHLKAGRRSAYEGEGHILLSGEEFQHLQSNEKYKYLGINESGKVDHNEARQQIQKEYFRRVKCLTKTHLNSRNLIKSINTYAIPVLLYSFGVINYKQKDLKTIDTKTRKLLAINKAQQKKANVNRLYIPIEHGGRGLINLEMLYKTQIIKYNRYLKSGKDYLIKAIVVHDKNRDKYSIHKEATHFSEELGIHNRYDFTEKELKTAVVRRHINNWKSKALHGQFLRTVLEKENIDTEYSFRWLKKQPVSPTLEASIFSIQDQSVITNQFERDIMKKSVNGKCRICLAKDETVQHIVSGCEKLAGTYYTRRHNNIVQYVHWTIAKKHNFHVNQLWWKENLTQPQVIENDTAKLMWEMPVQTDRTVTHNRPDIIYINKQEKHAYLIDVTIPSDYNIGAKEVEKLSKYHLLKTEVYRLWKIPTTVIPIVIGATGVIARSLHKYCDKLNSNINIHILQKQAAIHTNTIMSKILGNSVFAGEPESSSP

SEQ ID NO: 8563 - protein, 1218 aa, Muschampia tessellum
MNRRAGVGETENTTAENTCNADDALQSGALPTSSAGALELTTTSSEIIGDARRRWSQEELSELMYCYYKARSEGPGYIKRFEQLFKQRNPNSTKIAKFTGNTLSNQARSIINRKFISAELLEQIRQRAEDDNATNSNILSHTQHTTNDINTQIQSNEQSLDTITYNHLHEEHINLENEELMNNDTKELQRIDSLIRNIEINEDQDPIILEFLQVLAEVKDTPISERNYLPKAKINKQFIENLRKINDFLPNLLIISNTLRETNNIIYAAAKTLIKSNGQKPFYMNNIKKQVRNNPWKRRLKSTIEILRKEIGQLTEINKGINSRKILKTRDKLYVKYNIFSKQDHDYVLEILTQKLKAKAGRLKRYEDINERKIHNKQFVENEHKFYRNLVGKQQVASEIPSKEAIESFWQNIIGKPIDYNKTAAWIKEIDQANLDTEEHTFENINVEQTKKALSKLCNWKTPGVDRIHNYYLKYLTSTHEYIAKLLDKIFKGTETLEEWFTTGQVILIPKNEDTKDPKNWRPIACLPTMYKLLTSIIAEELYAHCDKNDILAPEQRGCRRRTRGCKDHLMVNKAILEDAHQSQKNLNMAWIDYQKAFDSISHDWLLKALELYRCPKSIQSFLRLVIPHWKVIMTAYGSNGTITTDPMHIRRGIFQGDSLSPLLFCIGVNPLSQILNKYNLQGYHLKNSIYINHLLYMDDLKIYASNKNNLKVMLDSTEIFTHDIGMNFGLDKCNILHLTRGKRSEMEGEGHVLLSGEEFQHLKNHNTYKYLGINESGKIDHSEVRQQIQKEYFKRVKSLLKTHLNSRNLIKSINTFAIPVLLYSFGVINFKISDLKAIDTKTRKLLAINKAHHQKADVNRLYIPIDEGGRGLINIEMLYKTQIIKYNRYLKSNNDHLIKAIVEHDKIRDKYSIYKEGKEYCEEIGIRDRFSYTERELKNAVIKKHINIWKSKALHGQFLKGVLEKDNIDTEFSFRWLKKQPISPTLEASIFSIQDQSVITNQFERDIIKKPVDGKCRVCLSKDETVQHIVSGCEKLAGTYYTRRHNNIVQYIHWTIAKKHQFQINPLWWKEQLTQPQVIENETAKLMWEIPVQTDNTVTHNRPDIIYINKQENHAYLIDISIPSDYNVGAKEIEKLSKYHLLRTEVTRLWKIPTTIIPIIIGGTGVVAKSLHRYCDKLNSNINIHIMQKQAAIYTNTILSKVLGNSIFSGESEPPSP

SEQ ID NO: 8564 - protein, 1274 aa, Salatis canalis
MKRVLRELRSGPLPGGRRGTLGAGAERDSIRTASGSSLNRRAGVGEPEDITADIISEADDALQSSGPSRSSAGTSETTTTRSTISDDARRKWSQDELHELMFCYFKAKSEGPGYIKRFERIFKQRNPNNPKINKYTGNTLSNQARSIINRKFISEEVLQEIKQRAEHTLPATTNISQQTATETNTDLRYTTQNTQTYTTNIQRSNSESDVHRQQIDSNVNTEIIRDNIILQDNRGEEIIDASTQQQIDDLTRTIDTSEDHDPIILDFLKTLAEVKETPIDKRYFLPKAKFNKQFFDNLQKINAFLPTLLITNCTLRETNNVIYAAAKTLIISNGQKPYAPPVVRKPPKDPPWKRRMKSKIDIFRKELGQLTEIGKGINSRKLIKIKNTLYTKYNIVSQQDHDNIVEILKQKLKAKAGRLKRYEDINDRKNQNNLFSENQHKFYRTMSGKLNKASKIPTKEDVETFWNNILAQPITYNKTATWIKEIEQSTLDIHEHNFASINIDQIKIAIKKLHNWKTPGIDKIHNYYLKYFTSSHEFLAKLFDKIFNGSESIEEWFTTGQVILIPKETDTEDPKNWRPIACLPTMYKLLTSVIADQLYIHCENNDIIAPEQRGCRRHARGCKDHLMVNKAILEDAHQSQKNLSMGWVDYRKAFDSMSHEWLLKALELYKCPKSIRIFLQMVMPNWKVVMTAHGVNGSITTDPIYIRRGIFQGDSLSPLLFCIGINPLSQILNKYDLNGYHLKDSIHINHLLYMDDLKIYAKNKNSLKVLLDSTELFTQDIGMSFGLNKCNILHLTAGRRRDYNGEGHILLSGEEFQHLQFNERYKYLGINESGKIDHSEVRQQIQKEYFRRIKCLTRTHLNSRNLIKSINSYAIPVLLYSFGIVNYKINDLKTIDTKTRKLLAINRAQQKKANVNRLYIPIEQGGRGLINIEMLYKTQIIKYKTYLKSKKDHLIKAIVVHDKNRVKYSIHKEARQFSEEIGIQHKDDYTEKELKTAVVTKHISNWKSKALHGQFLRAVLEKENIDTEYSFRWLKKQPVSPTLEASLFSIQDQSVITNQFERDIMKKSVNGKCRICSAKDETVQHIVSGCEKLAGTYYTKRHNNIVQYIHWTIAKKHKFNVNQLWWKENLTQPQVIENETAKLMWEMPVQTDRTVTHNRPDIIYINKQENHAYLIDVTIPSDYNIGVKEIEKLSKYHLLKTEITRLWKVPTTIIPIVIGATGIVAKSLHKYCNKLDSHINIHILQKQAAIHTNTILSKILGNSIFAGETESSSP

SEQ ID NO: 8565 - protein, 1257 aa, Euphyes dion
MMKRQLRNLRQGPLPGERRGTFGADAGRDSIRTVSGSPLSRRGRVGEPEDVTADPIRDTDNALQSTGSPASSAGASETTTTSLLTSEDARRKWSQAELQELMFCYFKARAEGPGYIKRFERLFKQRNRNNPKIAKFTGNTLSNQARSIINRKFLSAEVLDEIKQQAEQETTNTQSVAPLLVTQNASTYVQPNTQTELNVNHQINLDSVDINTNIISENIEVADTEELQQINELTSNINVSENEDPIILKLLQSLAEIKETPIAERKTLPKPKFNCNFFDNLRKINNYLPKLLITNTTLREINNIIYAAAITLVTENKQEPYMPKNKTKPLSDPPWKRRLKSNIDIIRKELGQLTEIGKGVNGKKLLKAKHKLYTKYNILSKQEHDNIVEIFKQKLKAKAGRLKRYDDINSRKTQNKQFLENQHKFYRSLSGNQQTVTDIPSKEAIETFWKNIISQPVTYNKNASWIKNIEETNTHIEEHNFDTITVEQVKHAINKLHNWKTPGIDQIHNYYLKYFTSTHKFIAKLFDKIFKGTEAIEEWFTTGMVILIPKDGETTDPKNWRPIACLPTMYKLLTSIISEELYTHCNNNDIIAPEQRGCRRGARGCKDHLMINKAILEDAHQSQKNLSMGWIDYRKAFDSISHEWLLKVLALYKCPESITNFLRLVIPNWRVIMTTYGTNGTITTDPIYIRRGIFQGDSLSPLLFCIGINPLSHILNKYELKGYHLKDSVYINHLLYMDDLKLYANNKNSLKILLDSTEIFTRDIGMSFGFNKCNILHLTAGVKSGQEGEGHILLSGEKFEHLHNTERYKYLGINESGKIDHSEVREQIQKEYFKRVKCLTRTHLNSRNLIKSINTYAIPVLLYSFGVVNYKNSDLKTIDTKTRKLLAMNKAHHQKADVDRLYIPVEQGGRGLINLEMLYKTQIIKYNKYLKSEYDHLIKAITIHDKTRDKYCIYKESKQFCEEIGIQNKDNYSEKEIKNFVVKKHVSNWKSKALHGQFLKGVLEKDNIDTEFSFRWFKKQPVSTTLEASIFSIQDQSIITNQFERDIMKKPVDGKCRVCLAKDETVQHIVSGCEKLAGTYYTKRHNNIVQYVHWTIARKHNFNVNQLWWKEALVKPQVIENETAKLMWEMPVQTDITVTHNRPDIIYINKEENHAYLIDITVPSDYNIGAKEIEKLSKYHLLKTEITRLWKIPTTVIPIVIGATGVIAKSLHRYCNRLNSNINIHIMQKQAAIHTNTILSKVLGNVIFAGETESPSP

SEQ ID NO: 8566 - protein, 893 aa, Pyrgus malvae
MIKVKTTLYTKYNINNNQEHANTVEILKQKLKAIAGRLKRYEDMSDRKNHNKLFAENQHKFYRNMSGVQQAVVEAPTKEAIESFWENILARPISYNKSATWIKEIEESNSEIGETDFDNITIEQVKKAINKLHNWKTPGIDKIHNYYLKYFTSAHEYITKLYNKLIKCQETHEEWFTTGNVILIPKEGDTRDPKNWRPIACLPTMYKLLTSVIANQLYVHCESNDIIAPEQRGCRRRARGCKDHLMINKAILEDAHLSQKSLSMGWVDYRKAFDSISHEWVLKTLDLYKCPKTIKTFLQIIMPSWKVVMTAYGQNGPITTETISVRRGIFQGDSLSPLLFCLCINPLSQILNKYSLKGYHLKDSIYINHLLYMDDLKVYAHNKNSLNVLLDSTEIFTRDIGMSFGLNKCNVLHLKAGRCSGREGEGHVLLSGEEFQHLQINDRYKYLGIHESGKIDHTEVRQQIQKEYISRVKTLAKTHLNSRNLIKSINTYAIPVLLYSFGIVNFKTSDLKAIDTKTRKVLAIHKAHQQKADVSRLYIPIEEGGRGLINVEMMYKTQIIKYNKYLKSEKDHLIKAIVVHDKLRDKYSIHKEARQFSEEIELQNRNDYTEKELKTAVVRKHINTWKSKALHGQFLKSVLEKENIDTEFSFRWFKKQPISPTLEASIFCIQDQSIITKQFERDIMKKTVDGKCRICQAKDETVQHIISGCEKLAGTYYIRRHNNIVQYIHWTLAKKHKFEVNSLWWKETLTQPQVIENDTAKIMWEMPIQTDITVANNRPDIIYINKKENHTYLIDITVPSDYNIGAKEIEKLSKYHLLRTEITRLWKTSTTIIPIVIGATGVIAKSLHRYCNRLDSNINIHIIQKQAAIHTSTILSKVLGNSVFTGETDSPSP

SEQ ID NO: 8567 - protein, 1170 aa, Toxidia parvulus
MFCYFKARSQGPGYIKRFEKLFRHRNQNNPKISKFTGNTLSNQARSIINRKFLSTELLEEIKQRAELTPATTDSESICLIDPSHIESITNPQRNNSNADKEIRYTHDTNTDSVEIVTERQTILHANAEKDNEELINMIEQQQINNLTRKIDTSENQDPLILHLLQILAEIKDTPIAERKLLPKPKFNKQFFDNLNKINDFLPSLLITNDTLKEINNIIYAAAKTLIVANGQNPYPPTTTRKPQIDPPWKRRLKSKIDLIRKELGQLTEIGKGLNSKKILKAKNTLYNKYNIFNQQDHDNIVEILKQKLKATAGRLKRYDDINARKTQNKQFAENEHKFYRNITRKEQALTGTPTKEAIESFWKNIIEQPTTYNKNALWIKEIEESNIDTQEHTFDTVTLDQVKYAIRKLHNWKTPGIDKIHNYYLKYFTSTHEFIAKLYDKILKGTETIEEWFTTGQVILIPKEGDTRDPKNWRPIACLPTMYKLLTSVIADQLYTHCENNDIISPEQRGCRRHARGCKDHLMINKAILEDAHQSQKNLSMGWIDYRKAFDSISHEWLLKVLDLYRCPKSISNFLRLVMPNWKVIMTIYGTSGSITTDPICIRRGIFQGDSLSPLLFCIGINPLSQILNKYDLKGYHLKDSIYVNHLIYMDDVKIYANNKNSLKVLLDSIEIFTRDIGMSFGLNKCNILHLTAGKTSEQDGKGHILLSGEEFKHLQKSERYKYLGIHESGKIDHSEVRQQIQKEYFRRVKCLTRTHLNSRNLIKSINTYAIPILLYSFGIVNFKNNDLKTIDTKTRKLLAINKAHQQKADVDRLYIPIEEGGRGLVNVEMLYKTQIIKYKEYLRAGNDHLLKAIIAHDKVKDKYSIYKDAKQFSEEIGLQDRNSYSEKELKTAIIRKHVKNWKSKPLHGQFLKSVLEKENIDTEFSFRWLKKQPVSPTLEASIFSIQDQSVVTNQFERDIMKKPVDGKCRVCSTKDETVQHIVSGCEKLAGTYYTKRHNNIVQYVHWTIAKKHKFNIHQLWWKETLIKPQVIENETAKLMWEMPVQTDITVTHNRPDIIYINKQENHAYLIDITIPTDYNIGAKEIEKLSKYHLLKTEITRLWKIPTTVIPIVIGATGIIAKSLHRYCNRLDSNINIHIMQKQAAIYTNTILSKVLGNAIFAGESESPSP

SEQ ID NO: 8568 - protein, 1262 aa, Pyrgus malvae
MMKRQLRNLRTGSLPGGRRGTLGAGAERDSMRDASGSSLSRRAGVRETEYATADTNQNSDDTLQSRESPIDLAGTLEQTTTSSTENISDDSRRKWSQQELHELMFCYFKAKAEGPGYIKRFEKLFKTRNLSNPKVKKFTGNTLSNQARSIINRKFISEEVLEEIKTRAEQSLSLSVTDTNREVITPITHTIAPQITTPDNHTTNHTSIQTIQIGTDIHNTVNFEEPIDTSETQQVNDLVQNVDASENQDPIILELLQILAEIKDIPIIERKSLPKPKFNKQFFENLRKINNFLPSLFVTNETLRGINDIIYAAATTLITINGQKAYSSIRGRRPPIDPPWKRRLKTKIDVIRKELGQFTEIAKGVNSRKMIKVKTTLYTKYNINNNQEHANTVEILKQKLKAIAGRLKRYEDMSDRKNHNKLFAENQHKFYRNICGVQQAVVEAPTKEAIESFWENILARPISYNKSATWIKEIEESNSEIEETDFYNITIEQVKIAINKLHNWKTPGIDKIHNYYLKYFTSAHEYITKLYNKLIKCQETHEEWFTTGNVILIPKEGDTRDPKNWRPIACLPTMYKLLTSVIANQLYVHCESNDIIAPEQRGCRRRARGCKDHLMINKAILEDAHLSQKSLSMGWVDYRKAFDSISHEWILKTLDLYKCPKTIKTFLQIIMPSWKVVMTAYGQNDPITTETINVRRGIFQGDSLSPLLFCLCINPLSQILNKYSLKGYHLKDSIYINHLLYMDDLKVYAHNKNSLNVLLDSTEIFTRDIGMSFGLNKCNVLHLKAGRCSGREGEGHVLLSGEEFQHLQSNDRYKYLGIHESGKIDHTEVRQQIQKEYISRVKSLAKTHLNSRNLIKSINTYAIPVLLYSFGIVNFKTSDLKAIDTKTRKVLAIHKAHQQKADVSRLYIPIEEGGRGLINVEMMYKTQIIKYNKYLKSEKDHLIKAIVVHDKLRDKYSIHKEARQFSEEIELQNRNDYTEKELKTAVVRKHINTWKSKALHGQFLKSVLEKENIDTEFSFRWFKKQPISPTLEASIFCIQDQSIITKQFERDIMKKTVDGKCRICQAKDETVQHIISGCEKLAGTYYIRRHNNIVQYIHWTLAKKHKFEVNSLWWKETLTQPQVIENDTAKIMWEMPVQTDITVANNRPDIIYINKKENHTYLIDITVPSDYNIGAKEIEKLSKYHLLRTEITRLWKTSTTIIPIVIGATGVIAKSLHRYCNRLDSNINIHIIQKQAAIHTSTILSKVLGNSVFTGETDSPSP

SEQ ID NO: 8569 - protein, 1256 aa, Carterocephalus mandan
MMKRQLRNLRLGPLPGGRRGTLGAGAERDSMRTASGSSLNRRAGVGGTEDTTADLICDADDALQSRASPANSAGASESTTTSSTISDDARRKWSQGELHELMFCYFKARSEGPGYIKRFEQIFKQRNPNNPKINKFTGNTLSNQARNIIKRKFISSEILEQIKQQAEDNNAADTDILSLTQIRCNNTNTQEQHTTTVTHQLNANTLSLNENINIEEQQINIELEEQQQIDNLTRNIDTSENQEPIILELLQSLAEAHETPISERLHLPKPKFNKQFYENLRKINDFLPNILITNNTLRETNNVIYAAAKTLIVNNGQKPFSTAKVRKQVSDPPWKRRLKSKIEIIRKELGQLTEIGKGINSRKMLKTKDKLYNKHKIFNQQDHDNIVEVLKQKLKAKAGRLKRYEDMNDRKNHNKQFAENQHKFYRNMSRKQQTVTEIPTKEAIETFWNKIIGEPINYHETATWIKEIDEAHIDTEELAFDNINVEQTKQAIRKLSNWKTPGIDKIHNYYLKYLTSTHEFIAKLFNKIFIGTEPLEQWFATGQVILIPKEGDTKDPKNWRPIACLPTMYKLLTSIIAEELYTHCDKNDILAPEQRGCRRRARGCKDHLMVNKAILEDAHQSQKNLSMAWIDYRKAFDSISHEWLLKALELYRCPKSIQNFLRLIIPHWKVTMTAYGRNGAITTDPIHIRRGIFQGDSLSPLLFCIGINPLSQILNKYDLHGYQLKNSIHINHLLYMDDLKIYASNKNKLKVMLDSTEIFTRDIGMSFGLNKCNVLHLKNGRRSGMEGDGHVLLSGEEFQHLQSHNTYKYLGINESGKINHSEVRQQIQKEYLKRVKSLTKTHLNSRNLIKSINTYAIPVLLYSFGIVNFKINDLRAIDTKTRKILAMYNAQHQKADVNRLYVPVDQGGRGLINIEMLYKTQIIKYKKYLKSSNDYLLKSIVTHDKSKDKYSILKEGTEYSEELGIQDINSYTDRELKAAVVKNHLNIWKSKALHGQFLKNVLNKENVDTEFSFQWLKKQPISPTLEASIFAIQDQSVVTNQFERDIMKKPVDGKCRVCLAKDETVQHIVSGCEKLAGTYYTRRHNNVVQYVHWTLAKKHKFQVNHLWWKEYLLQPQVIENDTAKLMWEMPVQTDLTVTHNRPDIIYINKQENHAYLIDISIPSDYNIGAKEIEKLSKYHLLRTEITRLWKMQATVIPIVIGGTGVIAKSLHRYCNRLNSDINIHIMQKQAAIHTSTILSKFLGNTIFAGELESPSP

SEQ ID NO: 8570 - protein, 1165 aa, Urbanus proteus
MKRVLRDLHSGPLPGGRRGTLGAGAERDSMRTASGSSLNRRAGVGESEDTTADIIRDADSALQNSGSATNSAGTSETTTTRSIISEDARRKWSQDELHELMFCFFKAKAEGPGYIKRFENLYKQSNANNPKINKYTGNTLSNQARSIINRKFISEEVLQEIKRRAEQTLNVISTDTVTITSHTQAYTSNDHIHNSIINLTNTSTRQTNCAVNIEVVTEEIIPENNHNEGIIDAAEQQHIHNITETIDTSEDQDKIILDLLQTLSEVKHTPIDERDFLPKPKFNKSFINNLRKINNFLPNLLMTNCTLRETNDVIYAAAKTLIISNDQKPYPPSMTKKPSKDPPWKRRLKTKIDIIRKELGQLTEIGKGVTSKKIHKIKNTLYNKYNIFNKQDHDKMVEIIKQKLKAMAGRLKRYEDINDRKTHNKLFSENEHKFYRSISGQQNIADNIPTKQAIENFWNNIFSKPITYNKTATWIKEIEQSTLDFVANNFDGINLDQVKTAINKLHNWKTPGIDKIHNYYLKYFTNAHIFIANLFDKIFKGIETIEEWFTTGQIILIPKDKDTEDPKNWRPIACLPTMYKLLTSVISDQLYTHCEINNIIAPEQRGCRRRTRGCKDHLMVNKAILEDAHQSQKNLSMGWVDYRKAFDSISHDWLLKALELYRCPNSIIRFLQIVMPSWKVVMTAHSMKGSITTEPIFIRRGIFQGDSLSPLLFCLSINPLSQILNKYELKGYHLRDSIYLNHLLYMDDLKLYAKNRNSLKVLLDSTEIFTQDIGMSFGLNKCSILHLTAGRRKGHEGEGHILLSGQEFQHLQINEKYKYLGINESGKIDHSEVRQQIQKEYFKRVKFLTKTHLSSRNLIKSINTYAVPVLLYSFGVVNFKNSDLKTIDTKTRKLLAINKAHQKKADVDRLYIPIDHGGRGLINLEMLYKTQIIKYNIYLKSGKDDLIKAIVSHDKNRDKYSIHKEARQFREEIGIQDKEYYTEKELKVAVIKKHTNNWKSKALHGQFLKAVLEKENIDTEYSFRWLKKQPISPTLEASIFAIQDQSVITNQFERDIIKKPVTGKCRICLAKDETVQHIVSGCEKLAGTYYTKRHNNIVQYVHWTLAKKHKFDVNQLWWKETLTQPQVLENETAKLMWEIPVQTDKTITHNRPDIIYINKQENHAY

SEQ ID NO: 8571 - protein, 1262 aa, Pyrgus malvae
MMKRQLRNLRTGSLPGGRRGTLGAGAERDSMRDASGSSLSRRAGVRETEYATADTNQNSDDTLQSRESPIDLAGTLEQTTTSSTENISDDSRRKWSQQELHELMFCYFKAKAEGPGYIKRFENLFKTRNLSNPKVKKFTGNTLSNQARSIINRKFISEEVLEEIKTRAEQSLSLSVTDTNREVITPITHTIAPQISTPDNHTTNHTSIQTIQIGTDIHNTVNFEEPIDTSETQQVNNLVQNVDASENQDPIILELLQILAEIKDIPIIERKSLPKPKFNKQFFENLRKINNFLPSLFVTNETLRGINDIIYAAATTLITINGQKAYSSIRGRRPPIDPPWKRRLKTKIDVIRKELGQFTEIAKGVNSRKMIKVKTTLYTKYNINNNQEHANTVEILKQKLKAIAGRLKRYEDMSNRKNHNKLFAENQHKFYRNMSGVQQAVVEAPTKEAIESFWENILARPISYNKSATWIKEIEESNSVIEETDFDNITIEQVKIAINKLHNWKTPGIDKIHNYYLKYFTSAHEYITKLYNKLIKCQETHEEWFTTGNVILIPKEGDTRDPKNWRPIACLPTMYKLLTSVIANQLYVHCESNDIIAPEQRGCRRRARGCKDHLMINKAILEDAHLSQKSLSMGWVDYRKAFDSISHEWLLKILDLYKCPKTIKIFLQTIMTSWKVVMTAYGQNGPITTETISVRRGIFQGDSLSPLLFCLCINPLSQILNKYSLKGYHLKDSIYINHLLYMDDLKVYAHNKNSLNVLLDSTEIFTRDIGMSFGLNKCNVLHLKAGRCSGREGEGHVLLSGEQFQHLQSNDRYKYLGIHESGKIDHTEVRQQIQKEYISRVKTLAKTHLNSRNLIKSINTYAIPVLLYSFGIVNFKTSDLKAIDTKTRKVLAIHKAHQQKADVSRLYIPIEEGGRGLINVEMMYKTQIIKYNKYFKSEKDHLIKAIVVHDKLRDKYSIHKEARQFSEEIELQNRNDYTEKELKTAVVRKHINTWKSKALHGQFLKSVLEKENIDTEFSFRWFKKQPISPTLEASIFCIQDQSIITKQFERDIMKKTVDGKCRICQAKDETVQHIISGCEKLAGTYYIRRHNNIVQYIHWTLAKKHKFEVNSLWWKETLTQPQVIENDTAKIIWEMPVQTDITVANNRPDIIYINKKENHTYLIDITVPSDYNIGAKEIEKLSKYHLLRTEITRLWKTSTTIIPIVIGATGVIAKSLHRYCNRLDSNINIHIIQKQAAIHTSTILSKVLGNSIFTGETDSPSP

SEQ ID NO: 8572 - protein, 1262 aa, Pyrgus malvae
MMKRQLRNLRTGSLPGGRRGTLGAGAERDSMRDASGSSLSRRAGVRETEYATADTNQNSDDTLQSRESPIDLAGTLEQTTTSSTENISDDSRRKWSQQELHELMFCYFKAKAEGPGYIKRFENLFKTRNLSNPKVKKFTGNTLSNQARSIINRKFISEEVLEEIKTRAEQSLSLSVTDTNREVITPITHTIAPQISTPDNHTTNHTSIQTIQIGTDIHNTVNFEEPIDTSETQQVNNLVQNVDASENQDPIILELLQILAEIKDIPIIERKSLPKPKFNKQFFENLRKINNFLPSLFVTNETLRGINDIIYAAATTLITINGQKAYSSIRGRRPPIDPPWKRRLKTKIDVIRKELGQFTEIAKGVNSRKMIKVKTTLYTKYNINNNQEHTNTVEILKQKLKAIAGRLKRYEDMSDRKNHNKLFAENQHKFYRNMSGVQQAVVEAPTKEAIESFWENILARPISYNKSATWIKEIEERNSEIEETDFDNITIEQVKIAINKLHNWKTPGIDKIHNYYLKYFTSAHEYITKLYNKLIKCQETHEEWFTTGNVILIPKEGDTTDPKNWRPIACLPTMYKLLTSVIANQLYVHCESNDIIAPEQRGCRRRARGCKDHLMINKAILEDAHLSQKSLSMGWVDYRKAFDSISHEWVLKTLDLYKCPKTIKTFLQIIMPSWKVVMTAYGQNGPITTETISVRRGIFQGDSLSPLLFCLCINPLSQILNKYSLKGYHLKDSIYINHLLYIDDLKVYAHNKNSLNVLLDSTEIFTRDIGMSFGLNKCNVLHLKAGRCCGREGEGHVLLSGEEFQHLQSNDRYKYLGIHESGKIDHTEVRQQIQKEYISRVKTLAKTHLNSRNLIKSINTYAIPVLLYSFGIVNFKTSDLKAIDTKTRKVLAIHKAHQQKADVSRLYIPIEEGGRGLINVEMMYKTQIIKYNKYLKSEKDHLIKAIVVHDKLRDKYSIRKEARQFSEEIELQNRNDYTEKELKTAVVRKHINTWKSKALHGQFLKSVLEKENIDTEFSFRWFKKQPISPTLEASIFCIQDQSIITKQFERDIMKKTVDGKCRICQAKEETVQHIISGCEKLAGTYYIRRHNNIVQYIHWTLAKKHKFEVNSLWWKETLTQPQVIENDTAKIMWEMPVQTDITVANNRPDIIYINKKENHTYLIDITVPSDYNIGAKEIEKLSKYHLLRTEITRLWKTSTTIIPIVIGATGVIAKSLHRYCNRLDSNINIHIIQKQAAIHTSTILSKVLGNSIFTGETDSPSP

SEQ ID NO: 8573 - protein, 1262 aa, Pyrgus malvae
MMKRQLRNLRTGSLPGGRRGTLGAGAERDSMRDASGSSLSRRAGVRETEYATADTNQNSDDTLQSRESPIDLAGTLEQTTTSSTENISDDSRRKWSQQELHELMFCYFKAKAEGPGYIKRFEKLFKTRNLSNPKVKKFTGNTLSNQARSIINRKFISEEVLEEIKTRAEQSLSLSVTDTNREVITPITHTTAPQITTPANHTTNHTSIQTIQIGTDIHNTVNFEEPIDTSETQQVNDLVQNVDASENQDPIILELLQILAEIKDIPIIERKSLPKPKFNKQFFENLRKINNFLPSLFVTNETLRGINDIIYAAATTLITINGQKAYSSIRGRRPPIDPPWKRRLKTKIDVIRKELGQFTEIAKGVNSKKMIKVKTTLYTKYNINNNQEHANRVEILKQKLKAIAGRLKRYEDMSDRKNHNKLFVENQHKFYRNMSGVQQAVVEAPTKEAIESFWENILARPISYNKSATWIKEIEESNSEIEETDFDTITIEQVKIAINKLHNWKTPGIDKIHNYYLKYFTSAHEYITKLYNKLIKCRETHEEWFTTGNVILIAKEGDTRDPKNWRPIACLPTMYKLLTSVIANQLYVHCESNDIIAPEQRGCRRRARGCKDHLMINKAILEDAHLSQKSLSMGWVDYRKAFDSISHEWLLKILDLYKCPKTIKIFLQTIMTSWKVVMTAYGQNGPITTETISVRRGIFQGDSLSPLLFCLCINPLSKILNKYSLKGYHLKDSIYINHLLYMDDLKVYAHNKNSLKVLLDSTEIFTRDIGMSFGLNKCNVLHLKAGRCSGREGEGHVLLSGEEFQHLQINDRYKYLGIHESGKIDHTKVRQQIQKEYISRVKTLAKTHLNSRNLIKSINTYAIPVLLYSFGIVNFKTSELKAIDTKTRKVLAIHKAHQQKSDVSRLYIPIEQGGRGLINVEMMYKTQIIKYNKYLKSEKDHLIKAIVVHDKLRDKYSIHKEARQFSEEIELQNRNDYTEKELKTAVVRKHINIWKSKALHGQFLKSVLEKENIDTEFSFRWFKKQPISPTLEASIFCIQDQSIITKQFERDIMKKTVDGKCRICQAKDETVQHIISGCEKLAGTYYIRRHNNIVQYIHWTLAKKHKFEVNSLWWKETLTQPQVIENDTAKIMWEMPVQTDITVANNRPDIIYINKKENHTYLIDITVPSDYNIGAKEIEKLSKYHLLRTEITRLWKTSTTIIPIVIGATGVIAKSLHRYCNRLDSNINIHIIQKQAAIHTSTILSKVLGNSIFTGETDSPSP

SEQ ID NO: 8574 - protein, 1265 aa, Euriphellus phraxanor
MKRVPTDLRQGPLPGVRRGTLGAGAERDSIRTASGSSLNRRAGVGESEVTTADIISDADVALQSSGSSRSSAGTPDTTTTRLTMSEDARRKWSQDELHELMFCYFKAKSEGPGYIKRFERIFKQRNPNNPKVNKYTGNTLSNQARSIINRKFISEEVLQEIKRQAEHPATSTITTTTNTNSLSITLNTNTPGINSNIIQPYTRTESNSEVRVDIDPENIISEHRQEEEVTDAATQKQINDLTRNIDTSEDQDPIILEFLQTLAEVKEIPINERYFLPKPKFNKHFFDNFRKINDFLPSLLITNCTLRETNDVIYAAAKTLIVINGQKPYPPSITKKAPKDPPWKRRIKSTIDIIRKELGQLTEIGKGINSKKILKIKTTLYNKYRIFSQKDHDNIVEILKQKLKAKAGRLKRYEDMNDRKVQNNLFTENQHKFYRTISGKANIASNIPTKEAIETFWNNIIAKPVTYNKTAAWIKEIEETTLNINEHKFDSIDLDQIKLAIKKIHNWKTPGIDKIHNYYIKYFTSSHEYIAKLFDKIFKGSEAIEEWFTTGQVILIPKDTDTEDPKNWRPIACLPTMYKLLTSVIADQLYAHCENNDIIAPEQRGCRRRARGCKDHLMVNKAILEDAHLSQKNLSTGWVDYSKAFDSISHDWLLKVLELYRCPKAIRNFLKTVIPKWKVVMTAHGMNGSITTEPIYIRRGIFQGDSLSPLLFCMSINPLSQILNKYDLRGYHLRDSAYINHLLYMDDLKLYAKDKNSLKVLLDSTEIFTQDIGMSFGLNKCNILHLTAGRRSSHEGEGHILLSGLEFQHLQSNEKYKYLGIHESGKIDHSEVRQQIQKEYFKRIKCLNRTHLNSRNLIKSINTYAIPVLLYSFGVVNYKNNDLKIIDTKTRKLLALKKAHQKKADVSRLYIPIEEGGRGLINVEMLYKTQIIKYKRYLKTGEDHLIKAIVVHDKNRDKYSIHKEARQFSEEIGIQDRDDYTEKELKTAVVRKQVSNWKSKALHGQFLRAVLEKENIDTEYSFRWLKKQPVSPTLEASIFSIQDQSVITNQFERDIMKKPVNGKCRICSAKDETVQHIISGCEKLAGTYYTKRHNNIVQYIHWTIAKKHKFNVNPLWWKENLTQPQVIENESAKLMWEIPVQTDKTVTHNRPDIIYINKQENHIYLIDITVPSDYNIGAKEVEKLSKYHLLKNEITRLWKMPTTIIPIVIGATGVVARSLHKYCNKLDSTINIHILQKQAAIHTTTILSKILGTSIFTGEAESSSP

SEQ ID NO: 8575 - protein, 871 aa, Telegonus cellus
MVEIIKQKLKAMAGRLKRYEDINDRKTHNKLFSENEHKFYRSISGQQNIADNIPTKQALENFWTNILAKPITYNKTATWIKEIEQSALDFNEHNFDSVSLDQVKTAINKLHNWKTPGIDKIHNYYLKYFTNAHTFIANLFDKIFKGTETIEEWFTTGQVILIPKDEDTKDPKNWRPIACLPTMYKLLTSIIADQLYTHCENNNIIAPEQRGCRRRARGCKDHLMVNKAILEDAHQSQKNLSMGWIDYRKAFDSISHDWLLKALDLYKCPKSISRFLQTVMPRWKVVMTAHSMNGSITTDPIFIRRGIFQGDSLSPLLFCLSINPLSQILNKYKLKGYHLRDSIYLNHLLYMDDLKLYANNKNSLKVLLDSTEIFTIDIGMSFGLNKCSILHLTAGRRKGHEGEGHILLGGEEFQHLQSHEKYKYLGINESGKIDHSEVRQQIQKEYFRRVKCLTKTHLSSRNLFKSINTYAVPVLLYSFGVVNYKNSDLKTIDTKTRKLLAINKAHQKKADVNRLYIPIEHGGRGLINLETLYKTQIIKYNVYLKTGKDDLIKAIVNHDKNRDKYSIYKEARQFREEIGIQDKEYYTEKELKIAVVKKYTNNWKSKVLHGQFLRAVLEKENIDTEYSFRWLKKQPVSATLEASIFAIQDQSVITNQFERDIIKKPVTGKCRICLSKDETVQHIVSGCEKLAGTYYTKRHNNIVQYVHWTIAKKHKFNVNQLWWKETLTQPQVIENETAKLMWEIPVQTDKTITHNRPDIIYINKQENHAYLIDISIPSDYNIGAKEIEKLSKYHPLKIEINRLWKIPTTVIPVIIGTTGIVARSLHKYCNKLDSNINIHILQKQAAIHTSTILSKILGNSILAGETESPSP

SEQ ID NO: 8576 - protein, 1232 aa, Pyrgus malvae
MRDASGSSLSRRAGVRETEYATADTNQNSDDTLQSRESPIDLAGTLEQTTTSSTENISDDSRRKWSQQELHELMFCYFKAKAEGPGYIKRFEKLFKTRNLSNPKVKKFTGNTLSNQARSIINRKFISEEVLEEIKTRAEQSLSLSVTDTNREVITPITHTIAPQITTPDNHTTNHTSIQTIQIGTDIHNTVNFEEPIDTSETQQVNDLVQNVDASENQDPIILELLQILAEIKDIPIIERKSLPKPKFNKQFFENLRKINNFLPSLFVTSETLRGINDIIYAAATTLITINGQKAYSSIRGRRPPIDPPWKRRLKTKIDVIRKELGQFTEIAKGVNSRKMIKVKTTLYTKYNINNNQEHTNTVEILKQKLKAIAGRLKRYEDMSDRKNHNKLFAENQHKFYRNMSGVQQAVVEAPTKEAIESFWENILARPISYNKSATWIKEIEERNSEIEETDFDNITIEQVKIAINKLHNWKTPGIDKIHNYYLKYFTSAHEYITKLYNKLIKCQETHEEWFTTGNVILIPKEGDTTDPKNWRPIACLPTMYKLLTSVIANQLYVHCESNDIIAPEQRGCRRRARGCKDHLMINKAILEDAHLSQKSLSMGWVDYRKAFDSISHEWVLKTLDLYKCPKTIKTFLQIIMPSWKVVMTAYGQNGPITTETISVRRGIFQGDSLSPLLFCLCINPLSQILNKYSLKGYHLKDSIYINHLLYIDDLKVYAHNKNSLNVLLDSTEIFTRDIGMSFGLNKCNVLHLKAGRCCGREGEGHVLLSGEEFQHLQSNDRYKYLGIHESGKIDHTEVRQQIQKEYISRVKTLAKTHLNSRNLIKSINTYAIPVLLYSFGIVNFKTSDLKAIDTKTRKVLAIHKAHQQKADVSRLYIPIEEGGRGLINVEMMYKTQIIKYNKYLKSEKDHLIKAIVVHDKLRDKYSIRKEARQFSEEIELQNRNEYTEKELKTAVVRKHINTWKSKALHGQFLKSVLEKENIDTEFSFRWFKKQPISPTLEASIFCIQDQSIITKQFERDIMKKTVDGKCRICQAKEETVQHIISGCEKLAGTYYIRRHNNIVQYIHWTLAKKHKFEVNSLWWKETLTQPQVIENDTAKIMWEMPVQTDITVANNRPDIIYINKKENHTYLIDITVPSDYNIGAKEIEKLSKYHLLRTEITRLWKTSTTIIPIVIGATGVIAKSLHRYCNRLDSNINIHIIQKQAAIHTSTILSKVLGNSIFTGETDSPSP

SEQ ID NO: 8577 - protein, 1159 aa, Pyrgus malvae
MFCYFKAKAEGPGYIKRFEKLFKTRNLSNPKVKKFTGNTLSNQARSIINRKFISEEVLEEIKTRAEQSLSLSVTDTNREVITPITHTIAPQITTPDNHTTNHTSIQTIQIGTDIHNTVNFEEPIDTSETQQVNDLVQNVDASENQDPIILELLQILAEIKDIPIIERKSLPKPKFNKQFFENLRKINNFLPSLFVTNETLRGINDIIYAAATTLITINGQKAYFSIRGRRPPIDPPWKRRLKTKIDVIRKELGQFTEIAKGVNSRKMIKVKTTLYTKYNINNNQEHANTVEILKQKLKAIAGRLKRYEDMSDRKNHNKLFAENQHKFYRNISGVQQAVVEAPTKEAIESFWENILARPISYNKSATWIKEIEESNSEIEETDFDNITMEQVKIAINKLHNWKTPGIDKIHNYYLKYFTSAHEYITKLYNKLIKCQETHEEWFTTGNVILIPKEGDTRDPKNWRPIACLPTMYKLLTSVIANQLYVHCESNDIIAPEQRGCRRRARGCKDHLMINKAILEDAHLSQKSLSMGWVDYRKAFDSISHEWILKTLDLYKCPKTIKTFLQIIMPSWKVVMTAYGQNDPITTETINVRRGIFQGDSLSPLLFCLCINPLSQILNKYSLKGYHLKDSIYINHLLYMDDLKVYAHNKNSLNVLLDSTEIFTRDIGMSFGLNKCNVLHLKAGRCSGREGEGHVLLSGEEFQHLQSNDRYKYLGIHESGKIDHTEVRQQIQKEYISRVKSLAKTHLNSRNLIKSINTYAIPVLLYSFGIVNFKTSDLKAIDTKTRKVLAIHKAHQQKADVSRLYIPIEEGGRGLINVEMMYKTQIIKYNKYLKSEKDHLIKAIVVHDKLRDKYSIHKEARQFSEEIELQNRNDYTEKELKTAVVRKHINTWKSKALHGQFLKSVLEKENIDTEFSFRWFKKQPISPTLEASIFCIQDQSIITKQFERDIMKKTVDGKCRICQAKDETVQHIISGCEKLAGTYYIRRHNNIVQYIHWTLAKKHKFEVNSLWWKETLTQPQVIENDTAKIMWEMPVQTDITVANNRPDIIYINKKENHTYLIDITVPSDYNIGAKEIEKLSKYHLLRTEITRLWKTSTTIIPTVIGATGVIAKSLHRYCNRLDSNINIHIIQKQAAIHTSTILSKVLGNSVFTGETDSPSP

SEQ ID NO: 8578 - protein, 1262 aa, Pyrgus malvae
MMKRQLRNLRTGSLPGGRRGTLGAGAERDSMRDASGSSLSRRAGVRETEYATADTNQNSDDTLQSRESPIDLAGTLEQTTTSSNENISDDSRRKWSQQELHELMFCYFKAKAEGPGYIKRFEKLFKTRNLSNPKVKKFTGNTLSNQARSIINRKFISEEVLEEIKTRAEQSLSLSVIDTNREVITPITHTIAPQITTTDNHTTNHTSIQTIQIGTDIHNTENFEEPIDTSETQQVNDLVQNVDASENQDPIILELLQILAEIKDIPIIERKSLPKPKFNKQFFENLRKINNFLPSLFVTNETLRGINDIIYAAATTLITINGQKAYSSIRGRRPPIDPPWKRRLKTKIDVIRKELGQFTEIAKGVNSKKMIKVKTTLYIKYNINNNQEHANRVEILKQKLKAIAGRLKRYEDMSDRKNHNKLFAENQHKFYRNMSGVQQAVVEAPTKEAIESFWENILARPISYSKSATWIKEIEESNSEIEETDFDTITIEQVKIAINKLHNWKTPGIDKIHNYYLKYFTSAHEYITKLYNKLIKCQETHEEWFTTGNVILIPKEGDTRDPKNWRPIACLPTMYKLLSSVIANQLYVHCESNDIIAPEQRGCRRRARGCKDHLMINKAILEDAHLSQKSLSMGWVDYRKAFDSISHEWLLKILDLYKCPKTIKIFLQTIMTSWKVVMTAYGQNGPITTETISVRRGIFQGDSLSPLLFCLCINPLSQILNKYSLKGYHLKDSIYINHLLYMDDLKVYAHNKNSLNVLLDSTEIFTRDIGMSFGLNKCNVLHLKAGRCSGREGEGHVLLSGEQFQHLQSNDRYKYLGIHESGKIDHTEVRQQIQKEYISRVKTLAKTHLNSRNLIKSINTYAIPVLLYSFGIVNFKTSDLKATDTKTRKVLAIHKAHQQKADVSRLYIPIEQGGRGLINVEMMYKTQIIKYNKYLKSEKDHLIKAIVVHDKLRDKYSIHKEARQFSEEIELQNRNDYTEKELKTAVVRKHINTWKSKVLHGQFLKSVLEKENIDTEFSFRWFKKQPISPTLEASIFCIQDQSIITKQFERDIMKKTVDGKCRICQAKDETVQHIISGCEKLAGTYYIRRHNNIVQYIHWTLAKKHKFEVNSLWWKETLTQPQVIENDTAKIMWEMPVQTDITVANNRPDIIYINKKENHTFLIDITVPSDYNIGAKEIEKLSKYHLLRTEITRLWKTSTTIIPIVIGATGVIAKSLHRYCNRLDSNINIHIIQKQAAIHTSTILSKVLGNSVFTGETDSPSP

SEQ ID NO: 8579 - protein, 1245 aa, Ectomis pervivax
MKRVLKDLRTGPLPGGRRGTLGAGAERDNMRTASGSSLNRRAGAGETENTTADIISDADDALQNRGSPTSSAGTLETTTTRSIISDDARRKWSQDELQELMFCYYKAKSAGPGYIKRFECLFKQRNPTNPKIHKYTGNTLSNQARSIINRKFISEEVLQEIKRQAEHTTTAISTDSTVATQNTQLTNNKLDVETAADNIIIEDYENKEVTDAAEHQQINDITRSIDTSENQDPVILEFLQTLAEVNDTPIDKRYFLPKPKFNKFFFENLHKINNFLPTLLMTNRTLRETNNVIYAAAKTLIIKNGQKPYLLSVMKKSSKDPPWKRRLKSKIDVIRKELGQLTEIGNGINSRKILKIKNILYNKYNIFTRQDHDKIAEILKQKLKAIAGRLKRYEDINDRKIQNNLFTENQHKFYRKVSGQKNNTSNIPTKDAIETFWMNILGQPITYNKTASWIKDIEEATSDIDEHNFDTISLDQIKNAINKLSNWKTPGIDKIHNFYLKYLTNSHEFIAKVFDKIFKGIEPIEEWFTTGQVILIPKDTDTKDPKNWRPIACLPTMYKLLTSIIADQLYIHCESNDIIAPEQRGCRRHTRGCKDHLMVNKAILEDAHQSQKNLSMGWIDYRKAFDSISHDWLLKVLELYKCPKSIRYFLQMVMPNWNVIMTAHGTNNTVTTDPIYIRRGIFQGDSLSPLLFCICINPLSQILNKYDLQGFHLKDSVYINHLLYMDDLKIYAKNKNSLNVLLNSTEIFTHDIGMSFGLNKCNILHLTTGRRSSHEGEGHILLSGEEFNHLKSNEKYKYLGINESGKIDHNEVRQQVQKEYFRRVKCLTRTHLHSRNLIKSINTYAIPVLLYTFGVVNYKISDLKLIDTKTRKLLAINKAQQKKADVNRLYIPMEQGGRGLINIEMLYKSQIIKYKKYLKSGKDHIIRAIVVYDKSRDKYSIHKEAKQFSEEISIRDRHDVTEREVNVAVIRKHINNWKSKVLHGQFLRAVLEKENIDTEYSFRWFKKQPVSPTLEASIFSIQDNSIITNQFERDIMKKPVDGKCRLCLAKDETIQHLVSGCEKLAGTYYTKRHNNIVQYIHWTIAKKHKFNVDQLWWKETLKQPQIIENETAKLMWEMPVQTDRTVTHNRPDIIYINKIENHAYLIDITIPSDYNIGAKEVEKLSKYHLLKTEITRLWKIPTSVIPIVIGATGIVARSLHKYCNRLDSHINIHILQKQAAIHTTTILSKILGNTIFAGETEFPSP

SEQ ID NO: 8580 - protein, 1260 aa, Astraptes enotrus
MKRVLRDMHSGPLPGVRRGTLGADAERDSIRTVSGSSLNRRAGVGEPEDTTADIFSDADCALQSSDFPTNSAGTSEMTTTRSIISEDARRKWSQDELQELMFCYFKAKAEGPGYIKRFEYIFKQRNPNNPKINKYTGNTLSNQARSIINRKFMSEEVLQKIKRQAEHTLNVINTDSVSTTPHTQTYTTNIQIHQPHTDTQTNCNVNIEIIPDDINLEHNQSEEIIHAAEQQQINDITGNIDTSEDQDQIILDLLQTLAEVKHTAIDQRYLLPKPKFNKLFIDNLRKINNFLPTLLITNCTLRETNDVIYAAAKTLIVTNGQKPYPPSIIKKPSKDPSWKRRLKTKIDIFRKELGQLTEIGKGVNSRKLLKIKNTLYNKYNIFSQQDHDKIVEIIKQKLKATAGRLKRYEDINDRKTQNNLFLENEHKFYRSMSGQQNSASDIPTKEALEDFWKNILAVPVTYNKTATWIKEIEQSTATFDEYNFDGINLDQIKTAINKLHNWKTPGVDRIHNYYLKYFTSCHTFLANLFNKIFKGTETVEEWFTTGQVILIPKDKDTKDPKNWRPIACLPTMYKLLTSVIADQLYRHCENNNIIAPEQRGCRRRARGCKDHLMVNKAILEDAHQSQKNLSMGWVDYRKAFDSISHDWLLKALELYRCPTSIRSFLQMVMPTWKVVMTAHSMKGSITTDPIHIRRGIFQGDSLSPLLFCLSINPLSQILNKYELSGYHLKDSVYINHLLYMDDLKLYAKNKNSLNVLLDSTEVFTQDIGMRFGLNKCNILHLTAGRRKGHEGQGHILLSGEEFQHLQSHERYKYLGINESGTIDHSEVRQQIQKEYFKRVKYLTKTHLNSRNLIKSINTYAVPILLYSFGVVNYKYNDLKAIDTKTRKLLAINKAQQKKADVSRLYIPIEQGGRGLVNVEMLYKTQIIKYNKYLKTGKDDLIKAIVVHDKNRDKHSIYKEARQFAEEIGIQDKEYYTEKELKTAVVKKHIINWKSKALHGQFLRAVLEKDNIDTEYSFRWLKKQPISPTLEASIFSIQDQSIITNQFERDIIKKPVTGKCRICLAKDETVQHIVSGCEKLAGTYYTKRHNNIVQYIHWTIAKKHKFNVNQLWWKENLTQPQVIENETAKLMWEMPVQTDKTITHNRPDIIYINKQENRAYLIDVSIPSDYNIGAKEIEKLSKYHPLKNEITRLWKIPTTVIPIIIGTTGIIAKSLHKYCNILDSNINIHIVQKQAAIHTSTILSKILGNNVFVGETESPSP

SEQ ID NO: 8581 - protein, 1264 aa, Choaspes benjaminii
MNIMEKRLKDLRQGPLPGERRGTLGAGAERDSMRTASGSSLNRRARAGEPEVTTAEKIRDADDALQSRESPTSSAGTLDSTTTRSIPIDDARRKWSQVELHELMFCYFKARSQGPGYIKRFEQLFKQRNHNNPKINKFTGNTLSNQARSIINRKFISQEVLDDIKQRAEQKSSTENTTYLSTTTHTHTNTIHEQESHENIQQHSNDTAHHTPNHNTDTQTTNNNTSNRLPQIDETKINDTVHSIDTRENQDPLILDLLQIFAETKETPIIERKFLPKPKLNKQFFDNLHKINDFLPNLLITNTNLVDTNNIIYAAARTLTIANGQKPYSTPKTMKQARDPPWKRRLKSKMEIIRRELGQFTEINKGISSKKVQKAKENLYNKYHIFSQQEHDNTVEILKQKLKAKSGRLRRYEDMNKRKTQNKLFQENEHKFYRTQTEKQHEVQEIPTKEEIENFWTNILSQPVPYNKTATWIKETEQLHTNNEEYKFDNITTSQIKHAVKRLHNWKTPGIDKIQNFYLKYLTTTHEFIAQLFDNIFKGKEIIEEWFTTGNVILIPKDSNPQDPKNWRPIACLPTMYKLLTSVITDQLYAHCDRNRIIAPEQRGCRRRTRGCKDHLMINKAILEDAHQSQKNLSMGWIDYRKAFDSISHEWILHVLDLYKCPKSIKSFLQVVMPRWKVIMTARGKHGAVTTDPINVRRGIFQGDSLSPLLFCIAINPLSQILNKYDLQGYHLKDSIYVNHLLYMDDLKLYANNKNNLKVLLDSTESFTRDIGMTFGLNKCNILHLKAGRRSKHEGEGHVLLSGEVFQQLPRNDTYKYLGINESGKIDHSEVRQQIQKEYFKRVKNITKTHLNSRNLVKAVNTYAIPTLLYSFGIVNYRNSDLKAIDTKTRKILAINKAHQQKAEVNRLYIPIEMGGRGLTNVELLYKTQIIKYKTYLDSESDYLIKAIAAHDKTRDKYSIYKEARKFSEEVGIQDRQNYTDREIKSAVIRKLTNQWKSKALHGQFLRGILEKDNIDKEYSFKWLIKQPISPILEASIFSIQDQAVITNQFERDIIKKSVDGKCRLCLAKDETVQHIVSGCEKLAGTYYTKRHNNIVQYIHWTIAKKHKFDVDKLWWKQTLTKPQVIENETAKLMWEMPVQTDITVTHNRPDIIYINKTQNHAYLIDISVPSDYNIGPKEIEKLSKYHLLKTEINRLWKIPTTIVPIVVGATGIVAKSIHRYCSKLDTNINIHIIQKQAAIFTNTILSKTLGNCLFTGDPELPSP

SEQ ID NO: 8582 - protein, 1260 aa, Astraptes hopfferi
MKRVLRDLQLGSLPGVRRGTLGAGAERDSIRTASGSLLNRRAGVGGPEDTTADIISVTECALQNSGPSTISAGASETTTTRSIISDDARRKWSQDELQELMFCYFKAKAEGPGYIKRFEHIFKQRNPNNPKINKYTGNTLSNQARSIINRKFISEEVLQEIRRQAEDRPNVAITSHTQTYTPDNQIHNSIINQTNTDTRQTNSSVNLEVVTDEVILEHNQNEEIIDGAEQQQIHNITGTIDTSEDQDQIILDLLQTLAEVKHTPIDERYFLPKPKFNKPFIDNLGKINHFLPNLLRTNCTLKETNDVIYAAAKTLIITNGQKPYLPTTKKKPSKDPPWKRRLKTKIDIIRKELGQLTEIGKGVNSRKILKIKNTLYNKYNIFNQQDHEKMVEIIKQKLKAMAGRLKRYEDINDRKTHNKLFTENEHKFYRSISGQQNVADNIPTKQALENFWNNILAKPITYNKTATWIKEIEQSALDFDEHNFDSISLDQIKTAINKLHNWKTPGIDKIQNYYLKYFTNAHIFIANLFDKIFKGTEMIEDWFTTGQVILIPKDKDTKDPKNWRPIACLPTMYKLLTSVIADQLYTHCENNNIIAPEQRGCRRRARGCKDHLMVNKAILEDAHQSQKNLSMGWIDYRKAFDSVSHDWLLKTLELYKCPKSISRFLQMVMPGWKVVMTAHSMNGSITTDPIIIRRGIFQGDSLSPLLFCLSINPLSQILNKYELKGYHLRDSIYLNHLLYMDDLKLYANNKNSLKVLLDSTEIFTQDIGMSFGLNKCSILHLIAGRRKGHEGEGHILLSGEEFQHLQSHEKYKYLGINESGKIDHSEVRQQIQKEYFRRVKNLTKTHLSSRNFIKSINTYAVPVLLYSFGVVNYKNSDLKTIDTKTRKLLAINKAHQKKADVNRLYIPIEHGGRGLINVEILYKTQIIKYNTYLKSGKDDFIKAIVNHDKNRDKYSIYKEARQFREELEIQDKEYYTDKELKIAVVKKHTNNWKSKVLHGQFLRKVLEKENIDTEYSFRWLKKQPVSPTLEASIFAIQDQSVITNQFERDIIKKPVSGKCRICLAKDETVQHIVSGCEKLAGTYYTKRHNNIVQYVHWTIAKKHKFNVNQLWWKETLTQPQVIENETAKLMWEMPVQTDKTITHNRPDIIYINKQDNHAYLIDISIPSDYNIGAKEIEKLSKYHPLKIEINRLWKIPTTVIPVIIGATGIVARSLHKYCNKLDSNINIHILQKQAAIHTSTILSKILGNSILTGETESPSP

SEQ ID NO: 8583 - protein, 1258 aa, Ochlodes sylvanus
MMKRQLRNLRQGPLPGDRRGTFGADAERDSMRTVSGSSLNRRARVGETEDTTADIIRDADDALQSTGYPASSAGASETTTTSSLTTDDARRKWSQEELYELMFCYFKARAEGPGYIKRFEQLFKQRNRNNPKVVKFTGNTLSNQARSIINRKFISAELLDKIKQQAEQSITNTQSVASLTVTQNTNTCVPYDTQQTNLNIDHRADTDSVDINTIITSEDTELADTEELQQINDLTSNINVSENEDPIILNLLQSLAEIKETSIAQRKVLPKPKFNRQFFDNLRKINNFLPKLLITNSTLREINNIIYAAAKTLIIENKQAPYTPKTRTKPVSDPPWKRRLKNKIDIIRKELGQLTEIGKGLNSKKLLKAKNKLYAKYNVFNKQEHDNIVEILKQKLKAMAGRLKRYDDINDRKIQNKQFLENQHKFYRSISGKQQTANEIPSKETVETFWKDIISQPITYNKNASWIRDIEETNTHIVEHNFDTITVEQVKHAIGKLHNWKTPGIDQIHNYYLKYFTSTHKFIAKLFNRIFKGTEIIEEWFTTGLVILIPKDGDTSDPKNWRPIACLPTMYKLLTSIISNELYIHCNNNDIFAPEQRGCRRQTRGCKEHLMINKAILEDAHQSHKNLSMGWIDYRKAFDSISHEWLLKVLSLYKCPESITNFLRLVIPNWKVIMTAHGSHNSITTDPIHIRRGIFQGDSLSPLLFCIGINPLSQILNKYELKGYHLKDSAYINHLLYMDDLKVYANNKNSLKILIDSTEIFTRDIGMSFGLNKCNILHLTAGVKSGQEGEGHILLSGEEFEHLHNNERYKYLGINESGKIDHNEVRQQIQKEYFRRVKCLTRTHLNARHLIKSINTYAVPVLLYSFGVVNYKNNDLKTIDTKTRKLLAINKAHHQKADVNRLYIPIDQGGRGLINLEMLYKTQIIQYNNYLKSKNDHLIKAIVAHDKQRDKYSIYKESKQFSEEIGLQSKENYTVKEIKNLTVKKHINSWKNKAMHGQFLKGVLEKDNIDTEFSFRWLKKQTVSPTLEASIFSIQDQSIITNQFERDIIKKPVDGKCRVCLAKDETVQHIVSGCEKLAGTYYTKRHNNIVQYVHWTIARKHKFNVNQLWWKETLVKPQVIENESAKLMWEMPVQTDITVAHNRPDIIYINKQENHVYLIDITVPSDYNIGAKEIEKLSKYHLLKTEITRLWKIPTTVIPIVIGATGVIAKSLHRYCNKINSEINIHIMQKQAAIHTSTILSKVLGNVIFAGETESPSP

SEQ ID NO: 8584 - protein, 1247 aa, Perichares adela
MMKRQLRNLRQGPLPGVRRGTFGAGAERDSMRNASGSSLNRRARVGEPEDTTADTTRDADDTLLGRVLPTSSAGASETTTTSSLTAEDARRKWSQEELHELMFCYFKARAEGPGYIKRFERIFKERNRNNPKAAKFTGNTLSNQARGIINRKFISAELLDEIKQQAENTTTQLESLPPVTQYTHNSIINSESNTDEGLDLDVNNVISGEIELNTEQAEQINDLTLSIDTSENQDPIILKFLETLAEVKETPIVQRKFLPKPKFNKIFFDNLRKINNFLPKLLITNDTLTEINNIIYAAAKTLIIDNKQIPYTQLAKKKSPSDPPWKRRLKSKIDIIRKELGQLTEIGKGLSSKKLLKAKHILYTKYNIFNKQDHDNIVEILKQKLKAKAGRLKRYDDINSKKTQNKQFLENQHKFYRSLSGKQPTTTEIPTKEAIESFWKNIISQPITYNKTASWIRDIEESNKHIEEHNFDSITVEQVKDAISKIHNWKTPGIDQIHNYYLKYFTSTHKFIAKLFDKIFKGIEITEEWFTTGQVILIPKDGDTNDPKNWRPIACLPTMYKLLTSVISNQLYLHCENNDIIAPEQRGCRRQARGCKDHLMINKAILEDAHQSQKNLSMGWIDYQKAFDSISHDWLLKVLELYKCPKSITNFLRLVIPNWKVVMTAHSTKGSVTTDPIYIRRGIFQGDSLSPLLFCLGINPLSHVLNKYDLKGYHLKDSIYVNHLLYMDDLKVYAHNKNSLKILLDSTEIFTRDIGMSFGLNKCSILHLTAGRRSGQVGEGHMLLSGKEFKHLQSNEKYKYLGITESGKIDHNEVRQQLQKEYFRRVKCLTRSYLNSRNLIKSINTYAIPVLLYSFGVVNYKNIDLKAIDTKTRKLLAINKAHHQKADVNRLYIPIDQGGRGLINLEMLYKTQIIKYNKYLKYGKDHLLKAIVVHDKSRDKYSIYKESKHFSEEIGLQNEDNYTEKEIKNLVVKKHVNIWKSKALHGQFLKGVLEKENIDTEFSFRWFKKQPVSPTLEASIFSIQDQSIITNQFERDIIKKPVDGKCRVCSARDETVQHIISGCEKLAGTYYTKRHNNIVQYIHWTIARKHEFNVNQLWWKETLVKPQVIENETAKLMWEMPVQTDVTVTHNRPDIIYINKQENHAYLIDVTVPSDYNIGAKEIEKLSKYHLLKTEITRLWKIPTTVVPIVIGATGVIAKNLHRYCNKINSQINIHIMQKQAAIHTNTILSKVLGNVIFAGETESPSP

SEQ ID NO: 8585 - protein, 1247 aa, Ampittia dioscorides
MMKRQLRNLRPGPLPGERRGTLGAGAERDSIRTTSGSSLNRRARVGETEDTTAETTRDADDALQSRDSPTCSAGTSETTTTSSLSSDDARRKWSQEELHLLMFCYFKAKSEGPGYIKRLERLFKQHFGNNPKTSKFNGNTLSNQARSIINRKFISTELLEQIKQQAEQSPTLTQSNLLTSIPNTHIESHITESTTNLSTSTNSNDINTEQHDQQNVEELQQINELTQNIDTTEEQDPLILQFLQIYAEIKDIDINQRNVLPKPKFSKQFFDNLHKINDFLPKLLVTNNTLREVNNLIYAAAKTLIIANHQKPYYSSLIKKPSKDPPWKRRLKTKIDIIRKELGQLTEIGKGLTSKKLQKAKNTLYDKYNIFSPKDHDYIVEILKQKLQAKAGRLKRYEDMILRKTQNKQFVENQHKFYRNISTKQQNATEIPTKQAIETFWQNIIGQPVTYNKEATWIKEIADTNGNVEEHSFSNINVEQVKRAVSKLHNWKTPGVDQIHNFYLKYLTSSHIFLANLFNNIFNGSEAVEEWFTTGQVILIPKEGDTKDPKNWRPIACLPTMYKLLTSIIADQLYTHCENNDIIAPEQRGCRRRTRGCKDHLMINKAILEDAHQSQKNLSMGWIDYRKAFDSISHDWLLKVLDLYKCPKSIVNFLRLVIPHWKVVMTAYGTNGSVTTDPIYIRRGIFQGDSLSPLLFCIGINPLTQILNKYDLKGYHLKDSVHVNHLLYMDDLKLYASNKNNLKILLNSTEIFTQDIGMSFGLNKCSILHLQAGRRREQEGCGHILLSGDEFQYLQSNEKYKYLGINESGKIDHSEVRQQIQKEYFRRVKCLTQSHLNARNLIKSINTFAIPVLLYSFGVINYKNRDLKIIDTKTRKLLSINKAHHQKADVHRLYIPVDQGGRGLINVEMLYKTQIIKYNKYLKTGDDHLLKAIVVHDKNRDKYSLFKESKEFSEELGLQNKDTDTEIKTAVVNSNISSWKNKPLHGQFLKDVLDKQNIDTEFSFRWLKKQLVSPSLEASLFSVQDQAVITNQFERDIMKKPVDGKCRVCLSKDETVQHIVSGCEKLAGTYYTKRHNNIVQYVHWTIARKHKFNVNNLWWKETLVRPQVLENDTAKIMWEMPVQTDVTVTHNRPDIIYINKLENHAYLIDVSIPSDYNIGAKEIEKLSKYHLLKTEITRLWKIPTTIVPIVLGATGIIAKSLHKYCNRLNSNINIHIMQKQAAIHTITITSKVLGNTIFVGETEAPSP

SEQ ID NO: 8586 - protein, 1184 aa, Potamanaxas melicertes
MFCYFKARAEGPGYIKRFERLFKERNSHNLKISKFTGNTLSNQARSIINRKFLSDEVLAEIKSKAEQTSSVHDTDLGSLSPNQPIILESNIILTHHSDINTQQTNHNVVNVDNSIILEQDENSVDMELQQQINNLTQNVEVNDNQDPIILELLRTLAEIKDTPIDERHFLPKPKFNKQFSENMRKINNFLPHLLITNDSLRETNNIIYAAAKTLIECNGQKSFPPLTKRKSFADPPWKRRLKSKIDIIRKELGQFTEIANGVNSRKMSKIKTRLYNKYNIFTAQEHSNTVEILKQKLKAKAGRLKRYEDMNDRKNQNKHFQENQHKFYRTITGNQKVANEIPSKEEIENFWNNILAKPVTYNKSAPWIKEIEDNVIDLQETQFDKITLQQVKIAISKLHNWKTPGVDKIYNYYLKYLTSTHEYLTKLFDKLFKGTEAIEDWFTTGYVILIPKDAETKDPMNWRPIACLPTMYKLLTSVITNELYTHFEKNGIIAPEQRGCRRQARGCKDHLMINKSILEDAHQSQKNLSMGWVDYRKAFDSISHDWLLKVLDLYRCPETIKSFLQMVMPHWKVVMTAHGTNSSITTDPIAIRRGIFQGDSLSPLLFCAAINPLSFILKKYELQGYHLKDSVYVNHLLYMDDLKVYAHNKNSLKVLLDSTEIFTRDIGMCFGLNKCNILHLKAGRRYGQEGEGHILLNGEEFQHLQVKEKYKYLGIHESGKIDHSEVRQQIQKEYFKRVKNLAKTHLNSRNLFKSINTYAIPVLLYSFGIVNFKRSDLKAIDTKTRKLLNINKAHHQKADVSRLYVPVEQGGRGLTNVEMLYKTQIIKYRNYLKTEKDHLIKAIVNHDRARDKYSIDKEAKQFREEIELQNTDTYTDKELKTAVAKKHIIKWKSKVLHGQFLKSVLEKENIDREFSFRWLKKQPVSPTLEATIFSIQDQSIITKQFERDIMKKSVDGKCRICSAKDETVQHIISGCEKLAGTYYTKRHNNIVQYVHWTIAKKHKFEVNKFWWKENLTQPQVIENDTAKLMWEMPVQTDVTVTHNRPDIIYINKTEHQVYLIDVTIPSDYNIGAKEIEKLSKYHLLKTEITRLWKIPTTVIPIVIGATGIIGKSLHKYTIHSHACKIFLHKNQRKQKRTMYSKKKSHFKPHCAVNRHGNLHRNPLQSFSSAYNTPNNDSDNNSTYF

SEQ ID NO: 8587 - protein, 1244 aa, Urbanus sp.
MKRVSRDLHSGPLPGGRRGTLGAGAERDSMRTASGSSLNRRAGVGESEDTTADIIRDADSALQSSGSATNSAGASETTTTRSIISEDARRKWSQDELHELMFCFFKAKAEGPGYIKRFENLFKQRNVNNPKINKYTGNTLSNHARSIINRKFISEEVLQEIKRRAEQTLNIICTDTITPHTQAYISNDHIHNSIVNLTNTNTRHTNCAANIEVVTDEIISEHNHNEEIIDAAEQQHIHNITETIDTSEDQDKIILDLLQTLSEVKHTPIDERYFLPKPKFNKSFINNLRKVNNFLPTLLMTNCTLRETNDVIYAAAKTLIISNDQKPYSPSMTKKPSKDPPWKRRLKTKIDIIRKELGQLTEIGKGVNSRKIHKIKNTLYNKYNIFNQQDHDKTVEIIKQKLKAMAGRLKRYENINDRKTHNKLFAENEHKFYRSISGQQNIADNIPTKEAIENFWNNILSKPITYNKTATWIKEIEQSTSHFVEHNFDSISLDQVKTAINKLNNWKTPGIDKIHNYYLKYFTNAHIFIANLFDKIFKGKETIEEWFTTGQVILIPKDKDTEDPKNWRPIACLPTMYKLLTSVISDQLYTHCEINNIIAPEQRGCRRRARGCKDHLMVNKAILEDAHQSQKNLSMGWVDYRKAFDSMSHDWLLKALELYRCPNSIIRFLQIVMPRWKVVMTAHSMKGSITTEPIFIRRGIFQGDSLSPLFFCLSINPLSQILNKYELKGYHLRDSIYLNHLLYMDDLKLYAKNKNSLKVLLDSTEIFTQDIGMSFGLNKCSILHLTAGRRKGHEGEGHLLLSGQEFQHLQINEKYKYLGINESGKIDHSEVRQQIQKEYFRRVKFLTKTHLSSRNLIKSINTYAIPVLLYSFGVVNYKNSDLKTIDTKTRKLLAINKAHQKKADVNRLYIPIDHGGRGLINLEMLYKTQMIKYNIYLKSGKDDLIKAIVSHDKNRDKYSIHKEARQFREEIGIQDKEHYTEKELKIAVVKKHISNWKSKVIHGQFLRAVLEKENIDTEYSFQWLKKQPISPTLEASIFAIQDQSVITNQFERDILKKPVSGKCRICLAKDETVQHIVSGCEKLAGTYYTKRHNNIVQYVHWTIAKKHKFNVNPLWWKETLSQPQVIENETAKLMWEIPVQTDKTITHNRPDIIYINKEENHTYLIDISIPSDYNIGAKEIEKLSKYHPLKTEINRLWKIPTTVIPIIIGTTGTVAKSLHKYCNKIDSNINIHIIQKQAGIFHLN

SEQ ID NO: 8588 - protein, 1197 aa, Codatractus cyledis
MKRVIRDLRLGPLPGVRRGTLGAGGERDSIRAASGSSLIRRAGVGETEDTTADIISDADCALQGSGSTTISVGTSETTTTRLCISEDARRKWSQDELQELMFCYFKAKAEGPGYIKRFERIFKQRNPNNPKINKYTGNTLSNQARSIINRKFISEEVLHDIKRRAEQTLSAINLDSNSITTHTQTYTNQIQKHNSNIQQPNTNLLETNTSVGIVTDDINLETYQVEEITGADEQQQIDDLTGNINTNEDQDPIILDFLQTLAEVNDTPINKRYFLPKPKFNKKFINNLRKINNFLPNLLITNCTLRETNNVIYAAAKTLITTNGQKPYPPSITKKSTKDPPWKRRLKTKIDLIRKELGQLTEINKGVNSKKILKIKNTLYNKYKIFCKQDHDKVVEILKQKLKAMAGRLKRYEDINGRKIQNNLFVENQHKFYRSMSGQQNKATKIPTKETLENFWNNILAQPITYNKSATWLKEIEQSALDINEHNFDSISLDQIKIAINKLHNWKTPGVDKIHNYYLKYFTNAHEFIAKLFDKIFKGTETIEEWFTTGQVILIPKDADTEDPKNWRPIACLPTMYKLLTSIIADQLYTHCESNDIIAPEQRGCRRRARGCKDHLMVNKAILEDAHQSQKNLSMGWVDYRKAFDSISHDWLLKVLELYRCPKSIRRFLQTVMPSWNVVMTAHSTNGSVTTNPIYIRRGIFQGDSLSPLLFCLSINPLSQTLNKYNLKGYHLRDSVYINHLLYMDDLKLYAKNKNSLKVLLDSTEIFTQDIGMSFGLNKCSILHLTAGRRKDWEGEGHILLSGEEFQHLKNYEKYKYLGINESGKINHSEVRQQIQKEYFRRVKCLTRTHLNSRNLIKSINSYAIPVLLYSFGIVNYKNNDLKTIDTKTRKLLAINKAHQKKADVSRLYIPIEYGGRGLINLETLYKIQIIKYKQYLKSGKDYLIRAIVDHDKSRDKYSIHKEARQFSEDIRIERKEFYTDKELKIAVVKQHINNWKSKVLHGQFLRAVLEKENIDTEYSFRWLKKQPVSSILEASIFSIQDQSVITNQFERDIMKKPVTGKCRICSAKDETVQHIVSGCEKLAGTYYTKRHNNIVQYVHWTIAKKHQFDVNQFWWKDNLTQPQVKENETAKLMWEMPVQTDKTIIHNRPDIIYINKQENHAYLIDVSIPSDFNIGAKEIEKLSKYHLLKNEITRLW

SEQ ID NO: 8589 - protein, 1151 aa, Eantis tosta
MKLSTSDDARRKWSEEELHELMYCFYKAKAEGPGYIKRFEKLFKQRNINNPKVAKFTGNTLSNQARSIINRKFISEEVLKEIKQKAELQTHTGHTHTNTVNKEQEPRQSHQINIDTQHTSRHVETEINNITLNQLEETVDTDELQQINNLTQNIDASENQDPIILELLQILAETKDVPVNERNNLPKPKFNKQFFENLNKINSYLPKLLVTNTSLKDTNNVLYAAAKTLIIANGQKPFTAITGRKPPTDPPWKRRLKTKIDILRKELGHLTEIAKGVQSRKMIKIKTNLYNKYNIFNSQDHDYTVEILKQKLKAKAGRLKRYEDINNRKTQNKYFHENQHKFYRNISGKQQVANEIPTKETIETFWKNILAQPTTYNKTASWIKEMEETGKDLEESNFDNITVDKVKFAINKLHNWKTPGIDKLHNYYLKYFTNAHEYIAKLFNNLFKGTESIEEWFTTGHVILIPKDGDTKDPKNWRPIACLPTMYKLLTSVIANNLYKHCENNNIIAPEQRGCRRRARGCKDHLMINKAILEDAHQSQKNLSMGWVDYRKAFDSISHEWLLKVLDLYKCPKNIKAFLQMVMPNWKVVMTAYGSNGSITTEPIYIRRGIFQGDSLSPLLFCISINPLSQILNKYERKGYHLKDSIYINHLLYMDDLKVYAHNKNSLKVLLDSTEIFTRDIGMSFGLNKCNILHLTAGRRSGQEGEGHILLGGDEFQHLRFNEKYKYLGIHESGKIDHSEVRQQIQKEYFRRIKCLTKTHLNSRNLITSINTYAVPVLLYSFGIVNFKNSDLKSIDTKTRKLLAIQKAHQQKADVSRLYIPLEKGGRGLINIEMMYKTQIIKYQKYLKSENDYLIKAIVVHDKEREKYSIDKEARKFCEEIEIRNKDTYTDKELKTAVIKKHINTWKTKALHGQFLKSVLEKENIDVDSSFRWFKKQPVSSTLEAAIFSIQDQSIITNQFERDILKKSVDGKCRLCLAKDETVQHIVSGCEKLAGTYYTRRHNNIVQYVHWTLAKKHNFEVNHLWWKETLTQPQVIENDTAKLMWEMPVQTDITVTHNRPDIIYINKVENYTYLIDVTIPSDYNIGAKEIEKLSKYHLLKTEISRLWKTPTTVIPIVIGATGVIAKSLNRYCNRLDSNINIHILQKQAAIH

SEQ ID NO: 8590 - protein, 1261 aa, Cecropterus bathyllus
MKRVLRDLRTGPLPGVRRGTLGAGAERDSIRTASGSLLNRRAGVGGPEDTTADIISDADCTLQSSGPSTNSAGTSETTTTRSVISDDARRKWSQDELHELMFCYFKAKAEGPGYIKRFENIFKQRNPNNPKINKYTGNTLSNQARSIITRKFISEEVLQEIKRQAELTLNLTDTYAVNITSLTQTNTINTQIHNPIANQTNTDTRQTDGVVTDNMILEHNQTEEIIDAAQQQLIHDTIGNIDTSENQDQIILDLLQTLAEVKHTPIDERSFLPKPKFNKMFIDNLRKINNFLPILLETNCTLRETNDVIYAAAKTLIITNGQKPYPASMTKKPSKDPPWKRRLKTKIDIIRKELGQLTEIGKGVNSRKILKIKNTLYNKYNIFSQQDHDKMVEIIKQKLKAMAGRLKRYEDINSRKTQNKLFSENEHKFYRSMSGQQNKASNIPTKEALENFWNNILAQPITYNKTATWIKELEQLTLNFDEHNFDSIHLEQIKKAINRLHNWKTPGIDKIHNYYIKYFTNAHTYIAKIFDKIFKGTETIEEWFTTAQVILIPKDEDTKDPKNWRPIACLPTMYKLLTSVIADQLYTHCENNNIIAPEQRGCRRHARGCKDHLMLNKTILEDAHQSQKNLSMGWVDYRKAFDSISHDWLLKALELYKCPKSISRFLKIVMPNWKVIMTAHSMNGSITTGPICIRRGIFQGDSLSPLLFCLSINPLSQILNKYERNGYHLRDSIYLNHLLYMDDLKLYAKNKNSLKVLLDSTEIFTQDIGMSFGLNKCSILHLTAGRRKSHEGEGHILLSGEEFQHLQSHEKYKYLGISESGKIDHSEVRQQIQKEYYRRVKCLTKTNLTSRNLIKSINTYAVPVLLYSFGVINYRNNDLKTIDTKTRKLLAINRAHHKKADVNRLYIPVEHGGRGLTNLEMLYKTQIIKYNKYLKSGKDDLIKAIVNHDRNRDKYSIYKEAMQFSEEIGIHDKEHYTEEELKTAVVKKHIHNWKSKALHGQFLKAVLEKENIDTEYSFRWLKKQPVSPTLEASIFAMQDQSVITNQFERDIIKKPVTGKCRICLAKDETVQHIVSGCDKLAGTYYTKRHNNIVQYVHWTLAKKHKFNINQLWWKETLTQPQVIENETAKLMWEMPVQTDKTITHNRPDIIYINKQENHAYLIDISIPSDYNIGAKEIEKLSKYHPLKNEINRLWKIPTTVIPIVIGTTGIVARSLHKYCNKLDSNINIHIMQKQAAIHTSTIVSKILGNSILLGETESPSP

SEQ ID NO: 8591 - protein, 1161 aa, Cecropterus toxeus
MFCYYKAKAEGPGYIKRFEKLFKQRNPNNPKINKYTGNTLSNQARSIIHRKFISEEVLQEIKRQAEYTLNLTDTDPVSTTLYTQIPTIKTKTQNPILNQTNTDTRQTDGVITDNDILEHNQSEEVIDAANQEQIYDTIGDIDTSEDQDQIILDLLQTLAEIKHIPIDKRCFLPKPKFNKPFIDNLYKINNFLPTLLETNCTLRETNDVIYAAAKTLITTNGQKPYSASATKKPSKDPPWKRRLKTKIDIIRKELGQLTEIGKGVNSKKILKIKNILYNKYNIFSQQDHDKIVEINKQKLKAMAGRLKRYEDINNRKTQNNLFSENEHKFYRNISGQQNKASTIPTKETLENFWNNILAQTITYNKTATWVTELEQSTLNFDEHNFNSIRIEHIKRAINRLNNWKTPGIDKIHNYYLKYFTNAHTYIAKIFDKILKGTETIEEWFTTGQVILIPKDENTKDPKNWRPIACLPTMYKLLTSVIADELYTHCENNNIIAPEQRGCRRRTRGCKDHLMMNKTILEDAHQSQKNLSMGWVDYRKAFDSISHDWLLKALELYRCPKLISRFLKTVMPKWKVIMTAHSMNGSITTDPIYIRRGIFQGDSLSPLLFCLSINPLSQILNRYELNGYHLRDSIYLNHLLYMDDLKLYAKNKNSLKVLLDSTEIFTQDIGMSFGLNKCSILHLTAGRRKSQEGEGHVLLSGEEFQHLQSHEKYKYLGINESGKIDHSEVRQQIQKEYYRRVKCLTKTHLSSRNLMKSINTYAVPVLLYSFGVINYRNNDLKTIDTKTRKLLAINKAHQKKADVDRLYIPVDHGGRGLINIEMLYKTQIIKYNKYLRSGKDDLIKAIFNHDRNRDKYSIYKEAKQFSEEIGIHDKEYYTEKELKAAIVKKHINNWKSKVLHGQFLKAVLEKENIDTEYSFRWLKKQPVSPTLEASIFAMQDQSIITNQFERDIMKKPVTGKCRVCLAKDETVQHIVSGCEKLAGTYYTKRHNNIVQYVHWTIAKKHKFNINQLWWKETLTQPQVIENETAKLMWEIPVQTDKTITHNRPDIIYINKQEKQAYLIDISVPSDYNIGAKEIEKLSKYHPLKNEINRLWKIPTTIIPIVIGTTGIVAKSIHKYCNKLDSNINIHIIQKQAAIHTSTILSKILGNSILLGETESPSP

SEQ ID NO: 8592 - protein, 1260 aa, Telegonus anausis
MKRVLRDLQLGPLPGVRRGTLGAGAERDSIRTASGSLLNRRAGVGGPEDTTADIISVTECALQSSGTSTISAGASETTTTRSTISEDARRKWSQDELQELMFCYFKAKAEGPGYIKRFERIFKQRNPNNPKINKYTGNTLSNQARSIINRKFISEEILQEIKRRAEDTPNATITSYTQTNTANNQIHNSIINQTNSDTRQTSYGVNLAVVNDEIILEHDQNEEIIDGAEQQQMHNITGIIDTSEDQDQIILDLLQTLAEVKHTPIDERYFLPKPKFNKSFIDNLGKINNFLPALLMTNCTLRETNDVIYAAAKTLITTNGQKPYPPTTKKKPSKDPPWKRRLKTKIDIIRKELGQLTEIGKGVNSRKIVKIKNTLYNKYNIFNQQDHEKMVEIIKQKLKAMAGRLKRYEDINDRKTHNNLFSENEHKFYRSISGQQNIADNIPTKQALEFFWNNILAKPITYNKTATWIREIEQSTLDFDEHNFDSISLDQIKTAINKLHNWKTPGIDKIHNYYLKYFTNAHTFIANLFDKIFKGTETIEEWFTTGQVILIPKDKDTKDPKNWRPIACLPTMYKLLTSVIADQLYTHCENNNIIAPEQRGCRRRARGCKDHLMVNKAILEDAHQSQKNLSMGWIDYQKAFDSVSHDWLLKALELYKCPKSISRFLQMVMPGWKVVMTAHSMNGSITTDPIFIRRGIFQGDSLSPLLFCLSINPLSQILNKYELKGYHLRDSIYLNHLLYMDDLKLYAKNKNSLKVLLDSTEIFTQDVGMSFGLNKCSILHLTAGRRKGHEGEGHILLSGEEFQHLQSHEKYKYLGINESGKIDHSEVRQQIQKEYFRRVKNLTKTHLSSRNLIKSINTYAVPVLMYSFGVVNYKNSDLKTIDTKTRKLLAINKAHLKKADVNRLYIPIEHGGRGLINVEILYKTQIIKYNAYLKSGKDDLIKAIVNHDKNRDKYSIYKEAKQFREEIGIQDKEFYAEKELKIAVVKKHTNNWKSKALHGQFLRSVLEKENIDTEYSFRWLKKQPVSPTLEASIFAIQDQSVITNQFERDIIKKPVTGKCRICLAKDETVQHIVSGCEKLAGTYYTKRHNNIVQYVHWTLARKHKFNVNQLWWKETLTQPQVIENETAKLMWEIPVQTDKTITHNRPDIIYINKQENHAYLIDISIPSDYNIGAKEIEKLSKYHPLKIEINRLWKIPTTVIPVIIGATGIVAKSLHKYCNKLDSNINIHILQKQAAIHTSTILAKILGNCILTGETESPSP

SEQ ID NO: 8593 - protein, 1162 aa, Cecropterus acanthopoda
MFCYFKAKAEGPGYIKRFENIFKQRNPNNPKIYKYTGNTLSNQARSIINRKFISEEVLQEIKRQAEHTVNLTDTEPVAITSHSQKNTINTQIHNPNISQTTNTDTQQTDGVVIDNITLEHNQREEIIDAAEQQQIDDTIGNIDTSEDQDQIILDLLQTLAEVKHTPINERYFLPKPKFNKPFIDNLRKINSFLPTLLIANCTLRETNDVIYAAAKTLIITNGQKPYPPSITINPSKDPPWKRRLKTKIDIIRKELGQLTEIGKGVNSRKVLKIKNTLYNKYNIFSQQDHDKMVEIIKQKLKAMAGRLKRYEDMNNRKIQNNLFSENEHKFYRSMSGQQNNASNIPTKQAMENFWNNILAQPITYNKTATWIKELEQSALDFNEHNFDSISLEQIKKAINRLHNWKTPGVDKIHNYYLKYFTNTHTYIAKLFDKIFKGTETIEEWFTTGQVILIPKDEDTKDPKNWRPIACLPTMYKLLTSVIADQLYTHCENNNIIAPEQRGCRRRARGCKDHLMLNKTILEDAHQSQKNLSMGWVDYRKAFDSISHDWLLKALELYRCPKSISRFLKIVMPKWKVIMTAHSTNGSITTDPIYIRRGIFQGDSLSPLLFCLSINPLSQILNKYELSGYHLRDSIYLNHLLYMDDLKLYAKNKNSLKVLLDSTEIFTQDIGMSFGLNKCSILHLTAGRRKGHEGEGHILLSGEQFQHLQSHEKYKYLGINESGKIDHSEVRQQIQKEYFRRVKCLTKTHLSSRNLIKSINTYAVPVLLYSFGVINYRNNDLKTIDTKTRKLLAMNKAHQKKADVNRLYIPVEHGGRGLTNLEMLYKTQIIKYNKYLKSGEDDLIKAIVNHDRNRDKYSIYKEARQFREEIGIQDKECYTEKELKTAVIKKHISNWKSKVLHGQFLKTVLEKENIDTEYSFRWLKKQPVSPTLEASIFAMQDQSIITNQFERDIMKKPVTGKCRICLAKDETVQHIVSGCEKLAGTYYTKRHNNIVQYVHWTIAKKHKFSINQLWWKETLTQPQVIENETAKLMWEIPVQTDKTITHNRPDIIYINKQENHAYLIDISIPSDYNIGAKEIEKLSKYHPLKNEISRLWKIPSTVIPIVIGTTGIVARSLHKYCNKLDSKINIHIMQKQAAIHTSTILSKILGNSILIGETESPSP

SEQ ID NO: 8594 - protein, 1161 aa, Cycloglypha thrasibulus
MFCYFKARAEGPGYIKRFEKLFKERNVNNPKISKFTGNTLSNQARSIINRKFISNEVLAQIKSKAEQTSTVTDKELDSLSPSQQNSVESNTTEINHSNTFIQPIKHTVVTADNHTILEQDEAIVDVNELQEVNNLIQNIDASDNQDPIILELLRNLAEIKDTPIHDRKFLPKPKFNKKFFENFRKINNFLPNLLITNDSLRETNNIIYAAAKTLIECNDQKPFTPPNGRKPINDPSWKRRLKTKIDFLRKEIGRFIEIGNGVNSRKMLKIKSTLYNKYNIFTKQEHDNTVEILKQKLKAKAGRLKRYDDMNDRKNQNKNFEENQHKFYRNITGKQLVNKETPSKEEIETFWNNILAQPVSYNKSAPWIKELEEEEKDRNIQETQFEEITLDQVKLAITKLHNWKTPGIDKIHNYYLKYFTSTHVYLTKLFDKLFKGTEKIEEWFTTGNVILIPKEAETKDPKNWRPIACLPTMYKLLTSVITNILYTHLEKNDIIAPEQRGCRRQVRGCKDHLMVNKAILEDAHQSQKNLSMGWIDYRKAFDSISHDWLLKVLDLYKCPETIKSFLQMVMPHWKVVMTAHGTDNSITTDPIFIRRGIFQGDSLSPLLFCAAINPLSYILNKYELQGYHLKDSVYINHLLYMDDLKLYAHNKTSLTVLLDSTEIFTRDIGMSFGLNKCKILHLKAGRKYEEEGGGHILLNGEDFQHLQSNEKYKYLGIHESGKIDHSEARQQIQKEYFNRVKKLTKTHLNSRNLIKSINTFAIPVLLYSIGIVNFKNSDLKAIDTKTRKILNMNKAQHQKADVNRLYIPIQQGGRGLINVEMLYKTQIIKYRRYLKTEKDHLTKAIVIHDKARDKYSIVKEAKQFSEELELKSSNTYSEKELKEAVVRKHINKWKSKVMHGQFLKSVLEKENIDKEFSFRWLKKQPISPTLEAAIFSIQDQSIVTRQFERDIMKKPVDGKCRICSAKDETVQHIVSGCEKLAGTYYTKRHNNIVQYIHWTLARKHNFEVNRLWWKENLTQPQVIENETAKLMWEMPVQTDNTVAHNRPDIIYINKIENHAFLIDVTIPSDYNIGAKEIEKLSKYHLLKREITRLWKIPTTVVPVVIGATGIIGKSLHTYINKLNSNINIHIIQKQAALLSSTILSKVLGNTIFDGEIESPSP

SEQ ID NO: 8595 - protein, 1286 aa, Gorgythion begga
MPREGRTLETLVVRYAPMANRALATFVNMERQLRNRTLGPLPGGDRRGTLGAGAERDSIRAASDSPLSRRAGVGETEYTTAEQTRNTDVTLQRRESPTNSAGTSGQTTTSLISEDARKKWSQEELYELMFCYFKSKAEGPGYIKRFERLFKERNYNNPKISKFTGNTLSNQARSIINRKTISSEVLADIKRKAEQTSSVNDRDLVTPEYPNTFVTNTTYNTNLLNTNTQTANQDVGIPDNDAVLDQYEVVISREEQQQVNNSIENIDTSENQDPVILELLRTLAEVKDTPIEKRKFLPKPQFNKQLFENFGKINNFLPSLLIINDSLREVNDIIYAAAKTLIEYNGQKSFLPTTERKPFSDPPWKRRLKTKIDLLRKELGQFTEINNGVNSKKMLKIKTMLYNKYNIFTKQDHDNIVEILKQKLKAKAGRLKRYEDMNDRKNQNKYFQENQHKFYRNIIEKQLVAKETPTKEEIETFWSNILSQPITYNNTAGWIKELEESNADIQESQFDEITLEQVKIAISKLQNWKTPGIDKIHNYYLKYLTSTHEYITKLFNKIFKGTEAIEEWFTTGNVILIPKDAETKDPQNWRPIACLPTMYKLLTAVITNQLYMHFDKNDIIAPEQRGCRRHVRGCKDHLMINKAILEDAHQSQKNLSMGWIDYRKAFDSISHDWLLKVLELYKCPSTIKSFLQRVMPHWKVVMTAHGTNKSITTDPINIRCGIFQGDSLSPLLFCAAINPLSYILNRYKTQGYHLKDSVYVNHLLYMDDLKLYAHNKNCLKVLLDSTEIFTRDISMSFGLNKCKVLHLKAGRKCGQEGGGHILLNGQEFQHLEDNEKYKYLGIHESGKIDHSEARQQIQKEYFKRVKNLAKTHLNSRNLITSINTFAIPVLLYSIGIVYYKKSDLKAIDTKTRKLLNINKAHHKKADVNRLYIPVEQGGRGLINVEMLYKTQIIKYRRYLKNEKDQLIKAIVKHDRARDKYCIEKEAKQFSEEIELQNRDTYTEKELKNAVVRKQINNWKSKAMHGQFLKSVLEKENIDKEFSFRWLKKQPISPTLEAAIFSIQDQSIITRQFERDIMKKPVDGKCRICSAKDETVQHIISGCEKLAGTYYTKRHNNIVQYIHWTLAKKHKFLVNRLWWKENLTQPQVIENETAKLMWEMPVQTDVTVTHNRPDIIYINKIENHVYLIDISIPSDYNIGAKEIEKLSKYHLLKTEITRLWKMPTTVVPIIIGATGIIGKNLHTYINKLDSNINIHITQKQAALISSTILSKVLGNSIFAGEIESPSP

SEQ ID NO: 8596 - protein, 1149 aa, Codatractus imalena
MFCYFKTKAEGPGYIKRFERIFKQRNPNNLKINKYTGNTLSNQARSIINRKFISEEVLHDIKRRAEQTLSATNLDSNTITTHTQTYTNQLQKHDSNIQQLNTHLLGTNSSAGIVTDDIILETYQVEEEITGEEITGADEQQPVDDLTGNIDTSEDQDPIILGFLQTLAEVKDMPINKRYFLPKPKFNKKFINNLRKINNFLPNLLITNCTLRETNNVIYAAAKTLITTNGQKPYPPSIIKKSTKDPPWKRRLKTKIDLIRKELGQLTEINKGVNSRIILKIKNTLYNKYKIFCKQDHDKVVEILKQKLKAMAGRLKRYEDINGRKIQNNLFAENQHKFYRSMLGQQNKATKIPTKEALENFWNNILARPITYNKSASWLKAIEQSALDINEHKFDSINLDQIKIAISKLHNWKTPGVDKIHNYYLKYFTNAHEFIAKLFDKIFKGTETIDEWFTTGQVILIPKDADTEDPKNWRPIACLPTMYKLLTSIIADQLYTHCESNDIIAPEQRGCRRRARGCKDHLMVNKAILEDAHQSQKNLSMGWVDYRKAFDSISHDWLLKVLELYRCPKAIWRFLQTVMPSWNVVMTAHSTNGSVTTNPIYIRRGIFQGDSLSPLLFCLSINPLSQTLNKYDLKGYHLRDSVYINHLLYMDDLKLYAKNKNSLKVLLDSTEIFTQDIGMSFGLNKCSILHLTAGRRKGCEGEGHILLSGEEFQHLKHYETYKYLGINESGRINHSEVRQQIQKEYFRRVKSLTRTHLNSRNLITSINTYAIPVLLYSFGIVNYKNNDLKTIDTKTRKLLAINKAQHKKADVSRLYIPIEYGGRGLINLESLYKIQIIKYKQYLKSGKDYLIRAIVDHDKSRDKYSIHKEARQFSEDIRIECKEFYTEKELKMAVVKQHINNWKSKVLHGQFLRAVLEKENIDTEYSFRWLKKQPVSSILEASIFSIQDQSVITNQFERDIMKKPVTGKCRICSAKDETVQHIVSGCEKLAGTYYTKRHNNIVQYVHWTIAKKHQFNVNKFWWKENLTQPQVIENETSKLMWEMPVQTDKTIIHNRPDIIYINKQENHAYLIDVSIPSDYNIGAKEIEKLSKYHLLKNEITRLWKIPTTIIPIIIGTTGIVARSLHKYCNKLDSNINIHMWRPSATRQEM

SEQ ID NO: 8597 - protein, 1259 aa, Cecropterus confusis
MKIVLRDLRKGPLPGVRRGMLGAGAERDSIWTASASLLNRRAGVGGPEDTTADIISDADCTLQSSGSPTNSAGTSETTTTRSVIPDDARRKWSQDELHELMFCYFKAKAEGPGYIKRFDKIFKQRNPNNPKINKYTGNTLANQARSIINRKFISEEVLQEIKRQAEHTLNLTDTYTVPTSPLTQTITINTQIHNPIINQRNTDTRDGVVTDNNILEHNQNEEIIDAAQQQQIHDTIRKIDTDENQDHIILDLLQTLAEVKHTPIDERCFLPKPKFNKPFIDNLSKINNFLPTLLETNCTLRETNDVIYAAAKTLIITNGQKTYPPSFTKRPSKDPPWKRRLKTKIDIIRKELGQLTEIGRGVNSRKILKIKNTLYNKYNIFSQHDHDKMVEIIKQKLKAMAGRLKRYEDINRRKTQNNLFSENEHKFYRSMSGQENKASNIPTKEALENFWNNILAQPVTYNKTATWIKELEQSSLNFDEHNFDSIRLEQVKKAINKLQNWKTPGIDKIHNYYIKYFTNAHTYIAKIFDKIFKGTETIEEWFTTGQVILIPKDEDTKDPKNWRPIACLPTMYKLLTSVVADQLYTHCENNDIIASEQRGCRRHARGCKDHLMLNKTILEDAHQSQKNLSMGWVDYRKAFDSISHDWLLKALELYRCPKSISRFLKTVMPRWKVIMTAHSMNGSITTDPIYIRRGIFQGDSLSPLLFCLCINPLSQILNKYESNGYHLRDSIYLNHLLYMDDLKIYAKNKNSLKVLLDSTEIFTQDIGMSFGLNKCRILHLAAGRRKCHEGEGHILLSGEEFQHLQIHEKYKYLGINESGKIDHSEVRQQMQKEYYRRVKCLTKTHLTSRNLIKSINTYAVPVLLYSFGVINYRNNDLKTIDTKTRKLLAINKAHQKKADVNRLYIPVEYGGRGLTNVELLYKTQIIKYNKYLKSGKDDIIKAIVNHDRNRDKYSIYKEAKQFREEIGIHDKEHYTEKELKIAVVKKHIQNWKSKVLHGQFLKAVLEKENIDTEYSFKWLKKQPVSPTLEASIFAMQDQSVVTNQFERDIIKKPVTGKCRLCLAKDETVQHIVSGCEKLAGTYYTKRHNNIVQYVHWTLAKKHKFNINQLWWKETLTQPQVIENETAKLMWEMPVQTDKTITHNKPDIIYINKQENHAYLIDISIPSDYNIGAKEIEKLSKYHPLKNEINRLWKIPTDVIPIVIGTTGIVARSLHKYCNKLNSNINIHIMQKQAAIHTSTIVSKILGNSILLGETESPSP

SEQ ID NO: 8598 - protein, 1261 aa, Cecropterus casica
MKRVLRDLRTGPLPGVRRGTLGAGAERDSIRTASGSLLNRRAGVGEPEDTTADIISDADCTLQSSGSPTDFAGTSETTTTRSVISDDARRKWSQDELHELMFCYFKAKAEGPGYIKRFENIFKQRNPNNPKINKYNGNTLSNQARSIINRKFISEEVLQEIKRQAEHTLNLTDTYAVPNTSLTQTNTIKTQIHNPIINQTNTDTREIDGVVTDNIILEHNQSEEIIDAAQQQQIHDTIEDIDTSENQDQIILDLLQTLAEVKHTPIDERHFLPKPKFNKPFIDNLCKINNFLPTLLESNCTLRETNDVIYAAAKTLIITNGQKPYPASMTKKPSKDPPWKRRLKTKIDIIRKELGQLTEIGKGINSRKILKIKNTLYNKYNIFSQNDHDKMVEIIKQKLKAMAGRLKRYQDMNSRKTQNKLFSENEHKFYRSMSGQQNKASNTPTKETLENFWNNILAQPITYNKTATWIKELEQLTLNFNEHNFDSIRLEQIKKAISRLHNWKTPGIDKIHNYYIKYFTNAHIYIAKIFDKIFKGTETIEEWFTTGHVILIPKDEDTEDPKNWRPIACLPTMYKLLTSIVADQLYTHCENNNIIAPEQRGCRRHARGCKDHLMLNKTILEDAHQSQKNLSMGWVDYRKAFDSVSHDWLLKALELYRCPKSISRFLKTVMPNWKVIMTAHSMNGSITTDPIYIRRGIFQGDSLSPLLFCLSINPLSQILNKYERNGYHLRDSIHLNHLLYMDDLKLYAKNKNSLKVLLDSTEIFTQDIGMSFGLDKCSILHLTAGRRKGHEGEGHILLSGEEFQHLQSHEKYKYLGINESGKIDHNEGRQQIQKEYYRRVKCLTKTHLTSRNLIKSINTYAVPVLLYSFGVINYRNNDLKTIDTRTRKLLAINKAHQKKADVNRLYIPVEHGGRGLTNLEMLYKTQIIKYNTYLKSGKDDLIKAIVNHDRNRDKYSICKEAKQFREEIGIHDKEQYTEKELKTALVKKHIHNWKSKVLHGQFLKAVLEKENIDTEYSFRWLKKQPVSPTLEASIFAMQDQSVITNQFERDIIKRPVTGKCRICLAKDETVQHIVSGCEKLAGTYYTKRHNNIVQYVHWTLAKKHNFNINQLWWKEILTQPQVIENETAKLMWEMPVQTDKTITHNRPDIIYINKQKNHAYLIDVSIPSDYNIGAKEIEKLSKYHPLKNEINRLWKIPTTVIPIVIGTTGIVARSLHKYCDILDSNINIHIMQKQTAIHTSTIVSKILGNSILLGETESPSP

SEQ ID NO: 8599 - protein, 1175 aa, Camptopleura auxo
MPEDARRKWSQEELHELMFCYFKARAEGPGYIKRFERLFKERNINNPKINKFTGNTLSNQARSIINRKFISDEVLAEIKSKAEQTSSVNDRDADSFTPNSINTYLPQPTHTHFTHINSQLMSDVDTADNNTILEQDEDIINMEEQQQINNLTQNVDASDNQDPIILELLRTLAEIKEIPIHQRKFLPKPKFNKHFFENFRKINNFLPNLLITNDSLRGTNNIIYAAAKTLIECNGQKPFLPTSGRKPITDPPWKRRLKTKIDILRKEIGQFTEIGNGVNSRKMSRTKNTLYNKYNIFTKQEHDNTVEILKQKLKAKAGRLKRYEDMNDRKNQNKYFQENQHKFYRNITEKQLAAKETPSKDEIETFWSNILSQPVTYNTTAPWIKELENRNVDIQETQFEEITLEQVKFAITKLQNWKTPGIDKIHNYYLKYLTSTHEYITKLFDKIFKGTEEIEEWFTTGNVILIPKDAETKDPKNWRPIACLPTMYKLLTSVITNKLYTHLEKNDIIAPEQRGCRRQVRGCKDHLMVNKAILEDAHQSQKNLSMGWIDYQKAFDSISHDWLIKVLDLYKCPKTIKSFLQMVMPHWKVVMTAHGINNSITTDPIFVRRGIFQGDSLSPLLFCAAINPLSHILNKYELQGYHLKDSVYINHLLYMDDLKLYAHNKNSLKVLLDSTEVFTRDIGMSFGLNKCKVLHLKAGRKCGQEGEGHILLNGEEFKHLEGNEKYKYLGIHESGKIDHSEARQQIQKEYFKRVRNLAKTHLNSRNLIKSINTFAIPVLLYSIGIVNFKSSDLKAIDTKTRKLLNIHRAHHQKADVNRLYIPVEQGGRGLIGMEMLYKTQIIKYRKYLKNEKDYLIKAIVSHDRAREKYSIDKEAKQFSEEIALQNRDAYTEKELKVAVVKTHINKWKSKAMHGQFLKSVLEKENIDTEFSFKWLKKQPISPTLEAAIFSIQDQSIITHQFERDIMKKPIDGKCRICLAKDETVQHIVSGCEKLAGTYYTKRHNNIVQYIHWTLAKKHKFEVNSLWWKENLTQPQVIENETAKLMWEMPVQTDVTVAHNRPDIIYINKVENHTYLIDVTVPSDYNIGAKEIEKLSKYHLLKTEITRLWKIPTTVIPVVIGATGVIGKSLHTYIKKLDSNINIHIMQKQAALISSTILSKVLGNTIFAGDIESPSP

SEQ ID NO: 8600 - protein, 1214 aa, Urbanus evona
MKRVLRDLQPGPLPGGRRGTLGAGAERDSMRTASGSSLNRRAGVGETEDTTADIIRNADNALQSSGPATNSAGISETTTTRSIISDDARRKWSQDELHELMFCFFKAKADGPGYIKRFENLFKQRNTNNPKINKYTGNTLSNQARSIINRKFISEEVLQEIKRRAGYTPHTQTYAANDHIHNPIINLTNTNTRQTNCGENIEVVTDEIILEHNQNEEIIDAAEHQHIHNITETIDTSEDQDKIILDLLQTLSEVKDTPIDERYFLPKPKFNKSFINNLRKINNFLPTLLMTNCTLRETNDVIYAAAKTLIISNDQKPYPPSMTKKPSKDPPWKRRLKTKIDIIRKELGQLTEIGRGINSRKILKIKNTLYNKYNIFNQQDHDKMAEIIKQKLKAMAGRLKRYEDINDRKTHNKLFSENEHKFYRSISGQQNIADNIPTKQEIEFFWKNILSKPIAYNKTATWIKEIEQSTLDYVEHDFNGISLDQIKNAINKLHNWKTPGIDKIHNYYLKYFTNAHTFIANLFDKIFKGTEAIEEWFTTGQVILIPKDKDTEDPKNWRPIACLPTMYKLLTSVIADQLYTHCENNNIIAPEQRGCRRRARGCKDHLMANKAILEDAHQSQKNLSMGWVDYRKAFDSISHDWLLKALELYRCPNSISKFLQIVMPRWKVMMTAHSMKGSITTDPIFIRRGIFQGDSLSPLLFCLSINPLSQILNKYELKGYHLRDSIYLNHLLYMDDLKLYAKNRNSLKVLLDSTEIFTQDIGMSFGLNKCNILHLTAGRRKGHEGEGHILLSGEEFQHLQINEKYKYLGINESGKIDHSEVRQQIQKEYFRRVKFLTKTHLSSRNLIKSINTYAVPVLLYSFGVVNYKNNDLKTIDTKTRKLLAINKAHQKKAEVSRLYIPIENGGRGLLNLEMLYKTQIIKYNIYLKSGKDDLIKAIVSHDKNRDKYSIYKEARQFREEIGIQDKEYYTEKELKIAVIRKHINNWKSKALHGQFLRAVLEKENIDTEYSFRWLKKQPISPTLEASIFAIQDQSIITNQFERDIIKKPVTGKCRICLAKDETVQHIVSGCEKLAGTYYTKRHNNIVQYVHWTLAKKHKFDVNQLWWKETLTQPQVIENETAKLMWEIPVQTDKTITHNRPDIIYINKQENHAYLIDISIPSDYNIGAKEIEKLSKYHPLKIEINRLWKIPTTVIPVIIGTTGVLAKTLHKYGNR

SEQ ID NO: 8601 - protein, 1161 aa, Cecropterus takuta
MFCYYKAKAEGPGYIKRFENLFKQRNPNNPKINKYTGNTLSNQARSIINRKFISEEVLQEIKRQAEHTLNLSDTDLVSTALYTQITTINTKIQNPILNQTIADTQQTDGVVTDNNILEHNQSEEVIDATNQQQIHDTIGNIDTSEDQDQIILDLLQTLAEVKYIPIDKRCFLPKPKFNKPFIDNLHKINNFLPTLLETNCTLRETNDVIYAAAKTLITTNGQKPYSASVTKKPSKDPPWKRRLKTKIDIIRKELGQLTEIGKGVNSKKILKIKNTLYNKYNIFSQQDHDKIVEINKQKLKAMAGRLKRYEDINNRKTQNNLFSENEHKFYRSMSGQQNKASNIPTKETLENFWNNILAQPITYNKTATWITELEQSTLNFDEHNFDSIRLEQIKKAINRLNNWKTPGIDKIHNYYLKYFTNAHTYIAKIFDKILKGTETIEEWFTTGQVILIPKDENTKDPKNWRPIACLPTMYKLLTSVIADELYTHCENNNIIAPEQRGCRRRARGCKDHLMMNKTILEDAHQSQKNLSMGWVDYRKAFDSISHDWLLKALELYRCPKLISRFLKIVMPKWKVIMTAHSMNGSITTDPIYIRRGIFQGDSLSPLLFCLSINPLSQILNRYELNGYHLRDSIYLNHLLYMDDLKLYAKNKNSLKVLLDSTEIFTQDIGMSFGLNKCSILHLTAGRRKSQEGEGHVLLSGEEFHHLQIHEKYKYLGINESGKIDHSEVRQQIQKEYYRRVKCLTKTHLSSRNLMKSINTYAVPVLLYSFGVINYRNNDLKAIDTKTRKLLAINKAHQKKADVDRLYIPVDHGGRGLINIEMLYKTQIIKYNKYLRSGKDDLIKAIFNHDRNRDKYSIYKEAKQFSEEIGILDKEYYTEKELKAAIVKKHISNWKSKVLHGQFLKAVLERENIDTEYSFRWLKKQPVSPTLEASIFAMQDQSIITNQFERDIIKKPVSGKCRICLAKDETVQHIVSGCEKLAGTYYTKRHNNIVQYVHWTIAKKHKFNINPLWWKESLTQPQVIENETAKLMWEIPVQTDKTITHNRPDIIYINKQEKQAYLIDISVPSDYNIGAKEIEKLSKYHPLKNEINRLWKIPTTIIPIVIGTTGIVAKSIHKYCNKLDSNINIHIIQKQAAIHTSTILSKILGNSILLGETESPSP

SEQ ID NO: 8602 - protein, 1205 aa, Lycas argentea
MKRQLRNLRQGPLPGGRRGTFGAGAERDSIRTTSGSSLNRRARAGEPEDTTADTTRDADDTLPGRVSPTSSAGALETTTTSSLTVEDARRKWSQEELHELMFCYFKAKAEGPGYIKRFERLFKQRNRNNPKAAKFTGNTLSNQARSIINRKFISTELLEEIKQQAENTTTQSQSSLPVTQHTHSPIINLQPNTEDDLDSGINNIIVEEIEHIDTEQAEQIDNLTLSIDTSENQEPIILKFLETLAEIKETPITQRKFLPKPKFNQTFFDNLRKINNFLPTLLITNTTLIEINNIIYAAAKTLIVENKQVPYTQTNKRKPPSDPPWKRRIKSKIEIIRKEIGQLTEIGKGVSSKKLLKAKHILYTKYNILSKQDHDNTVEILKQKLKAKAGRLKRYDDINSRKTQNKQFLENQHKFYRTLSGKQQATTEIPTKEAIESFWKNIISQPITYNKNASWIREIEESNKNIEQHNFDSITVEQVKEAISKIHNWKTPGIDQIHNYYLKYFTSTHKFIAKLFDKIFKGTEITEEWFTTGQVILIPKDGDTNDPKNWRPIACLPTMYKLLTSVISNQLYIHCNNNDIIAPEQRGCRREARGCKDHLMINKAILEDAHQSQKNLSMGWIDYQKAFDSISHDWLLKTLELYKCPESIINFLRLVIPKWKVVMTAHSTNSSVTTDPIYIRRGIFQGDSLSPLLFCLGINPLSYVLNKYDLNGYHLKDSIYVNHLLYMDDLKIYAHNKNSLKILLDSTEIFTRDIGMSFGLNKCSTLHLTAGRKSGQVGEGHILLSGKEFKHLESNERYKYLGINESGKIDHNEVRQQLQKEYFRRVKHLARTYLNSRNLIKSINTYAVPVLLYSFGIVNYKNIDLKSIDTKTRKLLAINKAHHQKADVNRLYVPIDQGGRGLTNLEMLYKTQIIKYNRYLKSGKDHLLKAIVVHDKVRDKYSIYKESKQFSEEIELRNEDNYTEKEIKKLVIKKHVNIWKSKALHGQFLKGVLEKENIDTEFSFRWLKKQPVSPTLEASIFSIQDQSIITNQFQRDIIKKPVDGKCRVCFTRDETVQHITSGCEKLAGTYYTKRHNNIVQYVHWTIARKHGFNVNQLWWKETLVQPQVIENETAKLMWEMPVQTDVTVTHNRPDIIYINKQENHAYLIDVTVPSDYNIGAKEIEKLSKYHLLKTEITRLWKIPTEVIPIVYDMCLFVYFSLLHKF

SEQ ID NO: 8603 - protein, 1260 aa, Cecropterus evenus
MKRVLRDLQKGPLPGVRRGTLGAGAERDSIRTASGSLLNRRAGVGEPEGTTADIISDTDCTLQSNGLSAVSAGTPETTTTSLIISNDARRKWSQDELHELMFCYFKAKAEGPGYIKRFENIFKQRNPNNPKINKYTGNTLSNQARSIINRKFISEEVLQEIKRQAENTLNLTCTDPVPVTSHIQTNTINTQVCNSIINQTNNDTQQIHEVVTDHVLEHNQREEIVDAAEQEPTHNTIVNIDTSENQDQIILDLLQTLAEVKHTPIDERYFLPKPKFNKFFIDNLHKINNFLPTLLMTNCTLRETNDVIYAAAKTLIITNGQKPYPPAMSKKLFKDPPWKRRLKSKIDIIRKELGQLTEIGKGVNSRKIIKIKNTLYNKYNIFIKQDHDKMVEILKQKLRAMAGRLKRYEDISNRKTQNNLFSQNEHKFYRNMLGQQSKATDAPTKQAIEKFWNDILAKPITYNKTATWIKELEQSTLDFNEHIFNSIGLEQIKIAINRLHNWKTPGIDKIQNYYLKYFTNTHIYIAKLFDKIFNGTEAIEEWFTTGQVILIPKDTNTKDPKNWRPIACLPTMYKLLTSVIADQLYTHCENNNIIAPEQRGCRRRTRGCKDHLMLNKAILEDAHQSQKNLSMGWVDYRKAFDSISHDWLLKALELYRCPKSISKFLKIVMPKWKVVMTAHSMTGLITTDPIFIRRGIFQGDSLSPLLFCLSINPLSQILNKYELSGYHLKDSIYLNHLLYMDDLKVYAKNKNSLKVLLDSTEIFTQDIGMTFGLNKCSILHLTAGRRKVYEGEGHILLSGEEFQYLQSDEKYKYLGINESGKIDHSEVRQHIQKEFFRRVKCLTKTHLNSRNLIKSINTYAVPVLLYSFGVINYRNNDLKTLDTKTRKLLTISKAHQKKADVDRLYIPVEYGGRGLINLEMLYKTQIIKYKKYLKSGKDDLIKAIINHDKNRDKYSIYKEAKQFSEEIGIQDRESYTEKELKTAVIKKNINNWKSKALHGQFLKTVLEKENIDTEYSFRWLKKQPVSPTLEASLFAMQDQSVITKQFERDIMKKPITGKCRICLAKDETVQHIVSGCEKLAGTYYTKRHNNIVQYVHWTIAKKHNFDINPLWWKETLTQPQVIENETAKLMWEIPVQTDKTITHNRPDIIYINKQENHAYLIDVSIPSDYNIGAKEIEKLSKYYPLKTEINRLWKIPTTVVPIVIGTTGIVGKSLHKYVNNLDSNINIHIMQKQAAMYTSIILSKILGNSLLAGETESPSP

SEQ ID NO: 8604 - protein, 1150 aa, Racta chiria
MANRALVTFMMKRQLRNLRYGPLPGVRRGTFGADAERDSIRTVSGSLPSGRARVGEPENATAYPIRDADDALQSTGYPTSSAGVSETTTTSSLTTEDARRKWSQEELHELMFCYFKAKSEGPGYIKRFERLFKQRNLNNPKVAKFTGNTLSNQARSIINRKFISAEVLNEIKQQAEQGTTNSQTVVSYSAIQNTCTHNQSNVQQSNPILHHQTEVNTNNTTSEHNELRNTIELQEINDLTSSVDTTENQDPIILKLLQSLAEIKEISMSQRQLLPKPKFNQKFFDNLRKVNNFLPKLLVTNCTLREINDIIYAAAKTLIIENKQEPYRNQKTNIKPFSDPPWKRRLKNNIDIIRKELGQFTEIGKGLTSKKLLKIKNKLYDKYNIFSKQDHDNIVEILKQKLKAKAGRLKRYDDINNRKTQNKQFLENQHKFYRNMSGKQQVTTEIPTKEAIETFWKNIMSQPITYNNNAPWIRELEETNKHIEEHNFDTITVEQVKHAISKLHNWKTPGIDQIQNYYLKYLTSTHKFIAQIFNKIFKGTEAVEEWFTTGLVILIPKDGDTSDPKNWRPIACLPTMYKLLTSIISNELYVHCNNNDILAPEQRGCRREARGCKDHLMINKAILEDAHQSQKNLSMGWIDYRKAFDSISHDWLLEVLSLYKCPETIINFLRLVIPNWKVIMTARGLNHTITTDPIHIRRGIFQGDSLSPLLFCIGLNPLSHILNKYEFKGYHLKDSVYVNHLLYMDDLKVYANNKNSLRILLDSTEIFTRDIGMNFGLDKCNILHLTAGTKSGQEGDGHILLSGEEFEHLKINERYKYLGINESGKIDHNEVRQQIQKEYFRRVKCLTRTHLNSRNLIKSINTYAIPVLLYSFGIVNYKNSDLKLIDTKTRKLLAMHKAHHQKADVDRLYIPIDQGGRGLLNVEMLYKTQIIKYSKYLKSHNDYLLEAIVIHDKVRDKYSIYKESKQFCEEIGLQSKENYTDNELKKLVVRKHINSWKNKALHGQFLKGVLEKENIDTEFSFRWFKKQPVCPTLEASIFSLQDQSIVTNQFERDIMKKPVDGKCRVCLAKDETVQHIVSGCQKLAGTYYTKRHNNIVQYVYWTIARKHNFNVNQLWWKEALVQPKVIENETAKLMWEMPVQTDITVTHNRP

SEQ ID NO: 8605 - protein, 1365 aa, Spodoptera frugiperda
MEREISNSSIGSLPGGDRRGTSGADAGRLSMRTVSGSTLNRRARVGEPENATAEHNRHAEDALQCGSLTQSVAGTSALQTTTSSEDNLRIRKWSIEEQRELMFCYFKSKAEGPGYLKRLYNTFKQRNPNNFKVHKLDGNKLSNQARIILNGKAISKEELALIKNKAEQTVDTVSLISEHSTTLTPNNSRSHTPISITQSPTPNTNSHTLDNIDSRRKWTTEEQHELMFCYFKAKTGGTGYIKRFYDLFCSRNPDNPKIHRFDGNKLSNQARTILNRRLISDEVLAQIKLKVQNSPIEPLNDSPVTEIDFQQDAITTPVPITSHERTTMEIEANSPTINTDNTEIVEIHEDQHPVIVEFLQILAEVRATDIKDRKFLPKPKFSKSFIANMQIINKYLPSVLEFDNSLRHINDVIYAVARTLIKINNQTPYTLNNKPKPKKDPPWKLRIKNKIEDFRKELGRLTEIRSGINSRKINNIKNKLFDKYNIFSDNDRDNTMEIIKQKIKALSARLKRYDDIDKRKTQNIMFQENQHKFYKSLSEHNNTINSLPTKNEIQHFWASILSQPISYNKNAEWITEIETAMSNIEETNLDEIGLDKLRIALRKIHNWKTPGIDKVQNYYLKYLTSSHPYIADLFTRILNKTEAIEDWFTTGQVILIPKNSQTQDPKNWRPIACLPTMYKLLTSVIANELYTHCDNNNILAPEQRGCRRRARGCKDHLMMNKAILEDAHQSQKNLSMGWVDYRKAFDSVSHEWLLRVLDLYKCPNSIKGFLEITMPTWKVIMTARGSNHSVTTDPIYIKRGIFQGDSLSPLLFCLAINPLSQILNKYKEKGYKVKDTPINHLLYMDDLKLYSNSKNNLSILIDSTEIFTSDIGMSFGLDKCSVLHLKAGRRVEHQGVGHILLSGEEFENLKGDQSYKYLGIHESGKIEHNTVRQGLQKEYFKRVKRIANSHLNSRNLIRAINSFAVPVLLYSFGVVNYKSSDLKNIDVKTRKILNMNKAHHQKADLDRLYLPIETGGRGLINIEMLHKTQIIKYQQYLERETDYIIKTITMHDKTRDKYSIDKEAKENRIEFKINNNTICTDSEIKSAKIKYTIGKWKAKPLHGQFYRSVIDKENIDTNYSFRWLKKQAISPSLEASIFSLQDQAIVTRQHERDVLKRAVDGKCRLCGVKDETAQHIVAGCEQLAGTYYTRRHNNVVQYVYWTLLKKHNMETTSLWWKEQLTQPQVKENDTAKIMWEIPVQTDVTVTHNRPDIIYINKKDNKTYLIDITVPSDYNIGAKEIEKLSKYHLLQKEITRLWNTQAQVVPIVIGASGMVAKSIHKYCTQLDSNINIHIIQKQAAIHTTTILTKVLGNTIYVDRERDPPLP

SEQ ID NO: 8606 - protein, 976 aa, Megathymus violae
MQILNKYLPSVLEFDNSLRHINDVIYSVAKTLIKTNKQTPYTLNNKPKLKRDPPWKLRLKNKIEDFRKELGRLTEIKNGINSKNLNKIKNKLFNKYNIFNNQDHDNTIETIKQRIKALAARLKRYDDIAKRKNQNKIFQENQHKFYTTLTENTNITNVLPTKDEIQDFWTSILSHPISYNKDAAWITEIETTMTNIEETSLDVINLDKLKVALRKTYNWKTPGIDKIQNYYLKYLTSTHKYLADLFTRILNKTETIADWFTTGQVILIPKNNETQNPNWRPIACLPTMYKLLTSVIANELYTHCDSNNILAPEQRGCRRRARGCKDHLMMNNAILEDAHQSQKNLSMGWVDYRKAFDSVSHEWVLRVLDLYKCPVSIKGFLEIIMPTWKVVMTARGARDVVTTDPIYIKRGMFQGDSLSPLLFCLAINPLSQILNKYKDKGYKIKDTLVNHLLYMDDLKIYSNSKNNFSILINSTEIFTQDIGMSFGLDKCNVLHMKAGRRTEHQGIGHILLSGEEFQHLKGDQSYKYLGIHESGKIEHSTVRQELQKQYFSRVKRITNSHLNSGNLIKAINNFAVPVLLYSFGVVNYKISDLKNIDVKTRKILNMNKAHHQKADLDRLYVPIENGGRGLINIEMSYKTQVIKYQQYLERETDYIIIAITTHDKNRDKYSIDKEAKEHRLELKIKNNTICTDAEIKSAKIKHAIGRWKAKPLHGQFYRSATDKENIDTEYSFRCLKKQAISPALEASVFSLQDQAIITRQHERDVLKKSVDGNCRLCGIKDETAQYIVSGCEKLAGTYYTKRHNSVVQYVYWTLLKKHNMDTNCLWWKEQLNQPQIKENEMAKIMCEMPVQTDVTVTHNRPDIIYINKTNNKTYLIDITIPSDYNLGPKELEKLSKYHLLQKEVTRLWKTQTQVIPIVTGASGVVAKSIHKYCTQLDSKISIHIMQKQVAIYTSTILSKVLGNTIYVDRESDSPLP

SEQ ID NO: 8607 - protein, 1275 aa, Atrytonopsis hianna
MERDIRKSRIGPLPGGDRRGTSGADAGRLSMRTVSGSTLNRRARVGEPENTTAENNRNAEDALQCGSMTKSIAGTSALQATTSSEDDNSRIRKWSIEEQRELMFCYFKSRTEGPGYLKRLYETFKQRNPYNLKIQILDGSKLSNQARIILKGTVISKEELAQIRHSAEQAVDTVSLSSTHAQSTTPIPNDSSAQTLTSITQLPIPNTNSHVQDQSINIQENEAIQEDSRRKWSVEEQHELLFCYFKAKAGGVGYIRRLYDIFRSRNPHNPKVHRFDGNKLSNQVRTILNRKFIADEVLSQIKLNAQDSTNRPLNEPPEAAEIDNQSDLITTTPITSTGTQHEQTNIENQPNSPIINSNQTETIEVSEDLHPIIVEFLRTLAETRVTDIKDRKLLPKPNFTKSFIENIQIINKYLPCVLEFDKSLRHINDVIYAVAKTLIKTNNQTPYTLNNKPKPKRDPPWKLRLKNKIEDFRKELGRLTEIKNGINSKKLNKLKNKLFNKYNIFNNQDLDNTIETIKQRIKALAARLKRYDDIDKRKIQNKVFQDNQHKFFTTLTENTNVANVLPTKDEIQDFWTSILSQPISYNKDAEWITEIETTVSNIEETSLDVVSLDKLKVALRKTHNWKTPGIDKVQNYYLKYLTSTHKYIADLFTRILNKSETIEDWFTTGQVILIPKNNETQDPKNWRPIACLPTMYKLLTSVIANELYIHCNNNNILAPEQRGCRRRARGCKDHLMMNKAILEDAHQSQKNLSMGWVDYRKAFDSVSHEWLLKVLDLYKCPKSIKGFLEITMPRWNVVMTARGANDSVTTGPIYIKRGIFQGDSLSPLLFCLAINPLSQILNKYKDKGYKIKGTPMNHLLYMDDLKIYSNSKTNLSILIDSTEIFTQDIGMSFGLDKCNVLHMKAGRRAEHQGVGHVLLSGEEFQHLRGDQSYKYLGIHESGKIEHSTVRQELQKEYFRRVKRITNSHLNSRNLIKAINSFAVPVLLYSFGVVNYKNSDLKNIDVKTRKLLNMSKAHHQKADLDRLYLPVENGGRGLINIEMLYKIQVIKYQQYLERETDYIIKTITTHDKSRDKYSIDKEAKENKIELKINNYTTCTDTEIKSAKVKYVIEKWKAKPLHGQFYRTVIDKENIDTEYSFRWLKKQAISPSLEASVFSLQDQAIITRQHERDVLKKSVDGKCRLCGVKDETAQHIVAGCEKLAGTYYTKRHNNVVQYVYWTLLKKHNMDTTSLWWKEELTQPQIKENETAKIMWEMPVQTDITVTHNTPDIIYINK

SEQ ID NO: 8608 - protein, 1365 aa, Spodoptera frugiperda
MEREISNSSIGSLPGGDRRGTSGADAGRLSMRTVSGSTLNRRARVGEPENATAEHNRHAEDALQCGSLTQSVAGTSALQTTTSSEDNLRIRKWSIEEQRELMFCYFKSKAEGPGYLKRLYNTFKQRNPNNFKVHKLDGNKLSNQARIILNGKTISKEELALIKNKAEQTVDTVSLISEHSTTLTPNNSRSHTPISITQSPTPNTNSHTLDNIDSRRKWTTEEQHELMFCYFKAKTGGTGYIKRFYDLFCSRNPDNPKIHRFDGNKLSNQARTILNRRLISDEVLAQIKLKVQNSPIEPLNDSPVTEIDFQPDVITTPVPITSHEGTTMEIEANSPTINTDNTEIVENHEDQHPVIVEFLQILAEVRATDIKDRKFLPKPKFSKSFIANMQIINKYLPSVLEFDNSLRHINDVIYAVAQTLIKINNQTPYTLNNKPKPKKDPPWKLRIKHKIEDFRKELGRFTEIRSGINSRKINNIKNKLFDKYNIFSDNDRDNTMEIIKQKIKALSARLKRYDDIDKRKTQNIMFQENQHKFYKSLTENTNTINSLPTKDEIQHFWASILSQPISYNKNAEWITEIETAMSNIEETNLDEIGLDKLRIALRKIHNWKTPGIDKVQNYYLKYLTSTHPYIADLFTRILNKTEAIEDWFTTGQVILIPKNSQTQDPKNWRPIACLPTMYKLLTSVIANELYTHCDNNHILAPEQRGCRRRARGCKDHLMMNKAILEDAHQSQKNLSMGWVDYRKAFDSVSHEWLLRVLDLYKCPNSIKGFLEITMPTWKVIMTARGSNDSVTTGPIYIKRGIFQGDSLSPLLFCLAINPLSQILNKYKEKGYKVKDTPINHLLYMDDLKLYSNSKNNLSILIDSIEIFTSDIGMSFGLDKCNVLHMKAGRRVEHQGVGHILLSGEEFENLKGDQSYKYLGIHESGKIEHNTVRQGLQKEYFKRVKRIANSHLNSRNLIKAINSFAVPVLLYSFGVINYKSSDLKSIDVKTRKILNMNKAHHQKADLDRLYLPTETGGRGLINIEMLHKTQIIKYQQYLERETDYIIKTIAMHDKTRDKYSIDKEAKENRIEFKINNNTICTDSEIKSAKIKYTIGKWKAKPLHGQFYRSVIDKENIDTNYSFRWLKKQAISPSLEASIFSLQDQAIVTRQHERDVLKRAVDGKCRLCGVKDETAQHIVAGCEQLAGTYYTKRHNNVVQYVYWTLLKKHNMETTNLWWKEQLTQPQIKENDTAKIMWEIPVQTDVTVTHNRPDIIYINKRDNKTYLIDITVPSDYNIGAKEIEKLSKYHLLQKEITRLWNTQAQVVPIVIGASGMVAKSIHKYCTQLDSNINIHIIQKQAAIHTTTILTKVLGNTIYVDRERDPPLP

SEQ ID NO: 8609 - protein, 1387 aa, Ephestia elutella
MSRNESNERIGPLPGGDRRGTSGADAGRLSIRTVSGSSLNRRARVGEPENTTAEPNCCAESALPSGTGSQSLAGTSENQTTTSFNEQFSDDARRKWSTEERKELMFCYFKAKYMGTGYIKRMFELFSTRNIDNPKVNRLDANKLSNQARLIISRQLLTHDEIEHIKNSVQRLHTDVLDTTNNLRLHTPDSYIQQMEQSSSRPSTRSSSRQSDLNINEENVSSINNTDSRRKWTEEEQCELMFCYFKAKSGGPGYIKRLYNIFVERNPYNPKTRKFDGNTLSNQARTIINRKLISDETLSEIKTRAELLNLEQIEEEAEETEEININTPTPSEISTQINDQPINTTSSGNVHVDTEHQSTTDDNITDLEVDENLDPLIHTFLQNIAETKETPIDSRKFIPKPKFNRHFFENLHKINNFLPNIMTINNNLRNMNDVIYAAAKTLIEANGQTLYTASKVIKPKRDPPWKTRLKNRIEDLRKELGRLTELKKGVSSKKLNKIKNKLYNKYRIFNENDLDNAIETIKQRIKALAGRLKRYEDMSKRKTQNQQFQENQHLFYRNLNSTNVAKDIPSKTEIQTFWESILSEPVPFNKDAQWVKETEETTENIVTQTFDEITLQNLKAAIKKLSNWKTPGIDKIQNYYLKYFTSIHPFLTDLFTKIINKQEQLEEWFTTGLVILIPKKGDTKNPKNWRPIACLPTMYKLLTSVIADELYSHCDSNNILSPEQRGCRRKVRGCKDHLMINKAILEDAHQSQKNLSMGWVDYQKAFDSISHEWLLKVLDIYKCPSSIKGFLEIVIPNWNVIMTARGSHESITTDRISIRRGIFQGDSLSPLLFCLALNPLTQILQKYIDKGYQLKDKTYINHLIYMDDLKLYSNSKHNLKIMIDSTEIFTRDIGMSFGLDKCNVLHLKAGRRDEHQGQGHILLTGEQFEHLKVGESYKYLGVHETGKINHNEIKQQIKKEYFRRVKCITNSHLNSRNLLRAINSYAVPVVLYSFGVINYKDTDLRAIDTKTRKILNMNKSHHQKAEVERLYLPNEEGGRGLLNIETMYKTQIIKYNNYLKTGTDHLIQAIREHDKAKDKYSIEKESIEFRKELGLQIDEQYTDKEIKKAIVRNRINKIKSKPLHGQFYKDVLGRENIEKDTSFRWLKKQPVSPILEASIYAIQDQAVVTRQHERDILKRPVDGKCRVCGSRDETAQHIIAGCEKLAGTHYTKRHNNLVQYVHWTLLKKHGFECEKLWWKEHLTQPQVKENDTAKIMWEMPIQTDVTVAHNRPDIVYINKLDNQIYLIDVTVPSDYNIGAKEIEKLSKYHLLQKEITRLWKMPTQVIPIVIGTTGIIAKSLHRYLNFLNSKIDVNILQKQAAIHTSIIMSKVLGNTIFVDRNPDSPSP

SEQ ID NO: 8610 - protein, 1387 aa, Ephestia elutella
MSRNESNERIGPLPGGDRRGTSGADAGRLSIRTVSGSSLNRRARVGEPENTTAEPNCYAESALPSGTGSQSLAGTSENQTTTSLNEQFSDDARRKWSTEERKELMFCYFKAKYEGTGYIKRMFELFSTRNIDNPKVNRLDANKLSNQARLIISRQLLTHDEIEHIKNSVQRLHTDVLDTTNNLRLHTPDSYIQQMEQSSSRPSTRSSSRQSDLNINDENVSSINNTDSRRKWTEEEQCELMFCYFKAKSGGPGYIKRLYNIFVERNPYNPKTRKFDGNTLSNQARTIINRKLISDETLSEIKTRAELLNLEQIEEEAEETVEININTPTPSEISTQINDHPINTTSLGNMHVDTEHQSTTDDNITDLEVDENLDPLIHTFLQNIAETKETPIDSRKFIPKPKFNRHFFENLHKINNFLPNIMTINNNLRNMNDVIYAAAKTLIEANGQTLYTASKVIKPKRDPPWKTRLKNRIEDLRKELGRLTELKKGVSSKKLNKIKNKLYNKYRIFNENDLDNAIETIKQRIKALAGRLKRYEDMSKRKTQNQQFQENQHLFYRNLNSTNVAKDIPSKTEIQTFWESILSEPVPFNKDAQWVKETEETTENIVTQTFDEITLQNLKAAIKKLSNWKTPGIDKIQNYYLKYFTSIHPFLTDLFTKIINKQEQLEEWFTTGLVILIPKKGDTKNPKNWRPIACLPTMYKLLTSVIADELYSHCDSNNILSPEQRGCRRKVRGCKDHLMINKAILEDAHQSQKNLSMGWVDYQKAFDSISHEWLLKVLDIYKCPSSIKGFLEIVIPNWNVIMTARGSHESITTDRISIRRGIFQGDSLSPLLFCLALNPLTQILQKYIDKGYQLKDKTYINHLIYMDDLKLYSNSKHNLKIMIDSTEIFTRDIGMSFGLDKCNVLHLKAGRRDEHQGQGHILLTGEQFEHLKVGESYKYLGVHETGKINHNEIKQQIKKEYFRRVKCITNSHLNSRNLLRAINSYAVPVVLYSFGVINYKDTDLRAIDTKTRKILNMNKSHHQKAEVERLYLPNEEGGRGLLNIETIYKTQIIKYNSYLKTGTDHLIQAIREHDKAKDKYSIEKESIEFRKELGLQIDEQYTDKEIKKAIVRNRINKIKSKPLHGQFYKDVLGRENIEKDTSFRWLKKQPVSPILEASIYAIQDQAVVTRQHERDILKRPVDGKCRVCGSRDETAQHIIAGCEKLAGTHYTKRHNNLVQYVHWTLLKKHGFECEKLWWKEHLTQPQVKENDTAKIMWEMPIQTDVTVAHNRPDIVYINKLDNQIYLIDVTVPSDYNIGAKEIEKLSKYHLLQKEITRLWKMPTQVIPIVIGTTGIIAKSLHRYLNFLNSKIDVNILQKQAATHTSIIMSKVLGNTIFVDRNPDSPSP

SEQ ID NO: 8611 - protein, 1387 aa, Ephestia elutella
MSRNESNERIGPLPGGDRRGTSGADAGRLSIRTVSGSSLNRRARVGEPENTTAEPNCCAESALPSGTGSQSLAGTSENQTTTSFNEQFSDDARRKWSTEERKELMFCYFKAKYEGTGYIKRMFELFSTRNIDNPKVNRLDANKLSNQARLIISRQLLTHDEIEHIKNSVQRLHTDVLDTTNNLRLHTPDSYIQQMEQSSSRPSTRSSSRQSDLNINEENGSSINNTDSRRKWTEEEQCELMFCYFKAKSGGPGYIKRLYNIFVERNPYNPKTRKFDGNTLSNQARTIINRKLISDETLSEIKTRAELLNLEQIEEEAEETEEININTPNPSEISTQINDQPINTTSTGNVHVDTEHQSTTDDNITDLEVDENLDPLIHTFLQNIAETKETPIDSRKFIPKPKFNRHFFENLHKINNFLPNIMTINNNLRNMNDVIYAAAKTLIEANGQTLYTASKVIKPKRDPPWKTRLKNRIEDLRKELGRLTELKKGVSSMKLNKIKNKLYNKYRIFNENDLDNAIETIKQRIKALAGRLKRYEDMSKRKTQNQQFQENQHLFYRNLNSTNVAKDIPSKTEIQTFWESILSEPVPFNKDAQWVKETEETTENIVTQTFDEITLQNLKAAIKKLSNWKTPGIDKIQNYYLKYFTSIHPFLTDLFTKIINKQEQLEEWFTTGLVILIPKKGDTKNPKNWRPIACLPTMYKLLTSVIADELYSHCDSNNILSPEQRGCRRKVRGCKDHLMINKAILEDAHQSQKNLSMGWVDYQKAFDSISHEWLLKVLDIYKCPSSIKGFLEIVIPNWNVIMTARGSHESITTDRISIRRGIFQGDSLSPLLFCLALNPLTQILQKYIDKGYQLKDKTYINHLIYMDDLKLYSNSKHNLKVMIDSTEIFTRDIGMSFGLDKCNVLHLKAGRRDEHQGQGHILLTGEQFEHLKVGESYKYLGVHETGKINHNEIKQQIKKEYFRRVKCITNSHLNSRNLLRAINSYAVPVVLYSFGVINYKDTDLRAIDTKTRKILNMNKSHHQKAEVERLYLPNEEGGRGLLNIETMYKTQIIKYNNYLKTGTDHLIQAIREHDKAKDKYSIEKESIEFRKELGLQIDEQYTDKEIKKAIVRNRINKIKSKPLHGQFYKDVLGRENIEKDTSFRWLKKQPVSPILEASIYAIQDQAVVTRQHERDILKRPVDGKCRVCGSRDETAQHIIAGCEKLAGTHYTKRHNNLVQYVHWTLLKKHGFECEKLWWKEHLTQPQVKENDTAKIMWEMPIQTDVTVAHNRPDIVYINKLDNQIYLIDVTVPSDYNIGAKEVEKLSKYHLLQKEITRLWKMPTQVIPIVIGTTGIIAKSLHRYLNFLNSKIDVNILQKQAATHTSIIMSKVLGNTIFVDRNPDSPSP

SEQ ID NO: 8612 - protein, 966 aa, Ephestia elutella
MTINNNLRNMNDVIYAAAKTLIEANGQTLYTASKVIKPKRDPPWKTRLKNRIEDLRKELGRLTELKKGVSSMKLNKIKNKLYNKYRIFNENDLDNAIETIKQRIKALAGRLKRYEDMSKRKTQNQQFQENQHLFYRNLNSTNVAKDIPSKTEIQTFWESILSEPVPFNKDAQWVKETEETTENIVTQTFDEITLQNLKAAIKKLSNWKTPGIDKIQNYYLKYFTSIHPFLTDLFTKIINKQEQLEEWFTTGLVILIPKKGDTKNPKNWRPIACLPTMYKLLTSVIADELYSHCDSNNILSPEQRGCRRKVRGCKDHLMINKAILEDAHQSQKNLSMGWVDYQKAFDSISHEWLLKVLDIYKCPSSIKGFLEIVIPNWNVIMTARGSHESITTDRISIRRGIFQGDSLSPLLFCLALNPLTQILQKYIDKGYQLKDKTYINHLIYMDDLKLYSNSKHNLKIMIDSTEIFTRDIGMSFGLDKCNVLHLKAGRRDEHQGQGHILLTGEQFEHLKVGESYKYLGVHETGKINHNEIKQQIKKEYFRRVKCITNSHLNSRNLLRAINSYAVPVVLYSFGVINYKDTDLRAIDTKTRKILNMNKSHHQKAEVERLYLPNEEGGRGLLNIETMYKTQIIKYNNYLKTGTDHLIQAIREHDKAKDKYSIEKESTEFRKELGLQIDEQYTDKEIKKAIVRNRINKIKSKPLHGQFYKDVLGRENIEKDTSFRWLKKQPVSPILEASIYAIQDQAVVTRQHERDILKRPVDGKCRVCGSRDETAQHIIAGCEKLAGTHYTKRHNNLVQYVHWTLLKKHGFECEKLWWKEHLTQPQVKENDTAKIMWEMPIQTDVTVAHNRPDIVYINKLDNQIYLIDVTVPSDYNIGAKEIEKLSKYHLLQKEITRLWKMPTQVIPIVIGTTGIIAKSLHRYLNFLNSKIDVNILQKQAAIHTSIIMSKVLGNTIFVDRNPDSPSP

SEQ ID NO: 8613 - protein, 1283 aa, Ephestia elutella
MFCYFKAKYEGTGYIKRMFELFSTRNIDNPKVNRLDANKLSNQARLIISRQLLTHDEIEHIKNSVQRLHTDVLDTTNNLRLHTPDSYIQQMEQSSSRPSTRSSSRQSDLNINEENVSSINNTDSRRKWTEEEQCELMFCYFKAKSGGPGYIKRLYNIFVERNPYNPKTRKFDGNTLSNQARTIINRKLISDETLSEIKTRAELLNLEQIEEEAEETEEININTPTPSEISTQINDQPINTTSSGNVHVDTEHQSTTDDNITDLEVDENLDPLIHTFLQNIAETKETPIDSRKFIPKPKFNRHFFENLHKINNFLPNIMTINNNLRNMNDVIYAAAKTLIEANGQTLYTASKVIKPKRDPPWKTRLKNRIEDLRKELGRLTELKKGVSSMKLNKIKNKLYNKYRIFNENDLDNAIETIKQRIKALAGRLKRYEDMSKRKTQNQQFQENQHLFYRNLNSTNVAKDIPSKTEIQTFWESILSEPVPFNKDAQWVKETEETTENIVTQTFDEITLQNLKAAIKKLSNWKTPGIDKIQNYYLKYFTSIHPFLTDLFTKIINKQEQLEEWFTTGLVILIPKKGDTKNPKNWRPIACLPTMYKLLTSVIADELYSHCDSNNILSPEQRGCRRKVRGCKDHLMINKAILEDAHQSQKNLSMGWVDYQKAFDSISHEWLLKVLDIYKCPSSIKGFLEIVIPNWNVIMTARGSHESITTDRISIRRGIFQGDSLSPLLFCLALNPLTQILQKYIDKGYQLKDKTYINHLIYMDDLKLYSNSKHNLKIMIDSTEIFTRDIGMSFGLDKCNVLHLKAGRRDEHQGQGHILLTGEQFEHLKVGESYKYLGVHETGKINHNEIKQQIKKEYFRRVKCITNSHLNSRNLLRAINSYAVPVVLYSFGVINYKDTDLRAIDTKTRKILNMNKSHHQKAEVERLYLPNEEGGRGLLNIETMYKTQIIKYNNYLKTGTDHLIQAIREHDKAKDKYSIEKESIEFRKELGLQIDEQYTDKEIKKAIVRNRINKIKSKPLHGQFYKDVLGRENIEKDTSFRWLKKQPVSPILEASIYAIQDQAVVTRQHERDILKRPVDGKCRVCGSRDETAQHIIAGCEKLAGTHYTKRHNNLVQYVHWTLLKKHGFECEKLWWKEHLTQPQVKENDTAKIMWEMPIQTDVTVAHNRPDIVYINKLDNQIYLIDVTVPSDYNIGAKEIEKLSKYHLLQKEITRLWKMPTQVIPIVIGTTGIIAKSLHRYLNFLNSKIDVNILQKQAAIHTSIIMSKVLGNTIFVDRNPDSPSP

SEQ ID NO: 8614 - protein, 1038 aa, Ephestia elutella
MHVDTEHQSTTDDNITDLEVDENLDPLIHTFLQNIAETKETPIDSRKFIPKPKFNRHFFENLHKINNFLPNIMTINNNLRNMNDVIYAAAKTLIEANGQTLYTASKVIKPKRDPPWKTRLKNRIEDLRKELGRLTELKKGVSSKKLNKIKNKLYNKYRIFNENDLDNAIETIKQRIKALAGRLKRYEDMSKRKTQNQQFQENQHLFYRNLNSTNVAKDIPSKTEIQTFWESILSEPVQFNKDAQWVKETEETTENIVTQTFDEITLQNLKAAIKKLSNWKTPGIDKIQNYYLKYFTSIHPFLTDLFTKIINKQEQLEEWFTTGLVILIPKKGDTKNPKNWRPIACLPTMYKLLTSVIADELYSHCDSNNILSPEQRGCRRKVRGCKDHLMINKAILEDAHQSQKNLSMGWVDYQKAFDSISHEWLLKVLDIYKCPSSIKGFLEIVIPNWNVIMTARGSHESITTDRISIRRGIFQGDSLSPLLFCLALNPLTQILQKYIDKGYQLKDKTYINHLIYMDDLKLYSNSKHNLKIMIDSTEIFTRDIGMSFGLDKCNVLHLKAGRRDEHQGQGHILLTGEQFEHLKVGESYKYLGVHETGKINHNEIKQQIKKEYFRRVKCITNSHLNSRNLLRAINSYAVPVVLYSFGVINYKDTDLRAIDTKTRKILNMNKSHHQKAEVERLYLPNEEGGRGLLNIETIYKTQIIKYNSYLKTGTDHLIQAIREHDKAKDKYSIEKESIEFRKELGLQIDEQYTDKEIKKAIVRNRINKIKSKPLHGQFYKDVLGRENIEKDTSFRWLKKQPVSPILEASIYAIQDQAVVTRQHERDILKRPVDGKCRVCGSRDETAQHIIAGCEKLAGTHYTKRHNNLVQYVHWTLLKKHGFECEKLWWKEHLTQPQVKENDTAKIMWEMPIQTDVTVAHNRPDIVYINKLDNQIYLIDVTVPSDYNIGAKEIEKLSKYHLLQKEITRLWKMPTQVIPIVIGTTGIIAKSLHRYLNFLNSKIDVNILQKQAATHTSIIMSKVLGNTIFVDRNPDSPSP

SEQ ID NO: 8615 - protein, 1093 aa, Coeliades ramanatek
MTFASISTRTSADRVPDQHTHQDSQQQSNSPAQPSSHTQASDENISSLLAQNNEVTHLGETSNNEIAHSVDAGEDQDPLILELLQILAETKETPLNDRKFLPKPKLNKQFFINLHKINDFLPNLLVTNTNLVDTNNIIYAAAMTLIISNGQKPYSALKEIRPPRDPPWKRRLKTKIELIRKELGQFTEIKKGVNSRKMQKAKENLYNKYNIFSQQEHDNMMELLKQKLKAKSGRLKRYEDISDRKNQNKLFKENQHKFYRMQYERRQEVDKLPTKEEIETFWTDILSKPISYNKSAAWIRDTERCNEHIEESEFDSIATSEVKNAIKRLHNWKTPGIDKIQNFYLKYLTNTHEFIAKIFNNIFKGKETIEEWFTTGNVILIPKNSNTLDPKNWRPIACLPTMYKLLTSVITNRLQAHCEHHNIIAPEQRGCRRHTRGCKDHLMINKAILEDAHQSQKNLCMGWIDYRKAFDSISHEWILHVLDLYKCPKSIKRFLQVVMPHWKVIMTARGNNCSITTDPIVVRRGIFQGDSLSPLLFCLAINPLTQILSKYELKGYHLKDSIYVNHLLYMDDLKLYANNRNNLKVLLDSTETFTNDIGMTFGLNKCNVLHLTAGRRQRCEGEGHILLSGEEFQELQRNETYKYLGINESGKIDHNEVRQQIQKEYFKRVKNITKTHLNARNLIKAINTYAIPTLLYSFGVVNFKISDLKSIDVKTRKLLALNKAHQQKAEVTRLYLPIDSGGRGLINVEMLYKTQIIKYKKYLDSNKDDLLKAIAIHDKSRDKYSIHKESLEFCTEIGIQDRFDRRDHTNKELKLAVITKLTNIWKSKCLHGQFINKVLDKDNIDTEYSFRWLKKQPISPALEAAIFSIQDQAVITNQFERDIMKKPVDGKCRVCSAKDETVQHIVSGCEKLAGTYYTKRHNNIVQYIHWAIARKHKFDVDKLWWKQHLTKPQVIENDTAKLMWEMPVQTDLTVTHNRPDIIYINKTQNHAYLIDVTVPSDYNIGAKEIEKLSKYHLLKTEITRLWKIPTTIVPIVIGATGIVAKSIHRYCNKLDAHINIHIIQKQAALHTNVILSKTLGNCIFTGETELPSP

SEQ ID NO: 8616 - protein, 1162 aa, Ectomis octomaculata
MKRVLKDLRTGPLPGGRRGTLGAGAERDSMRTASGSSLNRRAGAGETENTTADIFSDADDALQNRGSPTSSAGTSETTTTRSIISDDARRKWSQDELHELMFCYYKAKSTGPGYIKRFEHLFKQRNPTNPKIHKYTGNTLSNQARSIINRKFISEEVLQEIKRQAEHTSTAISTDLTLSTQNIQPKNHRLDAEIATDNIIIEDYQNEEVTDAAEQQQVNDVIRIIDVSENQDPVILEFLQTLAEVKDTPIDKRYCLPKPKFNKSFFENLHKINNFLPTILITNCTLRETNNVIYAAAKTLIINNGQRPFLPSVTKNSTKDSPWKRRLRTKIDVIRKELGQLTEIANGINSRKIHKIKNTLYNKYNIFTRQDHDKIAEILKQKLKAIAGRLKRYEDINNRKIQNNLFTENQHKFYRNISGQKHKTSEIPTKGAIETFWINILGQPITYNKTASWIKDIEETTSEIDEHNFDTISLDQIKSAISKLSNWKTPGIDKIHNFYLKYLTNSHEFIAKVFDKIFKGIEPIEERFSTGQVILIPKDADTKDPKNWRPIACLPTMYKLLTSIIADQLYIHCETNDIIAPEQRGCRRRTRGCKDHLMVNKAILEDAHQSQKNLSMGWVDYRKAFDSISHDWLLKVLELYKCPKSIRYFLQMVMPHWNVIMTAHSTKDTITTDPIYIRRGIFQGDSLSPLLFCMCINPLSQILNKYDLQGFHLKDSIYINHLLYMDDLKIYAKNKNSLNVLLNSTEIFTHDIGMNFGLNKCSILHLTAGRRSSHEGEGHILLSGEEFQHLKSNEKYKYLGINESGKIDHSEVRQQVQKEYFRRVKCLTRTHLLSRNLIKSINTYAMPVLLYTFGVVNYKISDLKSIDTKTRKLLAINKAQQKKADVSRLYIPMDQGGRGLINIEMLYKTQIIKYNRYIKSEKDHIIKAIVVHDKSRDKYSIHKEAKQFCEEISIRDRREFTEKEVKAAVIRKHINNWKSKVLHGQFLKTVLEKENIDTEYSFRWFKKQPVSPSLEASIFSIQDNSIITHQFERDIMKKPVDGKCRLCLAKDETVQHLVSGCEKLAGTYYTKRHNNIVQYIHWTIAKKHKFNVDKFWWKETLTQPQIIENETAKLMWEMPVQTDRTVTHNRPDIIYINKIENHAYLIDITIPSDYNIGAKEME

SEQ ID NO: 8617 - protein, 1266 aa, Polygonus savigny
MKRVLRELRPGPLPGGRRGTLGAGAERDSIRAASGSSLNRRAGVGEPEVTTADITSDAGDALQNSGSSTRSAGTSDMTTTSSIISDDARRKWSQEELHELMFCYFKAKFTGPGYIKRFEQIFKQRNPNNPKVNKYTGNTLSNQARSIINRKFISEEVLLEIKRKAECTSTLVNPDSISHTQNTQTYTTNTQESNLIIHQPNTDSTPTNSNINREINTNNIFVEHSQSEVVIDAAEQQQINDLTGNIDTSEDQDPIILELLQTLAEVKDTPIDKRYFLPKPKFNKHFFENFHKINKFLPSLLVTNCTLRETNNILYAAAKTLIVANNQKPFPPLIAKKPFKDPPWKRRIKTKIDIIRKELGQLTEIGRGVKSRKIIKIKNTLYNKYNIFTQQDHNNTVEILKQRLKAIAGRLKRYEDMNDRKTQNNLFAENQHKFYKNISGQQIKTSEIPTKEAIETFWKNILDQPITYNKKANWIKEIEDTASEIDEHNFDSINLNQIKTAINKLHNWKTPGIDKIHNYYLKYLTSSHEFLVKVFNKIFKGIEPIEEWFTTGHVILIPKDADTKDPKNWRPIACLPTMYKLLTSVIAEQLYTHCEHNNIIAPEQRGCRRNTRGCKDHLMVNKAILEDAHQSQKNLCMGWVDYRKAFDSISHDWLLKALELYKCPKSIINFLQKVMPYWNVVMTAHGINNTITTDPIHIRRGIFQGDSLSPLLFCICLNPLSQILSKYELQGFHLKDSIYVNHLLYMDDLKIYAKNKNSLNILLNSTEIFTQDIGMSFGLNKCSILHLKAGRRSSHEGEGHILLSGEEFQHLQSNERYKYLGINESGKIDHSEVRQQIQKEYFKRLKCLTKTHLNSRNLIKAINIYAIPVLLYTFGVVNYKNSDLKSIDVKTRKLLALNKAQQQKADVSRLYIPLEQGGRGLINVEMLYKTQIIKYERYLKSGKDHLIKAIVVHDKNRDKYSIHKEARQFCEEIGINDRVDYTEKELKTAVIKKYVNNWKSKALHGQFLRSVLQKENIDTEYSFRWLKKQPVSPTLEASVFSLQDNSVITNQFERDIMKKPVNGKCRICLAKDETVQHIVSGCEKLAGTYYTKRHNNIVQYIHWTIAKKHNFNVNQLWWKETLTQPQVIENETAKLMWEMPVQTDRTVTHNRPDIIYINKQQNHAYLIDVTVPSDYNIGAKEVEKLSKYHLLKTEITRLWKIPTSVIPIVIGATGIVARSLHKYCNILDSHINIHILQKQAAIHTTTIMSKILGNAIFAGETESPSP

SEQ ID NO: 8618 - protein, 1267 aa, Duroca duroca
MANGALVTFMMKRQLRNLRQGPLPGERRGTFGADAERDSIRTVSGSSLNRRARVGEPEDTTADTIRDADNALQNTGSSTSSAGVSEATTTSSLTSEDARRKWSQEELHELMFCYFKAKAEGPGYIKRFERLFKQRNQNNPKVAKFTGNTLSNQARSIINRKFISAELLDEIKQRAEQITTNTQLAVSLSDTPNTCTHNLFNAHQSNSAVNHQTDTDGADVGTNNIIAEYNHLLDTENLQEINDLTSNIDTSEDQDPIILKCLQSFAEVKEIPIAERKFLPKPKFNKQFFDNLRKINNFLPKLLITNDSLREINNVIYAAAKTLIIENKQEPYIQNTKTKALSDPPWKRRLKSNIDIIRKELGQLTEIGKGLNSKKILKAKNKLYTKYNIFSKQDHDNILEILKQKLKAKAGRLKRYDDINARKTQNKQFLENQHKFYRSMTGKQQITEIPSKEAIETFWKNIISQPITYNKTAPWISDIEDSNKDIEEHSFDNITVEQVKQAISKLHNWKTPGIDQIHNYYLKYFTSTHKFIAKLFDRIFKGTETTEEWFTTGLVILIPKDGDTNDPKNWRPIACLPTMYKLLTSIISNELYTHCSNNDIVAPEQRGCRRRARGCKDHLMINKAVLEDAHQSQKNLSMGWIDYRKAFDSISHDWLLKVLSLYKCPESIINFLRLVMPNWKVIMTARGINNSITTEPICIRRGIFQGDSLSPLLFCIGINPLSQILNKYELKGYHLKDSVYINHLLYMDDLKVYAKNKNSLGILLDSTEIFTRDIGMSFGLNKCSILHLTAGIKSGQEGDGHILLSGEEFEHLKSNERYKYLGINESGKIDHNEVRQQIQKEYFRRVKCLTRTHLNSRNLIKSINTYAMPVLLYSFGVVNYKNSDLKTIDTKTRKLLNIHKAHHQKADVDRLYIPIDQGGRGLVNIEMLYKTQIIKYNKYLKSENDHLIKAIVVHDKMRDKYSICKESKQFCEEIRLRNEENYTEKEIKNLVVKKHVNSWKNKPLHGQFLNRVLEKENIDTEYSFRWFKKQPMSPTLEASIFAIQDQSIITNQFERDIIKKPVDGKCRVCLEKDETVQHIVSGCEKLAGTYYTKRHNNIVQYVHWTIARKHNFNVNQLWWKENLVKPQVIENETAKLMWEMPVQTDITVTHNRPDIIYINKQEKHAYLIDITVPSDYNIGAKEVEKLSKYHLLKTEITRLWKIPTTVVPIVIGATGVIAKSLHRYCNKINSDINIHIMQKQAAIHTNTILSKVLGNVIFAGETESPSS

SEQ ID NO: 8619 - protein, 802 aa, Udranomia kikkawai
MTYNTGAPWIKEIEEASKSIEEYNFENITIDEVKNAITKLKNWKTPGVDKIHNYYLKYFTSTHKYLAKLFDKLFKGQEIMEDWFTTGQVILIPKDGDTTDPKNWRPIACLPTMYKLLTSVIADQLYIHCDINNIIAPEQRGCRRRARGCKDHLMINKAIVEDAHHSQKNLSMGWIDYQKAFDSISHAWLLKALEIYRCPKSIRSFLEIIIPNWNVVMTAHGTNGSITTDPIYIRRGIFQGDSLSPLLFCISINPLSQLLNKYNLKGYHLKDSLFINHLLYMDDLKIYANNKNSLQVLLDSTEIFTQDIGMSFGLNKCNILHLTAGRRSSHEGNGHILLSGEEFQNLQINDKYKYLGINESGKIDHNEVRQQMQKEYFKRVKHIARTHLNSRNLIKAINTFAVPILLYSFGIINYKISDLKTIDTKTRKLLAINKAQQKKADVSRLYIPIEQGGRGLTNIEMLYKTQIIKYKKYLNLENDYLIKAIVAHDKNKTKYSIYKEATQFSEEIGIQDSNDNYTDKELRRAVVKKHVNNWKSKPLHGQFLKAVLEKENIDTEYSFRWLKRKPVSPTLEASIFSIQDQSVVTNQFERDIMKKPVNGKCRICLAKDETVQHITSGCESLAGTYYTKRHNNIVQYVHWTIAKKHNFNVNQFWWKETLVQPQVIENESAKLMWEMPVQTDKTVTHNRPDIIYINKQENQAYLIDITVPSDYNIGPKEIEKLSKYYLLKTEINRLWKIPTTVIPIVVGATGIVAKSIHKYCNLLNASIDTHIIQKQAAIHTTTILSKALGNSIFAGETESPSP

SEQ ID NO: 8620 - protein, 942 aa, Caprimulgus europaeus
MGHLEQETEGEQLVPSESHTEGGLKNHYLQLISQWMTDGKLSILQGSFDKIREMNGEATELIPEVIKDSYTRLFKKNTETKASQGPKRRECKKPSSGPPKQWMKKRAIRRGQFLRFQQLFDLDKSKLASIILDDSESSKCNIPSDQIHEVFKSRWESPGTFQSLGAFRANGHADNSAFSTLITAKEIDKNIKEMKKNSAPGPDGVSLKDLIKMDPRYTHLVELYNLWLVTGTIPDEMRECRTTLLPKSSKPERLKDINNWRPITIGSTILRLYSRILTARLTKACPINPRQKGFIRAPGCAENLKLLQLILKTAKKEHRPLGVVFVDIAKAFDTVDHQHIITALRQKRVDEHIIALITDLYHKISTRITLKKEQSDPIGIQVGVKQGDPMSPILFNLSMDPLLCKLEEEGEGFQHCSKKITTMAFADDLVLLSGSWEGMQKNIKIVEVFCELTGLKTQGEKCHGFYIKPTKDSYTINDCPPWTIKGTPLNMIEPGNSEKYLGLHIDPWVGISKPELTEKVKDWLGRIGRAKLKPWQKVDILKGYAIPRLIYLADQADVKTTHLESLDLEIRNTVKEWLHLPPSTCDAILYCSTRDGGLGITRLTGLIPSIQARRLHRIAQSSDEITRTFAREAGIEKDFAKLWVAAGGDKDKIPSIWDPKTVSVLPEELSGEDPLSEWEVAAPRIIYPKPCNWRKQEFTHWTKLASQGRGISNFEKDTISNKWLEQHRGIPQRKLITALQLRANVFPTREFLARGREGTQIKACRHCQAESETCAHIIGYCPAVQDARIKRHNQICELLMETAKKEEWVVFQEPQLRDTSHELYKPDIIFVKDKKAIVVDVTIRYESKPTSLSEAAAEKVRKYSHLKDQIQELTNATDIKFMGFPLGARGKWHEDNYELLEDLGLSGSKREKLARRLSNRALFTSVDIIHMFTSKTRTVIRV

SEQ ID NO: 8621 - protein, 1765 aa, Caprimulgus europaeus
MCWSTRVNFLSVGTQTDPKDLQEITTTKTTEDCEEKSEEASEGLGLIYLEFVNSGSMLFSEGGWDEWLGGLPEPYEEPGPPVLGAAVGPPELSGSVPGSHAGPGSGAACRGSAAGHGSIVACRGSAADPGSGGDCRGSAVDQGSGGDCRGSVAGRVSGGVGPGSATGPGSRGDCRGSAAGRVSGGDCRGSAAAPGSKRDCRGSAAGRVSGGVCPGTATGPGSGGECRGSAAGRVSGGDCRGSAAAPGLKRDCRGSAAGRVSGGVCTGSAAGRVSGGVCPGSAAGPGSGGECRGSAAGRVSGGDCRGSAAAPGLKRDCRGSAAGRVSGGVCPGSAAGRVSGGVCPGSAAGPGSGGERRGSAAGRVSGGDCRGSAAAPGLKRDCRGSAAGRVSGGDCRGSAAAPGLKRDCRGSAAGRVSGGVCPGTATGPGSGGDCRGSAAGRVSGGVCPGTATGPGSGRECRGSAAGRVSGGDCRGSAAAPGLKRDCRGSAAGRVSGGVCPGSAAGRVSGGVCPGSAAGPGSGGERHGSAAGRVSGGDCRGSAAAPGLKRDCRGSAAGRVSGGVCPGSATVPGSGGECRGSAAGRVSGGGGSGSVAEQGSGRDCRGSADNQGSGLDYQGSGPNSLEEIKDPSPAGNPAAVNTPVVKIPDSQPSCPCCGNKVSKISGLVEHLKRNHGIKKILFQCARCGKTNEKQHSIACHFPKCKGPEEPPSIKGLICEECQKIFPTKIGLGQHKRHAHPVTRNNERINASRPKAISARGAHKRCWTDEEVEQLQRLIKQYEGNKNINKLIAEHIPTKTAKQISDKRRLLHNSPTEGETITQDEMGHLEQETEGEQLVPSESHTEGGLKNHYLQLISQWMTDGKLSILQGSFDKIREMNGEATELIPEVIKDSYTRLFKKNTETKASQGPKRRECKKPSSGPPKQWMKKRAIRRGQFLRFQQLFDLDKSKLASIILDDSESSKCNIPSDQIHEVFKSRWESPGTFQSLGAFRANGHADNSAFSTLITAKEIDKNIKEMKKNSAPGPDGVSLKDLIKMDPRYTHLVELYNLWLVTGTIPDEMRECRTTLLPKSSKPERLKDINNWRPITIGSTILRLYSRILTARLTKACPINPRQKGFIRAPGCAENLKLLQLILKTAKKEHRPLGVVFVDIAKAFDTVDHQHIITVLRQKRVDEHIIALITDLYHKISTRITLKKEQSDPIGIQVGVKQGDPMSPILFNLSMDPLLCKLEEEGEGFQHCSKKITTMAFADDLVLLSGSWEGMQKNIKIVEVFCELTGLKTQGEKCHGFYIKPTKDSYTINDCPPWTIKGTPLNMIEPGNSEKYLGLHIDPWVGISKPELAEKVKDWLGRIGRAKLKPWQKVDILKGYAIPRLIYLADQADVKTTHLESLDLEIRNTVKEWLHLPPSTCDAILYCSTRDGGLGITRLTGLIPSIQARRLHRIAQSSDEITRTFAREAGIEKDFAKLWVAAGGDKDKIPSIWDPKTVSVLPEELSGEDPLSEWEVAAPRIIYPKPCNWRKQEFTHWTKLASQGRGISNFEKDTISNKWLEQHRGIPQRKLITALQLRANVFPTREFLARGREGTQIKACRHCQAESETCAHIIGYCPAVQDARIKRHNQICELLMETAKKEEWVVFQEPQLRDTSHELYKPDIIFVKDKKAIVVDVTIRYESKPTSLSEAAAEKVRKYSHLKDQIQELTNATDIKFMGFPLGARGKWHEDNYELLEDLGLSGSKREKLARRLSNRALFTSVDIIHMFTSKTRTVIRV

SEQ ID NO: 8622 - protein, 942 aa, Caprimulgus europaeus
MGHLEQETEGEQLVPSESHTEGGLKNHYLQLIFQWMTDGKLSILQGSFDKIREMNGEATELIPEVIKDSYTRLFKKNTETKASQGPKRRECKKPSSGPPKQWMKKRAIRRGQFLRFQQLFDLDKSKLASIILDDSESSKCNIPSDQIHEVFKSRWESPGTFQSLGAFRANGHADNSAFSTLITAKEIDKNIKEMKKNSAPGPDGVSLKDLIKMDPRYTHLVELYNLWLVTGTIPDEMRECRTTLLPKSSKPERLKDINNWRPITIGSTILRLYSRILTARLTKACPINPRQKGFIRAPGCAENLKLLQLILKTAKKEHRPLGVVFVDIAKAFDTVDHQHIITALRQKRVDEHIIALITDLYHKISTRITLKKEQSDPIGIQVGVKQGDPMSPILFNLSMDPLLCKLEEEGEGFQHCSKKITTMAFADDLVLLSGSWEGMQKNIKIVEVFCELTGLKTQGEKCHGFYIKPTKDSYTINDCPPWTIKGTPLNMIEPGNSEKYLGLHIDPWVGISKPELTEKVKDWLGRIGRAKLKPWQKVDILKGYAIPRLIYLADQADVKTTHLESLDLEIRNTVKEWLHLPPSTCDAILYCSTRDGGLGITRLTGLIPSIQARRLHRIAQSSDEITRTFAREAGIEKDFAKLWVAAGGDKDKIPSIWDPKTVSVLPEELSGEDPLSEWEVAAPRIIYPKPCNWRKQEFTHWTKLASQGRGISNFEKDTISNKWLEQHRGIPQRKLITALQLRANVFPTREFLARGREGTQIKACRHCQAESETCAHIIGYCPAVQDARIKRHNQICELLMETAKKEEWVVFQEPQLRDTSHELYKPDIIFVKDKKAIVVDVTIRYESKPTSLSEAAAEKVRKYSHLKDQIQELTNATDIKFMGFPLGARGKWHEDNYELLEDLGLSGSKREKLARRLSNRALFTSVDIIHMFTSKTRTVIRV

SEQ ID NO: 8623 - protein, 921 aa, Caprimulgus europaeus
MWWMANDVYWCVTQHYIPWFCDVTSSCLHHRSNAIGCRERDLIFPYITRSSGRQTLASNTKANQGPKRRGCKKPSSDPPKQWMKKRAIKRGLFLRFQQLLDLDKSKLASIILDDSESSKCDIPSDQIHEVFKSRWESPGTFQSLGAFRTNGHADNSAFSTLITAKEIDKNIKEMKKNSAPGPDGISLKDLIKMDPRYTHLVELYNLWLVTGTIPDEMRECRTTLLPKSSKPERLKDINNWRPITIGSTILRLYSRILTARLTKACPINPRQRGFIRAPGCAENLKLLQLILKTAKKEHRPLGVVFVDIAKAFDTVDHQHIITVLRQKRVDEHIIALITDLYHKISTRITLKKEQSDPIGIQVGVKQGDPMSPILFNLSMDPLLYKLEEEGEGFQHCSKKITTMAFADNLVLLSGSWEGMQKNIKIVEVFCELTGLKTQGEKCHGFYIKPTKDSYTINDCPSWTIKGTPLNMIEPGNSEKYLGLHIDPWVGISKSELAEKVKDWLGRIGRAKLKPWQKVDILKGYAIPRLIYLANQADIKTTHLESLDLEIRNTVKEWLHLPPSTCDAILYCSTRDGGLGITRLTGLIPSIQARRLHRIAQSSDEVTRTFAKEAGIEKDFARLWVSAGGDKDKIPSIWDPKTVSVLPEELGGEEPLSEWEVAAPRIIFPKPCNWRKQEFTHWTKLASQGRGISNFEKDTISNKWLEQHRGIPQRKFITALQLRANVFPTREFLARGREGTQIKACRHCQAESETCAHIIGYCPAIQDARIKRHNQICELLMETAKKEEWVVFQEPQLRDTSHELYKPDIFVKDKKAIVVDVTIRYESKPTSLSEAAAEKVKKYSHLKDQIQELTNATDIKIMGFLLGAREKWHKDNYELLEDLGISGSKREKLARRLLNRALFTSVDIIHMFTSKTRTVIRV

SEQ ID NO: 8624 - protein, 1204 aa, Desoria tigrina
MGHRQPTRDGSELTIFFPLPDHFDCTEEGCLKVYKTEAWTRVKQSLMRHLLKDHDLTIEKSIHICTACELDLGFRPTQHKCAVSLELPPAEASKFRHQCDECDMSFPSKKGLGNHKMAHKKKNHAASVLAVSQPAPAAPAPPPAEPPSQPSRAAILTADDSILSIESQSPAPSPLSQSTPLATSQSPPASQRRRRRRLAGIHQPSPIHNSELDDSVAREESANSGAINSIHSPPHSPSPSPIPSEEEASEAEVPNISADPFSSGHSIAIEDLSDNENDSQTEVNHNLNNSHPTHINCEGKSVIHGFSTQFREFLQGPSTPEIWDQFEKALELLTREACNELDIKPRPPEPKPPPRTVDALEARFIQKLYKRNRRRAIRLITEGDTPPCTIQKEQLHQFFSERRAEKGYDHTFFSKYTGNREPLKMDPFTKTEVVTRLEKFENSAPGDDQITYRHWLSLDPEGTILSVIMNICLKFQRIPVQWKSSRTILIYKKDDPADPANWRPISITRTLYKLYSGCLASRLTNWLVNNNVLHRSQKGFLPFDGVFEHNYVLQQRIQATRTQRRDICIAWLDFSDAFGSVPHAALISCLQHYGVSDIMGTIIKDMYSNAVTEVVSADGPTAPIQIKSGIHQGDPLSSILFNLAINPILERIDTGDDEHHALSFADDLTPMAPNPDELQEKINIVDKKAKRLSINLNPKKCATLHLSGITPVGARPTAFAVGRSRIKTLADHDSITCLGKPTGFQLFKDNAPIDRYINTATKIFSSKLAPWQRIDAMKTFFYSSLTFAMRSAQHGKTQWERVDTALRPLLKATLALPTNSANEYLYGSSTAGGCSIPIAAEDSDLLLIDNAFKLLTSPDKTIAELAMQDLLLTTSKRITTVPTRDDIAMYLSGYNKGSYKKTSNAISNAWTQARLASTRLKVSWTFSDDGPSLHRDELTLEPRHRKSVAATIRSQLRKARDARLHSLPNQGKVMQVVSQHKSSHHFIQGGEYIRFADWRFIHRARLNLVPLNGAKAWNNNNNKSCRRCGYANETLPHVLNHCMRYSQAYTNRHNAIVTRMKSALAKFNIISENQTVMPGNNARPDLVVAKDKKAFIIDVTCPFENQPEAFIEARNLKIEKYQPIREHLLATYDVVEIIPIVVGSLGSWDKNNDTFIKSICSRSYAKLMSKLCVVDCIKWSRDIYIEHLTGVPQHIAAPRFDAEK

SEQ ID NO: 8625 - protein, 1400 aa, Laodelphax striatellus
MGGDSVERRPPTAFYHLLAASKPQGSASGASSWPTRVLAGDCCHPAGIDPEASREVLGLPALSPPTAIGPNSSQRAATGNGAPGAAPSRGSDSVPNRNPQPATPTTAGSSAAAIPPPTTATPGRPFKCRICQRGFSTKSGLGVHFKRAHPEEANAEVVVPTKKVLWTEEEMYAFAAREAAIIQQIQDGVRSDCRRIMNHTLFYEPPLGTRRSQEAIKKMRQRDTYKQLLQGFLENPTSIPAAAYSDPGRGRPPPSPLVGQPRATPPPSGRRQIVPPPAPGSVRATTPARTTPDVRAGPSATFTTPSGAIPPVRPGPAAHRPRLSPAFTPTAARRPTPLAATRTAAPSRPLASTSLQGSHHQRPHLRSRPSVQPAAAASTGPSGPDIDPPPNSPTSPEERRQVLAVHLAGSRLSPSVEVLATVEDEPAADIGLTLPNSPDVIPEGSVGASILPAGLPTGLDSGVVVGENILPTTPHEIPGFDTDVALGDVLSPVAHQHTGLDLQRDDTPAVELAADDGSQLAAGIIPPLPGFDIFREPVDRNPVDPQQLPEFHLHDEDFPPLVPAEQQQGQQHHGQRRFPDLPPPLATTDDGITRYPLATTQDIGTAVLQTLRRCQPQLQELRIWGSQQLSEAIDSLFQGDPELTFGKLREWVEAITPRHLRPLRTTRKRRTRGCEHMGNQPRRSERRAAYYAAVQESWRIARSKTAKAVLTGEEALRMAVLPGSAPEPPFTVQQMFGFWEPLFTAPSCAVRPQPIIATAPRLWSLWWPITAAEVKAARVPNTSAAGPDRISPRMWAACPNVVKLALFNILLMVQAVPVSLASAYTIFIPKGDKPEDPSQYRPITVSSVILRHFHKVLAARLRRVGLIGEFQRAFEDGCLENTAALAATLHHARTRLKQLHIASLDIAKAFDTVSHEALAAVLQELGVPVPFVTYIKNVYAMSTTTLRFGRHRSPLLSVGQGVRQGDPLSSFLFCLVIDRVLKDYPPPVHYPIGAAKLRYLAYADDVLLFSSSVPGLQMALSAFSSAAEGVGLKLNSKKCFTLSIIPDGKHKKTKIATASLFQLPDGSPLKPATSTTIFKYLGVFFSPGGARGSGVDMRALLNRVTAAPLKPQQRLYILRHHLIPALYHQLVLGRITLGMLRALDVQVRGEIRRWLRLPHDTPVAFFHAACAHGGLGVPSLAAAVPPLVYFRVRKLAVSSVPVFKAIFGTQLMQRRLVWALSAARKFDPAFPEATARPQDLHFKQALHSSTDGFELREASRAPASTAWIRNASTAIPGMDYVGYVHVLINALPSRVRTTRGKPDANVRCRAGCRQAESTAHCVQVCPRTHGGRILRHDAVVNTVAAHLQQKKFRVIREGVWETSEGRRKPDIVAGTDEEHAFILDVQVVSGQRPLQTAFRR

SEQ ID NO: 8626 - protein, 1259 aa, Laodelphax striatellus
MYAFAAREAAILLEIKDGLRNDCKRIMNYTLYYEPPDGTKRTQEAIKKLRQREEYKRLLEGFSNNPSTIPPSARVPLQPGPAPSPARQRMIAAQALRANAPRPGPTPAAARRPRRPLARQPSGTPSTGRSPVPQVVVIPPADDGCAASDDPGIPGESGPIPEGTSVGPQFEDSAPNSTGKEPSGVGADSVYTGVQEAIPHMGDDLLDTIGFDLEITADVEDISPISVVPSIPGFVIAEEHFVPPPHPTDFDTNEAQSDEPELFVQVHQAVPQHLTGSDNSSPDPLDDPWVRELFPGYFNLDDRDFPPLPEVRPTGEVSQTVPVRPFPVLPEPLTAGYRRPIQFPLHSADEIGAAILQKLLSLEPELKRLEVWGSRHLLRAIANLQLGLIEFAFFDLKEWAEAIAPSVLPASAATVVHHHRRRRGHQQQAHTEHRAQHQRRKQGPSRAKRRAAYYGAVQEAWRKTRSRTAKAVLAGEASLRNAVLPGEAVKPPFSSKQMFEFWEPLFTASSCEVSAPEPKATPAALWSLWWPVTLTEVRMSKVPNTSAPGPDRIPPRMWAACPSAVKLALFNILLYLQAVPVQLLSAYTIFIPKGDNPEDPSQFRPITVSSVIIRHFHKVLATRLRRAGLVSDLQRAFEDGCLENTSALAATIHHARSRFKQLHVASLDIAKAFDSVSHQALTVALQELGAPPPFVRYLANVYALSTTTLRFGRHNSSLLSVRRGVRQGDPLSSFLFCLVIDRILHSLPSAVGFPLASVRLQHLAYADDVLLFASTVPGLQMMISAFATSAERVGLLLNPKKCLSLSLVPSGRDKKTKIITEALFKLPDGRFLQAASTTTVFKYLGVFFSPGGLRKCGVDLQLLLDRVTRAPLKPQQRLYIVRQHLIPSLFHQLILGRVTMQMLRNLDVMVRGAVRQWLHLPHDVALGFFHASCSQGGLGVPSFAAAIPPLIFHRVQKLAVSRVPIFKAVFGTALMQRRLVWALSAARSFDPLFPDNNRRPQDSYFAKRLHDSTDGFELRETPGVPASTAWLMNATSGIPGSDFVGFVHVLVNALPSRVRTTRGCPAADVRCRAGCNQAETTAHCVQHCFRSHGGRVLRHDAICKVVASHLQQRGLRVIREQIIQTSGGRRKPDIIAGKPGEYAFILDAQVVSGARPLARSYQEKRAKYNNEEVLNHIRADFNLQTRQKVPVRPLTISWRGIWERKSAGTLQDLGFSKAALTGLSTRVLLGSLLNFRRWFGRSTMRRQTGRRSIPRAGIG

SEQ ID NO: 8627 - protein, 1152 aa, Harpegnathos saltator
MCDKDEASEAGDSVCVSGGSSAACVANGQGDATGARVPGVPPYGRWDLRTPRTSRALQIVANVEAAMSCPVCLEVGVDIMFLGGKQLDAHLQKDHPTRKVEWKCELCPKIFPKLHAWRCHFAKCRGSAVSVPADFVCEHCSAGFETKSGLSQHERHTHPNVRNEKRAAEYSKPPAKSGKRLTVWTPEELDLLKKLNSEYRDERNINVKLMEFFPGKTNKQIGEARRRFKSEPYMQEVEILQTAATLEHEPPTTGACEPLVDVQLTTREPEIQAGSREDIAINWKDKLKEEMLADYDAGSLGTFVERFASIASEGLNITALDEIYDELVCMLKNPREKDADKGMQAKHVHSKRLKRSTRSRPPNRVQRKKYAYAKCQELMAKCPKKLADAVVANDLSLLQIRNAPDLADTRELYKNLWGIAGPQQEQCTGSNHIPVEDIFIPITPKEVETKISKIPNSSAAGPDGIRKADMRKKGISVVLSKLFNSLMLFCHYPSAWRENRTTLIPKPDKDISDVKNWRPITISSIVSRIFSSLMDRRLRRVISQSERQKGFTMENGCYSNVQLLNQAIARAKEVGGIFAVLDVSKAFDTIPHTAIKVSLERKGIPPLVADYIMSTYEKCTTTIKTYNGSLTIELRRGVKQGDPLSPLLFNLSIEPIIDYIQEKTLGIEVENHNLAAMAFADDLVLLARSKDQAAFQIQQVHKYLGRKGMSLSINKCSAFEYVSRNKTWFIRDPAVGIEGSTVPYSDPDTTFRYLGAKISPWRGLVDGFEVSTIKDVLARIQLLPIKPMQKIELMRTYILPRYTYGLIVRPPTRGTLKEIDTTIRDSAKKMLHLHHTTSNFFFYTPQRQGGLGLLEMEKLVLIAALRNGIKALGSTDPIIRDCLLTDKYQKKYTEYAAGLRLNWPLTLEQLDRYKVGLKRNYVQQWAKQPVQGQGVNDFMDEPIGNAWLSRNDLLKPSRIIDAIKMRTNTFPTRATLKRAHSDMDSRCRACKEDEETLGHILGKCRNTKPKRIHRHNEIVNLLRDRLAHRGSILQEPTIRVGSERYKPDLVVKLNEGRVLVLDITVRYENKDFLAAAATEKIEKYKCILPKLRTIFKTKVAKILPVVMGSRGAIPNRTALALEELKINRQDWLTMSMIVLRSSIEILNSFMDA

SEQ ID NO: 8628 - protein, 1076 aa, Aleochara bilineata
MDKNTETTPPENLQPACECGKTFATARGLKAHQTRFCARRRSASTNNHQCDICDSDFSTKEGLTQHLRLKHPAAYNERCALGSEHKHIRWSQMEVQYMALLEARWSGEMGFINKYLASKLEGRPIESLKKKRQSKEYRDMVQRLRAELEEAEGPNHENQFSIRVDPPTPPTNNQTGTAEIEEIFILSPPKSAPPTATSVFTAENEQLKDKFVDAVSSHQDRSLLEILFSSREDATKAIDLLVENILPTKQSGRTTTHFMANGPHNFPRKEARSNRAMKRASRAHEYRVAQGMYTKDRARLARSILDDTPLLHEGRPTLDSIDHTYRAIFEASDSSEPNWPSAEAETLDQGTLDNLNKPISIEETNLALNSIKSRAKGPDGITAQHFRQWDEGERHLCINLMFYWGYLPEPIQGCRTTLIPKAKTELENIHNWRPITIGSFITKVLSRILLKRLAPIVIHPSQKGFTSDDGVMFNSCLVDSIIRRRRQKFRPYTILSLDLQKAFDSVSHKAIADALKHKGISGIVARYIRASYQGVSTTITCGSVTTSKIKMLRGVKQGDPLSAILFNFVMDRFLKSIPQDCGVEMGTQRIAAMAYADDLLLLAPSKREARLLLQRADVFFKSQGMTLNPAKCHSLIVETVPGMKKLVARPEPYFTVGGQNIAPITTNYFKYLGNRCNYQGAEVPSTSLFETEIKRLKKAPLKPYQKLYIARTYLLPRVLARLQHPRVSKKILKRTDFMCRALIKQILHLPVTTSNAFVHAALKDGGLGITDFSKAIPAIVHKRLETCIISANDSISLIETFAKAQSQLLKISGGAIEPGDSARRNYAICLQNGYCGNGIAQVGNVKGASNWIAQPPSNWSAGTYVKSVLLRGNLLPTVGIPSNPLEARKCRGGCNKIESLSHVVQGCYITHAQRIRRHDHTCRTITKFGIKKGWHIISEPKIRIRNGMLYKPDLLLLKDDKVVVCDVAVHWEGQKTLEENYHNKLAKYNNEPFIHELQKRYPGSSIVVLPLIFGARGTSAKNNEELLRMIPVSPNDHLKIIHDIIIGTITCHSFFMKQVWSGNSRNRSRRSQIGNL

SEQ ID NO: 8629 - protein, 1076 aa, Aleochara bilineata
METYADNPSPQTLRPTCECGKAFATDRGLKAHQSRFCARRRSASTNSHQCDICDSDFSTKEGLTQHLRLKHPIAYNERCARGSEHKHVRWSQMEVQYMALLEARWNGEMGFINKYLATKLEGRPVESLKKKRQSTDYKELVQRLKSELEEAEGPNQTDLINISIDPPTPPATSRIENAEMEEVSLLNPPKSAPPTTTSNFPFGDEHLRNIFIDSVSSHHDRALLEILFSSRNDAIKAIDLLVEKIIPTKRSSDKPTNFTAGRPNNAQHKKVCSNRAVKRASRAHDYRLAQTMFNKDRARLARSILDETPLIHEGGPTKDCIDNTYRAIFETSVPSNSNWSSAKPETLDQDTLCNLNGPISPEETNQALDSIKSKAKGPDGITAQDIRRWDEGERHLCINLMFYWGYLPELIQRCRTTLIPKAKSGLDDINNWRPITIGSLLTKVLSRVLLKRLSPIAIHPAQKGFTNDDGVMFNSTLLDSIIRRRRQKSRPYTILSLDLKKAFDSVSHEAIADALRHKGISGIISRFIAACYKNVSTTITCGSTTTRTMKMLRGVKQGDPLSSILFNFVVDRFLKSLPRDCGVEMGPQRIAAMAYADDILLLAPSKREARLLLQRADEFFRSQGMTLNPSKCHSLIVETVPGMKKLVARPESYFTINGQSIAPTTTNYFKYLGNRYNYQGVEVPSTSLFEVEAKRLKKAPLKPYQKLYIARTYLFPRMLARLQNPRVSRKTLKRTDFLCRALIKQSLHLPITTSNAFLHAAQKDGGLGITDFSKAIPAIVHKRLQSCISSANAYDSIIDAFAKAQLQVIKTSGGAIESGDSARRSYAVSLHNGYCGNGIAQVGNVKGASNWIAYPPSNWSAATYVKSVLLRGNLLPTVGIPSNPPEAKRCRGGCSRIESLSHVLQGCYITHASRIHRHNHTCRNVAKFASKKGWHTIWEPKIRLKNGMLYKPDLILLKDTRVIVCDIAVHWEGQKNLEENYNNKLAKYNNKPFLDEMQKRYPGSNIIVLPLIFGARGTSAKHNVDLLSIIPVSNADHLKLIHDVIIGSIACHSFFMKQVWYGNSRPRGRRSQPNNL

SEQ ID NO: 8630 - protein, 1070 aa, Aleochara bilineata
MENSTEATLPENLRPACECGKTFATERGLKAHQTRFCARRRSASTNNHQCDVCDSDFSTKEGLTQHFRLKHPAAYNERCALGSEHKHIRWSQMEVQYMAHLEARWNGEMGFINKYLAAKLEGRPIESLKKKRQSKEYKELVQRLKSELEEAEGSNNTDLLTIRIDPPTPPASGQAETAEVEEVSILGPPKSAPPATENHFMFGGNRLRDQFIDAVASHQERALLEILFTSKEDAIKAINLLVENIIPTRQSGRPPTHFMASGSRNYPYLGTRSNRAIKRASRAHEYRLAQSMYNKDRARLARSILDETPLLHEGGPTLDSIENTYRAVFETSTPYNSNWSSAKPEILDNDILDTLNGPITQEEANAAIDAIKSKAKGPDGISAQHIRRWDEAERHLCINLMFYWGYLPESIQGCRTTLIPKTKSGLENINNWRPITIGSFLTKVMSRILLKRLSPIGIHPAQKGFTCDDGVMYNSCLLDNIIRRRRQKCRPYTILSLDLQKAFDTVSHGAIADALRHKGITGTIAEFINACYKNASTTITCGSVTTQRIQMLRGVRQGDPLSSVLFNFVVDRFLKDIPNNCGLEMGTQRIAAMAYADDILLLAPSKREARLLLQRADDFFRTQGMTLNPSKCHSLIVETVPGMKKLVARPEHYFTIGGQSIAPTTTDYFKYLGNRYNYQGVELPSTTLFEAEAKRLKKAALKPHQKLYIAQTYLLPRVLARLQNPRVSKKTLKRTDCLCRALIKQILHLPMTTSNAYIHAAQKDGGLGITDFSKAIPAIVHKRIENCIISANGSSIIIELFAKAQLQIIKVSGGAIESGDSARRTYAVSLQNGYCGNGIAQVGNVKDASKWITNPPSNWSAGTYVKSVLLRGNLLPTVGIPSNPPEARKCRGGCNKTESLSHVLQGCYITHAQRIRRHDHTCQNVAKFAKKQGWQTIKEPKIRLRNGTLYKPDLLLVKDTDVVVCDVAVHWEGQRTLEENFNAKLAKYNNEPFIREVQIRYPGSSITVLPLIFGARGTSAKNNNHLLSMIPVSRSDHTKILHDIIIGSIACHSFFMKQVWYGNSRTRTRR

SEQ ID NO: 8631 - protein, 1073 aa, Aleochara bilineata
MESNSHNVSPHNLQPTCECGKTFATTRGLKAHQTRFCARRRSASTNSHQCDICDSDFSTKEGLSQHLRLKHPAAYNERCARGSEHKHIRWSQMEFQYMALLEARWNGEMGYINKYLAAKLEGRPIESIKKKRQSAEYKETVQRLKTELEEAEGSNQTDLINIRIDPPTPPSTSRTDNAEIEEVSIISPPKSAPPTASGNFPFGEEHLRDLFIDTVSSHHDRALLEILFSSRSDAIKAIDLLVEKVIPTKQSENKTINFTAGRPNNTYHEQACSNRAVKRATRAHDFRLAQTMYSKDRARLARSILDDTPLLQRGGPALTTIEHTYRTIFETSIPSNSDWSSAEAEILDHDVLSKLNSPITPEEVNLALESIKSRAKGPDGITAQDIRQWDDGERHLCINLMFYWGYLPESIQRCRTTLIPKAKHGLDNINNWRPITIGSFLAKVMSRILLKRLSPIALHPAQKGFTCDDGVMFNSCLLDSIIRRRRQKNRPYTILSLDLQKAFDSVSHKAIADALKHKGVTGIVARYIDACYQGVSTTITCGSAATPNIKMLRGVKQGDPLSSVLFNFVVDRFLKSIPQNCGLEMGAQRIAAMAYADDILLLAPTKREARLLLQNADDFFRSQGMTLNPQKCHSLIVETVPGMKKLVARPDSYFTIGGHNISPTTINYFKYLGNRVNYLGVEVPSTSLFEVEARRLKKAPLKPNQKLNIVKTYLLPRILARLQHPRVSKKTLKRTDFLCRGLIKNILHLPITTPNAYIHAAQKDGGLGIPDFSRSIPTIVHKRLEHCVISANEKNDLIEAFARAQSSIIKLSGGAIESGDSVRRSYAVSLHTGYCGNGIGQVGNVRDASNWITYPPSNWTASTYIKSVQLRGNLLPTVGIPSNPAEARKCRGGCNKTESLSHVIQGCYITHAQRIQRHDHICRNVSKFAKKRGWRTIIEPKIRIQDGTLYKPDLLLIKDSEVIVCDVAVHWEGQKTLEENYNRKLRKYYNEPFLQELRKRYPGSNILVLPFILGARGTSAKNNQQLLSMIPINSKDHLKTIHDVIIGSIMCHSFFMKRVWSGNSRRRGRDPRR

SEQ ID NO: 8632 - protein, 1071 aa, Aleochara bilineata
MVNNIGNSPPQNLQPACECGKSFATARGLKAHQTRFCARRRSASTSSHQCDICDSDFSTKEGLTQHFRLKHPAAYNERCARGSEHKHIRWSQMEVQYMALLEARWNGEMGFINKYLASKLEGRPIESLKKKRQSAEYRGLVQRLKTELEESEGSSHSELINIRIDPPTPPATNQAVEDEVEEVSILDPPRSAPPTTENVFPFGEEHIKDLFIDTVASHHNRALLDILFSSRSDAIKAIDLLVEKIIPTKRSMEQATNFPAGRSQNHPHEQTCSNRAAKRASRAHEYRLAQTMYIKDRARLARSILDETPLVHEKGPTLQSIDDTYRTLFETSASPNSNWSSEKAEILDSDILGKINSPITTEEVNLALQSIKSKAKGPDGITAQHIQRWDDGERHLCINLMFYWGYLPESIQRCRTTLIPKAKCGLEDINNWRPITIGSFLSKIMSRILLKRLSRIAIHPAQKGFTNDDGVMFNANLLDSIIRRRRQKNRPYTVLSLDLRKAFDSVSHKAIADALKHKGVTGIIARYINACYRGVSTTISCGSVTTSAMKMLRGVKQGDPLSSVLFNFVVDRFLKSIPPTCGVEMGAHRLAAMAYADDILLLAPTKREARLLLQRADVFFQSQGMTLNPQKCHSLIVETVPGMKKLVARPDPYFTICGQSIAPITVNYFKYLGNRYNYQGVEIPSTSLFEVESTRLRKAPLKPFQKLFITRTYLLPRVLARLQNPRVSKKLLRRTDFLCRALVKHILHLPKTTPNAFIHAAQKDGGLGIPDFSKAIPAIVHKRLENCIISANGNDDIIETFAKAQSQMIKTSGGAIESGDLARRNYAASLQSGYCGNGIAQVGNVKGASDWIGHPPSNWTAATYIKSVLLRGNLLPTVGIPSNPIEARRCRGGCNKTESLSHVLQACYITHERRIQRHDHTCKNVRKFAIKHGWNTIVEPKIRVRDGTLYKPDLILIKDEQVVVCDVAIHWEGQKTLEQNYNNKRLKYSTEPFLYEMRKRYPGSSITVLPLIFGARGSSAKNNNQLLSMIPINNKDYLKIIHDVIIGSIACHSFFMQRVWYGNSRRRHMHS

SEQ ID NO: 8633 - protein, 1073 aa, Aleochara bilineata
MENTNNNLPSENLQPVCECGKTFATNRGLKAHQTRFCARRRSASTNSHQCDICDSDFSTKEGLTQHLRLKHPAAYNERCARGSEHKHIRWSQMEIQYMAYLEARWNGEMGFINKYLATKLEGRPIESLKKKRQNTEYRDLVQRLKAELEDAEGPQQPNPITIRVRPPTPPTNYASEVEEVSILSPLRSAPPTTSNVFCFETERLKDLFIDTVSSHHSRALLEILFSSRCDAVKAIDLLVEKIIPTKQSQEVTTNFTADRPQFNPNKQACSNRAVKRATRAHDYRLAQTMYNKDRARLARSILDETPLAHGKGPAVNVIENTYRAIYESTAPPSPDWPSAQAEILEQDTLHKLNGPISIEEVNLALDSIKSKAKGPDGISAQHIRRWDDGERHLCINLMFFWGYLPESIQRCRTTLIPKTKCGLDDINNWRPITIGSFLSKVMSRILLKRLSPIAIHPSQKGFTCDDGVMYNSSLLDAIIRRRRQKSRPYAILSLDLRKAFDSVSHEAIADALKHKGVTGIIARYIGACYRGVSTTITCGSVTTPEINMLRGVKQGDPLSSVLFNFVVDRFLKSIPQNCGVEMGTQKIAAMAYADDILLMAPTKREARLLLQKADLFFRSQGMTLNPQKCHSLIVETVPGMKKLVARPDAYFTIGGQSIVPTTLDYFKYLGNRYNCKGAEVPTTSLFEVEARRLKKAPLKPHQKFYIARTYLLPRILARLQNSRVSKKTLKRTDYLCKALIKQILHLPVTTPNAFIHAAQKDGGLGIPDFSKTIPAIVHRRLENCIISAKNNDGIIETFVKAQSLMIRLSGGTLESGDSVRRSYAVSLQTGYCGNGIGQVGNVKDASNWITHPPSNWTAATYVKSVLLRGNLLPTIGIPSNPVEARRCRGGCNKIESLSHVLQGCYISHAQRIRRHDHACKNVVKFATKKGWRTIIEPKIRLQNGTLYKPDLLLIKNNEVVVCDVAVHWEGQKTLEENYNNKLMKYNNEPFLEELQKRYPGSSIVVLPFILGARGTSANSNNNLLKMIPITHKDHLKIIHDVIIGSIACHSFFMKQVWYGNSKRRGVRFDQRPL

SEQ ID NO: 8634 - protein, 1049 aa, Aleochara bilineata
MSNNTTNSFPAIMQPACECGKSFATSRGLKAHQTRFCARRRSATTNSHQCDICDSDFTTKEGLTQHLRLKHPAAYNERCAVESEHKHIRWSQMEVHYMALLEARWNGEMGFINKYLATKLEGRPIESLKKKRQSKEYRELVQRLKSEIEEAEGPNQGDLINIRVDPPTPPPAASRAEHSEIETVSLLNLPKSAPPATNDNFLFGEEELKSLYIDALANHHDRALLDVLFTSREDALKAIDLLVEKVLPTKRSGEPTTHFIARGPQITSNKQACSNRAMKRLSRAHEYRLAQSMYTKDRAKLARSVLDDTPLTHKEEPTLDSIDRTYRAIFESSASCDSSWTSDKAETLDKDTLYSLNKPISPEETNLALNSIKSKAKGPDGITAQHFRRWDEGERHLCINLIFYWGYLPESIQRCRTTLIPKSKSELQNINNWRPITIGSFLTKVLSRVLLKRLTPVAIHPAQKGFTSDDGVMFNSNLLDSIIRRRRQKNRPYTILSLDLQKAFDSVSHKAIANALKQKGVTGIIARYINASYRGVSTAISCGSATTKTINMLRGVKQGDPLSSVLFNFVIDRFLKSLPQNCGVEMGTQRIAAMAYADDILLLAPSKREARLLLQRADVFFKSQGMALNPGKCHSLIVETVPGMKKLVARLEPYFTIGGQSIAPTTTNSFKYLGNRVNYQGVEIPSTSLFEEEAKRLKKAPLKPHQKLFIARTYLLPRVLARMQHSRVSKKTLKRTDFLCRSLVKQILHLPITTSNAYIHAAQKDGGLGITDFSRAIPAIVHKRLESCIISANNDSTIIELFARAQSQMTKISGGAIESGDSVRRKYAISLQNGYCGNGIAQVGNVKNASGWIAQPPSNWTASTYIKSVLLRGNLLPTAGIPSNPPEARKCRGGCHRTESLSHVLQGCYITHAQRINRHDHTCKNIIKFAAKKGWQAVIEPKIRIKDGTLYKPDFLLIRESKVVVCDVAVHWEGQKTLEENFNNKLAKYNNTYLIRELQKRYPGSSIEVLPFILGARGTSANNNNRLLTTIPISHQDHLKLIHDVMVGS

SEQ ID NO: 8635 - protein, 1074 aa, Aleochara bilineata
MNVINEDSPPANLRPACECGRTFATDRGLKAHQNRFCARRRSASTNSHQCDICDSDFSTKEGLTQHLRLKHPVAYNERCAAGSEHKHIRWSQMEVQYMALLEARWNGEMGFINKFLNAKLEGRPIESIKKKRQSKEYRETVQRLKSELEEAEGPNIPNSITIRVNPPTPPPASRAEEAEIETVSIVNSPTPPPSENTFPSEEDDLRSMYIDAVSSHHDRALLEILFTSREDAVKAIDLLVEKLIPTKRSRENTTHFTAREPHNTTNKQACSNRAVKRLSRAHDYRLAQSMYNKDRAKLARSILDDTPLTHKEEPTLESIDQTYRTIFESSASFDSTWSSAKAENLDKDMLISLNKPISSEETNAALNSIKSKARGPDGITAQHFRQWDEAERHLCINLIFYWGYLPESIQRCRTTLIPKSKSGLEHINNWRPITIGSFLTKVLSKILLKRLSPIAIHPAQKGFTSDDGVMYNSTLLDSIIRRRRQKNRPYTILSLDLQKAFDSVSHEAIAHALMHKGVTGKIARYINASYRSVSTTISCGSVTSQSMNMLRGVKQGDPLSSVLFNFVVDRFLKSIPQNCGVEMGTQRIAAMAYADDILLLAPSKREARLLLQSADVFFKSQGMALNPAKCHSLIVETVPGMKKLVARPESYFTIGGQSITPTTTNFFKYLGNRYNYQGVEAPSTSLFEVEAKRLRKAPLKPHQKLHITRTYLLPRVLARLQNSRVSKKTLKRTDFLCRSLIKQILHLPVTTSNAYIHAAQKDGGLGITDFCKAIPAIVHRRLESCTISANNDSNIIELFAKAQSQMTKISGGAIESSDSARRSYAISLQNGYCGNGIAQVGNVKNASSWIAQPPSNWSASTYIKSVLLRGNLLPTIGIPSNPPEARKCRGGCSKIESLSHVLQGCYITHAQRIKRHDHTCKNIVKFAVKKGWQTVIEPKIRLKDGTLYKPDLLLIKDSKVVVCDVAVHWEGQKTLEENYYNKLAKYDNAHFKQELQKRYPGSSVEVLPFILGARGTSANNNNRLLSMIPINPRDHLKLIHDVIIGSIACHSFFMKQVWYGNSRNRGIRSQRRDL

SEQ ID NO: 8636 - protein, 1145 aa, Formica exsecta
MDNLIKEKASEANDPVIASGGASAACVAKRRGSASGSRIPGEPSDGQWDPTPIRVTQPFNIQGSIDAVIDCPKCSEDNRNRCCIGAKQLNEHILKEHPAVQVNWVCDRCEKVFPKLHSWRCHYPKCKGKPVVNTLATLKCECCEMCFESKIGLSQHERHAHPRTRNAKRAAEAEQLAEVGGRKLTVWTVEELEQLSQLSAVHCHEKNVNVRLMEFFPGKTNKQISDARRRLKPTLALNSQPDTDPVQPMPVEVSTINAEPLEQEPAPRVEHMECEDWKDILKTEIKVKYDIPSRWRDLAASMVEMTDLGTTTCAIDSVCKALSEELTKEERPTKNGVRRSSKCRSRKSYKTLPPNRVDKRRYAFAKCQELMNNCPKKLADAVAANDLSLLQLRPLPDTARTRELYSNLWGTIGPQQQEVTSRTAVDVPTSEIFLPITPKEVECRIKRIAGSSAAGIDGIKKGSLKGKGTSIILARLFNLLLLKEVYPSAWKQNRTTLIPKAGKDPSDVKNWRPITISSMVGRIFSSLLDRRIRDVIQQTQRQKGFTKENGCFANTRLLSAAIGEAKASGGVFTVLDISKAFDTIPHQAISLALKQKGISATVAKYIINMYSDCRTAIKTRDGELPIELKRGVKQGDPLSPLLFNLVIEPIIDMVQNNSSGIKVEENNLAAMAFADDMILLAQDRHTAIDQINSVYTELRKRGMALSIEKCFAFQYIPRPKTWYIKDPELVVNGIPISYGEPHKAFRYLGASATPWKGLIAGIELDTIQEIMDRVKALPIKPMQKLTLLRTYLLPRYTYGLVMSPPPKETLKSIDTIVRSSVKKIMHLHETVNSAFLYTPRKQGGLGLIEIHPMVCLAALRNAAKAAQSDDVIVRNTISNEKSHKLYGSYAAALRLPWPATSEQIDERKKQIKQGYKREWSQLIAQGQGIDDFAQEPLSNAWLTRSDLLRSSRLIDAIKLRTNTYPTRMTMKRAHDDIDPVCRACGEADETLGHILGQCIMTKAKRIKRHNEIVDLLKDRLAIANRVMVEPSIECNSERLKPDLVILNEERVIVLDVTVRYENKSFLAEAAKEKVNKYTCIAAKLKKDFKVCDAKVVPIVVGSRGALPAATITELKQLKIKKSDWLTISMMALRSSIEIANAFMDG

SEQ ID NO: 8637 - protein, 1050 aa, Nylanderia fulva
MDSEIEKASEADDPENASGGADAAYVAKRRGSASGARVPGAPSDGRWDPIPIRVTQPLTIQGSTDAVMDCPKCLENSRSISCIGAKQLNAHFLEQHPDVHVNWECEKCREVFPKIHSWRCHYPKCRGKKVNPAAEYKCENCKLSFESRIGLSQHERFAHPKIRNTKRAAEAEKPAEKSGRKLTVWTADEMERLEQLNLRFQDKRNINIRLMEFFPGKTNKQISDARRRLKPAVVPAPQPDVAPRQPELAAVVEVPRTQNESPARSAAPEQLSFEGEDWRESVLAEIEAESELKGVWATMVARLVSLASKRTTSEDIDLLCDEITECLNKNKGVHKDSRKRRNRKTKSRPPNRMEKRRFAFAKCQELMNNCPRKLADAVAANDLSLIQLRQSPEMAKIKELYTNLWGSPGPQQEPIGVADAEVPLRDIFLPIKPKEVQDKIRRIANSSAVGLDKIEKADLKGKGISIVLAKFFNLLLLKEAYPIAWKQNRTTLIPKASKDLSDVKNWRPITISSMLSRIFSSLLDRRIREVIQQTLRQKGFTKENGCFTNTRLLSAAISEAKASGGVFTVLDISKAFDTIPHKAIYWALIRKGIPAKVANYIVNMYSGCKTTIKARSDGVPIELKRGVKQGDPLSPTLFNLVIEPIIEMVQENTVGVKVEERNLAAMAFADDMVLLAQDRQTSIGQINSVYTELRKRGMALSIEKCFAFEYVPRPKTWYIRDPEMVVRGTPIPYGEPDKAFRYLGATATPWRGLIEGSELHTIQGVIERVKALPIKPMQKILLLRTYLLPRFTYGLVMRPPSKETLKNIDIAIRSGVKQILHLHETTNSAFLYTPMKEGGLGLLETLPMVYLAALRNAAKAAASDDILVRKVICNEASQKVHKSYAAALRLSWPASIKQIEERKRQIKNNYRQEWAQLIAQGQGVQDFGQEPLSNAWLSRSNLLRSSRLIDAIKMRTNTYPTRMTMRRAHDNVDTVCRACGEADETLGHILGQCSATKTKRIKRHNEIDDHVITLLFRTRLHIHFLYLFNHALFNIFRTHARIAHSASAVG

SEQ ID NO: 8638 - protein, 833 aa, Nylanderia fulva
MVARLVSLASKRTTSEDIDLLCDEITECLNKNKGVHKDSRKRRNRKTKSRPPNRMEKRRFAFAKCQELMNNCPRKLADAVAANDLSLIQLRQSPEMAKIKELYTNLWGSPGPQQEPIGVADAEVPLRDIFLPIKPKEVQDKIRRIANSSAVGLDKIEKADLKGKGISIVLAKFFNLLLLKEAYPIAWKQNRTTLIPKASKDLSDVKNWRPITISSMLSRIFSSLLDRRIREVIQQTLRQKGFTKENGCFTNTRLLSAAISEAKASGGVFTVLDISKAFDTIPHKAIYWALIRKGIPAKVANYIVNMYSGCKTTIKARSDGVPIELKRGVKQGDPLSPTLFNLVIEPIIEMVQENTVGVKVEERNLAAMAFADDMVLLAQDRQTSIGQINSVYTELRKRGMALSIEKCFAFEYVPRPKTWYIRDPEMVVRGTPIPYGEPDKAFRYLGATATPWRGLIEGSELHTIQGVIERVKALPIKPMQKILLLRTYLLPRFTYGLVMRPPSKETLKNIDIAIRSGVKQILHLHETTNSAFLYTPMKEGGLGLLETLPMVYLAALRNAAKAAASDDILVRKVICNEASQKVHKSYAAALRLSWPASIKQIEERKRQIKNNYRQEWAQLIAQGQGVQDFGQEPLSNAWLSRSNLLRSSRLIDAIKMRTNTYPTRMTMRRAHDNVDTVCRACGEADETLGHILGQCSATKTKRIKRHNEIVNLLKDRLSVNNRVIVEPTIELHGERFKPDLVILNEERALVLDVTVRYENRNFLAEAAREKVDNVTSRSQSRRVIRECMIRVARTRTIARDNVVLRKFFRGYPRRRVFRQRLHDAEERERMCYP

SEQ ID NO: 8639 - protein, 1149 aa, Lasius niger
MDCDDDEGASEANVLVNASGGASAACVANRRGSASCARVPGAPSDGRWDPIPIRVIQPLYIQGSIDAVVDCPKCSEKNLIISCIGAKQLNEHVLKEHPAVQINWICDRCQRVFPKIHSWRCHYPKCKGKIVNPLATYKCENCPMSFESKIGLSQHERHAHPRARNAKRAAEAEQPAEKSGRKLTVWSVEELVRLDQLNTEYSGEKNINIKLMEFFPGKTNKQISDARRRLKPQATPASQDEEDPTHAQVHNTETNNSAAEPPAQEAILEQASSSESENWRDVLVSEIEIAYDVSNKWRALAAKMVELAGRETTLNEINSLCDELAKELTKGDKPSQNGVSRSSKSHKTQENRRNKAKPPNRVQRRRFAFAKCQELMNNCPKKLADAVAANDLSILQMRLQPETAKTRELYIGLWGTPGPQQEPVCHTTTEIPAEKILLPITPREVENKIGRIANSSAAGIDGIKKANLKGKDTSTVLAKLFNLLLLKGIYPVAWKQNRTTLIPKGGKDPAEVKNWRPITISSMIGRVFSSLLDRRIRGVIQQTQRQKGFTSENGCFANTRLLSAAVNEAKASGGVFTILDISKAFDTVSHQAINLGLKRKGIPPIVANYITNMYDGCKTIIKTKDGEVPVELKRGVKQGDPLSPLLFNLVIEPIIQMVQDASLGIEVEGSNLAAMAFADDMILLAKDRETAIGQIRMVYTELRKRGMALSIEKCSAFQYVPRPKTWYVKDPEMVVGGIPISYGQPDEAFKYLGASATPWRGLIEGVKLNTIQDLIDRVKTLPIKPMQKLTLLRTYLLPRFTYGLVTCPPPKETLRNIDSTIRSGVKRILHLHESTNSAFMYTPRKQGGLGLLETYPMVYLAALRNATKAANSDDIIVRSTILNERSSKTYGTYAAALRLPWPATSEQIEERKRQIKQGYKREWSQLIAQGQGVEDFAQEPLCNAWLSRSDLLRSSRLIDAIKLRTNTYPTRTIMRRAHDEVSPICRACGSADETLGHVLGQCVTTKAKRIKRHNEIVDLLKDRLAATNRVLVEPTVEYNGERLKPDLVITNEERVIVLDVTVRYENKSFLIEAAKEKVDKYSDIANKLKRSFNASQARVVPIVVGSRGALPAATVAELKQLNINKADWLTISLIALRSSIEIANAFMDS

SEQ ID NO: 8640 - protein, 1140 aa, Nylanderia fulva
MDSEIEKASEADDPENASGGADAAYVAKRRGSASGARVPGAPSDGRWDPIPIRVTQPLTIQGSTDAVMDCPKCLENSRSISCIGAKQLNAHFLEQHPDVHVNWECEKCREVFPKIHSWRCHYPKCRGKKVNPAAEYKCENCKLSFESRIGLSQHERFAHPKIRNTKRAAEAEKPAEKSGRKLTVWTADEMERLEQLNLRFQDERNINIRLMEFFPGKTNKQISDARRRLKPAVVPAPQPDVAPRQPELAAVVEVPRTQNESPARSAAPEQLSFEGEDWRESVLAEIEAESELKGVWATMVARLVSLASKRTTSEDIDLLCDEITECLNKNKGVHKDSRKRRNRKTKSRPPNRMEKRRFAFAKCQELMNNCPRKLADAVAANDLSLIQLRQSPEMAKIKELYTNLWGSPGPQQEPIGVADAEVPLRDIFLPIKPKEVQDKIRRIANSSAVGLDKIEKADLKGKGISIVLAKFFNLLLLKEAYPIAWKQNRTTLIPKASKDLSDVKNWRPITISSMLSRIFSSLLDRRIREVIQQTLRQKGFTKENGCFTNTRLLSAAISEAKASGGVFTVLDISKAFDTIPHKAIYWALIRKGIPAKVANYIVNMYSGCKTTIKARSDGVPIELKRGVKQGDPLSPTLFNLVIEPIIEMVQENTVGVKVEERNLAAMAFADDMVLLAQDRQTSIGQINSVYTELRKRGMALSIEKCFAFEYVPRPKTWYIRDPEMVVRGTPIPYGEPDKAFRYLGATATPWRGLIEGSELHTIQGVIERVKALPIKPMQKILLLRTYLLPRFTYGLVMRPPSKETLKNIDIAIRSGVKQILHLHETTNSAFLYTPMKEGGLGLLETLPMVYLAALRNAAKAAASDDILVRKVICNEASQKVHKSYAAALRLSWPASIKQIEERKRQIKNNYRQEWAQLIAQGQGVQDFGQEPLSNAWLSRSNLLRSSRLIDAIKMRTNTYPTRMTMRRAHDNVDTVCRACGEADETLGHILGQCSATKTKRIKRHNEIVNLLKDRLSVNNRVIVEPTIELHGERFKPDLVILNEERALVLDVTVRYENRNFLAEAAREKVDKYKDISNKLKDNFNVPTSRVVPIVVGSRGALPTETVLELKQLKIKKEDWLTMSLIALRSSIEIANAFMDK

SEQ ID NO: 8641 - protein, 1050 aa, Nylanderia fulva
MDSEIEKASEADDPENASGGADAAYVAKRRGSASGARVPGAPSDGRWDPIPIRVTQPLTIQGSTDAVMDCPKCLENSRSISCIGAKQLNAHFLEQHPDVHVNWECEKCREVFPKIHSWRCHYPKCRGKKVNPAAEYKCENCKLSFESRIGLSQHERFAHPKIRNTKRAAEAKKPAEKSGRKLTVWTADEMERLEQLNLRFQDKRNINIRLMEFFPGKTNKQISDARRRLKPAVVPAPQPDVAPRQPELAAVVEVPRTQNESPARSAAPEQLSFEGEDWRESVLAEIEAESELKGVWATMVARLVSLASKRTTSEDIDLLCDEITECLNKNKGVHKDSRKRRNRKTKSRPPNRMEKRRFAFAKCQELMNNCPRKLADAVAVNDLSLIQLRQSPEMAKIKELYTNLWGSPGPQQEPIGVADAEVPLRDIFLPIKPKEVQDKIRRIANSSAVGLDKIEKADLKGKGISIVLAKFFNLLLLKEAYPIAWKQNRTTLIPKASKDFSDVKNWRPITISSMLSRIFSSLLDRRIREVIQQTLRQKGFTKENGCFTNTRLLSAAISEAKASGGVFTVLDISKAFDTIPHKAIYWALIRKGIPAKVANYIVNMYSGCKTTIKARSDGVPIELKRSVKQGDPLSPTLFNLVIEPIIEMVQENTVGVKVEERNLAAMAFADDMVLLVQDRQTSIGQINSVYTKLRKRGMALSIEKCFAFEYVPRPKTWYIRDPEMVVRGTPIPYGEPDKAFRYLGATATPWRGLIEGSELHTIQGVIERVKALPIKPMQKILLLRTYLLPRFTYGLVMRPPSKETLKNIDIAIRSGVKQILHLHETTNSAFLYTPMKEGGLGLLETLPMVYLAALRNAAKAAASDDILVRKVICNEASQKVHKSYAAALRLSWPASIKQIEERKRQIKNNYRQEWAQLIAQGQGVQDFGQEPLSNAWLSRSNLLRSSRLIDAIKMRTNTYPTRMTMRRAHDNVDTVCRACGEADETLGHILGQCSATKTKRIKRHNEIDDHVITLLFRTRLHIYFLYLFNHALFNIFRTHARIAHSASAVG

SEQ ID NO: 8642 - protein, 1131 aa, Nylanderia fulva
MDSEIEKASEADDPENASGGADAAYVAKRRGSASGARVPGAPSDGRWDPIPIRVTQPLTIQGSTDAVMDCPKCLENSRSISCIGAKQLNAHFLEQHPDVHVNWECEKCREVFPKIHSWRCHYPKCRGKKVNPAAEYKCENCKLSFESRIGLSQHERFAHPKIRNTKRAAEAEKPAEKSGRKLTVWTADEMERLEQLNLRFQDKRNINIRLMEFFPGKTNKQISDARRRLKPAVVPAPQPDVAPRQPELAAVVEVPRTQNESPARSAAPEQLSFEGEDWRESVLAEIEAESELKGVWATMVARLVSLASKRTTSEDIDLLCDEITECLNKNKGVHKDSRKRRNRKTKSRPPNRMEKRRFAFAKCQELMNNCPRKLADAVAANDLSLIQLRQSPEMAKIKELYTNLWGSPGPQQEPIGVADAEVPLRDIFLPIKPKEVQDKIRRIANSSAVGLDKIEKADLKGKGISIVLAKFFNLLLLKEAYPIAWKQNRTTLIPKASKDLSDVKNWRPITISSMLSRIFSSLLDRRIREVIQQTLRQKGFTKENGCFTNTRLLSAAISEAKASGGVFTVLDISKAFDTIPHKAIYWALIRKGIPAKVANYIVNMYSGCKTTIKARSDGVPIELKRGVKQGDPLSPTLFNLVIEPIIEMVQENTVGVKVEERNLAAMAFADDMVLLAQDRQTSIGQINSVYTELRKRGMALSIEKCFAFEYVPRPKTWYIRDPEMVVRGTPIPYGEPDKAFRYLGATATPWRGLIEGSELHTIQGVIERVKALPIKPMQKILLLRTYLLPRFTYGLVMRPPSKETLKNIDIAIRSGVKQILHLHETTNSAFLYTPMKEGGLGLLETLPMVYLAALRNAAKAAASDDILVRKVICNEASQKVHKSYAAALRLSWPASIKQIEERKRQIKNNYRQEWAQLIAQGQGVQDFGQEPLSNAWLSRSNLLRSSRLIDAIKMRTNTYPTRMTMRRAHDNVDTVCRACGEADETLGHILGQCSATKTKRIKRHNEIVNLLKDRLSVNNRVIVEPTIELHGERFKPDLVILNEERALVLDVTVRYENRNFLAEAAREKVDNVTSRSQSRRVIRECMIRVARTRTIARDNVVLRKFFRGYPRRRVFRQRLHDAEERERMCYP

SEQ ID NO: 8643 - protein, 1046 aa, Nylanderia fulva
MFCNLSVRMGENASGGADAAYVAKRRGSASGARVPGAPSDGRWDPIPIRVTQPLTIQGSTDAVMDCPKCLENSRSISCIGAKQLNAHFLEQHPDVHVNWECEKCREVFPKIHSWRCHYPKCRGKKVNPAAEYKCENCKLSFESRIGLSQHERFAHPKIRNTKRAAEAEKPAEKSGRKLTVWTADEMERLEQLNLRFQDKRNINIRLMEFFPGKTNKQISDARRRLKPAVVPAPQPDVAPRQPELAAVVEVPRTQNESPARSAAPEQLSFEGEDWRESVLAEIEAESELKGVWATMVARLVSLASKRTTSEDIDLLCDEITECLNKNKGVHKDSRKRRNRKTKSRPPNRMEKRRFAFAKCQELMNNCPRKLADAVAANDLSLIQLRQSPEMAKIKELYTNLWGSPGPQQEPIGVADAEVPLRDIFLPIKPKEVQDKIRRIANSSAVGLDKIEKADLKGKGISIVLAKFFNLLLLKEAYPIAWKQNRTTLIPKASKDLSDVKNWRPITISSMLSRIFSSLLDRRIREVIQQTLRQKGFTKENGCFTNTRLLSAAISEAKASGGVFTVLDISKAFDTIPHKAIYWALIRKGIPAKVANYIVNMYSGCKTTIKARSDGVPIELKRGVKQGDPLSPTLFNLVIEPIIEMVQENTVGVKVEERNLAAMAFADDMVLLAQDRQTSIGQINSVYTELRKRGMALSIEKCFAFEYVPRPKTWYIRDPEMVVRGTPIPYGEPDKAFRYLGATATPWRGLIEGSELHTIQGVIERVKALPIKPMQKILLLRTYLLPRFTYGLVMRPPSKETLKNIDIAIRSGVKQILHLHETTNSAFLYTPMKEGGLGLLETLPMVYLAALRNAAKAAASDDILVRKVICNEASQKVHKSYAAALRLSWPASIKQIEERKRQIKNNYRQEWAQLIAQGQGVQDFGQEPLSNAWLSRSNLLRSSRLIDAIKMRTNTYPTRMTMRRAHDNVDTVCRACGEADETLGHILGQCSATKTKRIKRHNEIDDHVITLLFRTRLHIHFLYLFNHALFNIFRTHARIAHSASAVG

SEQ ID NO: 8644 - protein, 514 aa, Craspedacusta sowerbii
MTRGVKQGDPLSPLLFNLVLDELLTSLPSDIGFQLGPHLINGLGFVDDVILVSASKPGMDKLLQHASDFFKSRSLALNSKKSFALRLIPSTKNRIVVPDRKASFLLSNEPLRLIDQHSTFTYLGINFDPSGKLSLNLQLLSDLLLKLRKAPLKPQQKLSLLKSNILPRFAYRLTLGRLTIGLLERFDTLVLQFVKDLLRLGHDTPYSGIHASVKDGGLGVPSMTLLVPSSLVRRLSKLDRSSDPIVSSLMSLGFLPKLLEKCQSILTRFGPLDSTASYSHSWGKLWHTTTDGRPTSDFSTHSFGQSWLLAPAPYLTGREFCELTKLRLGRLETRVTSSRGRPTVKSCRFCNALSESINHISQSCYPTHGLRIRRHNKLLSKLTSILKPCRDLQLFVEPRIITPQTLFKPDLIIVSSDSILVVDMIVTGDGPGALKRAADAKILKYDTSEFNTHLRSLHGAKKVTHMPFVMSCRGCYWTPNDRILDLAKAKSRRSEFVHASMSWTIKIWKFFCML

SEQ ID NO: 8645 - protein, 1138 aa, Morbakka virulenta
MRAYYQALEQPSNENSTTHTYQIWRRMNFDNRTNIDANKLANVRRDIVKNKRLTETELERIKTDIRGNQQKTDTAENEINRSTNNIAREDDKITHNNKGNVTHLTHSEQNEEVRKTLDMKQQILDKWEEIKFVEKRNRVMLPNITKDRKAKELIKVSNNALLIIKKQRHEPLDVTEINELMYATATVITENKGVRFKKQRKLKRKKPAWKERIEKEITRMRGDLSILTELTKDNGISERKRRKIMRRYTIKKEEDIAAEKEKLKQKIQAKAQRIRRFEKRNKQYRQNRMFKSNPKVFYRELGKKQMKVDEPPTLNEIETFWKTILEDDKHHNEVAEWIRTQEEMHKNSPEQQWKEITRDEVTAALRKSSNWKSPGEDKIANFWLKNCESLHEDLTRCYNEIVREPEKSPTWLTQGITYLLPKTQETKNPKNYRPITCLPTTYKILTSIIGERTYNHLEENNLLPVEQKGCRRGSYGCKDQLLINRMILEDCKTKRKNLSTAWIDYRKAFDSVPHSWIIKVMQIYKVSPDLIKYMKHSMNTWQTTMILNFSSGCITTNPIKIKNGIFQGDSLSPLLFCLSLAPLSNLLNHTEFGYENNKRRLNHLFYMDDLKLYSKNENQLEGLLNIVKIFSDDIKMQFGLEKCAKASFKRGILTNTSSVKLDDTTIIQELDQEGTYKYLGIEEGNGIKHATMKEKVRKEYYRRIKMILKSELNSSNKITAINTLAIPVATYSFNVINWQMKDIRKMDAKTRKIMTVHRMNHPKADVERIYLPRKEGGRGLIQLECAYKTSTVGLEMYLKETKDKLLKQVYKHESDKKLYSIQKEANKFEKEIGLQMESTENEKAMPITKKVKFLKETVKKKIMINMKERWKEKPLHGQYPERIDRADVDKELTFKWLQSSGLKAETEGLVIAAQDQSLATRYYQHKIIKNGADPKCRLCHEFDESVEHIISGCPVLAKKEYLERHDKALAYIHWKICKNYQIEVSNKWYEHKPTKVAEGNDVTVLWDVPINIDKEIKANRPDIVIRDKSKSFCTLIDMAVPSERNVATKEIEKIAKYKDLEIEINKMWNTKTTVIPVVIGALGCIRKGINRCIDQIPGNIRIEELQKTVLLGTAYLLRRTLSITWPQDHRLIPAYSKD

SEQ ID NO: 8646 - protein, 958 aa, Morbakka virulenta
MLPNITKDRKAKELIEVSNNALLIIKKQRHEPLDVTEINELMYATATVITEKKGVRFKKQRKLKRKKPAWKERIEKEITRMRGDLSILRELTKDNEISEKKRRKIMRRYTIKKEEDIAAEKEKLKQKIQAKAQRIRRFEKRNKQYRQNRMFKSNPKVFYRELGKKQMKVDKPPTLNEIETFWKTILEDDKHHNEVAEWIRTQEEMHKNSPEQQWKEITRDEVTAALRKSSNWKSPGEDKIANFWLKNCESLHEDLTRCYNEIVREPEKSPTWLTQGITYLLPKTQETKNPKNYRPITCLPTTYKILTSIIGERTYNHLEENNLLPVEQKGCRRGSYGCKDQLLINRMILEDCKTKRKNLSTAWIDYRKAFDSVPHSWIIKVMQIYKVSPDLIKYMKHSMNTWQTTMILNFSSGCITTNPIKIKNGIFQGDSLSPLLFCLSLAPLSNLLNHTEFGYENNKRRLNHLFYMDDLKLYSKNENQLEGLLNIVKIFSDDIKMQFGLEKCAKASFKRGILTNTSSVKLDDTTIIQELDQEGTYKYLGIEEGNGIKHATMKEKVRKEYYRRIKMILKSELNSSNKITAINTLAIPVATYSFNVINWQMKDIRKMDAKTRKIMTVHRMNHPKADVERIYLPRKEGGRGLIQLECAYKTSTVGLEMYLKETKDKLLKQVYKHESDKKLYSIQKEANKFEKEIGLQMESTENEKAMPITKKVKFLKETVKKKIMINMKERWKEKPLHGQYPERIDRADVDKELTFKWLQSSGLKAETEGLVIAAQDQSLATRYYQHKIIKNGADPKCRLCHEFDESVEHIISGCPVLAKKEYLERHDKALAYIHWKICKYYQIEVSNKWYEHKPTKVAEGNDVTVLWDMPINTDKEIKANRPDIVIRNKSKSFCTLIDMAVPSERNVATKEIEKIVKYKDLEIEINKMWNTKTSVIPVVMEALGEIRKGINRYIDQIP

SEQ ID NO: 8647 - protein, 880 aa, Morbakka virulenta
MRRYTIKKEEDIAAEKEKLKQKIQAKAQRIRRFEKRNKQYRQNRMFKSNPKVFYRELGKKQMKVDEPPTLNEIETFWKTILEDDKHHNEVAEWIRTQEEMHKNSPEQQWKEITRDEVTAALRKSSNWKSPGEDKIANFWLKNCESLHEDLARCYNEIVREPEKSPTWLTQGITYLLPKTQETKNPKNYRPITCLPTTYKILTSIIGERTYNHLEENNLLPVEQKGCRRGSYGCKDQLLINRMILEDCKTKRKNLSTAWIDYRKAFDSVPHSWIIKVMQIYKVSPDLIKYMKHSMNTWQTTMILNFSSGCITTNPIKIKNGIFQGDSLSPLLFCLSLAPLSNLLNHTEFGYENNKRRLNHLFYMDDLKLYSKNENQLEGLLNIVKIFSDDIKMQFGLEKCAKASFKRGILTNTSSVKLDDTTIIQELDQEGTYKYLGIEEGNGIKHATMKEKVRKEYYRRIKMILKSELNSSNKITAINTLAIPVATYSFNVINWQMKDIRKMDAKTRKIMTVHRMNHPKADVERIYLPRKEGGRGLIQLECAYKTSTVGLEMYLKETKDKLLKQVYKHESDKKLYSIQKEANKFEKEIGLQMESTENEKAMPITKKVKFLKETVKKKIMINMKERWKEKPLHGQYPERIDRADVDKELTFKWLQSSGLKAETEGLVIAAQDQSLATRYYQHKIIKNGADPKCRLCHEFDESVEHIISGCPVLAKKEYLERHDKALAYIHWKICKYYQIEVSNKWYEHKPTKVVEGNDVTVLWDMPINTDKEIKANRPDIVIRDKSKSFCTLIDMAVPAERNVATKEIEKIAKYKDLEIEINKMWNTKTTVIPVVIGALGLIRKGINRYIDQIPGNIRIEELQKTVLLGTAHLLRRTLSIT

SEQ ID NO: 8648 - protein, 1209 aa, Morbakka virulenta
MFMENNQRKSSRIARRAVKQGARSSVMDQAGVEKCTTGTNSSNPQTLEAFRNENSSQIGPLDYKVMSQITQKKRQKWTREEYKQVMIAYYQALEQPSNENSTTHTYQIWRRMNFDNRTNIDANKLANVRRDIVKNKRLTETELERIKTDIRGNQQKTDTAENEINRSTNNIAREDDKITHNNKGNVTHLTHSEQNEEVRKTLDMKQQILDKWEEIKFVEKRNRVMLPNITKDRKAKELIKVSNNALLIIKKQRHEPLDVTEINELMYATATVITENKGVRFKKQRKLKRKKPAWKERIEKEITRMRGDLSILTELTKDNGISERKRRKIMRRYTIKKEEDIAAEKEKLKQKIQAKAQRIRRFEKRNKQYRQNRMFKSNPKVFYRELGKKQMKVDEPPTLNEIETFWKTILEDDKHHNEVAEWIRTQEEMHKNSPEQQWKEITRDEVTAALRKSSNWKSPGEDKIANFWLKNCESLHEDLTRCYNEIVREPEKSPTWLTQGITYLLPKTQETKNPKNYRPITCLPTTYKILTSIIGERTYNHLEENNLLPVEQKGCRRGSYGCKDQLLINRMILEDCKTKRKNLSTAWIDYRKAFDSVPHSWIIKVMQIYKVSPDLIKYMKHSMNTWQTTMILNFSSGCITTNPIKIKNGIFQGDSLSPLLFCLSLAPLSNLLNHTEFGYENNKRRLNHLFYMDDLKLYSKNENQLEGLLNIVKIFSDDIKMQFGLEKCAKASFKRGILTNTSSVKLDDTTIIQELDQEGTYKYLGIEEGNGIKHATMKEKVRKEYYRRIKMILKSELNSSNKITAINTLAIPVATYSFNVINWQMKDIRKMDAKTRKIMTVHRMNHPKADVERIYLPRKEGGRGLIQLECAYKTSTVGLEMYLKETKDKLLKQVYKHESDKKLYSIQKEANKFEKEIGLQMESTENEKAMPITKKVKFLKETVKKKIMINMKERWKEKPLHGQYPERIDRADVDKELTFKWLQSSGLKAETEGLVIAAQDQSLATRYYQHKIIKNGADPKCRLCHEFDESVEHIISGCPVLAKKEYLERHDKALAYIHWKICKYYQIEVSNKWYEHKPTKVVEGNDVTVLWDMPINTDKEIKANRPDIVIRDKSKSFCTLIDMAVPAERNVATKEIEKIAKYKDLEIEINKMWNTKTTVIPVVIGALGLIRKGINRYIDQIPGNIRIEELQKTVLLGTAHLLRRTLSIT

SEQ ID NO: 8649 - protein, 1209 aa, Morbakka virulenta
MFMENNQRKSSRIARRAVKQGARSSVMDQAGVEKCTTGTNSSNPQTLEAFRNENSSQIGPLDYKVMSQITQKKRQKWTREEYKQVMIAYYQALEQPSNENSTTHTYQIWRRMNFDNRTNIDANKLANVRRDIVKNKRLTETELERIKTDIRGNQQKTDTAENEINRSTNNIAREDDKITHNNKGNVTHLTHSEQNEEVRKTLDMKQQILDKWEEIKFVEKRNRVMLPNITKDRKAKELIKVSNNALLIIKKQRHEPLDVTEINELMYATATVITENKGVRFKKQRKLKRKKPAWKERIEKEITRMRGDLSILTELTKDNGISERKRRKIMRRYTIKKEEDIAAEKEKLKQKIQAKAQRIRRFEKRNKQYRQNRMFKSNPKVFYRELGKKQMKVDKPPTLNEIETFWKTILEDDKHHNEVAEWIRTQEEMHKNSPEQQWKEITRDEVTAALRKSSNWKSPGEDKIANFWLKNCESLHEDLARCYNEIVREPEKSPTWLTQGITYLLPKTQETKNPKNYRPITCLPTTYKILTSIIGERTYNHLEENNLLPVEQKGCRRGSYGCKDQLLINRMILEDCKTKRKNLSTAWIDYRKAFDSVPHSWIIKVMQIYKVSPDLIKYMKHSMNTWQTTMILNFSSGCITTNPIKIKNGIFQGDSLSPLLFCLSLAPLSNLLNHTEFGYENNKRRLNHLFYMDDLKLYSKNENQLEGLLNIVKIFSDDIKMQFGLEKCAKASFKRGILTNTSSVKLDDTTIIQELDQEGTYKYLGIEEGNGIKHATMKEKVRKEYYRRIKMILKSELNSSNKITAINTLAIPVATYSFNVINWQMKDIRKMDAKTRKIMTVHRMNHPKADVERIYLPRKEGGRGLIQLECAYKTSTVGLEMYLKETKDKLLKQVYKHESDKKLYSIQKEANKFEKEIGLQMESTENEKAMPITKKVKFLKETVKKKIMINMKERWKEKPLHGQYPERIDRADVDKELTFKWLQSSGLKAETEGLVIAAQDQSLATRYYQHKIIKNGADPKCRLCHEFDESVEHIISGCPVLAKKEYLERHDKALAYIHWKICKYYQIEVSNKWYEHKPTKVVEGNDVTVLWDMPINTDKEIKANRPDIVIRDKSKSFCTLIDMAVPAERNVATKEIEKIAKYKDLEIEINKMWNTKTTVIPVVIGALGLIRKGINRYIDQIPGNIRIEELQKTVLLGTAHLLRRTLSIT

SEQ ID NO: 8650 - protein, 1214 aa, Morbakka virulenta
MFMENNQRKSFRIARRTVKQGARSSVMDQAGVEKCTTGTNSSNPQTLEAFRNENSSQIGPLDYKVMSQITQKKRQKWTREEYKQVMIAYYQALEQPSNENSTTHTYQIWRRMNFDNRTNIDANKLANVRRDIVKNKRLTETELERIKTDIRRNQQKTDTAENEINRSTNNIAREDDKITHNNKGNVTHLTHSEQNEEVRKTLDMKQQILDKWEEIKFVEKRNRVMLPNITKDRKAKELIKVSNNALLIIKKQRHEPLDVTEINELMYATATVITENKGVRFKKQRKLKRKKPAWKERIEKEITRMRGDLSILTELTKDNGISERKRRKIMRRYTIKKEEDIAAEKEKLKQKIQAKAQRIRRFEKRNKQYRQNRMFKSNPKVFYRELGKKQMKVDEPPTLNEIETFWKTILEDDKHHNEVAEWIRTQEEMHKNSPEQQWKEITRDEVTAALRKSSNWKSPGEDKIANFWLKNCESLHEDLTRCYNEIVREPEKSPTWLTQGITYLLPKTQETKNPKNYRPITCLPTTYKILTSIIGERTYNHLEENNLLPVEQKGCRRGSYGCKDQLLINRMILEDCKTKRKNLSTAWIDYRKAFDSVPHSWIIKVMQIYKVSPDLIKYMKHSMNTWQTTMILNFSSGCITTNPIKIKNGIFQGDSLSPLLFCLSLAPLSNLLNHTEFGYENNKRRLNHLFYMDDLKLYSKNENQLEGLLNIVKIFSDDIKMQFGLEKCAKASFKRGILTNTSSVKLDDTTIIQELDQEGTYKYLGIEEGNGIKHATMKEKVRKEYYRRIKMILKSELNSSNKITAINTLAIPVATYSFNVINWQMKDIRKMDAKTRKIMTVHRMNHPKADVERIYLPRKEGGRGLIQLECAYKTSTVGLEMYLKETKDKLLKQVYKHESDKKLYSIQKEANKFEKEIGLQMESTENEKAMPITKKVKFLKETVKKKIMINMKERWKEKPLHGQYPERIDRADVDKELTFKWLQSSGLKAETEGLVIAAQDQSLATRYYQHKIIKNGADPKCRLCHEFDESVEHIISGCPVLAKKEYLERHDKALAYIHWKICKYYQIEVSNKWYEHKPTKVVEGNDVTVLWDMPINTDKEIKANRPDIVIRDKSKNVCTLIDMAVPAERNVATKEIEKIAKYKDLEIEINKMWNTKTTVIPVVIGALGLIRKGINRYIDQIPGNSRIEELQKNGASWNCTFTKKNSIYNLAPGS

SEQ ID NO: 8651 - protein, 1209 aa, Morbakka virulenta
MFMENNQRKSSRIARRAVKQGARSSVMDQAGVEKCTTGTNSSNPQTLEAFRNENSSQIGPLDYKVMSQITQKKRQKWTREEYKQVMIAYYQALEQPSNENSTTHTYQIWRRMNFDNRTNIDANKLANVRRDIVKNKRLTETELERIKTDIRGNQQKTDTAENEINRSTNNIAREDDKITHNNKGNVTHLTHSEQNEEVRKTLDMKQQILDKWEEIKFVEKRNRVMLPNITKDRKAKELIKVSNNALLIIKKQRHEPLDVTEINELMYATATVITENKGVRFKKQRKLKRKKPAWKERIEKEITRMRGDLSILTELTKDNGISERKRRKIMRRYTIKKEEDIAAEKEKLKQKIQAKAQRIRRFEKRNKQYRQNRMFKSNPKVFYRELGKKQMKVDEPPTLNEIETFWKTILEDDKHHNEVAEWIRTQEEMHKNSPEQQWKEITRDEVTAALRKSSNWKSPGEDKIANFWLKNCESLHEDLARCYNEIVREPEKSPTWLTQGITYLLPKTQETKNPKNYRPITCLPTTYKILTSIIGERTYNHLEENNLLPVEQKGCRRGSYGCKDQLLINRMILEDCKTKRKNLSTAWIDYRKAFDSVPHSWIIKVMQIYKVSPDLIKYMKHSMNTWQTTMILNFSSGCITTNPIKIKNGIFQGDSLSPLLFCLSLAPLSNLLNHTEFGYENNKRRLNHLFYMDDLKLYSKNENQLEGLLNIVKIFSDDIKMQFGLEKCAKASFKRGILTNTSSVKLDDTTIIQELDQEGTYKYLGIEEGNGIKHATMKEKVRKEYYRRIKMILKSELNSSNKITAINTLAIPVATYSFNVINWQMKDIRKMDAKTRKIMTVHRMNHPKADVERIYLPRKEGGRGLIQLECAYKTSTVGLEMYLKETKDKLLKQVYKHESDKKLYSIQKEANKFEKEIGLQMESTENEKAMPITKKVKFLKETVKKKIMINMKERWKEKPLHGQYPERIDRADVDKELTFKWLQSSGLKAETEGLVIAAQDQSLATRYYQHKIIKNGADPKCRLCHEFDESVEHIISGCPVLAKKEYLERHDKALAYIHWKICKYYQIEVSNKWYEHKPTKVVEGNDVTVLWDMPINTDKEIKANRPDIVIRDKSKSFCTLIDMAVPAERNVATKEIEKIAKYKDLEIEINKMWNTKTTVIPVVIGALGLIRKGINRYIDQIPGNIRIEELQKTVLLGTAHLLRRTLSIT

SEQ ID NO: 8652 - protein, 1040 aa, Morbakka virulenta
MIEDDREKMTHNNKGYVTHLSQSEQNEEGRKTLNMKQQILDKWEVIKLVKRRNRVMLPNITKDRKAKELIKVSNNALLIIKKQRHEPLDVTEINELMYATATVITENKGVRFKKQRKLKRKKPAWKERIEKEITRMRGDLSILTELTKDNGISERKRRKIMRRYTIKKEEDIAAEKEKLKQKIQAKAQRIRRFEKRNKQYRQNRMFKSNPKVFYRELGKKQMKVDEPPTLNEIETFWKTILEDDKHHNEVAEWIRTQEEMHKNSPEQQWKEITRDEVTAALRKSSNWKSPGEDKIANFWLKNCESLHEDLTRCYNEIVREPEKSPTWLTQGITYLLPKTQETKNPKNYRPITCLPTTYKILTSIIGERTYNHLEENNLLPVEQKGCRRGSYGCKDQLLINRMILEDCKTKRKNLSTAWIDYRKAFDSVPHSWIIKVMQIYKVSPDLIKYMKHSMNTWQTTMILNFSSGCITTNPIKIKNGIFQGDSLSPLLFCLSLAPLSNLLNHTEFGYENNKRRLNHLFYMDDLKLYSKNENQLEGLLNIVKIFSDDIKMQFGLEKCAKASFKRGILTNTSSVKLDDTTIIQELDQEGTYKYLGIEEGNGIKHATMKEKVRKEYYRRIKMILKSELNSSNKITAINTLAIPVATYSFNVINWQMKDIRKMDAKTRKIMTVHRMNHPKADVERIYLPRKEGGRGLIQLECAYKTSTVGLEMYLKETKDKLLKQVYKHESDKKLYSIQKEANKFEKEIGLQMESTENEKAMPITKKVKFLKETVKKKIMINMKERWKEKPLHGQYPERIDRADVDKELTFKWLQSSGLKAETEGLVIAAQDQSLATRYYQHKIIKNGADPKCRLCHEFDESVEHIISGCPVLAKKEYLERHDKALAYIHWKICKYYQIEVSNKWYEHKPTKVVEGNDVTVLWDMPINTDKEIKANRPDIVIRDKSKSFCTLIDMAVPAERNVATKEIEKIAKYKDLEIEINKMWNTKTTVIPVVIGALGLIRKGINRYIDQIPGNIRIEELQKTVLLGTAHLLRRTLSIT

SEQ ID NO: 8653 - protein, 1209 aa, Morbakka virulenta
MFMENNQRKSSRIARRAVKQGARSSVMDQAGVEKCTTGTNSSNPQTLEAFRNENSSQIGPLDYKVMSQITQKKRQKWTREEYKQVMIAYYQALEQPSNENSTTHTYQIWRRMNFDNRTNIDANKLANVRRDIVKNKRLTETELERIKTDIRGNQQKTDTAENEINRSTNNIAREDDKITHNNKGNVTHLTHSEQNEEVRKTLDMKQQILDKWEEIKFVEKRNRVMLPNITKDRKAKELIKVSNNALLIIKKQRHEPLDVTEINELMYATATVITENKGVRFKKQRKLKRKKPAWKERIEKEITRMRGDLSILTELTKDNGISERKRRKIMRRYTIKKEEDIAAEKEKLKQKIQAKAQRIRRFEKRNKQYRQNRMFKSNPKVFYRELGKKQMKVDEPPTLNEIETFWKTILEDDKHHNEVAEWIRTQEEMHKNSPEQQWKEITRDEVTAALRKSSNWKSPGEDKIANFWLKNCESLHEDLTRCYNEIVREPEKSPTWLTQGITYLLPKTQETKNPKNYRPITCLPTTYKILTSIIGERTYNHLEENNLLPVEQKGCRRGSYGCKDQLLINRMILEDCKTKRKNLSTAWIDYRKAFDSVPHSWIIKVMQIYKVSPDLIKYMKHSMNTWQTTMILNFSSGCITTNPIKIKNGIFQGDSLSPLLFCLSLAPLSNLLNHTEFGYENNKRRLNHLFYMDDLKLYSKNENQLEGLLNIVKIFSDDIKMQFGLEKCAKASFKRGILTNTSSVKLDDTTIIQELDQEGTYKYLGIEEGNGIKHATMKEKVRKEYYRRIKMILKSELNSSNKITAINTLAIPVATYSFNVINWQMKDIRKMDAKTRKIMTVHRMNHPKADVERIYLPRKEGGRGLIQLECAYKTSTVGLEMYLKETKDKLLKQVYKHESDKKLYSIQKEANKFEKEIGLQMESTENEKAMPITKKVKFLKETVKKKIMINMKERWKEKPLHGQYPERIDRADVDKELTFKWLQSSGLKAETEGLVIAAQDQSLATRYYQHKIIKNGADPKCRLCHEFDESVEHIISGCPVLAKKEYLERHDKALAYIHWKICKYYQIEVSNKWYEHKPTKVAEGNDVTVLWDMPINTDKEIKANRPDIVIRDKSKSFCTLIDMAVPAERNVATKEIEKIAKYKDLEIEINKMWNTKTTVIPVVIGALGLIRKGINRYIDQIPGNIRIEELQKTVLLGTAHLLRRTLSIT

SEQ ID NO: 8654 - protein, 994 aa, Morbakka virulenta
MHFTFFNTNVIIIIIIIIIIIIIIKVSNNALLIIKKQRHEPLDVTEINELMYATATVITENKGVRFKKQRKLKRKKPAWKERIEKEITRMRGDLSILTELTKDNGISERKRRKIMRRYTIKKEEDIAAEKEKLKQKIQAKAQRIRRFEKRNKQYRQNRMFKSNPKVFYRELGKKQMKVDEPPTLNEIETFWKTILEDDKHHNEVAEWIRTQEEMHKNSPEQQWKEITRDEVTAALRKSSNWKSPGEDKIANFWLKNCESLHEDLARCYNEIVREPEKSPTWLTQGITYLLPKTQETKNPKNYRPITCLPTTYKILTSIIGERTYNHLEENNLLPVEQKGCRRGSYGCKDQLLINRMILEDCKTKRKNLSTAWIDYRKAFDSVPHSWIIKVMQIYKVSPDLIKYMKHSMNTWQTTMILNFSSGCITTNPIKIKNGIFQGDSLSPLLFCLSLAPLSNLLNHTEFGYENNKRRLNHLFYMDDLKLYSKNENQLEGLLNIVKIFSDDIKMQFGLEKCAKASFKRGILTNTSSVKLDDTTIIQELDQEGTYKYLGIEEGNGIKHATMKEKVRKEYYRRIKMILKSELNSSNKITAINTLAIPVATYSFNVINWQMKDIRKMDAKTRKIMTVHRMNHPKADVERIYLPRKEGGRGLIQLECAYKTSTVGLEMYLKETKDKLLKQVYKHESDKKLYSIQKEANKFEKEIGLQMESTENEKAMPITKKVKFLKETVKKKIMINMKERWKEKPLHGQYPERIDRADVDKELTFKWLQSSGLKAETEGLVIAAQDQSLATRYYQHKIIKNGADPKCRLCHEFDESVEHIISGCPVLAKKEYLERHDKALAYIHWKICKYYQIEVSNKWYEHKPTKVVEGNDVTVLWDMPINTDKEIKANRPDIVIRDKSKSFCTLIDMAVPAERNVATKEIEKIAKYKDLEIEINKMWNTKTTVIPVVIGALGLIRKGINRYIDQIPGNIRIEELQKTVLLGTAHLLRRTLSIT

SEQ ID NO: 8655 - protein, 1209 aa, Morbakka virulenta
MFMENNQRKSSRIARRAVKQGARSSVMDQAGVEKCTTGTNSSNPQTLEAFRNENSSQIGPLDYKVMSQITQKKRQKWTREEYKQVMIAYYQALEQPSNENSTTHTYQIWRRMNFDNRTNIDANKLANVRRDIVKNKRLTETELERIKTDIRGNQQKTDTAENEINRSTNNIAREDDKITHNNKGNVTHLTHSEQNEEVRKTLDMKQQILDKWEEIKFVEKRNRVMLPNITKDRKAKELIKVSNNALLIIKKQRHEPLDVTEINELMYATATVITENKGVRFKKQRKLKRKKPAWKERIEKEITRMRGDLSILTELTKDNGISERKRRKIMRRYTIKKEEDIAAEKEKLKQKIQAKAQRIRRFEKRNKQYRQNRMFKSNPKVFYRELGKKQMKVDKPPTLNEIETFWKTILEDDKHHNEVAEWIRTQEEMHKNSPEQQWKEITRDEVTAALRKSSNWKSPGEDKIANFWLKNCESLHEDLARCYNEIVREPEKSPTWLTQGITYLLPKTQETKNPKNYRPITCLPTTYKILTSIIGERTYNHLEENNLLPVEQKGCRRGSYGCKDQLLINRMILEDCKTKRKNLSTAWIDYRKAFDSVPHSWIIKVMQIYKVSPDLIKYMKHSMNTWQTTMILNFSSGCITTNPIKIKNGIFQGDSLSPLLFCLSLAPLSNLLNHTEFGYENNKRRLNHLFYMDDLKLYSKNENQLEGLLNIVKIFSDDIKMQFGLEKCAKASFKRGILTNTSSVKLDDTTIIQELDQEGTYKYLGIEEGNGIKHATMKEKVRKEYYRRIKMILKSELNSSNKITAINTLAIPVATYSFNVINWQMKDIRKMDAKTRKIMTVHRMNHPKADVERIYLPRKEGGRGLIQLECAYKTSTVGLEMYLKETKDKLLKQVYKHESDKKLYSIQKEANKFEKEIGLQMESTENEKAMPITKKVKFLKETVKKKIMINMKERWKEKPLHGQYPERIDRADVDKELTFKWLQSSGLKAETEGLVIAAQDQSLATRYYQHKIIKNGADPKCRLCHEFDESVEHIISGCPVLAKKEYLERHDKALAYIHWKICKYYQIEVSNKWYEHKPTKVVEGNDVTVLWDMPINTDKEIKANRPDIVIRDKSKSFCTLIDMAVPAERNVATKEIEKIAKYKDLEIEINKMGNTKTTVIPVVIGALGLIRKGINRYIDQIPGNIRIEELQKTVLLGTAHLLRRTLSIT

SEQ ID NO: 8656 - protein, 1209 aa, Morbakka virulenta
MFMENNQRKSSRIARRAVKQGARSSVMDQAGVEKCTTGTNSSNPQTVEAFRNENSSQIGPLDYKVMSQITQKKRQKWTREEYKQVMIAYYQALEQPSNENSTTHTYQIWRRMNFDNRTNIDANKLANVRRDIVKNKRLTETELERIKTDIRGNQQKTDTAENEINRSTNNIAREDDKITHNNKGNVTHLTHSEQNEEVRKTLDMKQQILDKWEEIKFVEKRNRVMLPNITKDRKAKELIKVSNNALLIIKKQRHEPLDVTEINELMYATATVITENKGVRFKKQRKLKRKKPAWKERIEKEITRMRGDLSILTELTKDNGISERKRRKIMRRYTIKKEEDIAAEKEKLKQKIQAKAQRIRRFEKRNKQYRQNRMFKSNPKVFYRELGKKQMKVDKPPTLNEIETFWKTILEDDKHHNEVAEWIRTQEEMHKNSPEQQWKEITRDEVTAALRKSSNWKSPGEDKIANFWLKNCESLHEDLARCYNEIVREPEKSPTWLTQGITYLLPKTQETKNPKNYRPITCLPTTYKILTSIIGERTYNHLEENNLLPVEQKGCRRGSYGCKDQLLINRMILEDCKTKRKNLSTAWIDYRKAFDSVPHSWIIKVMQIYKVSPDLIKYMKHSMNTWQTTMILNFSSGCITTNPIKIKNGIFQGDSLSPLLFCLSLAPLSNLLNHTEFGYENNKRRLNHLFYMDDLKLYSKNENQLEGLLNIVKIFSDDIKMQFGLEKCAKASFKRGILTNTSSVKLDDTTIIQELDQEGTYKYLGIEEGNGIKHATMKEKVRKEYYRRIKMILKSELNSSNKITAINTLAIPVATYSFNVINWQMKDIRKMDAKTRKIMTVHRMNHPKADVERIYLPRKEGGRGLIQLECAYKTSTVGLEMYLKETKDKLLKQVYKHESDKKLYSIQKEANKFEKEIGLQMESTENEKAMPITKKVKFLKETVKKKIMINMKERWKEKPLHGQYPERIDRADVDKELTFKWLQSSGLKAETEGLVIAAQDQSLATRYYQHKIIKNGADPKCRLCHEFDESVEHIISGCPVLAKKEYLERHDKALAYIHWKICKYYQIEVSNKWYEHKPTKVAEGNDVTVLWDMPINTDKEIKANRPDIVIRDKSKSFCTLIDMAVPAERNVATKEIEKIAKYKDLEIEINKMWNTKTTVIPVVIGALGLIRKGINRYIDQIPGNIRIEELQKTVLLGTAHLLRRTLSIT

SEQ ID NO: 8657 - protein, 985 aa, Morbakka virulenta
MLPNITKDRKAKELIKVSNNALLIIKNQRHEPLDVTEINELMYATATVITENKGVRFKKQRKLKRKKSAWKERIEKEITRMRGDLSILTELTKDNGISERKRKKIMRRYTIKKEEDIAAEKEKLKQKIQAKAQRIRRFEKRNKQYRQNRMFKSNPKVFYRELGKKQMKVDKPPTLNEIETFWKTILEDDKHHNEVAEWIRTQEEMHKNSPEQQWKEITRDEVTAALRKSSNWKSPGEDKIANFWLKNCESLHEDLTRCYNEIVREPEKSPTWLTQGITYLLPKTQETKNPKNYRPITCLPTTYKILTSIIGERTYNHLEENNLLPVEQKGCRRGSYGCKDQLLINRMILEDCKTKRKNLSTAWIDYRKAFDSVPHSWIIKVMQIYKVSPDLIKYMKHSMNTWQTTMILNFSSGCITTNPIKIKNGIFQGDSLSPLLFCLSLAPLSNLLNHTEFGYENNKRRLNHLFYMDDLKLYSKNENQLEGLLNIVKIFSDDIKMQFGLEKCAKASFKRGILTNTSSVKLDDTTIIQELDQEGTYKYLGIEEGNGIKHATMKEKVRKEYYRRIKMILKSELNSSNKITAINTLAIPVATYSFNVINWQMKDIRKMDAKTRKIMTVHRMNHPKADVERIYLPRKEGGRGLIQLECAYKTSTVGLEMYLKETKDKLLKQVYKHESDKKLYSIQKEANKFEKEIGLQMESTENEKAMPITKKVKFLKETVKKKIMINMKERWKEKPLHGQYPERIDRADVDKELTFKWLQSSGLKAETEGLVIAAQDQSLATRYYQHKIIKNGADPKCRLCHEFDESVEHIISGCPVLAKKEYLERHDKALAYIHWKICKYYQIEVSNKWYEHKPTKVAEGNDVTVLWDMPINTDKKIKANRTDIVIRDRSKSFCTLIEMAVPAERNVAKKEIEKIAKYKDLEIEINKMWNTKTTVIPVVIGALGLIRKGINRYIDQIPGNIRIEELQKMVRLGTAHLQRRTLSIT

SEQ ID NO: 8658 - protein, 1209 aa, Morbakka virulenta
MFMENNQRKSSRIARRAVKQGARSSVMDQAGVEKCTTGTNSSNPQTLEAFRNENSSQIGPLDYKVMSQITQKKRQKWTREEYKQVMIAYYQALEQPSNENSTTHTYQIWRRMNFDNRTNIDANKLANVRRDIVKNKRLTETELERIKTDIRGNQQKTDTAENEINRSTNNIAREDDKITHNNKGNVTHLTHSEQNEEVRKTLDMKQQILDKWEEIKFVEKRNRVMLPNITKDRKAKELIKVSNNALLIIKKQRHEPLDVTEINELMYATATVITENKGVRFKKQRKLKRKKPAWKERIEKEITRMRGDLSILTELTKDNGISERKRRKIMRRYTIKKEEDIAAEKEKLKQKIQAKAQRIRRFEKRNKQYRQNRMFKSNPKVFYRELGKKQMKVDEPPTLNEIETFWKTILEDDKHHNEVAEWIRTQEEMHKNSPEQQWKEITRDEVTAALRKSSNWKSPGEDKIANFWLKNCESLHEDLARCYNEIVREPEKSPTWLTQGITYLLPKTQETKNPKNYRPITCLPTTYKILTSIIGERTYNHLEENNLLPVEQKGCRRGSYGCKDQLLINRMILEDCKTKRKNLSTAWIDYRKAFDSVPHSWIIKVMQIYKVSPDLIKYMKHSMNTWQTTMILNFSSGCITTNPIKIKNGIFQGDSLSPLLFCLSLAPLSNLLNHTEFGYENNKRRLNHLFYMDDLKLYSKNENQLEGLLNIVKIFSDDIKMQFGLEKCAKASFKRGILTNTSSVKLDDTTIIQELDQEGTYKYLGIEEGNGIKHATMKEKVRKEYYRRIKMILKSELNSSNKITAINTLAIPVATYSFNVINWQMKDIRKMDAKTRKIMTVHRMNHPKADVERIYLPRKEGGRGLIQLECAYKTSTVGLEMYLKETKDKLLKQVYKHESDKKLYSIQKEANKFEKEIGLQMESTENEKAMPITKKVKFLKETVKKKIMINMKERWKEKPLHGQYPERIDRADVDKELTFKWLQSSGLKAETEGLVIAAQDQSLATRYYQHKIIKNGADPKCRLCHEFDESVEHIISGCPVLAKKEYLERHDKALAYIHWKICKYYQIEVSNKWYEHKPTKVVEGNDVTVLWDMPINTDKEIKANRPDIVIRDKSKSFCTLIDMAVPAERNVATKEIEKIAKYKDLEIEINKMWNTKTTVIPVVIGALGLIRKGINRYIDQIPGNIRIEDLQKTVLLGTAHLLRRTLSIT

SEQ ID NO: 8659 - protein, 1370 aa, Hestina assimilis
MSKLTILNVKINMKSIKKPRPQVPGGSSNLPDSDGSQSGTSSRGVYNLRARRTRQTTMACSTDIELQDDKANRLSLSSSSSTQSSFSPSPSSSHFLNSHSSTPTPRFVDVVQKAKAYEFAPTINFKRARKRWTEEMNRFIWRSYLYITQIETINMKSYLHSLHEHFINEFPHMQATKQRIGDQRRAILRNKLLSVETLQEIKLDVIAEISNSQNPPSQTQYNIGKTQNTEVTQTSKRTKMCWSNTMNETLIRHFYEVTELGKNLTGYRRNLRNKFVAVYPELSHLTEQRVSDQQRAIINNKYIINERLQQIREEVESYLSNNSSHVTYSQVVDIPIIRNLEIQEDSQESHPTHTTSHDHSNSSSAQCKAKYLDIKIQENLKEQFKVNLERFKNTDPTNRPYIPKLKTSIKLALIIAYVNNNILPEYLTSDQDFTSVQNIIYSAAFTVATCNGAKISAARGHDIKIFKPSWQKRLEDKIEKLRSNIGKLTQYILGNRSKHIIATVETIKLKYQNHAQYDSVNTQLTEYLDTLKQKLNAASSRLKRYLKCTYRKKQNKEFTNNEKKFYRNLNSAHQNIDKDNPNTPTTDTLREFWSGIWENPVQHDKEAEWTKDKNLNSAIRQMEFKKIPKDTFLRVITRTHNWKAPGSDNIHNLYNHLNTFLQSPEKLPAYITQGSTFMLPKDPNDTKNPTKYRPITCLQTIYKIFTACISEVINEHLIKYNILADQQKGCRKNSQGCKEQLTIDAIVMNTAFKEKRDIHTMFVDYQKAYDSVPHSWLIEVLHMYKIHPIIIGFLQTIMTRWQTTIRTRNSEASKPIHIQRGIFQGDALSPLWFCMALNPLSYLLNKTKLGFRLSYEESLSHLLYMDDIKLFAANKEKLFQLADITCQFSKDINMDFGVDKCKILSVQKGKIQNNTYFLEIGEPIMPLDESSTYKYLGFHQSRQIKHIYTKTELTKKFKHRLNLILKSHLNSKHTIKAINTYTIPVLTYSFGIIKWSKTELQKLQRIVNTHLTKYRKHHPKSCSQRLTLPRKEGGRGLIDIKNLHNKQIKTLRNYFHLKSDTSTFYKQVTEADNRLTPLNLKNRDIQSNEYIIDTRQKLATWTGKALHGRHRTHLSQEYVDIEKSNDWIKRGELFPETEGFMIAVQDEVIATRNHRKYIMKDPRQINDLCRHCHAASETIQHITGACKALAQTDYKHRHDQVAAIIHQQLAYRYKFLPKMIPYYKYKPETVLENHDYRVYWDRTIITDKTIHFNRPDITIHDKLNKTVYLIDVAIPNSHNIQSSIAEKLSKYQDLAIELRTQWRAQTVHIIPIVISSTGIVPKTLAQSLETLNLAPFTFSTLQKATILNTCRITRKFLTSSTISSGTFSIE

SEQ ID NO: 8660 - protein, 1028 aa, Polypterus senegalus
MEGSTSNQIIIGIQIKALHCLICGNLLNSFYNLRKHYKICHNQVRVLYKCNNCSKTNEYHHVISCHAPKCPPATKRKTKRKVQCNQCTCSCPNKRGLSIHKKHKHYVSESAKSEDIYEADVTMQSPSISPVKTKIEKPIHLAGTMLLEKIKNPVNENDYEMTLKRTWEQIEQDWPNKKICIRNITRQILEEFTPPNEESNKIYQKVGDDTKTKNKIPNKVLKKYEYKKIQLLFNKDKSHLVEELIDGVKRSKCDIPMSQLQEMYTKIWCYENLNVKSQYTPTELISNFSFLSLITPNEVYENLEEIINKSAPGPDGIKKENITKVFQKEFKLAMLFNIWLTAGFVPESLKIARTVLIPKSTDELELKKPSNWRPLTIGSMILRLFSKILHKRLRADVQINIRQKGFSECQGCTENLLTLQALLRSHKEEHKLLGIILVDFSKAFDTVSHNYMLEILRLMNLNSHIAMLIKNLYEDVYTYLEGQEGRSENIAIKRGVKQGDALSPLLFNIAINPLMEKLEAEGSGTRIGKSKITSMAFADDLVVMSRSWQGMLKNIKIIQTFCQESGLKVQPTKCKSFFYIWKNGKMKCKKEKLWEINGIQIERISNRLPAKYLGLLVTPAIGLIIDDLNENIVCWIEKLSKAPLKPTQKLCLLNTYLLPRLLYPLINTKTKISLLHKLDKTIRHGVKKWFHLPECTTSGILYSSSKSGGLSLLKMEALVLKATFRSLCKMELSEDVIIKEVLVIEKAKKHRELLWKQLGGEKEDYAKVNLQAVCLKVNDETTPPILEDWTKVEFDRWKTLPTQGFGIELFENDNISNNWITNRKGLSEGQYIAALQMRVNIFPTKETLSRGRDSDKICRKCQQGKETVSRILGLCPALQSQRIKRHHKICKKVRDAMELEDWLTFKEANIKDKEGKVLRPDLVCCKGVNANIIDVTIRFESNMKMAYKAKREKEKKYSKILDEVKHLYKMKGKCFAIVVGARGKWYRFNGKALEEMGMTKRRITSLGKRISKLTVMLSLDILTTFFKK

SEQ ID NO: 8661 - protein, 1054 aa, Columbicola columbae
MNEELLAIRETAMAGGRGFMKRMHALWLEAHPEHANLVTAQQLRDQASRIHRLRSDGGTMAKEQAAHRIDQNDQIEGSPQSVGSDVPPTALPGLEEKFHSIVSSHAGWPRLPRRRPKAEDLVEMDGILNRYLEPGVSLETICRAVRAAAAALASSTRGNPRKNEGRCLEQLRAKIRKARQEASRIQCVIQNIKEGRKATKKVAKAMRELRRTHRKLDLGVLTLLKTKAVDKVRSLVAARKKLLRRLRWVEENRKFSTNPSGFLRPSQDRLAASPSVRETETYWREIYENPSPCEDIEAFDEFEAHCLENLPPPEEPDPVDAAEVLEAVRGKRNFSAPGPDGIQNVWWKSFPSVHVHLARAFTQYLEGRMAIPQWLTEGRTFLLPKSGDLARPENYRPITCLNTVYKIFTSVLGGRILRRIQPVWDEVYEQKGSKKGRAGCKEHLFVDRSICADAVHYKRNLSMAWVDYSKAFDSTSHAVLLRLLRAMGVHPNVMRCLEQMIPLWRTRFLLRTSEGLVASDWVRFRRGVFQGDSLSPLLFCISLLPLSLALRRGKGYTAGPPGRRDFKVTHLFFMDDLKLYASNEANLKQALEGVRAYSAAVGMTFGLAKCAVCHISRGKVQDGGEGLQLVDGGIIRHLDAGESYKYLGISQRGMNDSATIRRTLHCQYVARLRKIWRSELSSRNKVAATNMLAVPVVLYSFGAIKWTANELQSLDRATRKTLNMNRSLHPRSSVQRVYLPRAQGGRGLLSLECLHDRVVLGFAERVLRGGDVLLQFAAEHEFREKGAFLFKAASRAAEKLGLHELIPDRTRLGLPFEEGGRARLTRSVRRAEEAKLMEEHMQKNLHSVFFKHVRQEQLSAQLTFSFLKSAGLRAETEGFLMAAQDGVCSTLVYRRAILKEEVASTDCRACGTRPETVMHLLSACPSYGRSLYIARHNAALRVLYFHLRHHYGIDAKPILPYAPPEIEGVVGNERCTIYWNYSFPTTRVLEATKPDVVVRDLCHRILLSRRSQYSNEEQRERQISGPYRRRRAAVSGTPGQAGRADHRLPGWHES

SEQ ID NO: 8662 - protein, 877 aa, Aelia acuminata
MPPRTADPVKGVRARHLYRSIMDNWEEEVPRDDRVDLEGPTVGAARETLSAAIRGLLGEISSRSLPAALRGLVSLAEEALSGSPVGDRLAQLISDWLAVRDPGEAREVRDRLQPVRNGRDICPENRRAQYARIQELWKKDKRAAAHEILGSGTRPPLHTPEALRDYWAPIVKHPSIPWGGDRVRGSRIDQGVDLWTPVTRIEVERLSPDHNSAPGLDGVLPSAWKGAPWRTKALVLDLIMLEGRMPPQLLRARITMISKAETVNGPGDYRPISVSFVVVRYFHRILAYRLETVVTHAPEQKGFIRGFDGVAHNVFLLDAVLRYGWRRRRSLCLSVLDVKKAFDSVSHAAIREVLYARGIQRELLDYISLMYADSASVIFSRGRASAEMRPARGVRQGDPLSPLLFNMVMDHVLAGLPDRIGFMLGGVRVSALAYADDLVLVAFSVQGMECMLRAVEEGLAQCGLELNPAKCLALTLTPAGKRKVIKLDDRARFEVGGGRLASVGVSDTWEYLGVTFNYTGVCETDIDLDIGLNRISRAPLKPQQKYILLRDFLIPGFLHKLVLGMSPKPLLKKLDVRLRSTLRSWLHLPKDVPCALFHAPIRFGGLGVPRLSRSVPYWRESRFSSLAVELEELGINPEVREYLGGGDYPWGEVPPQPAGMEREALEGMVDGVDLRGIGEVRESVRWIYATAENLTGSEYVRFLQLYSGALPTRMRLTRGIRRLHAETACRMGCPVQETPAHVIQRCPVTHGGRILRHHAVVKFLADNFRRRGNAVFRETTITQGNLWKRPDLIVANRDLARILDVQIVSCRVDLDQAGQAKIESYGQPWIIRAVVEMADVSDNSVEVVPVTLSWKGIWSRKSVQDLKKLGVRKKALG

SEQ ID NO: 8663 - protein, 987 aa, Aelia acuminata
MNRAPPTHQCGECGTVFSTASGLGVHMRASHPEAFNRSIDVERVNKRWSYEELVVLASHERRLVARGYRGNINAALAELMPPRTADAVKGVRARHLYRGIMGNWEEEVPREGRVDPEGPTVGAARETLSAAIRGLLGEISSRSLPVALRGLVSLAEEALSGSPVGDRLAQLISDWLAVRDPGVAREDRDRLQHVRDGREIRPESRRAQYARIQELWKKDKRVAAHEILGSGTRPPLHTPEALRDYWAPIVEHPSIPWGGDRVRGSRINQGVDLWTPVTRIEVERLSPDHNSAPGLDGVLPSAWKGAPWRMKALVLNLIMLEGRMPPQLLRARITMIPKAETVNGPGDYRPISVSSVVVRHFHRILAYRLEAVVTHAPEQKGFIRGFDGVAHNVFLLDAVLRYGWRRRRSLCLSVLDVKKAFDSVSHAAIREVLHARGIQRELLDYISLMYADSASVIFNRGRASAEMRPARGVRQGDPLSPLLFNMVMDHVLAGLPDRIGFMLGGVRVSALAYADDLVLVASSVQGMECMLRAVEEGLAQCGLELNPAKCLTLTLTPSGRRKVIKLDDRAGFQVGGERLASLGVSDTWEYLGVTFNYTGVCKTDIDLDVGLNRISRAPLKPQQKYILLRDFFIPGFLHKLVLGMSPKPLLKKLDVRLRSALRSWLHLPKDVPCALFHAPLRFGGLGVPRLSRSVPYWRESRFSSLAVNLEGLGINPEVREYLGVDYPWGEVPPQPAGMEREALEGMVDGVDLKGVGEVRESVRWIYNTAENLTGSEYVRFLQLYCGALPTKMRLTRGTRRMYADTSCRMGCTMQETAAHVIQRCPVTRGGRILRHHAVVKFLEENFRRRGHCVFRETTITHGNTRKRPDLIIGNKDMARILDVQVVSCKVDLDQAGQVKIARYGHPWVIRAVSEMTEAPPTEVKVIPVTLSWKGIWSRRSLMELRKIGVSKKALGWISERVLRGSVISFSRWRRRADAAIIRYEEPD

SEQ ID NO: 8664 - protein, 1018 aa, Stiretrus anchorago
MGTMCYQKSVRDTALRTTGGCPLLSMIREPPMHQCGVCGRMFGTASGLGVHFRASHPEEFNRSIDVERVRRRWTYEELVVLASAEREVRARGYQGSINQVLADLMPARTPDSVKGARAKLIYRGMLGEGEVVIPHDPGEVPGMEERQGCRGLIAAAIRGIVEDVKSSAMPPVIRGIISLAEEALTGASVGERLARLISDWLAVRDPAEAGRAGLIGPPPDRNGRVFRPENRRAQYARIQELWKKDKRAAAQSILGSEQRQPLHTPEALRDYWAPIIEAPSRPWDGDRVGGARVQRGVNLWTPMTQDEVTRLSPDHKSAPGLDRVLPSVWRGAPWRMKALILDLIMLEGRMPPALLRSRVTMIPKVERVNGPGDYRPISVSSVVVRHLHRVLAERMERVVDHVPEQKGFIRGFDGVAHNVLLLDAILRHGWRRRRSLCLSVLDVKKAFDSVSHDAIREVLRARGIQGEVVEYVSSMYAGSASVIYSGGRGAAEMRPARGVRQGDPLSPLLFNMVMDHVLAGLPSRVGFMLGGVRVSALAYADDLVLVASSVQGMECMLRAVEEGLTQCGLELNPAKCLALTLTPSGKRKVIKLDDRVGLYVGGGRLASLGVAEEWEYLGVRFGCRGVCKTRVEVETGLGKIGGAPLKPQQKYILLRDFFIPGLLHQLVLGASPRALLRKLDVQVRAALRGWLHLPKDVPNALFHAPVRFGGLGVPRLAGSVPFWRESRYAGVAGRLAESGISEEVGGALGREYPKGEVPPHPAGVEREELERSVDGADLKGIGEVRESTRWVYSTAEHLTGSEYVRFLQLYSGALPTRMRLTRGTRRRTQETGCRMGCQEQETAAHVIQRCPVSRGGRILRHHAVVKFLEENCRRRGQVVFRETTITHGGRKKRPDLVVASKGLARILDVQVVSCKVDLDQAGQVKMESYGRPWVIRAVAEMTDVPENKVEVIPVTLSWKGLWSKKSARDLRRMGVKKEALAWITERVIRGSVISFSRWRGRAAAAIVGGEGPGREAGR

SEQ ID NO: 8665 - protein, 928 aa, Aelia acuminata
MEHGIKIGDKSRNDRPVASPKIPQWKQRLQRKINTLRKNIGIISNYISNPQASRNKTKKKIDQIIVQNLGIVMEHELIDRLTLYLDNLKQKLAVYANRLRRYNEAALRREQNQVFKENERQFYRNLGQNRKKPCNYPEGIELYWKDIWEHPTYHQDNAPWIEEEVKSFQEASEMPEVTITRDDVMEAVKNLKNWRAPGPDGIQNYWIKRFSSLHELLANCYQDILENKQTPPAGFSEGITYMLPKMDGLNLLPEDFRPITCLNGIYKILTSILTRKIYEHLEVNNMIPMEQLGCKKMARGCKELLLIDSFIAGQTSKSQRNLSMAWIDYKKAFDSVPHSWLLKVLDIYKVEPKVNRLLSSLMAGWSTTLKIGATSISDQIKILRGIYQGDCLSPLWFCMALFPLSRILRRNKVGYKLNIKEEASMISHSWYMDDLKLYAKNNQQLQEMVETVSSFTSNIGMSFGLDKCAVLHVKKGRVVSNQNIMVNESDHIKELEANQYYRYLGMQQNFKIASKDVKQEIVARFKIRLRQVLKTHLSGKNKIKAINTWAIPALSYSFGILHWSSTSLQEIDRIVRTSLTQERAHHPTSSKVRLYLPRKQGGRGLINIEEACRKQELALRQYFQSKTTEPHLTIKNLDRGLTALDLNNVNYCTPPAESENERLSEWKNKALHGRFYNQLNEASIDKERSVEWLVAGKLFSETEGFVVAIQDQVIATRSYRRHVLKDVTTSDKCRLCSLTLESIQHITGGCGALAGSEYLQRHNNVAKIFHQALSTRFDLLSEKVPYYKYVPHRILQKGSFKLYWDESIITDHTVLHNRPDILLLDLGEKKAEIIDVAIPNDNNISSTVGEKLRKYQELAMELQQLYHLKNVTIVPIVISTNGLIPKSTVMGTESLKLPLDILREAQKSTLLDTARIVRKFLNLKKKKS

SEQ ID NO: 8666 - protein, 953 aa, Aelia acuminata
MNKVLEDHLTLIDGLQDIPHWLYVAAKTVLVELGIKIRDKGRNDRPVVYQKIPQWKKRLQRKINTLRKNIGIISNYVRNPLAARNKTKKKIDEIIVQNLGTIMEQELIDRLKLYLDNLKQKLAVYANRLRRYNEAALRREQNQVFKENERQFYRNLGQNRKKPCNYPEDIELYWKDIWEYPTYHRDNASWIEEEVKSFQDTSEMPEVTITRDDVMGAVKNLKNWRAPGPDGIQNYWIKRFSSFYGLLANCYQDILDNKQTPPAGFSEGITYMLPKKDGLNLRPEDFRPITCLNGLYKILTSILTRKIYVHLESNNMMPIEQLGCKKMARGCKELLLIDSFIAGQTSKSQRNLSKAWIDYKKAFDSVPHSWLLKVLDIYKVEPKVKSLLSSLMAGWSTTLKIGSTSISNQIKILRGIYQGDCLSPLWFCMALFPLSRILRRNKVGYKLDIKEEASTISHSWYMDDLKLYAKNSQQLQEMVETVSSFTSDIGMSFGLDKCAVLHVKKGRVVSTQNIVVNENKHIKELEDNQYYKYLGMQQNLKIASKDVKQEIVARFKIRLRQVLKTHLSGKNKIKAINTWAIPSLCYSFGILQWSSTSLQEVDRIMRTSLTRERAHHPTSSKVRLYLPRKQGGRGLINIEEACRKQELALRQYFQSKTTGLHLAITNLDRGLTVLDLSNVNYCTRAVESENERLSEWKNKALHGRFYNQLNEASIDKERSVEWLVAGKLFSETEGFVVAIQDQVIATRSYRRHVLKDVTTSDKCRLCSLTLESIQHITGGCGALAGSEYLQRHNNVAKIFHQALAARFDLLGEKVPYYKYVPHRLLQKGPFKLYWDESIITDHTVRHNRPDILFLDLGEKKAGIIDVAIPNDNNISSTVGEKLRKYQELAMELRQLYHLENVTVVPIVISTNGLIPKSTVMGTENLKLPLDALREAQKSILLDTARIVRKFLNI

SEQ ID NO: 8667 - protein, 1221 aa, Aelia acuminata
MGGNLVSVCTPCQGRLISYHLAAGIKCIYPLNMELRNRRLASDEPDTEAASGGNSGQLPSGNSGASGTTLSSGPARLQRIPANCPSSSLEERHSPPARNRQQRPRGAMRMKWTPDMNKAVIRAYYLATNLEREKTGYLNRIQRYWCESFPEVNVSTQRLSDQVRTILARHFLSSNDLHQIKEEVRILLTTENDVETTARTTNAEAINNEESVNPALPDKQQEFDSDLENRLRQSLLTEHIMLEGIPLWERPKLPRIPYNRAIVKIINIMNKVLEDHLTLIDGLQDIPHWLYVAAKTVLVELGIKIRDKGRNDRPVVSQKIPQWKKRLQRKINTLRKNIGIISNYVRNPLAARNKTKKKIDEIIVQNLGTIMEHELIDRLTLYLDNLKQKLAVYANRLRRYNEAALRREQNQVFKENERQFYRNLGQNRKKPCNYPEDIELYWKDIWEYPTYHRDNASWIEEEVKSFQDTSEMPEVTITRDDVMGAVKNLKNWRAPGPDGIQNYWIKRFSSFHGLLANCYQDILDNKQTPPAGFSEGITYMLPKKDGLNLRPEDFRPITCLNGLYKILTSILTRKIYVHLESNNMMPIEQLGCKKMARGCKELLLIDSFIAGQTSKSQRNLSMAWIDYKKAFDSVPHSWLLEVLDIYKVEPKVKSLLSSLMAGWSTTLKIGSTSISNQIKILRGIYQGDCLSPLWFCMALSPLSRILRRNKVGYKLDIKEEASTISHSWYMDDLKLYAKNNQQLQEMVETVSSFTSDIGMSFGLDKCAVLHIKKGRVVSTQNIVVNENKHIKELEDNQYYKYLGMQQNLKIASKDVKQEIVARFKIRLRQVLKTHLSGKNKIKAINTWAIPALCYSFGILQWSSTSLQEVDRIVRTSLTRERAHHPTSSKVRLYLPRKQGGRGLINIEEACRKQELALRQYFQSKTTGLHLAITNLDRGLTVLDLNNVNYCTRAVESENERLSEWKNKALHGRFYYQLNEASIDKERSVEWLVAGKLFSETEGFVVAIQDQIIATRSYRRHVLKDVTTSDKCRLCSLTLESIQHITGGCGALAGSEYLQRHNNVAKIFHQALAARFDLLGEKVPYYKYVPHRLLQKGPFKLYWDESIITDHTVRHNRPDILFLDLGEKKAGIIDVAIPNDNNISSTVGEKLRKYQELAMELRQLYHLENVTVVPIVISTNGLIPKSTVMGTENLKLPLDALREAQKSILLDTARIVRKFLNI

SEQ ID NO: 8668 - protein, 897 aa, Aelia acuminata
MNKVLEEHLTLIEGLQDIPHWLYISAKTVLMEHGIKIGDKSRNVRPVASPKIPQWKQRLQRKISTLRKNIGIISNYISNPLASRNKTKKKIDQIIVQNLGIVMKHELIDRLTLYLDNLKQKLAVYANRLRRYNEAALRREQNLVFKENECQFYRNLGQNRKKPCNYPEGIELYWKDIWEHPTYHQDNASWIEEEVKSFQDASEMPEVTITRDDVMEAVKNLKNWRAPGPDGIQNYWIKRFSSFQELLANYYQDILDNKQTPPAGFSEGITYMHSKKDGLNLLPEDFRPITCLNGIYKILTSILTRKIYEHLEVNNMIPMEQLGCKKMARGWKELLLIDSFIAGQPSKSQRNLSMAWIDYKKAFDSVPHSWLLKVLDIYKVEPKVNRLLSSLMAGWSTTLKIGATSISDQIKILRGIYQGDCLSLLWFCMALFPLSRILRRNKVGYKLNIKEEASMINHSWYMDDLKLYAKNNQQLQQMIETVSSFTSDIGMSFGLDKCAVLHVKKGRVVSTQNIMVNESEHIKELEANQYYRYLGMQQNFKIASKDVKQEIVARFKIRLRQVLKTHLSGKNKIKAINTWAIPALSYSFGILHWSSTSLQEIDRIVRTSLTQERAHHPTSSKVRLYLPRKQGGRGLINIEEACRKQELALRQYFQSKTTEPHLTIKNLDRGLTALDLNNVNYCTPAAESENERLSEWKNKALHGRFYNQLNEASIDKERSVDWLVAGKLFSETEGFVVAIQDQVIATRSYRRHVLKDVTTSDKCRLCSLTLESIQHIMGGCGALAGSEYLQRHNNEAKTFHQALSTRFDLLSEKVPYYKYVPHRILQKGSFKLYWDETIITDHTVLHNRPDILFLDLGEKKAEIIDVAISITTISALQFVRNSENIRNWRWSCNIYTI

SEQ ID NO: 8669 - protein, 1226 aa, Aelia acuminata
MSDDFVDSLISHINNLTLKHTMASFQIKSADYDHIPNFNGNPHNLLKFVTVCRQVYQIVCKPDNSYKSLNEQRLLSKILAKLTDEADYINTTCEFNKVEELLTYLERTFRDSRSIEQLSFELFNSKIYHKEHPLDFLHRIDKIRTLIISRHRIENTENRETIITALEKNILYHFFTNMPLHIRTYLMTKTDKLRTVDDLRNLIQNENHLLFDDLISSGNMRRPGEHDHKRHFDNKKKFEKHKNHRRFDNWQHPNNPYNPHNQYRTQGSPPQQNYYNDNNNRPYDREWPRREQQRYFNGSGQYRNQYQNRNNNYNNNNNNNNNNNNNNKKKRLQRKINTLRKNIGIISNYVRNPLAARNKTKKKIDEIIVQNLGTIMEHELIDRLTLYLDNLKQKLAVYANRLRRYNEAALRREQNQVFKENERQFYRNLGQNRKKPCNYPEDIELYWKDIWEYPTYHRDNASWIEEEVKSFQDTSEMPEVTITRDDVMGAVKNLKNWRAPGPDGIQNYWIKRFSSFHGLLANCYQDILDNKQTPPAGFSEGITYMLPKKDGLNLRPEDFRPITCLNGLYKILTSILTRKIYVHLESNNMMPIEQLGCKKMARGCKELLLIDSFIAGQTSKSQRNLSMAWIDYKKAFDSVPHSWLLEVLDIYKVEPKVKSLLSSLMAGWSTTLKIGSTSISNQIKILRGIYQGDCLSPLWFCMALFPLSRILRRNKVGYKLDIKEEASTISHSWYMDDLKLYAKNNQQLQEMVETVSSFTSDIGMSFGLDKCAVLHIKKGRVVSTQNIVVNENKHIKELEDNQYYKYLGMQQNLKIASKDVKQEIVARFKIRLRQVLKTHLSGKNKIKAINTWAIPALCYSFGILQWSSTSLQEVDRIVRTSLTRERAHHPTSSKVRLYLPRKQGGRGLINIEEACRKQELALRQYFQSKTTGLHLAITNLDRGLTVLDLNNVNYCTRAVESENERLSEWKNKALHGRFYNQLNEASIDKERSVEWLVAGKLFSETEGFVVAIQDQIIATRSYRRHVLKDVTTSDKCRLCSLTLESIQHITGGCGALAGSEYLQRHNNVAKIFHQALAARFDLLGEKVPYYKYVPHRLLQKGPFKLYWDESIITDHTVRHNRPDILFLDLGEKKAGIIDVAIPNDNNISSTVGEKLRKYQELAMELRQLYHLENVTVVPIVISTNGLIPKSTVMGTENLKLPLDALREAQKSILLDTARIVRKFLNI

SEQ ID NO: 8670 - protein, 1189 aa, Aelia acuminata
MELRNRRLASDEPDTEAASGGNSGQLPSGNSGASGTTLSSGPARLQRIPANCPSSSLKERHSPPARNRQQRPRGAMRMKWTPDMNKAVIRAYYLATNLEREKTGYLNRIQRYWCESFPEVNVSTQRLSDQVRTILARHFLSSNDLHQIKEEVRILLTTENDVETTARTTNAEAINNEESVNPALPDKQQEFDSNLENRLRQSLLTEHIMLEGIPLWERPKLPRIPYNRAIVKIINIMNKVLEDHLTLIDGLQDIPHWLYVAAKTVLVELGIKIRDKGRNDRSVVYQKIPQWKKRLQRKINTLRKNIGIISNYVRNPLAARNKTKKKIDEIIVQNLGTIMEQELIDRLKLYLDNLKQKLAVYANRLRRYNEAALRREQNQVFKENERQFYRNLGQNRKKPCNYPEDIELYWKDIWEYPTYHRDNASWIEEEVKSFQDTSEMPEVTITRDDVMGAVKNLKNWRAPGPDGIQNYWIKRFSSFYGLLANCYQDILENKQTAPAGFSEGITYMLPKKDGLNLRPEDFRPITCLNGLYKILTSILTRKIHVHLESNNMMPIEQLGCKKMARGCKELLLIDSFIAGQTSKSQRNLSMAWIDYKKAFDSVPHSWLLKVLDIYKVEPKVKSLLSSLMAGWSTTLKIGSTSISNQIKILRGIYQGDCLSPLWFCMALFPLSRILRRNKVGYKLDIKEEASTISHSWYMDDLKLYAKNSQQLQDMVETVSSFTSDIGMSFGLDKCAVLHVKKGRVVSTQNIMVNENKHIKELEDNQYYKYLGMQQNLKIASKDVKQEILARFKIRLRQVLKTHLSGRNKIKAINTWAIPALCYSFGILQWSSTSLQEVDRIIRTSLTRERAHHPTSSKVRLYLPRKQGGRGLINIEEACRKQELALRQYFQSKTTGLHLAITNLDRGLTVLDLNNVNYCTRAVESENERLSEWKNKALHGRFYNQLNEASIDKERSVEWLVAGKLFSETEGFVVAIQDQVIATRSYRRHVLKDVTTSDKCRLCSLTLESIQHITGGCGALAGSEYLQRHNNVAKIFHQALAARFDLLGEKVPYYKYVPHSLLQKGPFKLYWDESIITDHTVRHNRPDILFLDLGEKKAGIIDVAIPNDNNISSTVGEKLRKYQELAMELRQLYHLENVTVVPIVISTNGLIPKSTVMGTENLKLPLDALREAQKSILLDTARIVRKFLNI

SEQ ID NO: 8671 - protein, 1055 aa, Pterostichus madidus
MNTDNALSDSPHTDVTNSTALSTVAEKRGRTKWTPEMNRYLYKTYLLITKMETETRNYSNKLHKEVTQRFPELANKTLMNILSQKRELFTKNRLSQEEIKKIQKEVENTMRLEKGENILDTSKIADDEEAQEQEQSTEQFDEHILNTFRTNDMLYYGMQPTCKPKLPRLKEDKRTRNILNEINKILSKELATCTSMKELHAHLYTAAISTLMLHDYKIAEPGRSSKNRQVNKQPAWQVRLENNIRTLRRDIGRLMQAQTQQNNLKLQEHARKITIRYKNKDNNTCKEILDFMKQKLAVQAARLKRYKESDKRRKQTTQFLNNQKLFYRTLQNTNKNEGNIHPTQTPSNEEVETFWKGIWEQGVTHNTRASWIKDEKKRVERVQVMTQTDITEEDVKQALKKTQNWKSPGIDRLHNYWLKKFSAAHSTMATLFNISMEHPEQIPDFMTTGITYLLPKSTPQSEDPSKYRPITCLPTIYKTFTSIITDKLYKHLEKNNIISEEQKGCRKNSRGCKEQLLIDTAIMEDARKNKRDLFSAYIDYRKAFDSIPHSWLIEVLKIYKVNPKIVQLMEQLMVRWKTTLHLNNIATGKTYIRRGIFQGDSLSALWFCLALQPLTTILKNTKKGYVIPGTNHQISHLFYMDDLKLMCKSHADLQKLLKITETFSHDIRMDFGLDKCRINAMRKGKWQEVEGYRLQYTDAILETMNEEDTYKYLGLQQGRGINKNEIRNQLNAKFKARLESILYTKLSGKNIVQAVNTYAAPVISYSFGILNWIPTDLEELNRLIRTTCTQHRMKHPKSSVERFHLHRKKGGRGFVDLRNLHYNEVYQLRNYFLHKSETSPLHKAICQIDNNLTPLKLKDQNFNPQNQLTTDDVKIDKWREKELHGRYAALVEEQHIDKQATYAWLSRGDLFPETEGFLMVIQDQVIATKNYKKYIIKDSTITNTRCRMCETNNENIEHIISGCKVLAPTEYLRRHNNVAKIIHTKLCHNLFNTPQVPYYKYNPEAIIDKPHAKIYWDRTLLTDRTVEHNRPDIVYQDKINNCTYLIDIAVRYPRK

SEQ ID NO: 8672 - protein, 1136 aa, Pterostichus madidus
MNTDNALSDSPHTDVTNATALSTVAEKRGRTKWTPEMNRYLYKTYLLITKMETETRNYSNKLHKEVTQRFPELANKTLMNILSQKRELFTKNRLSQEEIKKIQKEVENTMRLEKGENILDTSKIADDEEAQEQEQSTEQFDEHILNTFRTNDMLYYGMQPTCKPKLPRLKEDKRTRNILNEINKILSKELATCKSMKELHAHLYTAAISTLILHDYKIAEPGRSSKNRQVNKQPAWQVRLENNIRTLRRDIGRLMQAQTQQNNLKLQEHARKITIRYKNKDNNTCKEILDFMKQKLAVQAARLKRYKESDKRRKQTTQFLNNQKLFYRTLQNTNKNEGNIHPTQTPSNEEVETFWKGIWEQGVTHNTRASWIKDEKKRVERVQVMTQTDITEEDVKQALKKTQNWKSPGIDRLHNYWLKKFSAAHSTMATLFNISMEHPEQIPDFMTTGITYLLPKSTPQSEDPSKYRPITCLPTIYKTFTSIITDKLYKHLEKNNIISEEQKGCRKNSRGCKEQLLIDTAIMEDARKNKRDLFSAYIDYRKAFDSIPHSWLIEVLKIYKVNPKIVQLMEQLMVRWKTTLHLNNIATGETYIRRGIFQGDSLSALWFCLALQPLTTILKNTKKGYDIPGANHQISHLFYMDDLKLMCKSHADLQKLLKITETFSHDIRMDFGLDKCRINAMRKGKWQEVEGYRLQYTDAILETMNEEDTYKYLGLQQGRGINKNEIRNQLNAKFKARLESILYTKLSGKNIVQAVNTYAAPVISYSFGILNWTPTDLEELNRLIRTTCTQHRMKHPKSSVERFHLHRKKGGRGFVDLRNLHYNEVYQLRNYFLHKSETSPLHKAICQIDNNLTPLKLKYQNFNPQNQLTTDDVKIDKWREKELHGRYAALVEEQHIDKQATYAWLSRGDLFPETEGFLMAIQDQVIATKNYKKYIIKDSTITNTRCRMCETNNENIEHIISGCKVLAPTEYLRRHNNVAKIIHTKLCHNLFNTPQVPYYKYNPEAIIDKPHAKIYWDRTLLTDRTVEHNRPDIVYQDKINNCTYLIDIAVPAPVNIKSKISEKMNKYIPLANDIKKTWGQEKVIILPIVIGATGEIPTKIHKAIETIGLTKNTYHQLQKAVILDTCHIVRKVLNLK

SEQ ID NO: 8673 - protein, 933 aa, Hofstenia miamia
MKEEIGERARLPIPRRVKRSKLAVETAKVKVLERIDARSVTEVNSLVYAGACEVLKNVGMEIKKKRRQEDKGDRKPAWERRIENKVAKIRQQIGKIRTSKVVQDRCRVGKGKTIEIAREELKQRLVAEAEKLRKYRARAKQARDNMKFETQEGRFYKELDAGGKATARAGEDAVRFWENIWGSAGPEIESVQMQKEVRQEEEVITTVRLKEALKTMKNWKAPGRDEVHGYWLKKFTSVHERLAAALEECVVSGCPEWMVVGRTFLIQKDPKKGSEASNFRPITCLPTMWKLLTSVISNRLACYLEQNRLIPEEQKGCRTKTRGCKDQLLIDQAVVENCRRRKTNLAMAWIDYRKAYDSISHRWVLRTLEANGVSRKWVEFLEREMGKWQTEIDGHRLRFRRGIFQGDSLAPLLFVVSLIPITEKLKETGIGYKMEKNGREVSHLWYMDDLKMYASSRKMLQKQVETLEKASRDSGLEFGLGKCAAVTMTRGKCVDGEGLRTSSGDKIEEVKEGYKYLGVIEKDRTDHVEMRLKKEYKRRVRKVLQKSALNGQNSIKAINTWAIPVLRYSAGIVRWNKNELRELDRETRKILAAERAFNLNGDVDRLYMTRHKGGKGLLSVEETVEAEALGLKEYVEEQPEGSLLEVTKELKKIRTESEGKKVYQSRMESERQTRYRQKAMHGEYWRNTEKCDREESNKWLKKAGLKRETEALIMAAQEQAIRTNWVKKHIDRRVEVSDKCRLCKKECETVDHLIAGCEKLAQNEYKFRHDKVGRMVHWSLSRQHGLEAGDKWYEHKPQGVIENEKVKILWDFNIQTSKVIEARRPDIVVVDKEKRLGTVIDIAVPKDRNVESKEKEKIDKYRELAEEIERLWKLKKVEVVPVVVGALGAVSKKHKRYLEKLGVPKWGGAVAQKAALLGTARVLRKALRLPGNW

SEQ ID NO: 8674 - protein, 1095 aa, Hofstenia miamia
MKSHDRAKALSPRQAFNGQRVLRISGQQADSTIGSVDSRSGSTGSTQTNGQRHKWTDEQNRTALECYRRSRPDERGYRKRMLEEWRKARTGLEVTEQRLAGQVRKLQLDESKGKKRVEQVKQREDEVIDVETEVAEVADAETEAAIKEKMKEEIGERARLPVPRRVKRSKLAVETAKVNKVLERIDARSVTEVNSLVYAGACEVLKNVGVEIKKKRWQEDKGDRKPAWERRIENKVAKIRQQIGKIRTSKAVQDRCRVGKGKTIEIAREELKQRLVAEAEKLRKYRARAKQARDNMKFETQEGRFYKELDAGEKATARAGEDAVRFWENIWGSAGPEIESVQMQKEVRQEEEVITTVRLKEALKKMKNWKAPGRDEVHGYWLKKFTSVHERLAAALEECVVSGCPEWMVVGRTFLIQKDPKKGSEASNFRPITSLPTTWKLLTSVISSRLACYLEQNRLIPEEQKGCRTKTRGCKDQLLIDQAVVENCRRRKTNLAMAWIDYRKAYDSISHRWVLRTLEANGVSRKWVEFLEREMAKWQTEIDGHRLRFRRGIFQGDSLAPLLFVVSLIPITEKLKETGIGYKMEKNGREVSHLWYMDDLKMYASSRKMLQKQVETLEKASRDSGLEFGLGKCAAVTMTRGKCVDGEGLRTSSGDKIEEVKEGYKYLGVIEKDRTDHMEMKMRLRKEYKRRVRKVLQKSALNGQNSIKAINTWAIPVLRYSAGIVRWNKNELRELDRETRKILAAERAFNLNGDVDRLYMARHKGGKGLLSVEETVEAEALGLKEYVEEQPEGSLLEVTKELKKIRTESEGKKIYQSRMESERQTRYRQKAMHGEYWRNTEKCDREESNKWLKKAGLKRETEALIMAAQEQAIRTNWVKKHIDRRVEVSDKCRLCKKEAETVDHLIAGCEKLAQNEYKFRHDKVGRMVHWSLSRQHGLEAGDKWYEHKPQGVIENEKVKILWDFNIQTSKVIEARRPDIVVVDKEKRLGTVIDIAVPKDRNVESKEKEKIDKYRELAEEIERLWKLKKVEVVPVVVGALGAVSKKHKRYLEELGVPKWGGAVAQKAALLGTARVRGKLSDSLGTGEFPELRGIPA

SEQ ID NO: 8675 - protein, 1085 aa, Hofstenia miamia
MRSHDRAKALSPRQAFNGQRVLRISGQQADSTIGSVDSRSGSTGSTQTNGQRHKWTDEQNRTALECYRRSRPDERGYRKRMLEEWRKARTGLEVTEQRLAGQVRKLQLDESKGKKRVEQVKQREDEVIDVETEVAEVADAETEAAIKEKMKEEIGERARLPVPRRVKRSKLAVETAKVNKVLERIDARSVTEVNSLVYAGACEVLKNVGVEIKKKRWQEDKGDRKPAWERRIENKVAKIRQQIGKIRTSKAVQDRCRVGKGKTIETAREELKQRLVAEAEKLRKYRARAKQARDNMKFETQEGRFYKELDAGEKATARAGEDAVRFWENIWGSAGPEIENVQIQKEARQEEEVITTVRLKEALKKMKNWKAPGRDEVHGYWLKKFTSVHERLAAALEECVVSGCPEWMVVGKTFLIQKDPKKGSEASNFRPITCLPTTWKLLTSVISSRLACYLEQNRLIPEEQKGCRTKTRGCKDQLLIDQAVVENCRRRKTNLAMAWIDYRKAYDSISHMWVLRTLEANGVSRKWVEFLEREMAKWQTEIDGHRLRFRRGIFQGDSLAPLLFVVSLIPITEKLKETGIGYKMEKNGREVSHLWYMDDLKMYASSRKMLQKQVETLEKASRDSGLEFGLGKCAAVTMTRGKCVDGEGLRTSSGDKIEEVKEGYKYLGVIEKDRTDHMEMKMRLRKEYKRRVRKVLQKSALNGQNSIKAINTWAIPVLRYSAGIVRWNKNELRELDRETRKILAAERAFNLNGDVDRLYMTRHKGGKGLLSVEETVEAEALGLKEYVEEQPEGSLLEVTKELKKIRTESEGKKIYQSRMESERQTRYRQKAMHGEYWRNTEKCDREESNKWLKKAGLKRETEALIMAAQEQAIRTNWVKKHIDRRVEVSDKCRLCKKEAETVDHLIAGCEKLAQNEYKFRHDKVGRMVHWSLSRQHGLEAGDKWYEHKPQGVIENEKVKILWDFNIQTSKVIEARRPDIVVVDKEKRLGTVIDIAVPKDRNVESKEKEKIDKYRELAEEIERLWKLKKVEVVPVVVGALGAVSKKHTRYLEELGVPKWGGAVAQKAALLGTARVLRKALRLPGNW

SEQ ID NO: 8676 - protein, 1085 aa, Hofstenia miamia
MRSHEKAKALSPRQAFNGQRVLRISGQQADSTIGSVDSRSGSIGSTQTNGQRHKWTDEQNRTALECYRRSRPDERGYRKRMLEEWRKARTGLEVTEQRLAGQVRKLQLDESKGKKRVEQVKQREDEVIDVETEVAEVADAETEAAIKEKMKEEIGERARLPIPRRVKRSKLAVETAKVNKVLERIDARSVTEVNSLVYAGACEVLKNVGVEIKKKRWQEDKGDRKPAWERRIENKVAKIRQQIGKIRTSKAVQDRCRVGKGKTIETAREELKQRLVAEAEKLRKYRARAKQARDNMKFETQEGRFYKELDAGEKATARAGEDAVRFWENIWGSAGPEIESVQMQKEVRQEEEVITTVRLKEALKKMKNWKAPGRDEVHGYWLKKFTSVHERLAAALEECVVSGCPEWMVVGRTFLIQKDPKKGSEASNFRPITCLPTTWKLLTSVISSRLACYLEQNRLIPEEQKGCRTKTRGCKEQLLIDQAVVENCRRRKTNLAMAWIDYRKSYDSISHEWVLKTLVANGVSRKWVEFLEREMAKWQTEIDGHRLRFRRGIFQGDSLAPLLFVVSLIPITEKLKETGIGYKMEKNGRAVSHLWYMDDLKMYASSRKMLQKQVETLEKASRDSGLEFGLGKCAAVTMTRGKCVDGEGLRTSSGDKIEEVKEGYKYLGVIEKDRTDHVEMKMRLRKEYKRRVRKVLQKSALNGQNSIKAINTWAIPVLRYSAGIVRWNKNELRELDRETRKILAAERAFNLNGDVDRLYMARHKGGKGLLSVEETVEAEALGLKEYVEEQPKGSLLEVTKELKKIRTESEGKKIYQSRMESERQTRYRQKAMHGEYWRNTEKCDREESNKWLKKAGLKRETEALIMAAQEQAIRTNWVKKHIDRRVEVSDKCRLCKKEAETVDHLIAGCEKLAQNEYKFRHDKVGRMVHWSLSRQHGLEAGDKWYEHKPQGVIENEKVKILWDFNIQTSKVIEARRPDIVVVDKEKRLGTVIDIAVPKDRNVESKEKEKIDKYRELAEEIERLWKLKKVEVVPVVVGALGAVSKKHKRYLEELGVPKWGGAVAQKAALLGTARVLRKALRLPGNW

SEQ ID NO: 8677 - protein, 1085 aa, Hofstenia miamia
MKSHDRAKALSPRQAFNGQRVLRISGQQADSTIGSVDSRSGSTGSTQTNGQRHKWTDEQNRTALECYRRSRPDERGYRKRMLEEWRKARTGLEVTEQRLAGQVRKLQLDESKGKKRVEQVKQREDEVIDVETEVAEVADAETEAAIKEKMKEEIGERARLPIPRRVKRSKLAVETAKVNKVLERIDARSVTEVNSLVYAGACEVLKNVGVEIKKKRWQEDKGDRKPAWERRIENKVAKIRQQIGKIRTSKAVQDRCRVGKGKTIETAREELKQRLVAEAEKLRKYRARAKQARDNMKFETQEGRIYKELDAGGKATARVGEDAVRFWENIWGSAGPEIENVQMQKEARQEEEVITTVRLKEALKKMKNWKAPGRDEVHGYWLKKFTSVHERLAAALEECVVSGCPEWMVVGKTFLIQKDPKKGSEASNFRPITCLPTTWKLLTSVISSRLACYLEQNRLIPEEQKGCRTKTRGCKDQLLIDQAVVENCRRRKTNLAMAWIDYRKAYDSISHRWVLRTLEANGVSRKWVEFLEREMAKWQTEIDGHRLRFRRGIFQGDSLAPLLFVVSLIPITEKLKETGIGYKMEKNGREVSHLWYMDDLKMYASSRKMLQKQVETLEKASRDSGLEFGLGKCAAVTMTRGKCVDGEGLRTSSGDKIEEVKEGYKYLGVIEKDRTDHMEMKMRLRKEYKRRVRKVLQKSALNGQNSIKAINTWAIPVLRYSAGIVRWNKNELRELDRETRKILAAERAFNLNGDVDRLYMTRHKGGKGLLSVEETVEAEALGLKEYVEEQPRGSILEVTKELRKIRTESEGKKIYQSRMESERQTRYRQKAMHGEYWRNTEKCDREESNKWLKKAGLKRETEALIMAAQEQAIRTNWVKKHIDRRVEVSDKCRLCKKEAETVDHLTAGCEKLAQNEYKFRHDKVGRMVHWSLSRQHGLEAGDKWYEHKPQGVIENEKVKILWDFNIQTSKVIEARRPDIVVVDKEKRLGTVIDIAVPKDRNVESKEKEKIDKYRELAEEIERLWKLKKVEVVPVVVGALGAVSKKHKRYLEELGVPKWGGAVAQKAALLGTARVLRKALRLPGNW

SEQ ID NO: 8678 - protein, 1038 aa, Hofstenia miamia
MDNGTNGQMNRTALECYRRSRPDERSYRKRMLEEWRKAETGLEVTEQRLAGQVRKLQLDESKGKKRVEQAKQREDEVIDVETQLAEEAEPVDAETEAAIKEKMKEEIGERTRLPVPRGVKKSKLAVETAKVNKVLERIDARSVTEVNSLVYASACEVLKNVGMDMKKKRRQEDKGDRKPAWERRIENKVAKIRQQIGKIRTSKAVQDRCRVGKGKTIETAREELKQRLVAEAEKLRKYRARAKQARDNMKFETQEGRFYKELDAGEKATARAGEDAVRFWENIWGSAGPEIESEQMHKEFRQEEEVITTAKLKEALKKMKNWKAPGRDEVHGYWLKKFTSVHERLAVALEECVVSGCPEWMVVGRTFLIQKDPKKGSEASNFRPITCLPTTWKLLTSVISSRLACYLEQNRLIPEEQKGCRTKTRGCKDQLLIDQAVVENCRRRKTNLAMAWIDYRKAYDSISHRWVLRTLEANGVSRKWVEFLEREMAKWQTEIDGHRLRFRRGIFQGDSLAPLLFVVSLIPITEKLKETGIGYKMEKNGREVSHLWYMDDLKMYASSRKMLQKQVETLEKASRDSGLEFGLGKCAAVTMTRGKCVDGEGLRTSSGDKIEEVKEGYKYLGVIEKDRTDHMEMKMRLRKEYKRRVRKVLQKSALNGQNSIKAINTWAIPVLRYSAGIVRWNKNELRELDRETRKILAAERAFNLNGDVDRLYMTRHKGGKGLLSVEETVEAEALGLKEYVEEQPEGSLLEVTKELKKIRTESEGKKIYQSRMESERQTRYRQKAMHGEYWRNTEKCDREESNKWLKKAGLKRETEALIMAAQEQAIRTNWVKKHIDRRVEVSDKCRLCKKEAETVDHLIAGCEKLAQNEYKFRHDKVGRMVHWSLSRQHGLEAGDKWYEHKPQGVIENEKVKILWDFNIQTSKVIEARRPDIVVVDKEKRLGTVIDIAVPKDRNVESKEKEKIDKYRELAEEIERLWKLKKVEVVPVVVGALGAVSKKHKRYLEELGVPKWGGAVAQKAALLGTARVLRKALRLPGNW

SEQ ID NO: 8679 - protein, 1085 aa, Hofstenia miamia
MKSHDRAKALSPRQAFNGQRVLRISGQQADSTIGSVDSRSGSIGSTKTNGQRHKLTDEQNRTALECYRRSRPDERGYRKRMLEEWRKAETGLEVTEQILAGQVRKLQLDESKGKKRVEQVKQREDEVIDVETEVAEVADAETEAAIKEKMKEEIGERARLPIPRRVKRSKLAVETAKVNKVLERIDAKSVTEVNSLVYAGACEVLKNVGVEIKKKRWQEDKGDRKPAWERRIENKVAKIRQQIGKIGTSKAVQDRCRVGKGKTIETAREELKQRLVAEAEKLRKYRARAKQARDNMKFETQEGRFYKELDAGGKATAKAGEDAVRFWENIWGSAGPEIESVQMQKEVRQEEEVITTVRLKEALKKMKNWKAPGRDEVHGYWLKKFTSVHERLAVALEECVVSGCPEWMVVGRTFLIQKDPKKGSEASNFRPITCLPTTWKLLTSVISNRLACYLEQNRLIPEEQKGCRTKTRGCKDQLLIDQAVVENCRRRKTNLAMAWIDYRKAYDSISHRWVLRTLEANGVSRKWVEFLEREMAKWQTEIDGHRLRFRRGIFQGDSLAPLLFVVSLIPITEKLKETGIGYKMEKNGRAVSHLWYMDDLKMYASSRKMLQKQVETLEKASRDSGLEFGLGKCAAVTMTRGKCVDGDGLRTSSGDKIEEVKEGYKYLGVIEKDRTDHEEMKMRLRKEYKRRVRKVLQKSALNGQNSIKAINTWAIPVLRYSAGIVRWNKNELRELDRETRKILAAEKAFNLNGDVDRLYMARHKGEKGLLSVEETVEAEALGLKEYVEEQPKGSLLEVTKELKKIRTESEGKKIYQSRMESERQTRYRQKAMHGEYWRNTEKCDREESNKWLKKAGLKRETEALIMAAQEQAIRTNWVKKHIDRRVEVSDKCRLCKKEAETVDHLIAGCEKLAQNEYKFRHDKVGRMVHWSLSRQHGLEAGDKWYEHKPQGVIENEKVKILWDFNIQTSKVIEARRPDIVVVDKEKRLGTVIDIAVPKDRNVESKEKEKIDKYRELAEEIERLWKLKKVEVVPVVVGALGAVSKKHKRYLEELGVPKWGGAVAQKAALLGTARVLRKALRLPGNW

SEQ ID NO: 8680 - protein, 790 aa, Hofstenia miamia
MKFETQEGRFYKELDAGEKATARAGEDAVRFWENIWGSAGPEIENVQIQKEARQEEEVITTVRLKEALKKMKNWKAPGRDEVHGYWLKKFTSVHERLAVALEECVVSGCPEWMVVGRTFLIQKDPKKGSEASNFRPITCLPTTWKLLTSVISSRLACYLEQNRLIPEEQKGCRTKTRGCKDQLLIDQAVVENCRRRKTNLAMAWIDYRKAYDSISHKWVLKTLEANGVSQKWVEFLERWEAKWQTEIDGHRLRFRRGIFQGDSLAPLLFVVSLIPITEKLKETGIGYKMEKNGREVSHLWYMDDLKMYASSRKMLQKQVETLEKASRHSGLEFGLGKCAAVTMTRGKCVDGEGLRTSSGDKIEEVKEGYKYLGVIEKDRTDHEEMKMRLRKEYKRRVRKVLQKSALNGQNSIKAINTWAIPVLRYSAGIVRWNKNELRELDRETRKILAAERAFNLNGDVDRLYMARHKGGKGLLSVEETVEAEALGLKEYVEEQPEGSLLEVTKELKKIRTESEGKKIYQSRMESERQTRYRQKAMHGEYWRNTEKCDREESNKWLKKAGLKRETEALIMAAQEQAIRTNWVKKHIDRRVEVSDKCRLCKKEAETVDHLIAGCEKLAQNEYKFRHDKVGRMVHWSLSRQHGLEAGDKWYEHKPQGVIENEKVKILWDFNIQTSKVIEARRPDIVVVDKEKRLGTVIDIAVPKDRNVESKEKEKIDKYRELAEEIERLWKLKKVEVVPVVVGALGAVSKKHTRYLEELGVPKWGGAVAQKAALLGTARVLRKALRLPGNW

SEQ ID NO: 8681 - protein, 967 aa, Hofstenia miamia
MAYNNNNNNNNNNNNNESKGKKRIEQVKQREDEVIDVETEVAEVADAETEAAIKEKMKEEIGERARLPIPRRVKRSKLAVETAKVNKVLERIDARSVTEVNSLVYAGACEVLKNVGVDIKKKRRQEDKGDRKPAWERRIENKVAKIRQQIGKIRTSTAVQDRFRVGKGKTIETAREELKQRLVAEAEKLRKYRARAKQARDNMKFETQEGRFYKELNAGEKATARAGEDAVRFWENIWGSAGPEIENVQMQKEARQEEEVITTVRLKEALKKMKNWKAPGRDEVHGYWLKKFTSVHERLAVALEECVVSGCPEWMVVGKTFLIQKDPKKGSEASNFRPITCLPTTWKLLTSVISSRLACYLEQNRLIPEEHKGCSTKTRGCKDQLLIDQAVVENCRRRKTNLAMAWIDYRKAYDSISHKWVLKTLEANGVSQKWVEFLEREMGKWQTEIDGHRLRFRRGIFQGDSLALLLFVVSLIPITEKLKETGIGYKMEKNGRAVSHLWYMDDLKMYASSRKMLQKQVETLEKASRDSGLEFGLGKCAAVTMTRGKCVDGDGLRTSSGDKIEEVKEGYKYLGVIEKDRTDHEEMKMRLRKEYKRRVRKVLQKSALNGQNSIKAINTWAIPVLRYSAGIVRWNKNELRELDRETRKILAAERAFNLNGDVDRLYMARHKGGKGLLSVEETVEAEALGLKEYVEEQPRGSLLEVTKELKKIRTESEGKKIYQSRMESERQTRYRQKAMHGEYWRNTEKCDREESNKWLKKAGLKRETEALIMAAQEQAIRTNWVKKHIDRRVEVSDKCRLCKKEAETVDHLIAGCEKLAQNEYKFRHDKVGRMVHWSLSRQHGLEAGDKWYEHKPQGVIENEKVKILWDFNIQTSKVIEARRPDIVVVDKEKRLGTVIDIAVPKDRNVESKEKEKIDKYRELAEEIERLWKLKKVEVVPVVVGALGAVSKKHKRYLEELGGTVAQK

SEQ ID NO: 8682 - protein, 999 aa, Hofstenia miamia
MKTRIEKTFDLAVFSFYVLLKRLPHLGSQRYQTASCESGLCIKSGINLYNNNNNNNNNNNNNNNNNKSKNKFKLPVPRGVKKSKLAVETAKVNKVLERIDARSVTEVNSLVYAGGWEVLKNVGMEMKKKRQQEDKGDRKPAWERRIENKVAKIRQQIGKIRTSKAVQDRCRVGKGKTIETAREELKQRLVAEAEKLRKYRARAKQARDNMKFETQEGRFYKELDAGEKATARAGEDAVRFWENIWGSAGPEIENVQIQKEARQEEEVITTVRLKEALKKMKNWKAPGRDEVHGYWLKKFTSVHERLAAALEECVVSGCPEWMVVGKTFLIQKDPKKGSEASNFRPITCLPTTWKLLTSVISSRLACYLEQNRLIPEEQKGCRTKTRGCKDQLLIDQAVVENCRRRKTNLAMAWIDYRKAYDSISHRWVLRTLEANGVSRKWVEFLEREMAKWQTEIDGHRLRFRRGIFQGDSLAPLLFVVSLIPITEKLKETGIGYKMEKNGREVSHLWYMDDLKMYASSRKMLQKQVETLEKASRDSGLEFGLGKCAAVTMTRGKCVDGEGLRTSSGDKIEEVKEGYKYLGVIEKDRTDHMEMKMRLRKEYKRRVRKVLQKSALNGQNSIKAINTWAIPVLRYSAGIVRWNKNELRELDRETRKILAAERAFNLNGDVDRLYMTRHKGGKGLLSVEETVEAEALGLKEYVEEQPEGSLLEVTKELKKIRTESEGKKIYQSRMESERQTRYRQKAMHGEYWRNTEKCDREESNKWLKKAGLKRETEALIMAAQEQAIRTNWVKKHIDRRVEVSDKCRLCKKEAETVDHLIAGCEKLAQNEYKFRHDKVGRMVHWSLSRQHGLEAGDKWYEHKPQGVIENEKVKILWDFNIQTSKVIEARRPDIVVVDKEKRLGTVIDIAVPKDRNVESKEKEKIDKYRELAEEIERLWKLKKVEVVPVVVGALGAVSKKHTRYLEELGVPKWGGAVAQKAALLGTARVLRKALRLPGNW

SEQ ID NO: 8683 - protein, 1095 aa, Hofstenia miamia
MKSHDRAKALSPRQAFNGQRVLRISGQQADSTIGSVDSRSGSTGSTQTNGQRHKWTDEQNRTALECYRRSRPDERGYRKRMLEEWRKARTGLEVTEQRLAGQVRKLQLDESKGKKRVEQVKQREDEVIDVETEVAEVADAETEAAIKEKMKEEIGERARLPIPRRVKRSKLAVETAKVNKVLERIDARSVTEVNSLVYAGACEVLKNVGVEIKKKRWQEDKGDRKPAWERRIENKVAKIRQQIGKIRTSKAVQDRCRVGKGKTIETAREELKQRLVAEAEKLRKYRARAKQARDNMKFETQEGRFYKELDAGEKATARAGEDAVRFWENIWGSAGPEIENVQIQKEARQEEEVITTVRLKEALKKMKNWKAPGRDEVHGYWLKKFTSVHERLAAALEECVVSGCPEWMVVGKTFLIQKDPKKGSEASNFRPITCLPTTWKLLTSVISSRLACYLEQNRLIPEEQKGCRTKTRGCKDQLLIDQAVVENCRRRKTNLAMAWIDYRKAYDSISHRWVLRTLEANGVSRKWVEFLEREMAKWQTEIDGHRLRFRRGIFQGDSLAPLLFVVSLIPITEKLKETGIGYKMEKNGREVSHLWYMDDLKMYASSRKMLQKQVETLEKASRDSGLEFGLGKCAAVTMTRGKCVDGEGLRTSSGDKIEEVKEGYKYLGVIEKDRTDHMEMKMRLRKEYKRRVRKVLQKSALNGQNSIKAINTWAIPVLRYSAGIVRWNKNELRELDRETRKILAAERAFNLNGDVDRLYMTRHKGGKGLLSVEETVEAEALGLKEYVEEQPEGSLLEVTKELKKIRTESEGKKIYQSRMESERQTRYRQKAMHGEYWRNTEKCDREESNKWLKKAGLKRETEALIMAAQEQAIRTNWVKKHIDRRVEVSDKCRLCKKEAETVDHLIAGCEKLAQNEYKFRHDKVGRMVHWSLSRQHGLEAGDKWYEHKPQGVIENEKVKILWDFNIQTSKVIEARRPDIVVVDKEKRLGTVIDIAVPKDRNVESKEKEKIDKYRELAEEIERLWKLKKVEVVPVVVGALGAVSKKHKRYLEELGVPKWGGAVAQTAALLGTVMVLREALRLSGNLCVPRTERIPA

SEQ ID NO: 8684 - protein, 1085 aa, Hofstenia miamia
MKSHDRAKALSPRQAFNGQRVLRISGQQADSTIGSVDSRSGSTGSTQTNGQRHKWTDEQNRTALECYRRSRPDERGYRKRMLEEWRKARTGLEVTEQRLAGQVRKLQLDESKGKKRVEQVKQREDEVIDVETEVAEVADAETEAAIKEKMKEEIGERARLPIPRRVKRSKLAVETAKVNKVLERIDARSVTEVNSLVYAGACEVLKNVGVEIKKKRWQEDKGDRKPAWERRIENKVAKIRQQIGKIRTSKAVQDRCRVGKGKTIETAREELKQRLVAEAEKLRKYRARAKQARDNMKFETQEGRFYKELDAGEKATARAGEDAVRFWENIWGSAGPEIESVQIQKEARQEEEVITTVRLKEALKKMKNWKAPGRDEVHGYWLKKFTSVHERLAVALEECVVSGCPEWMVVGRTFLIQKDPKKGSEASNFRPITCLPTTWKLLTSVISSRLACYLEQNRLIPEEQKGCRTKTRGCKDQLLIDQAVVENCRRRKTNLAMAWIDYRKAYDSISHRWVLRTLEANGVSRKWVEFLEREMAKWQTEIDGHRLRFRRGIFQGDSLAPLLFVVSLIPITEKLKETGIGYKMEKNGREVSHLWYMDDLKMYASSRKMLQKQVETLEKASRDSGLEFGLGKCAAVTMTRGKCVDGEGLRTSSGDKIEEVKEGYKYLGVIEKDRTDHMEMKMRLRKEYKRRVRKVLQKSALNGQNSIKAINTWAIPVLRYSAGIVRWNKNELRELDRETRKILAAERAFNLNGDVDRLYMTRHKGGKGLLSVEETVEAEALGLKEYVEEQPKGSLLEVTKELKKIRTESEGKKIYQSRMESERQTRYRQKAMHGEYWRNTEKCDREESNKWLKKAGLKRETEALIMAAQEQAIRTNWVKKHIDRRVEVSDKCRLCKKEAETVDHLIAGCEKLAQNEYKFRHDKVGRMVHWSLSRQHGLEAGDKWYEHKPQGVIENEKVKILWDFNIQTSKVIEARRPDIVVVDKEKRLGTVIDIAVPKDRNVESKEKEKIDKYRELAEEIERLWKLKKVEVVPVVVGALGAVSKKHTRYLEELGVPKWGGAVAQKAALLGTARVLRKALRLPGNW

SEQ ID NO: 8685 - protein, 1085 aa, Hofstenia miamia
MKSHDRAKALSPRQAFNGQRVLRISGQQADSTIGSVDSRSGSTGSTQTNGQRHKWTDEQNRTALECYRRSRPDERGYRKRMLEEWRKARTGLEVTEQRLAGQVRKLQLDESKGKKRVEQVKQREDEVIDVETEVAEVADAETEAAIKEKMKEEIGERARLPIPRRVKRSKLAVETAKVNKVLERIDARSVTEVNSLVYAGACEVLKNVGVEIKKKRWQEDKGDRKPAWERRIENKVAKIRQQIGKIRTSKAVQDSCRVGKGKTIETAREELKQRLVAEAEKLRKYRARAKQARDNMKFETQEGRFYKELDAGEKATARAGEDAVRFWENIWGSEGPEIESEQMQKEFRQEKEVITTAKLKKALKKMKNWKAPGRDEVHGYWLKKFTSVHERLAAALEECVVSGCPEWMVVGKTFLIQKDPKKGSEASNFRPITCLPTTWKLLTSVISSRLACYLEQNRLIPEEQKGCRTKTRGCKDQLLIDQAVVENCRRRKTNLAMAWIDYRKAYDSISHRWVLRTLEANGVSRKWVEFLEREMAKWQTEIDGHRLRFRRGIFQGDSLAPLLFVVSLIPITEKLKETGIGYKMEKNGREVSHLWYMDDLKMYASSRKMLQKQVETLEKASRDSGLEFGLGKCAAVTMTRGKCVDGEGLRTSSGDKIEEVKEGYKYLGVIEKDRTDHMEMKMRLRKEYKRRVRKVLQKSALNGQNSIKAINTWAIPVLRYSAGIVRWNKNELRELDRETRKILAAERAFNLNGDVDRLYMTRHKGGKGLLSVEETVEAEALGLKEYVEEQPEGSLLEVTKELKKIRTESEGKKIYQSRMESERQTRYRQKAMHGEYWRNTEKCDREESNKWLKKAGLKRETEALIMAAQEQAIRTNWVKKHIDRRVEVSDKCRLCKKEAETVDHLIAGCEKLAQNEYKFRHDKVGRMVHWSLSRQHGLEAGDKWYEHKPQGVIENEKVKILWDFNIQTSKVIEARRPDIVVVDKEKRLGTVIDIAVPKDRNVESKEKEKIDKYRELAEEIERLWKLKKVEVVPVVVGALGAVSKKHTRYLEELGVPKWGGAVAQKAALLGTARVLRKALRLPGNW

SEQ ID NO: 8686 - protein, 1116 aa, Hofstenia miamia
MKSSWGRKVSKALVGNFLGECESKIKHKITLMRSHDRAKALSPRQAFNGQRVLRISGQQADSTIGSVDSRSGSTGSTQTNGQRHKWTDEQNRTALECYRRSRPDERGYRKRMLEEWRKARTGLEVTEQRLAGQVRKLQLDESKGKKRVEQVKQREDEVIDVETEVAEVADAETEAAIKEKMKEEIGERARLPVPRGVKKSKLAVETAKVNKVLERIDARSVTEVNSLVYAGACEVLKNVGVEIKKKRWQEDKGDRKPAWERRIENKVAKIRQQIGKIRTSKAVQDRCRVGKGKTIETAREELKQRLVAEAEKLRKYRARAKQARDNMKFETQEGRFYKELDAGEKATARAGEDAVRFWENIWGSAGPEIENVQMQKEVRQEEEVITTVRLKEALKKMKNWKAPGRDEVHGYWLKKFTSVHERLAAALEECVVSGCPEWMVVGRTFLIQKDPKKGSEASNFRPITCLPTTWKLLTSVISSRLACYLEQNRLIPEEQKGCRTKTRGCKDQLLIDQAVVENCRRRKTNLAMAWIDYRKAYDSISHKWVLKTLEANGVSQKWVEFLEREMGKWQTEIDGHRLRFRRGIFQGDSLAPLLFVVSLIPITEKLKETGIGYKMEKNGRAVSHLWYMDDLKMYASSRKMLQKQVETLEKASRDSGLEFGLGKCAAVTMTRGKCVDGEGLRTSSGDKIEEVKEGYKYLGVIEKDRTDHMEMKMRLRKEYKRRVRKVLQKSALNGQNSIKAINTWAIPVLRYSAGIVRWNKNELRELDRETRKILAAERAFNLNGDVDRLYMTRHKGGKGLLSVEETVEAEALGLKEYVEEQPEGSLLEVTKELKKIRTESEGKKIYQSRMESERQTRYRQKAMHGEYWRNTEKCDREESNKWLKKAGLKRETEALIMAAQEQAIRTNWVKKHIDRRVEVSDKCRLCKKEAETVDHLIAGCEKLAQNEYKFRHDKVGRMVHWSLSRQHGLEAGDKWYEHKPQGVIENEKVKILWDFNIQTSKVIEARRPDIVVVDKEKRLGTVIDIAVPKDRNVESKEKEKIDKYRELAEEIERLWKLKKVEVVPVVVGALGAVSKKHKRYLEELGVPKWGGAVAQKAALLGTARVLRKALRLPGNW

SEQ ID NO: 8687 - protein, 1082 aa, Hofstenia miamia
MIVKPKEKALSPRQALNGQRLRRISGQQADSTIGSVDSRSGSIGSTQTNGQRHKWTDEQNRIALECYRRSRTDERKRMLEEWKKEETGLEVTEQRLAGRVRKLQLDESKGKKRVEQVKQREDEVIDVETEVAEVADAETEAAIKEKMKEEIGERTRLPIPRGVKRSKLAVETAKVNKVLERIDARSVTEVNSLVYAGACEVLKNVGVEIKKKRWQEDKGDRKPAWERRIENKVAKIRQQIGKIRTSKAVQDRCRVGKGKTIETAREELKQRLVAEAEKLRKYRARAKQARDNIKFETQEGRFYKELDAGEKATARAGEDAVRFWENIWGSAGPEIENVQMQKEARQEEEVITTVRLKEALKKMKNWKAPGRDEVHGYWLKKFTSVHERLAAALEECVVSGCPEWMVVGKTFLIQKDPKKGSEASNFRPITCLPTTWKLLTSVISSRLACYLEQNRLIPEEQKGCRTKTRGCKDQLLIDQAVVENCRRRKTNLAMAWIDYRKAYDSISHRWVLRTLEANGVSRKWVEFLEREMAKWQTEIDGHRLRFRRGIFQGDSLAPLLFVVSLIPITEKLKETGIGYKMEKNGRAVSHLWYMDDLKMYASSRKMLQKQVETLEKASRDSGLEFGLGKCAAVTMTRGKCVDGEGLRTSSGDKIEEVKEGYKYLGVIEKDRTDHMEMKMRLRKEYKRRVRKVLQKSALNGQNSIKAINTWAIPVLRYSAGIVRWNKNELRELDRETRKILAAERAFNLNGDVDRLYMTRHKGGKGLLSVEETVEAEALGLKEYVEEQPEGSLLEVTKELRKIRTESEGKKIYQSRMESERQTRYRQKAMHGEYWRNTEKCDREESNKWLKKAGLKRETEALIMAAQEQAIRTNWVKKHIDRRVEVSDKCRLCKKEAETVDHLIAGCEKLAQNEYKFRHDKVGRMVHWSLSRQHGLEAGDKWYEHKPQGVIENEKVKILWDFNIQTSKVIEARRPDIVVVDKEKRLGTVIDIAVPKDRNVESKEKEKIDKYRELAEEIERLWKLKKVEVVPVVVGALGAVSKKHKRYLEELGVPKWGGAVAQKAALLGTARVLRKALRLPGNW

SEQ ID NO: 8688 - protein, 1085 aa, Hofstenia miamia
MRSHDRAKALSPRQAFNGQRVLRISGQQADSTIGSVDSRSGSIGSTQTNGQRHKWTDEQNRTALECYRRSRPDERGYRKRMLEEWRKARTGLEVTEQRLAGQVRKLQLDESKGKKRVEQVKQREDEVIDVETEVAEVADAETEAAIKEKMKEEIGERARLPVPRRVKRSKLAVETAKVNKVLERIDARSVTEVNSLVYAGACEVLKNVGVEMKKKRRQEDKGDRKPAWERRIENKVAKIRQQIGKIRTSKAVQDRCRVGKGKTIETAREELKQRLVAEAEKLRKYRARAKQARDNMKFETQEGRFYKELDAGEKATARAGEDAVRFWENIWGSAGPEIENVQIQKEARQEEEVITTVRLKEALKKMKNWKAPGRDEVHGYWLKKFTSVHERLAAALEECVVSGCPEWMVVGKTFLIQKDPKKGSEASNFRPITCLPTTWKLLTSVISSRLACYLEQNRLIPEEQKGCRTKTRGCKDQLLIDQAVVENCRRRKTNLAMAWIDYRKAYDSISHKWVLKTLEANGVSQKWVEFLEREMGKWQTEIDGHRLRFRRGIFQGDSLAPLLFVVSLIPITEKLKETGIGYKMEKNGRAVSHLWYMDDLKMYASSRKMLQKQVETLEKASRDSGLEFGLGKCAAVTMTRGKCVDGEGLRTSSGDKIEEVKEGYKYLGVIEKDRTDHEEMKMRLRKEYKRRVRKVLQKSALNGQNSIKAINTWAIPVLRYSAGIVRWNKNELRELDRETRKILAAERAFNLNGDVDRLYMARHKGGKGLLSVEETVEAEALGLKEYVEEQPKGSLLEVTKELKKIRTESEGKKIYQSRMESERQTRYRQKAMHGEYWRNTEKCDREESNKWLKKAGLKRETEALIMAAQEQAIRTNWVKKHIDRRVEVSDKCRLCKKEAETVDHLIAGCEKLAQNEYKFRHDKVGRMVHWSLSRQHGLEAGDKWYEHKPQGVIENEKVKILWDFNIQTSKVIEARRPDIVVVDKEKRLGTVIDIAVPKDRNVESKEKEKIDKYRELAEEIERLWKLKKVEVVPVVVGALGAVSKKHKRYLEELGVPKWGGAVAQKAALLGTARVLRKALRLPGNW

SEQ ID NO: 8689 - protein, 1085 aa, Hofstenia miamia
MKSHDRAKALSPRQAFNGQRVLRISGQQADSTIGSVDSRSGSTGSTQTNGQRHKWTDEQNRTALECYRRSRPDERGYRKRMLEEWRKARTGLEVTEQRLAGQVRKLQLDESKGKKRVEQVKQREDEVIDVETEVAEVADAETEAAIKEKMKEEIGERARLPIPRRVKRSKLAVETAKVNKVLERIDARSVTEVNSLVYAGACEVLKNVGVEIKKKRWQEDKGDRKPAWERRIENNVAKIRQQIGKIRTSKAVQDRCRVGKGKTIETAREELKQRLVAEAEKLRKYRARAKQARDNMKFETQEGRFYKELDAGEKATARAGEDAVRFWENIWGSAGPEIESVQIQKEVRQEEEVITTAKLKEALKKMKNWKAPGRDEVHGYWLKKFTSVHERLAAALEECVVSGCPEWMVVGKTFLIQKDPKKGSEASNFRPITCLPTTWKLLTSVISSRLACYLEQNRLIPEEQKGCRTKTRGCKDQLLIDQAVVENCRRRKTNLAMAWIDYRKAYDSISHRWVLRTLEANGVSRKWVEFLEREMAKWQTEIDGHRLRFRRGIFQGDSLAPLLFVVSLIPITEKLKETGIGYKMEKNGREVSHLWYMDDLKMYASSRKMLQKQVETLEKASRDSGLEFGLGKCAAVTMTRGKCVDGEGLRTSSGDKIEEVKEGYKYLGVIEKDRTDHMEMKMRLRKEYKRRVRKVLQKSALNGQNSIKAINTWAIPVLRYSAGIVRWNKNELRELDRETRKILAAERAFNLNGDVDRLYMTRHKGGKGLLSVEETVEAEALGLKEYVEEQPEGSLLEVTKELKKIRTESEGKKIYQSRMESERQTRYRQKAMHGEYWRNTEKCDREESNKWLKKAGLKRETEALIMAAQEQAIRTNWVKKHIDRRVEVSDKCRLCKKEAETVDHLIAGCEKLGQNEYKFRHDKVGRMVHWSLSRQHGLEAGDKWYEHKPQGVIENEKVKILWDFNIQTSKVIEARRPDIVVVDKEKRLGTVIDIAVPKDRNVESKEKEKIDKYRELAEEIERLWKLKKVEVVPVVVGALGAVSKKHTRYLEELGVPKWGGAVAQKAALLGTARVLRKALRLPGNW

SEQ ID NO: 8690 - protein, 1005 aa, Hofstenia miamia
MLEEWRKARTGLEVTEQRLAGQVRKLQLDESRGKKRVEQAKQREDEVIDVETEVAEVADAETEAAIKEKMKEEIGERTRLPIPRGVKKSKLAVETAKVNKVLERIVVRSVTEVNSLVYAGACEVLKNVGMEMKKKRRQEDKGDRKPAWERRIENKVAKIRQQIGKIRTSKAVQDRCRVGKGKTIETAREELKQRLVAEAEKLRKYRARAKQARDNMKFETQEGRFYKELDAGGKATAKAGEDAVRFWENIWGSAGPEIESVQMQKEVRQEEEVITTVRLKEALKKMKNWKAPGRDEVHGYWLKKFTSVHERLAVALEECVVSGCPEWMVVGRTFLIQKDPKKGSEASNFRPITCLPTTWKLLTSVISNRLACYLEQNRLIPEEQKGCRTKTRGFFFFFLIDQAVVENCRRRKTNLAMAWIDYRKAYDSISHKWVLKTLEANGVSQKWVEFLEREMGKWQTEIDGHRLRFRRGIFQGDSLAPLLFVVSLIPITEKLKETGIGYKMEKNGRAVSHLWYMDDLKMYASSRKMLQKQVETLEKASRDSGLEFGLGKCAAVTMTRGKCADEEGLRTSSGDKIEEVKEGYKYLGVIEKDRTDHVEMKMRLRKEYKRRVRKVLQKSALNGQNSIKAINTWAIPVLRYSAGIVRWNKNELRELDRETRKILAAERAFNLNGDVDRLYMARHKGGKGLLSVEETVEAEALGLKEYVEEQPRGSLLEVTKELKKIRTESEGKKIYQSRMESERQTRYRQKAMHGEYWRNTEKCDREESNKWLKKAGLKRETEALIMAAQEQAIRTNWVKKHIDRRVEVSDKCRLCKKEAETVDHLIAGCEKLAQNEYKFRHDKVGRMVHWSLSRKHGLEAGDKWYEHKPRGVIENEKVKILWDFNIQTSKVIEARRPDIVVVDKEKRLGTVIDIAVPKDRNVESKEKEKIDKYRELAEEIERLWKLKKVEVVPVVVGALGAVSKKHKRYLEELGVPKWGGAVAQKAALLGTARVLRKALRLPGNW

SEQ ID NO: 8691 - protein, 1085 aa, Hofstenia miamia
MKSHDRAKALSPRQAFNGQRVLRISGQQADSTIGSVDSRSGSTGSTQTNGQRHKWTDEQNRTALECYRRSRPDERGYRKRMLEEWRKARTGLEVTEQRLAGQVRKLQLDESKGKKRVEQVKQREDEVIDVETEVAEVADAETEAAIKEKMKEEIGERARLPVPRRVKRSKLAVETAKVNKVLERIDARSVTEVNSLVYAGACEVLKNVGVEIKKKRWQEDKGDRKPAWERRIENKVAKIRQQIGKIRTSKAVQDRCRVGKGKTIETAREELKQRLVAEAEKLRKYRARAKQARDNMKFETQEGRFYKELDAGEKATARAGEDAVRFWENIWGSAGPEIENVQIQKEARQEEEVITTVRLKEALKKMKNWKAPGRDEVHGYWLKKFTSVHERLAAALEECVVSGCPEWMVVGKTFLIQKDPKKGSEASNFRPITCLPTTWKLLTSVISSRLACYLEQNRLIPEEQKGCRTKTRGCKDQLLIDQAVVENCRRRKTNLAMAWIDYRKAYDSISHRWVLRTLEANGVSRKWVEFLEREMGKWQTEIDGHRLRFRRGIFQGDSLAPLLFVVSLIPITEKLKETGIGYKMEKNGRAVSHLWYMDDLKMYASSRKMLQKQVETLEKASRDSGLEFGLGKCAAVTMTRGKCVDGEGLRTSSGDKIEEVKEGYKYLGVIEKDRTDHMEMKMRLRKEYKRRVRKVLQKSALNGQNSIKAINTWAIPVLRYSAGIVRWNKNELRELDRETRKILAAERAFNLNGDVDRLYMTRHKGGKGLLSVEETVEAEALGLKEYVEEQPEGSLLEVTKELKKIRTESEGKKIYQSRMESERQTRYRQKAMHGEYWRNTEKCDREESNKWLKKAGLKRETEALIMAAQEQAIRTNWVKKHIDRRVEVSDKCRLCKKEAETVDHLIAGCEKLAQNEYKFRHDKVGRMVHWSLSRQHGLEAGDKWYEHKPQGVIENEKVKILWDFNIQTSKVIEARRPDIVVVDKEKRLGTVIDIAVPKDRNVESKEKEKIDKYRELAEEIERLWKLKKVEVVPVVVGALGAVSKKHTRYLEELGVPKWGGAVAQKAALLGTARVLRKALRLPGNW

SEQ ID NO: 8692 - protein, 1008 aa, Hofstenia miamia
MLEEWRKARTGLEVTEQRLAGQVRKLQLDESRGKKRVEQAKQREDEVIDVETEVAEAAEPVDAETEAAIKEKMKEEIGERTRLPVPRGVKRSKLAVETAKVNKVLERIVVRSVTEVNSLVYAGACEVLKNVGMEMKKKRRQEDKGDRKPAWERRIENKVAKIRQQIGKIRTSKAVQDRCRVGKGKTIETAREELKQRLVAEAEKLRKYRARAKQARDNMKFETQEGRFYKELDAGGKATAKAGEDAVRFWENIWGSAGPEIESVQMQKEVRQEEEVITTVRLKEALKKMKNWKAPGRDEVHGYWLKKFTSVHERLAVALEECVVSGCPEWMVVGRTFLIQKDPKKGSEASNFRPITCLPTTWKLLTSVISSRLACYLEQNRLIPEEQKGCRTKTRGCKDQLLIDQAVVENCRRRKTNLAMAWIDYRKAYDSISHRWVLRTLEANGVSRKWVEFLEREMAKWQTEIDGHRLRFRRGIFQGDSLAPLLFVVSLIPITEKLKETGIGYKMEKNGRAVSHLWYMDDLKMYASSRKMLQKQVETLEKASRDSGLEFGLGKCAAVTMTRGKCVDGEGLRTSSGDKIEEVKEGYKYLGVIEKDRTDHVEMKMRLRKEYKRRVRKVLQKSALNGQNSIKAINTWAIPVLRYSAGIVRWNKNELRELDRETRKILAAERAFNLNGDVDRLYMARHKGGKGLLSVEETVEAEALGLKEYVEEQPEGSLLEVTKELKKIRTESEGKKIYQSRMESERQTRYRQKAMHGEYWRNTEKCDREESNKWLKKAGLKRETEALIMAAQEQAIRTNWVKKHIDRRVEVSDKCRLCKKEAETVDHLIAGCEKLAQNEYKFRHDKVGRMVHWSLSRQHGLEAGDKWYEHKPQGVIENEKVKILWDFNIQTSKVIEARRPDIVVVDKEKRLGTVIDIAVPKDRNVESKEKEKIDKYRELAEEIERLWKLKKVEVVPVVVGALGAVSKKHKRYLEELGVPKWGGAVAQKAALLGTARVLRKALRLPGNW

SEQ ID NO: 8693 - protein, 1063 aa, Hofstenia miamia
MRVKLKEKALSPRQALNGQRVRRISGQVDSTIGSVDSRSGSIGSTQTNGQRHKWTDEQNRTALECYRRSRPDERGYRKRMLEEWRKAETGLEVTEQRLAGQVRKLQLDESKGKKRVEQAKQREDEVIDVEAQLAEEAEPVDAETEAAIKEKMKEEIGERTRLPVPRGVKKSKLAVETAKVNKVLERIDARSVTEVNSLVYAGAWEVLKNVGMDIKKKRRQEDKGDSKPAWERRIENKVAKIRQQIGKIRTSKAVQDRCRVGKGKTIETAREELKQRLVAEAEKLRKYRARAKQARDNMKFETQEGRFYKELDAGEKATARAGEDAVRFWENIWGSAGPEIESVQMQKEFRQEEEVITTAKLKEALKKMKNWKAPGRDEVHGYWLKKFTSVHERLAVALEECVVSGCPEWMVVGRTFLIQKDPKKGSEASNFRPITCLPTTWKLLTSVISSRLACYLEQNRLIPEEQKGCRTKTRGCKDQLLIDQAVVENCRRRKTNLAMAWIDYRKAYDSISHKWVLKTLEANGVSQKWVEFLEREREKWQTEIDGHRLRFRRGIFQGDSLAPLLFVVSLIPITEKLKETGIGYKMEKNGREVSHLWYMDDLKMYASSRKMLQKQVETLEKASRDSGLEFGLGKCAAVTMTRGKCVDGEGLRTSSGDKIEEVKEGYKYLGVIEKDRTDHMEMKMRLRKEYKRRVRKVLQKSALNGQNSIKAINTWAIPVLRYSAGIVRWNKNELRELDRETRKILAAERAFNLNGDVDRLYMTRHKGGKGLLSVEETVEAEALGLKEYVEEQPEGSLLEVTKELKKIRTESEGKKIYQSRMESERQTRYRQKAMHGEYWRNTEKCDREESNKWLKKAGLKRETEALIMAAQEQAIRTNWVKKHIDRRVEVSDKCRLCKKEAETVDHLIAGCEKLAQNEYKFRHDKVGRMVHWSLSRQHGLEAGDKWYEHKPQGVIENEKVKILWDFNIQTSKVIEARRPDIVVVDKEKRLGTVIDIAVPKDRNVESKEKEKIDKYRELAEEIERLWKLKKVEVVPVVVGAVSKKHKGYLEKLGVPKWGGALAA

SEQ ID NO: 8694 - protein, 1008 aa, Hofstenia miamia
MLEEWRKAGTGLEVTEQRLAGQVRKLQLDESKGKKRVEQAKQREDEVIDIEAQLAEEAEPVDAETEAAIKEKMKEEIGERTRLPVPRGVKKSKLAVETAKVNKVLERIDARSVTEVNSLVYAGACEVLKNVGLEMKKKRRQEDKGDRKPAWERRIENKVAKIRQQIGKIRTSKAVQDRCRVGKGKTIETAREELKQRLVAEAEKLRKYRARAKQARDNMKFETQEGRFYKELDAGEKATARAGEDAVRFWENIWGSVGPEIESEQMQKECRQEEEVITTARLKEALKKMKNWKAPGRDEIHGYWLKKFTSVHERLAAALEECVVSGCPEWMVVGRTFLIQKDPKKGSETSNFRPITCLPTTWKLLTSVISNRLACYLEQNRLIPEEQKGCRTKTRGCKDQLLIDQGVVENCRRRKTNLAMAWIDYRKAYDSISHRWVLRTLEANGVSRKWVEFLEREMAKWQTEIDGHRLRFRRGIFQGDSLAPLLFVVSLIPITEKLKETGIGYKMEKNGREVSHLWYMDDLKMYASSRKMLQKQVETLEKASRDSGLEFGLGKCAAVTMTRGKCVDGEGLRTSSGDKIEEVKEGYKYLGVIEKDRTDHMEMKMRLRKEYKRRVRKVLQKSALNGQNSIKAINTWAIPVLRYSAGIVRWNKNELRELDRETRKILAAERAFNLNGDVDRLYMTRHKGGKGLLSVEETVEAEALGLKEYVEEQPEGSLLEVTKELKKIRTESEGKKIYQSRMESERQTRYRQKAMHGEYWRNTEKCDKEESNKWLKKAELKRETEALIMAAQEQAIRTNWVKKHIDRRVEVSDKCRLCKKEAETVDHLIASCEKLAQNEYKFRHDKVGRMVHWSLSRQHGLEAGDKWYEHKPQGVIENEKVKILWDFNIQTSKVIEARRPDIVVVDKEKRLGTVIDIAVPKDRNVESKEKEKIDKYRELAEEIERLWKLKKVEVVPVVVGALGAVSKKHTRYLEELGVPKWGGAVAQKAALLGTARVLRKALRLPGNW

SEQ ID NO: 8695 - protein, 1008 aa, Hofstenia miamia
MLEEWRKAGTGLEVTEQRLAGQVRKLQLDESKGKKRVEQAKQREDEVIDIEAQLAEEAEPVDAETEAAIKEKMKEEIGERTRLPVPRGVKKSKLAVETAKVNKVLERIDARSVTEVNSLVYAGAWEVLKNVGVEIKKKRWQEDKGDRKPAWERRIENKVAKIRQQIGKIRTSKAVQDRCRVGKGKTIETAREELKQRLVAEAEKLRKYRARAKQARDNMKFETQEGRFYKELDAGEKATARAGEDAVRFWENIWGSAGPEIESEQMQKECRQEEEVITTARLKEALKKMKNWKAPGRDEIHGYWLKKFTSVHERLAAALEECVVSGCPEWMVVGRTFLIQKDPKKGSEASNFRPITCLPTTWKLLTSVISNRLACYLEQNRLIPEEQKGCRTKTRGCKDQLLIDQGVVENCRRRKTNLAMAWIDYRKAYDSISHRWVLRTLEANGVSRKWVEFLEREMAKWQTEIDGHRLRFRRGIFQGDSLAPLLFVVSLIPITEKLKETGIGYKMEKNGREVSHLWYMDDLKMYASSRKMLQKQVETLEKASRDSGLEFGLGKCAAVTMTRGKCVDGEGLRTSSGDKIEEVKEGYKYLGVIEKDRTDHMEMKMRLRKEYKRRVRKVLQKSALNGQNSIKAINTWAIPVLRYSAGIVRWNKNELRELDRETRKILAAERAFNLNGDVDRLYMTRHKGGKGLLSVEETVEAEALGLKEYVEEQPEGSLLEVTKELKKIRTESEGKKIYQSRMESERQTRYRQKAMHGEYWRNTEKCDKEESNKWLKKAELKRETEALIMAAQEQAIRTNWVKKHIDRRVEVSDKCRLCKKEAETVDHLIASCEKLAQNEYKFRHDKVGRMVHWSLSRQHGLEAGDKWYEHKPQGVIENEKVKILWDFNIQTSKVIEARRPDIVVVDKEKRLGTVIDIAVPKDRNVESKEKEKIDKYRELAEEIERLWKLKKVEVVPVVVGALGAVSKKHTRYLEELGVPKWGGAVAQKAALLGTARVLRKALRLPGNW

SEQ ID NO: 8696 - protein, 1088 aa, Hofstenia miamia
MKSHDRAKALSPRQAFNGQRVLRISGQQADSTIGSVDSRSGSIGSTQTNGQRHKWTDEQNRTALECYRRSRPDERGYRKRMLEEWRKARTGLEVTEQRLAGQVRKLQLDESRGKKRVEQAKQREDEVIDVETEVAEAAEPVDAETEAAIKEKMKEEIGERTRLPVPRGVKRSKLAVETAKVNKVLERIDARSVTEVNSLVYAGACEVLKNVGMEMKKKRRQEDKGDRKPAWERRIENKVAKIRQQIGKIRTSKAVQDRCRVGKGKTIETAREELKQRLVAEAEKLRKYRARAKQARDNMKFETQEGRFYKELDAGGKATAKAGEDAVRFWENIWGSAGPEIESVQMQKEVRQEEEVITTVRLKEALKKMKNWKAPGRDEVHGYWLKKFTSVHERLAAALEECVVSGCPEWMVVGKTFLIQKDPKKGSEASNFRPITCLPTTWKLLTSVISSRLACYLEQNRLIPEEQKGCRTKTRGCKDQLLIDQAVVENCRRRKTNLAMAWIDYRKAYDSISHKWVLKTLEANGVSQKWVEFLEREMGKWQTEIDGHRLRFRRGIFQGDSLAPLLFVVSLIPITEKLKETGIGYKMEKNGRAVSHLWYMDDLKMYASSRKMLQKQVETLEKASRDSGLEFGLGKCAAVTMTRGKCVDGEGLRTSSGDKIEEVKEGYKYLGVIEKDRTDHVEMKMRLRKEYKRRVRKVLQKSALNGQNSIKAINTWAIPVLRYSAGIVRWNKNELRELDRETRKILAAERAFNLNGDVDRLYMARHKGGKGLLSVEETVEAEALGLKEYVEEQPKGSLLEVTKELKKIRTESEGKKIYQSRMESERQTRYRQKAMHGEYWRNTEKCDREESNKWLKKAGLKRETEALIMAAQEQAIRTNWVKKHIDRRVEVSDKCRLCKKEAETVDHLIAGCEKLAQNEYKFRHDKVGRMVHWSLSRQHGLEAGDKWYEHKPQGVIENEKVKILWDFNIQTSKVIEARRPDIVVVDKEKRLGTVIDIAVPKDRNVESKEKEKIDKYRELAEEIERLWKLKKVEVVPVVVGALGAVSKKHKRYLEELGVPKWGGAVAQKAALLGTARVLRKALRLPGNW

SEQ ID NO: 8697 - protein, 936 aa, Hofstenia miamia
MKEEIGERTRLPVPRGVKRSKLAVETAKVNKVLERIVVRSVTEVNSLVYAGACEVLKNVGMEMKKKRRQEDKGDRKPAWERRIENKVAKIRQQIGKIRTSKAVQDRCRVGKGKTIETAREELKQRLVAEAEKLRKYRARAKQARDNMKFETQEGRFYKELDAGGKATAKAGEDAVRFWENIWGSAGPEIESVQMQKEVRQEEEVITTVRLKEALKKMKNWKAPGRDEVHGYWLKKFTSVHERLAVALEECVVSGCPEWMVVGRTFLIQKDPKKGSEASNFRPITCLPTTWKLLTSVISNRLACYLEQNRLIPEEQKGCRTKTRGCKDQLLIDQAVVENCRRRKTNLAMAWIDYRKAYDSISHKWVLKTLEANGVSQKWVEFLEREMGKWQTEIDGHRLRFRRGIFQGDSLAPLLFVVSLIPITEKLKETGIGYKMEKNGRAVSHLWYMDDLKMYASSRKMLQKQVETLEKASRDSGLEFGLGKCAAVTMTRGKCVDGDGLRTSSGDKIEEVKEGYKYLGVIEKDRTDHEEMKMRLRKEYKRRVRKVLQKSALNGQNSIKAINTWAIPVLRYSAGIVRWNKNELRELDRETRKILAAERAFNLNGDVDRLYMARHKGGKGLLSVEETVEAEALGLKEYVEEQPKGSLLEVTKELRKIRTESEGKKIYQSRMESERQTRYRQKAMHGEYWRNTEKCDREESNKWLKKAGLKRETEALIMAAQEQAIRTNWVKKHIDRRVEVSDKCRLCKKEAETVDHLIAGCEKLAQNEYKFRHDKVGRMVHWSLSRQHGLEAGDKWYEHKPQGVIENEKVKILWDFNIQTSNVIEARRPDIVVVDKEKRLGTVIDIAVPKDRNVESKEKEKIDKYRELAEEIERLWKLKKVEVVPVVVGALGAVSKKHKRYLEELGVPKWGGAVAQKAALLGTARVLRKALRLPGNW

SEQ ID NO: 8698 - protein, 936 aa, Hofstenia miamia
MKEEIGERTRLPVPRGVKRSKLAVETAKVNKVLERIVVRSVTEVNSLVYAGACEVLKNVGMEMKKKRRQEDKGDRKPAWERRIENKVAKIRQQIGKIRTSKAVQDRCRVGKGKTIETAREELKQRLVAEAEKLRKYRARAKQARDNMKFETQEGRFYKELDAGGKATAKAGEDAVRFWENIWGSAGPEIESVQMQKEVRQEEEVITTVRLKEALKKMKNWKAPGRDEVHGYWLKKFTSVHERLAVALEECVVSGCPEWMVVGRTFLIQKDPKKGSEASNFRPITCLPTTWKLLTSVISNRLACYLEQNRLIPEEQKGCRTKTRGCKDQLLIDQAVVENCRRRKTNLAMAWIDYRKAYDSISHKWVLKTLEANGVSQKWVEFLEREMGKWQTEIDGHRLRFRRGIFQGDSLAPLLFVVSLIPITEKLKETGIGYKMEKNGRAVSHLWYMDDLKMYASSRKMLQKQVETLEKASRDSGLEFGLGKCAAVTMTRGKCVDGEGLRTSSGDKIEEVKEGYKYLGVIEKDRTDHEEMKMRLRKEYKRRVRKVLQKSALNGQNSIKAINTWAIPVLRYSAGIVRWNKNELRELDRETRKILAAERAFNLNGDVDRLYMARHKGGKGLLSVEETVEAEALGLKEYVEEQPKGSLLEVTKELKKIRTESEGKKIYQSRMESERQTRYRQKAMHGEYWRNTEKCDREESNKWLKKAGLKRETEALIMAAQEQAIRTNWVKKHIDRRVEVSDKCRLCKKEAETVDHLIAGCEKLAQNEYKFRHDKVGRMVHWSLSRQHGLEAGDKWYEHKPQGVIENEKVKILWDFNIQTSKVIEARRPDIVVVDKEKRLGTVIDIAVPKDRNVESKEKEKIDKYRELAEEIERLWKLKKVEVVPVVVGALGAVSKKHKRYLEELGVPKWGGAVAQKAALLGTARVLRKALRLPGNW

SEQ ID NO: 8699 - protein, 1085 aa, Hofstenia miamia
MKSHDRAKALSPRQAFNGQRVLRISGQQADSTIGSVDSRSGSTGSTQTNGQRHKWTDEQNRTALECYRRSRPDERGYRKRMLEEWRKARTGLEVTEQRLAGQVRKLQLDESKGKKRVEQVKQREDEVIDVETEVAEVADAETEAAIKEKMKEEIGERARLPVPRRVKRSKLAVETAKVNKVLERIDARSVTEVNSLVYAGACEVLKNVGVEIKKKRRQEDKGDRKPAWERRIENKVAKIRQQIGKIRTSKAVQDRCRVGKGKTIETAREELKQRLVAEAEKLRKYRARAKQARDNMKFETQEGRFYKELDAGEKATARAGEDAVRFWENIWGSAGPEIESVQMQKEVRQEEEVITTVRLKEALKKMKNWKAPGRDEVHGYWLKKFTSVHERLAAALEECVVSGCPEWMVVGKTFLIQKDPKKGSEASNFRPITCLPTTWKLLTSVISSRLACYLEQNRLIPEEQKGCRTKTRGCKDQLLIDQAVVENCRRRKTNLAMAWIDYRKAYDSISHRWVLRTLEANGVSRKWVEFLEREMAKWQTEIDGHRLRFRRGIFQGDSLAPLLFVVSLIPITEKLKETGIGYKMEKNGRAVSHLWYMDDLKMYASSRKMLQKQVETLEKASRDSGLEFGLGKCAAVTMTRGKCVDGEGLRTSSGDKIEEVKEGYKYLGVIEKDRTDHMEMKMRLRKEYKRRVRKVLQKSALNGQNSIKAINTWAIPVLRYSAGIVRWNKNELRELDRETRKILAAERAFNLNGDVDRLYMARHKGGKGLLSVEETVEAEALGLKEYVEEQPKGSLLEVTKELKKIRTESEGKKVYQSRMESERQTRYRQKAMHGEYWRNTEKCDREESNKWLKKAGLKRETEALIMAAQEQAIRTNWVKKHIDRRVEVSDKCRLCKKEAETVDHLIAGCEKLAQNEYKFRHDKVGRMVHWSLSRQHGLEAGDKWYEHKPQGVIENEKVKILWDFNIQTSKVIEARRPDIVVVDKEKRLGTVIDIAVPKDRNVESKEKEKIDKYRELAEEIERLWKLKKVEVVPVVVGALGAVSKKHKRYLEELGVPKWGGAVAQKAALLGTARVLRKALRLPGNW

SEQ ID NO: 8700 - protein, 936 aa, Hofstenia miamia
MKEEIGERTRLPVPRGVKRSKLAVETAKVNKVLERIDARSVTEVNSLVYAGACEVLKNVGMEMKKKRRQEDKGDRKPAWERRIENKVAKIRQQIGKIRTSKAVQDRCRVGKGKTIETAREELKQRLVAEAEKLRKYRARAKQARDNMKFETQEGRFYKELDAGGKATAKAGEDAVRFWENIWGSAGPEIESEQMQKEFRQEEEVITTAKLKEALKKMKNWKAPGRDEVHGYWLKKFTSVHERLAVALEECVVSGCPEWMVVGRTFLIQKDPKKGSEASNFRPITCLPTMWKLLTSVISNRLACYLEQNRLIPEEQKGCRTKTRGCKDQLLIDQAVVENCRRRKTNLAMAWIDYRKAYDSISHRWVLKTLEANGVSQKWVEFLEREMGKWQTEIDGHRLRFRRGIFQGDSLAPLLFVVSLIPITEKLKETGIGYKMEKNGRAVSHLWYMDDLKMYASSRKMLQKQVETLEKASRDSGLEFGLGKCAAVTMTRGKCVDGDGLRTSSGDKIDEFKEGYKYLGVIEKDRTDHEEMKMRLRKEYKRRVRKVLQKSALNGQNSIKAINTWAIPVLRYSAGIVRWNKNELRELDRETRKVLAAERAFNLNGDVDMLYMARHKGGKGLLSVEETVEAEELGLKEYVEAQSRGSLLEVTKELRKIRNESEGKKVYQSRMESERQTRYRQKAMHGEYWRNTEKCDREESNKWLKKAGLKRETESLIMAAQEQAIRTNWVKKHIDRRVEVSDKCRLCKKEAETVDHLIAGCEKLAQNEYKFRHDKVGRMVHWSLSRQHGLEAGDKCYEHKPEGVIENEKLKILWEFNSLSMNVIEACSHHLIVVDKEKRLGTVIDIAVPKDRNVESKEKEKIDKYRELAEEIERLWKLKKVEVVPVVVGALGAVSKKHKRYLEELGVPKWGGAVAQKAALLGTARVLRKALRLPGNW

SEQ ID NO: 8701 - protein, 1005 aa, Hofstenia miamia
MLEEWRKARTGLEVTEQRLAGQVRKLQLDESKGKKRVEQVKQREDEVIDVETEVAEVADAETEAAIKEKMKEEIGERTRLPVPRRVKRSKLAVETAKVNKVLERIDARSVTEVNSLVYAGACEVLKNVGVEIKKKRWQEDKGDRKPAWERRIENKVAKIRQQIGKIRTSKAVQDRCRVGKGKTIETAREELKQRLVAEAEKLRKYRARAKQARDNMKFETQEGRFYKELDAGEKATARAGEDAVRFWENIWGSAGPEIENVQMQKEVRQEEEVITTVRLKEALKKMKNWKAPGRDEVHGYWLKKFTSVHERLAAALEECVVSGCPEWMVVGRTFLIQKDPKKGSEASNFRPITCLPTMWKLLTSVISNRLACYLEQNRLIPEEQKGCRTKTRGCKDQLLIDQAVVENCRRRKTNLAMAWIDYRKAYDSISHRWVLRTLEANGVSRKWVEFLEREMAKWQTEIDGHRLRFRRGIFQGDSLAPLLFVVSLIPITEKLKETGIGYKMEKNGREVSHLWYMDDLKMYASSRKMLQKQVETLEKASRDSGLEFGLGKCAAVTMTRGKCVDGEGLRTSSGDKIEEVKEGYKYLGVIEKDRTDHMEMKMRLRKEYKRRVRKVLQKSALNGQNSIKAINTWAIPVLRYSAGIVRWNKNELRELDRETRKILAAERAFNLNGDVDRLYMTRHKGGKGLLSVEETVEAEALGLKEYVEEQPEGSLLEVTKELKKIRTESEGKKIYQSRMESERQTRYRQKAMHGEYWRNTEKCDREESNKWLKKAGLKRETEALIMAAQEQAIRTNWVKKHIDRRVEVSDKCRLCKKEAETVDHLIAGCEKLAQNEYKFRHDKVGRMVHWSLSRQHGLEAGDKWYEHKPQGVIENEKVKILWDFNIQTSKVIEARRPDIVVVDKEKRLGTVIDIAVPKDRNVESKEKEKIDKYRELAEEIERLWKLKKVEVVPVVVGALGAVSKKHTRYLEELGVPKWGGAVAQKAALLGTARVLRKALRLPGNW

SEQ ID NO: 8702 - protein, 876 aa, Hofstenia miamia
MEMKKKRRQEDKGDRKPAWERRIENKVAKIRQQIGKIRTSKAVQDRCRVGKGKTIETAREELKQRLVAEAEKLRKYRARAKQARDNMKFETQEGRFYKELDAGGKATAKAGEDAVRFWENIWGSAGPEIESVQMQKEVRQEEEVITTVRLKEALKKMKNWKAPGRDEVHGYWLKKFTSVHERLAVALEECVVSGCPEWMVVGRTFLIQKDPKKGSEASNFRPITCLPTMWKLLTSVISNRLACYLEQNRLIPEEQKGCRTKTRGCKDQLLIDQAVVENCRRRKTNLAMAWIDYRKAYDSISHKWVLKTLEANGVSQKWVEFLEREMGKWQTEIDGHRLRFRRGIFQGDSLAPLLFVVSLIPITEKLKETGIGYKMEKNGRAVSHLWYMDDLKMYASSRKMLQKQVETLEKASRDSGLEFGLGKCAAVTMTRGKCVDGEGLRTSSGDKIEEVKEGYKYLGVIEKDRTDHEEMKMRLRKEYKRRVRKVLQKSALNGQNSIKAINTWAIPVLRYSAGIVRWNKNELRELDRETRKILAAERAFNLNGDVDRLYMARHKGGKGLLSVEETVEAEALGLKEYVEEQPEGSLLEVTKELKKIRTESEGKKIYQSRMESERQTRYRQKAMHGEYWRNTEKCDREESNKWLKKAGLKRETEALIMAAQEQAIRTNWVKKHIDRRVEVSDKCRLCKKEAETVDHLIAGCEKLAQNEYKFRHDKVGRMVHWSLSRQHGLEAGDKWYEHKPQGVIENEKVKILWDFNIQTSKVIEARRPDIVVVDKEKRLGTVIDIAVPKDRNVESKEKEKIDKYRELAEEIERLWKLKKVEVVPVVVGALGAVSKKHKRYLEELGVPKWGGAVAQKAALLGTARVLRKALRLPGNW

SEQ ID NO: 8703 - protein, 935 aa, Hofstenia miamia
MKEEIDERTRLPVPRGVKKSKLAVETAKVNKVLERIVVRNVTEVNSLVYAGACEVLKNVGMDMKKKRRQEDKGDRKPAWERRIENKVAKIRQQIGKIRTSKAVQDRCRVGKGKTIETAREELKQRLVAEAEKLRKYRARAKQARDNMKFETQEGRFYKELDAGEKATARAGEDAVRFWENIWGSAGPEIESVQMQKEVRQEEVITTVRLKEALKKMKNWKAPGRDEVHGYWLKKFTSVHERLAAALEECVVSGCPEWMVVGRTFLIQKDPKKGSEASNFRPITCLPTMWKLLTSVISNRLACYLEQNRLIPEEQKGCRTKTRGCKDQLLIDQAVVENCRRRKTNLAMAWIDYRKAYDSISHRWVLRTLEANGVSRKWVEFLEREMGKWQTEIDEHRLRFRRGIFQGDSLAPLLFVVSLIPITEKLKETGIGYKMEKNGRAVSHLWYMDDLKMYASSRKMLQKQVETLEKASRDSGLEFGLGKCAAVTMTRGKCVDGEGLRTSSGDKIEEVKEGYKYLGVIEKDRTDHMEMKMRLRKEYKRRVRKVLQKSALNGQNSIKAINTWAIPVLRYSAGIVRWNKNELRELDRETRKILAAERAFNLNGDVDRLYMTRHKGGKGLLSVEETVEAEALGLKEYVEEQPEGSLLEVTKELKKIRTESEGKKIYQSRMESERQTRYRQKAMHGEYWRNTEKCDREESNKWLKKAGLKRETEALIMAAQEQAIRTNWVKKHIDRRVEVSDKCRLCKKEAETVDHLIAGCEKLAQNEYKFRHDKVGRMVHWSLSRQHGLEAGDKWYEHKPQGVIENEKVKILWDFNIQTSKVIEARRPDIVVVDKEKRLGTVIDIAVPKDRNVESKEKEKIDKYRELAEEIERLWKLKKVEVVPVVVGALGAVSKKHKRYLEELGVPKWGGAVAQKAALLGTARVLRKALRLPGNW

SEQ ID NO: 8704 - protein, 936 aa, Hofstenia miamia
MKEEIGERSRLPVPRGVKRSKLAVETAKVNKVLERIDARSVTEVNSLVYAGACEVLKNVGVEIKKKRWQEDKGDRKPAWERRIENKVAKIRQQIGKIRTSKAVQDRCRVGKGKTIETAREELKQRLVAEAEKLRKYRARAKQARDNMKFETQEGRFYKELDAGEKATARAGEDAVRFWENIWGSAGPEIENVQIQKEARQEEEVITTVRLKEALKKMKNWIIIIIIIIHGYWLKKFTSVHERLAAALEECVVSGCPEWMVVGKTFLIQKDPKKGSEASNFRPITCLPTTWKLLTSVISSRLACYLEQNRLIPEEQKGCRTKTRGCKDQLLIDQAVVENCRRRKTNLAMAWIDYRKAYDSISHRWVLRTLEANGVSRKWVEFLEREMGKWQTEIDGHRLRFRRGIFQGDSLAPLLFVVSLIPITEKLKETGIGYKMEKNGRAVSHLWYMDDLKMYASSRKMLQKQVETLEKASRDSGLEFGLGKCAAVTMTRGKCVDGEGLRTSSGDKIEAVKEGYKYLGVIEKDRTDHVEMKMRLRKEYKRRVRKVLQKSALNGQNSIKAINTWAIPVLRYSAGIVRWNKNELRELDRETRKILAAERAFNLNGDVDRLYMTRHKGGKGLLSVEETVEAEALGLKEYVEEQPEGSLLEVTKELKKIRTESEGKKIYQSRMESERQTRYRQKAMHGEYWRNTEKCDREESNKWLKKAGLKRETEALIMAAQEQAIRTNWVKKHIDRRVEVSDKCRLCKKEAETVDHLIAGCEKLAQNEYKFRHDKVGRMVHWSLSRQHGLEAGDKWYEHKPQGVIENEKVKILWDFNIQTSKVIEARRPDIVVVDKEKRLGTVIDIAVPKDRNVESKEKEKIDKYRELAEEIERLWKLKKVEVVPVVVGALGAVSKKHKRYLEQLGVPKWGGAVAQKAALLGTARVLRKALRLPGNW

SEQ ID NO: 8705 - protein, 1085 aa, Hofstenia miamia
MKSHDRAKALSPRQAFNGQRVLRISGQQADSTIGSVDSRSGSTGSTQTNGQRHKWTDEQNRTALECYRRSRPDERGYRKRMLEEWRKARTGLEVTEQRLAGQVRKLQLDESKGKKRVEQVKQREDEVIDVETEVAEVADAETEAAIKEKMKEEIGERARLPIPRRVKRSKLAVETAKVNKVLERIDARSVTEVNSLVYAGACEVLKNVGVEIKKKRWQEDKGDRKPAWERRIENKVAKIRQQIGKIRTSKAVQDRCRVGKGKTIETAREELKQRLVAEAEKLRKYRARAKQARDNMKFETQEGRFYKELDAGEKATARAGEDAVRFWENIWGSAGPEIENVQIQKEARQEEEVITTVRLKEALKKMKNWKAPGRDEVHGYWLKKFTSVHERLAAALEECVVSGCPEWMVVGRTFLIQKDPKKGSEASNFRPITCLPTTWKLLTSVISSRLACYLEQNRLIPEEQKGCRTKTRGCKDQLLIDQAVVENCRRRKTNLAMAWIDYRKAYDSISHKWVLKTLEANGVSQKWVEFLEREMGKWQTEIDGHRLRFRRGIFQGDSLAPLLFVVSLIPITEKLKETGIGYKMEKNGRAVSHLWYMDDLKMYASSRKMLQKQVETLEKASRDSGLEFGLGKCAAVTMTRGKCVDGEGLRTSSGDKIEEVKEGYKYLGVIEKDRTDHMEMKMRLRKEYKRRVRKVLQKSALNGQNSIKAINTWAIPVLRYSAGIVRWNKNELRELDRETRKILAAERAFNLNGDVDRLYMTRHKGGKGLLSVEETVEAEALGLKEYVEEQPEGSLLEVTKELKKIRTESEGKKIYQSRMESERQTRYRQKAMHGEYWRNTEKCDREESNKWLKKAGLKRETEALIMAAQEQAIRTNWVKKHIDRRVEVSDKCRLCKKEAETVDHLIAGCEKLAQNEYKFRHDKVGRMVHWSLSRQHGLEAGDKWYEHKPQGVIENEKVKILWDFNIQTSKVIEARRPDIVVVDKEKRLGTVIDIAVPKDRNVESKEKEKIDKYRELAEEIERLWKLKKVEVVPVVVGALGAVSKKHKRYLEELGVPKWGGAVAQKAALLGTARVLRKALRLPGNW

SEQ ID NO: 8706 - protein, 1088 aa, Hofstenia miamia
MRVKPKEKALSPRQALNGQRVRRISGQVDSTIGSVDSRSGSIGSTQTNGQRHKWTDEQNRTALECYRRSRPDERGYRKRMLEEWRKAETGLEVTEQRLAGQVRKLQLDESKGKKRVEQAKQREDEVIDVEAQLAEEAEPVDAETEAAIKEKMKEEIGERTRLPVPRGVKKSKLAVETAKVNKVLERIDARSVTEVNSLVYAGAWEVLKNVGMDIKKKRRQEDKGDSKPAWERRIENKVAKIRQQIGKIRTSKAVQDRCRVGKGKTIETAREELKQRLVAEAEKLRKYRARAKQARDNMKFETQEGRFYKELDAGEKATARAGEDAVRFWENIWGSAGPEIESEQMHKEFRQEEEVITTAKLKEALKKMKNWKAPGRDEVHGYWLKKFTSVHERLAVALEECVVSGCPEWMVVGRTFLIQKDPKKGSEASNFRPITCLPTTWKLLTSVISSRLACYLEQNRLIPEEQKGCRTKTRGCKDQLLIDQAVVENCRRRKTNLAMAWIDYRKAYDSISHKWVLKTLEANGVSQKWVEFLEREMGKWQTEIDGHRLRFRRGIFQGDSLAPLLFVVSLIPITEKLKETGIGYKMEKNGRAVSHLWYMDDLKMYASSRKMLQKQVETLEKASRDSGLEFGLGKCAAVTMTRGKCVDGDGLRTSSGDKIEEVKEGYKYLGVIEKDRTDHEEMKMRLRKEYKRRVRKVLQKSALNGQNSIKAINTWAIPVLRYSAGIVRWNKNELRELDRETRKILAAERAFNLNGDVDRLYMARHKGGKGLLSVEETVEAEALGLKEYVEEQPKGSLLEVTKELKKIRTESEGKKIYQSRMESERQTRYRQKAMHGEYWRNTEKCDREESNKWLKKAGLKRETEALIMAAQEQAIRTNWVKKHIDRRVEVSDKCRLCKKEAETVDHLIAGCEKLAQNEYKFRHDKVGRMVHWSLSRQHGLEAGDKWYEHKPQGVIENEKVKILWDFNIQTSKVIEARRPDIVVVDKEKRLGTVIDIAVPKDRNVESKEKEKIDKYRELAEEIERLWKLKKVEVVPVVVGALGAVSKKHKRYLEDLGVPKWGADPMGKNRFSKIKIVNRIAMSSRYSTR

SEQ ID NO: 8707 - protein, 1085 aa, Hofstenia miamia
MRSHERAKALSPRQAFNGQRVLRISGQQADSTIGSVDSRSGSTGSTQTNGQRHKWTDEQNRTALECYRRSRPDERGYRKRMLEEWRKARTGLEVTEQRLAGQVRKLQLDESKGKKRVEQVKQREDEVIDVETEVAEVADAETEAAIKEKMKEEIGERARLPVPRRVKRSKLAVETAKVNKVLERIDARSVTEVNSLVYAGAWEVLKNVGMEMKKKRRQEDKGDRKPAWERRIENKVAKIRQQIGKIRTSKAVQDRCRVGKGKTIETAREELKQRLVAEAEKLRKYRARAKQARDNMKFETQEGRFYKELDAGEKATARAGEDAVRFWENIWGSAGPEIESVQMQKEVRQEEEVITTVRLKEALKKMKNWKAPGRDEVHGYWLKKFTSVHERLAVALEECVVSGCPEWMVVGRTFLIQKDPKKGSEASNFRPITCLPTTWKLLTSVISSRLACYLEQNRLIPEEQKGCRTKTRGCKDQLLIDQAVVENCRRRKTNLAMAWIDYRKAYDSISHRWVLKTLEANGVSRKWVEFLEREMAKWQTEIDGHRLRFRRGIFQGDSLAPLLFVVSLIPITEKLKETGIGYKMEKNGRAVSHLWYMDDLKMYASSRKMLQKQVETLEKASRDSGLEFGLGKCAAVTMTRGKCVDGEGLRTSSGDKIEEVKEGYKYLGVIEKDRTDHMEMKMRLRKEYKRRVRKVLQKSALNGQNSIKAINTWAIPVLRYSAGIVRWNKNELRELDRETRKILAAERAFNLNGDVDRLYMTRHKGGKGLLSVEETVEAEALGLKEYVEEQPEGSLLEVTKELKKIRTESEGKKIYQSRMESERQTRYRQKAMHGEYWRNTEKCDREESNKWLKKAGLKRETEALIMAAQEQAIRTNWVKKHIDRRVEVSDKCRLCKKEAETVDHLIAGCEKLAQNEYKFRHDKVGRMVHWSLSRQHGLEAGDKWYEHKPQGVIENEKVKILWDFNIQTSKVIEARRPDIVVVDKEKRLGTVIDIAVPKDRNVESKEKEKIDKYRELAEEIERLWKLKKVEVVPVVVGALGAVSKKHKRYLEELGVPKWGGAVAQKAALLGTARVLRKALRLPGNW

SEQ ID NO: 8708 - protein, 1084 aa, Hofstenia miamia
MRSHERAKALSPRQAFNGQRVLRISGQVDSTIGSVDSRSGSIGSTQTNGQRHKWTDEQNRTALECYRRSRPDERGYRKRMLEEWRKAGTGLEVTEQRLAGQVRKLQLDESKGKKRVEQVKQREDEVIDVETEVAEVADAETEAAIKEKIIIIIIIIIIIIIIRRVKRSKLAVETAKVNKVLERIDARSVTEVNSLVYAGACEVLKNVGVEIKKKRWQEDKGDRKPAWERRIENKVAKIRQQIGKIRTSKAVQDRCRVGKGKTIETAREELKQRLVAEAEKLRKYRARAKQARDNMKFETQEGRFYKELDAGEKATARAGEDAVRFWENIWGSAGPEIENVQIQKEARQEEEVITTVRLKEALKKMKNWKAPGRDEVHGYWLKKFTSVHERLAAALEECVVSGCPEWMVVGRTFLIQKDPKKGSEASNFRPITCLPTTWKLLTSVISSRLACYLEQNRLIPEEQKGCRTKTRGCKDQLLIDQAVVENCRRRKTNLAMAWIDYRKAYDSISHRWVLRTLEANGVSRKWVEFLEREMAKWQTEIDGHRLRFRRGIFQGDSLAPLLFVVSLIPITEKLKETGIGYKMEKNGRAVSHLWYMDDLKMYASSRKMLQKQVETLEKASRDSGLEFGLGKCAAVTMTRGKCVDGDGLRTSSGDKIEEVKEGYKYLGVIEKDRTDHEEMKMRLRKEYKRRVRKVLQKSALNGQNSIKAINTWAIPVLRYSAGIVRWNKNELRELDRETRKVLAAERAFNLNGDVDRLYMARHKGGKGLLSVEETVEAEALGLKEYVEAQPRGSILEVTKELRKIRTESEGKKIYQSRMESERQTRYRQKAMHGEYWRNTEKCDREESNKWLKKAGLKRETEAQIMAAQEQAIRTNWVKKHIDRRVEVSDKCRLCKKEAETVDHLIAGCEKLAQNEYKFRHDKVGRMVHWSLSRQHGLEAGDKWYEHKPQGVIENEKVKILWDFNIQTSKVIEARRPDIVVVDKEKRLGTVIDIAVPKDRNVESKEKEKIDKYRELAEEIERLWKLKKVEVVPVVVGALGAVSKKHTRYLEELGVPKWGGAVAQKAALLGTARVLRKALRLPGNW

SEQ ID NO: 8709 - protein, 1087 aa, Hofstenia miamia
MRVKLKEKALSPRQALNGQRVQRISGQVDSTIGSVDSRSGSIGSTPTNGQRHKWTVEQNRTALECYRRSRPDERGYRKRMLEEWRKAETGLEVTEQRLAGQVRKLQLDESKGKKRVEQAKQREDEVIDIEAQLAEEAEPVDAETEAAIKEKMKEEIGERTRLPVPRGVKKSKLAVETAKVNKVLERIDARSVTEVNSLVYAGAWEVLKNVGMEMKKKRQQEDKGDRKPAWEKRIENKVAKIRQQIGKIRTSKAVQDRCRVGKGKTIETAREELKQRLVAEAEKLRKYRARAKQARDNMKFETQEGRFYKELDAGEKATARAGEDAVRYWENIWESAGPEIESEQMHKEFRQEEEVITTAKLKEALKKMKNWKAPGRDEVHGYWLKKFTSVHERLAVALEECVVSGCPEWMVVGKTFLIQKDPKKGSEASNFRPITCLPTTWKLLTSVISSRLACYLEQNRLIPEEQKGCRTKTRGCKDQLLIDQAVVENCRRRKTNLAMAWIDYRKAYDSISHKWVLKTLEANGVSQKWVEFLEREMGKWQTEIDGHRLRFRRGIFQGDSLAPLLFVVSLIPITEKLKETGIGYKMEKNGRAVSHLWYMDDLKMYASSRKMLQKQVETLEKASRDSGLEFGLGKCAALTMTRGKCVDGDGLRTSSGDKIEEVKEGYKYLGVIEKDRTDHEEMKMRLRKEYKRRVRKVLQKSALNGQNSIKAINTWAIPVLRYSAGIVRWNKNELRELDRETRKILAAERAFNLNGDVDRLYMARHKGGKGLLSVEETVEAEALGLKEYVEEQPKGSLLEVTKELKKIRTESEGKKIYQSRMESERQTRYRQKAMHGEYWRNTEKCDREESNKWLKKAGLKRETEALIMAAQEQAIRTNWVKKHIDRRVEVSDKCRLCKKEAETVDHLIAGCEKLAQNEYKFRHDKVGRMVHWSLSRQHGLEAGDKWYEHKPQGVIENEKVKILWDFNIQTSKVIEARRPDIVVVDKEKRLGTVIDIAVPKDRNVESKEKEKIDKYRELAEEIERLWKLKKVEVVPVVVGALGAVSKKHTRYLEELGVPKWGGAVAQKAALLGTARVLRKALRLPGNW

SEQ ID NO: 8710 - protein, 1085 aa, Hofstenia miamia
MKSHDRAKALSPRQAFNGQRVLRISGQQADSTIGSVDSRSGSTGSTQTNGQRHKWTDEQNRTALECYRRSRPDERGYRKRMLEEWRKARMGLEVTEQRLAGQVRKLQLDESKGKKRVEQVKQREDEVIDVETEVAEVADAETEAAIKEKMKEEIGERARLPIPRRVKRSKLAVETAKVNKVLERIDARSVTEVNSLVYAGACEVLKNVGVEIKKKRRQEDKGDRKPAWERRIENKVAKIRQQIGKIRTSKAVQDRCRVGKGKTIETAREELKQRLVAEAEKLRKYRARAKQARDNMKFETQEGRFYKELDAGEKATARAGEDAVRFWENIWGSAGPEIENVQMQKEVRQEEEVITTVRLKEALKKMKNWKAPGRDEVHGYWLKKFTSVHERLAAALEECVVSGCPEWMVVGKTFLIQKDPKKGSEASNFRPITCLPTTWKLLTSVISSRLACYLEQNRLIPEEQKGCRTKTRGCKDQLLIDQAVVENCRRRKTNLAMAWIDYRKAYDSISHRWVLRTLEANGVSRKWVEFLEREMAKWQTEIDGHRLRFRRGIFQGDSLAPLLFVVSLIPITEKLKETGIGYKMEKNGREVSHLWYMDDLKMYASSRKMLQKQVETLEKASRDSGLEFGLGKCAAVTMTRGKCVDGEGLRTSSGDKIEEVKEGYKYLGVIEKDRTDHMEMKMRLRKEYKRRVRKVLQKSALNGQNSIKAINTWAIPVLRYSAGIVRWNKNELRELDRETRKILAAERAFNLNGDVDRLYMTRHKGGKGLLSVEETVEAEALGLKEYVEEQPEGSLLEVTKELKKIRTESEGKKIYQSRMESERQTRYRQKAMHGEYWRNTEKCDREESNKWLKKAGLKRETEALIMAAQEQAIRTNWVKKHIDRRVEVSDKCRLCKKEAETVDHLIAGCEKLAQNEYKFRHDKVGRMVHWSLSRQHGLEAGDKWYEHKPQGVIENEKVKILWDFNIQTSKVIEARRPDIVVVDKEKRLGTVIDIAVPKDRNVESKEKEKIDKYRELAEEIERLWKLKKVEVVPVVVGALGAVSKKHTRYLEELGVPKWGGAVAQKAALLGTARVLRKALRLPGNW

SEQ ID NO: 8711 - protein, 1001 aa, Hofstenia miamia
MEEGKNGIRSYRAEACREVRKLQLDESKGKKRVEQVKQREDEVIDVETEVAEVADAETEAAIKEKMKEEIGERARLPIPRRVKRSKLAVETAKVNKVLERIDARSVTEVNSLVYAGACEVLKNVGVEIKKKRWQEDKGDRKPAWERRIENNVAKIRQQIGKIRTSKAVQDRCRVGKGKTIETAREELKQRLVAEAEKLRKYRARAKQARDNMKFETQEGRFYKELDAGEKATARAGEDAVIFWENIWGSAGPEIENVQMQKEARQEEEVITTVRLKEALKKMKNWKAPGRDEVHGYWLKKFTSVHERLAAALEECVVSGCPEWMVVGRTFLIQKDPKKGSEASNFRPITCLPTTWKLLTSVISSRLACYLEQNRLIPEEQKGCRTKTRGCKDQLLIDQAVVENCRRRKTNLAMAWIDYRKAYDSISHKWVLKTLEANGVSQKWVEFLEREMGKWQTEIDGHRLRFRRGIFQGDSLAPLLFVVSLIPITEKLKETGIGYKMEKNGRAVSHLWYMDDLKMYASSRKMLQKQVETLEKASRDSGLEFGLGKCAAVTMTRGKCVDGEGLRTSSGDKIEEVKEGYKYLGVIEKDRTDHVEMKMRLRKEYKRRVRKVLQKSALNGQNSIKAINTWAIPVLRYSAGIVRWNKNELRELDRETRKILAAERAFNLNGDVDRLYMARHKGGKGLLSVEETVEAEALGLKEYVEEQPKGSLLEVTKELKKIRTESEGKKIYQSRMESERQTRYRQKAMHGEYWRNTEKCDREESNKWLKKAGLKRETEALIMAAQEQAIRTNWVKKHVHRRVEVSDKCRLCKKEAETVDHLIAGCEKLAQNEYKFRHDKVGRMVHWSLSRQHGLEAGDKWYEHKPQGVIENEKVKILWDFNIQTSKVIEARRPDIVVVDKEKRLGTVIDIAVPKDRNVESKEKEKIDKYRELAEEIERLWKLKKVEVVPVVVGALGAVSKKHKRYLEELGVPKWGGAVAQKAALLGTARVLRKALRLPGNW

SEQ ID NO: 8712 - protein, 790 aa, Hofstenia miamia
MKFETQEGRFYKELDAGEKATARAGEDAVRFWENIWGSAGPEIESVQMQKEVRQEEEVITTAKLKEALKKMKNWKAPGRDEVHGYWLKKFTSVHERLAVALEECVVSGCPEWMVVGRTFLIQKDPKKGSEASNFRPITCLPTTWKLLTSVISSRLACYLEQNRLIPEEQKGCRTKTRGCKDQLLIDQAVVENCRRRKTNLAMAWIDYRKAYDSISHKWVLKTLEANGVSRKWVEFLEREMAKWQTEIDGHRLRFRRGIFQGDSLAPLLFVVSLIPITEKLKETGIGYKMEKNGREVSHLWYMDDLKMYASSRKMLQKQVETLEKASRDSGLEFGLGKCAAVTMTRGKCVDGEGLRTSSGDKIEEVKEGYKYLGVIEKDRTDHMEMKMRLRKEYKRRVRKVLQKSALNGQNSIKAINTWAIPVLRYSAGIVRWNKNELRELDRETRKILAAERAFNLNGDVDRLYMTRHKGGKGLLSVEETVEAEALGLKEYVEEQPEGSLLEVTKELKKIRTESEGKKIYQSRMESERQTRYRQKAMHGEYWRNTEKCDREESNKWLKKAGLKRETEALIMAAQEQAIRTNWVKKHIDRRVEVSDKCRLCKKEAETVDHLIAGCEKLAQNEYKFRHDKVGRMVHWSLSRQHGLEAGDKWYEHKPQGVIENEKVKILWDFNIQTSKVIEARRPDITVVDKEKRLGTVIDIAVPKDRNVESKEKEKIDKYRELAEEIERLWKLKKVGVVLVVVGALGAISKKHKRYLEQLGVPTWGGAVAQKAALLGTARVLRKSLRLPGNW

SEQ ID NO: 8713 - protein, 1084 aa, Hofstenia miamia
MRSHVKAKALSPRQAFNGQRVLRISGQQADSTIGSVDSRSGSIGSTQTNGQRHKWTDEQNRTALECYRRSRPDERGYRKRMLEEWRKARTGLEVTEHRLAGQVQKLQLDESKGKKTVEQVKQREDEVIDVETEVAEVADAETENNKREKMKEEIGERARLPVPRRVKRSKLAVETAKVNKVLERIDARSVTEVNSLVYAGACEVLKNVGVEIKKKRRQEDKGDRKPAWERRIENKVAKIRQQIGKIRTSKAVQDRCRVGKGKTIETAREELKQRLVAEAEKLRKYRARAKQARDNMKFETQEGRFYKELDAGEKATARAGEDAVRFWENIWGSAGPEIESVQMQKEVRQEEEVITTVRLKEALKKMKNWKAPGRDEVHGYWLKKFTSVHERLAAALEECVVSGCPEWMVVGKTFLIQKDPKKGSEASNFRPITCLPTTWKLLTSVISSRLACYLEQNRLIPEEQKGCRTKTRGCKDQLLIDQAVVENCRRRKTNLAMAWIDYRKAYDSISHRWVLRTLEANGVSRKWVEFLEREMAKWQTEIDGHRLRFRRGIFQGDSLAPLLFVVSLIPITEKLKETGIGYKMEKNGREVSHLWYMDDLKMYASSRKMLQKQVETLEKASRDSGLEFGLGKCAAVTMTRGKCVDGEGLRTSSGDKIEEVKEGYKYLGVIEKDRTDHMEMKMRLRKEYKRRVRKVLQKSALNGQNSIKAINTWAIPVLRYSAGIVRWNKNELRELDRETRKILAAERAFNLNGDVDRLYMTRHKGGKGLLSVEETVEAEALGLKEYVEEQPEGSLLEVTKELKKIRTESEGKKIYQSRMESERQTRYRQKAMHGEYWRNTEKCDREESNKWLKKAGLKRETEALIMAAQEQAIRTNWVKKHIDRRVEVSDKCRLCKKEAETVDHLRAGCEKLAQNEYKFRDKVGRMVHWSLSRQHGLEAGDKWYEHKPQGVIENEKVKILWDFNIQTSKVIEARRPDIVVVDKEKRLGTVIDIAVPKDRNVESKEKEKIDKYRELAEEIERLWKLKKVEVVPVVVGALGAVSKKHKRYLEELGVPKWGGAVAQKAALLGTARVLRKALRLPGNW

SEQ ID NO: 8714 - protein, 1232 aa, Callosobruchus maculatus
MQRQDRRPTDDDNGDETGNELIIMLPYAERSCPMCLRDGHNLFHMRIEDECKHIKQQHKETKIKYKCTACKKIYQIRHAALCHVPKCPVRAAAAAPPPESSDSESDGEPSNPPIPESVALACSDCGEKFSGRGALAQHQRHRHPLTRNEARAAGTRQHPQGKKGPKSMFTEEETNIMLECELRYLGERNIAVKMVPLLPSYTNKQIRDRRRAVDYKRLRANFFRSKGIAIPEGLSAESADPQSASSGMSDAGEASEPPAPVNTLKVPRRRTRGPEGGSLRPAQEVTEAPTTVGENQDENPANPAVVIVSPSPSPDNSEKVSETSDLEMVSPAVSPDEEIWRRDVAQTALSRQLTSAAQRHPEVNTVTQLLKNAISEARDLPSGLPQSQIDTLYDRVTALFVSEERGVAGRRKGHGRGKNKRGNRRYLFAMTQDIYKKNPGLLAKHVRNNVDWLEEPCVRAPAQDVRDLYQKLWGTKPSKVQVPNLGEPSDSVLELGSVLTAVTGKEVYTRLSRMKTSTAPGPDGLKKGDIKRVPGATEVLQLFYNLIMISGKQPTAWRKNRTTLIPKEGKDGTLAENYRPITISSILSRIYFGILDSKLRAIARFSPRQKGFLNESGCFNNVHILNELLRHSKVKTGLVVTQLDVSKAFDTVPHHALGLALRRKGFPEQVVRIVENAYEDVSTIIELEKAPVEIRLQRGVKQGDPLSPLLFNLVLEPLLEALEREPGYEIDNETQISSLAFADDLLLVAQTVPQAKEQLSNTEAYLRCLGMKIAASKCRAFRVIRTKDSWYLADPGLSLDSGEVIPVAGAGDHLVYLGCNVSPWAGVTIEGTRANLASTLSRVQRLKLKPHQKVDLISTYIVPHYLYQLAIAMPSLAQIKLIDQELRVALKNILHLPQSTTNALLYCGKRDGGLGIPRLEWLATSSALKAGLKFADNPDPAMRALATGTKLESRLRRMALEARIAWPLTREQVASYVRTQKKAELKRWKSLGSQGKSAAAFADSTVANAWLRDPSLLKPCRMITALRMRTNSCADRAAMSRASTIPDPKCRHCGVQIETLGHILGQCRDTKPQRIRRHDEIKNLIVEELKKKGTGVAITVEPTVAATGGGNLKPDLVVKSQERVFVVDVTVRHEDGENLAQGFKSKVEKYSRLLPQFQQRWAARSAEVLPVVVGTRGAMPRETIENLRKLGISRRDVLLTMSLIALRSSIEIYHDFMDYDAPLARRGVQPHR

SEQ ID NO: 8715 - protein, 894 aa, Ormyrus pomaceus
MMLENLRRGEQENTAQPPMAARCNMETLATTEAIDNKLQDWIVANRSKIPETTPGAFYLRMAASRVLHRQSPVDDIKAWIDDISSEACPMRRPNNTDWQPRTPNLSRKKQKKEEYRRIQQLWRRNISKAASQVLDGNREQRDKPDIHTQEAYWEPILEASSGNLHTWTGEPVGSEESTVYNPCKPITEAEVRNNRPSNGTAPGPDGIKIDAWKRVPDVAKAMVFNVILLHGSCPLFLSDSRTVLIPKAQGTMGPSLFRPISISSVILRHMHKIIAARLKNFSILDNRQRAFIEADGVAENTVTLAAILTEARRSLKPLHVAILDVKKAFDTVNHGAITEALARKRLCPTFIQYLDALYRTSRTKLEVGAQETGWIQPGQGVRQGDPLSPILFNLIIDLAMERLSTAVGFSMGDTNLSALAFADDLILMASTREGMQLQLNSITEELNRNGLHIMPAKCRILSMIPSGREKKTKVVTDFCFVAEGKPIPQIGINETWKYLGVEFNSYGPVKRKINIVEYLQKITKAPLKPQQRVEILKVYLIPRYTHSLVLGRTLHDELRNGDKEVRKAVRGWLRLSNDVPKAYFHAPISEGGLGITSFESSIPAYTKSRINALNSSNMPAAGWTSCSSWVNSKRKWYHQTKVSPKDWKAALHKSTDGYELRECNKANLSSNWVRDQYVRIPASDWIKYQHIRINAIPSRIRTSRGRRTNGELTRCRAGCMEAETTAHIIQNCPRTHGGRILRHDHIAECISRWLAEARWSVKREHKFRTTQGNFKPDIVANQESATKILDVQITSASRPLAEVSSIKRNFYDNNFDQKRAAKELMGAPYSATAVEAITISWRGIWDPRYMNTLFSMGIPKSKLASLTTRVLKGSHLNFVTFNAATTRARARRSR

SEQ ID NO: 8716 - protein, 986 aa, Triatoma infestans
MEVELTHTCEVCERVFSTVTGLGLHRRRAHPEEFNRGINVERCRRRWSPEELQILAECEVRLVREGGREGLVQRLVHCMQGRTLDGIKGARKREDYRRMVFSLMSADAAEERIGAVERNGESFGVGEGVGWEEALRSALRADMDALQGSRRVSGAGELLVRAVREVLAARDPTLHILEWWRGLGGDNPAIESGDAERVGVVQGGTLSPRRLRRRQYASVQELWKRDRKAAVNRVLGGGRDLGHHSMREITDFWGPVFEAPSAAWGGDVERASVGWTAAEIFAPVDNVELAGSYPRLGTAAGPDGIMPQVWKNVPMVMKRMLFNCFMLRGELPEEILAAETTLVPKVRRPPGPGDYRPLTVASVIVRHFHKLLVGRLCALCAHVPAQRGFVPGMDGVGDSVVRLNAIMRKAWQSRRALIVVSLDVAKAFDSVSHAAIVGLLSKRGAPPVFVRYVESCLARASLRIRWGGQRSRVIRVMRGVRQGDPLSPFLFNLIMDYVLSGLPERVGFRIGTPGHRVNAMAYADDMLLFASSEVGMRLLLTSAEASLAECGLGVNSAKSWSLSLNPSGRQKLIKVDTSAGFRLGGSELPAIGMADSFGYLGVRFGPSGVLEAVPCLLEKLDCIQRAPLKPQQKMEALRDFVLPGVFQELVLGRLEKTSLSRWDVSVRAHVRRWLHLPRDVPNAYIHALRSGGGLGIPELSRLVPVWRRMRRERIMERWGDEEAEELGAVVREGGGEETRETVRRAQLEDLHGRVDGRDLRDSGAAKASYSWKGSRAETLSGREFVQFVRLHSGCLPSAMRTSRGRRVQGGALRCRAGCSSAETVAHVVQVCPLTKGGRILRHHAVVRLLAGAFERRRCGTYQEVSMVLGETRMRPDLVITKGAKAWVVDVQIVSPGEGLAVVNQAKRDKYSTAAVREAVRELTGKTEIGIVAATLTWKGIWCGRSVRDLRAMGLSNQVMEWATERVLRGSSMNWNRWNVLRLARRA

SEQ ID NO: 8717 - protein, 986 aa, Triatoma infestans
MEVELTHTCEVCGRVFSTVTGLGLHRRRAHPEEFNRGINVERCRRRWSPEELQILAECEVRLVREGGREGLVQRLVHCMQGRTLDGIKGARRREDYRGMVFSLMSADAAEERIGAVERNGESFGVGEGVGWEEALRSALRADMDALQGSRRVSGAGELLVRAVREVLAARDPTLHILEWWRGLGGDNPAIESGDAERVGVVQGGTLSPRRLRRRQYASVQELWKRDRKAAVNRVLGGGRDLGHHSMREITDFWGPVFEAPSAAWGGDVERASVGWTAAEIFAPVDNVELAGSYPRLGTAAGPDGIMPQVWKNVPMVMKRMLFNCFMLRGELPEEILAAETTLVPKVRRPPGPGDYRPLTVASVIVRHFHKLLVGRLSALCAHVPAQRGFVPGMDGVGDSVVRLNAIMRKAWQSRRALIVVSLDVAKAFDSVSHAAIVGLLSKRGAPPVFVRYVESCLARASLRIRWGGQRSRVIRVMRGVRQGDPLSPFLFNLIMDYVLSGLPERVGFRIGTPGHRVNAMAYADDMLLFASSEVGMRLLLTSAEASLAECGLGVNSAKSWSLSLNPSGRQKLIKVDTSAGFRLGGSELPAIGMADSFGYLGVRFGPSGVLEAVPCLLEKLDCIQRAPLKPQQKMEALRDFVLPGVFQELVLGRLEKTSLSRWDVSVRAHVRRWLHLPRDVPNAYIHALRSGGGLGIPELSRLVPVWRRMRRERIMERWGDEEAEELGAVVREGGGEETRETVRRAQLEDLHGRVDGRDLRDSGAAKASYSWKGSRAETLSGREFVQFVRLHSGCLPSAMRTSRGRRVQGGALRCRAGCSSAETVAHVVQVCPLTKGGRILRHHAVVRLLAGAFERRRCGTYQEVSMVLGETRMRPDLVITKGAKAWVVDVQIVSPGEGLAVVNQAKRDKYSTAAGREAVRELTGKTEIGIVAATLTWKGIWCGRSVRDLRAMGLSNQVMEWATERVLRGSSMNWNRWNVLRLARRA

SEQ ID NO: 8718 - protein, 986 aa, Triatoma infestans
MEVELTHTCEVCERVFSTVTGLGLHRRRAHPEEFNRGINVERCRRRWSPEELQILAECEVRLVREGGREGLVQRLVHCMQGRTLDGIKGARKREDYRRMVFSLMSADAAEERIGAVERNGESFGVGEGVGWEEALRSALRADMDALQGSRRVSGAGELLVRAVREVLAARDPTLHILEWWRGLGGDNPAIESGDAERVGVVQGGTLSPRRLRRRQYASVQELWKRDRKAAVNRVLGGGRDLGHHSMREITDFWGPVFEAPSAAWGGDVERASVGWTAAEIFAPVDNVELAGSYPRLGTAAGPDGIMPQVWKNVPMVMKRMLFNCFMLRGELPEEILAAETTLVPKVRRPPGPGDYRPLTVASVIVRHFHKLLVGRLSALCAHVPAQRGFVPGMDGVGDSVVRLNAIMRKAWQSRRALIVVSLDVAKAFDSVSHAAIVGLLSKRGAPPVFVRYVESCLARASLRIRWGGQRSRVIRVMRGVRQGDPLSPFLFNLIMDYVLSGLPERVGFRIGTPGHRVNAMAYADDMLLFASSEVGMRLLLTSAEASLAECGLGVNSAKSWSLSLNPSGRQKLIKVDTSAGFRLGGSELPAIGMADSFGYLGVRFGPSGVLEAVPCLLEKLDCIQRAPLKPQQKMEALRDFVLPGVFQELVLGRLEKTSLSRWDVSVRAHVRRWLHLPRDVPNAYIHALRSGGGLGIPELSRLVPVWRRMRRERIMERWGDEEAEELGAVVREGGGEETRETVRRAQLEDLHGRVDGRDLRDSGAAKASYSWKGSRAETLSGREFVQFVRLHSGCLPSAMRTSRGRRVQGGALRCRAGCSSAETVAHVVQVCPLTKGGRILRHHAVVRLLAGAFERRRCGTYQEVSMVLGETRMRPDLVITKGAKAWVVDVQIVSPGEGLAVVNQAKRDKYSTAAVREAVRELTGKTEIGIVAATLTWKGIWCGRSVRDLRAMGLSNQVMEWATERVLRGSSMNWNRWNVLRLARRA

SEQ ID NO: 8719 - protein, 986 aa, Triatoma infestans
MEVELTHTCEVCGRVFSTVTGLGLHRRRAHPEEFNRGINVERCRRRWSPEELQILAECEVRLVREGGREGLVQRLVHCMQGRTLDGIKGARRREDYRGMVFSLMSADAAEERIGAVERNGESFGVGEGVGWEEALRSALRADMDALQGSRRVSGAGELLVRAVREVLAARDPTLHILEWWRGLGGDNPAIESGDAERVGVVRGGTLSPRRLRRRQYASVQELWKRDRKAAVNRVLGGGRDLGHHSMREITDFWGPVFEAPSAAWGGDVERASVGWTAAEIFAPVDNVELAGSYPRLGTAAGPDGIMPQVWKNVPMVMKRMLFNCFMLRGELPEEILAAETTLVPKVRRPPGPGDYRPLTVASVIVRHFHKLLVGRLSALCAHVPAQRGFVPGMDGVGDSVVRLNAIMRKAWQSRRALIVVSLDVAKAFDSVSHAAIVGLLSKRGAPPVFVRYVESCLARASLRIRWGGQRSRVIRVMRGVRQGDPLSPFLFNLIMDYVLSGLPERVGFRIGTPGHRVNAMAYADDMLLFASSEVGMRLLLTSAEASLAECGLGVNSAKSWSLSLNPSGRQKLIKVDTSAGFRLGGSELPAIGMADSFGYLGVRFGPSGVLEAVPCLLEKLDCIQRAPLKPQQKMEALRDFVLPGVFQELVLGRLEKTSLSRWDVSVRAHVRRWLHLPRDVPNAYIHALRSGGGLGIPELSRLVPVWRRMRRERIMERWGDEEAEELGAVVREGGGEETRETVRRAQLEDLHGRVDGRDLRDSGAAKASYSWKGSRAETLSGREFVQFVRLHSGCLPSAMRTSRGRRVQGGALRCRAGCSSAETVAHVVQVCPLTKVGRILRHHAVVRLLAGAFERRRCGTYQEVSMVLGETRMRPDLVITKGAKAWVVDVQIVSPGEGLAVVNQAKRDKYSTAAVREAVRELTGKTEIGIVAATLTWKGIWCGRSVRDLRAMGLSNQVMEWATERVLRGSSMNWNRWNVLRLARRA

SEQ ID NO: 8720 - protein, 986 aa, Triatoma infestans
MEVELTHTCEVCERVFSTVTGLGLHRRRAHPEEFNRGINVERCRRRWSPEELQILAECEVRLVREGGREGLVQRLVHCMQGRTLDGIKGARKREDYRRMVFSLMSADAAEERIGAVERNGESFGVGEGVGWEEALRSALRADMDALQGSRRVSGAGELLVRAVREVLAARDPTLHILEWWRGLGGDNPAIESGDAERVGVVRGGTLSPRRLRRRQYASVQELWKRDRKAAVNRVLGGGRDLGHHSMREITDFWGPVFEAPSAAWGGDVERASVGWTAAEIFAPVDNVELAGSYPRLGTAAGPDGIMPQVWKNVPMVMKRMLFNCFMLRGELPEEILAAETTLVPKVRRPPGPGDYRPLTVASVIVRHFHKLLVGRLSALCAHVPAQRGFVPGMDGVGDSVVRLNAIMRKAWQSRRALIVVSLDVAKAFDSVSHAAIVGLLSKRGAPPVFVRYVESCLARASLRIRWGGQRSRVIRVMRGVRQGDPLSPFLFNLIMDYVLSGLPERVGFRIGTPGHRVNAMAYADDMLLFASSEVGMRLLLTSAEASLAECGLGVNSAKSWSLSLNPSGRQKLIKVDTSAGFRLGGSELPAIGMADSFGYLGVRFGPSGVLEAVPCLLEKLDCIQRAPLKPQQKMEALRDFVLPGVFQELVLGRLEKTSLSRWDVSVRAHVRRWLHLPRDVPNAYIHALRSGGGLGIPELSRLVPVWRRMRRERIMERWGDEEAEELGAVVREGGGEETRETVRRAQLEDLHGRVDGRDLRDSGAAKASYSWKGSRAETLSGREFVQFVRLHSGCLPSAMRTSRGRRVQGGALRCRAGCSSAETVAHVVQVCPLTKGGRILRHHAVVRLLAGAFERRRCGTYQEVSMVLGETRMRPDLVITKGAKAWVVDVQIVSPGEGLAVVNQAKRDKYSTAAGREAVRELTGKTEIGIVAATLTWKGIWCGRSVRDLRAMGLSNQVMEWATERVLRGSSMNWNRWNVLRLARRA

SEQ ID NO: 8721 - protein, 986 aa, Triatoma infestans
MEVELTHTCEVCGRVFSTVTGLGLHRRRAHPEEFNRGINVERCRRRWSPEELQILAECEVRLVREGGREGLVQRLVHCMQGRTLDGIKGARRREDYRGMVFSLMSADAAEERIGAVERNGESFGVGEGVGWEEALRSALRADMDALQGSRRVSGAGELLVRAVREVLAARDPTLHILEWWRGLGGDNPAIESGDAERVGVVQGGTLSPRRLRRRQYASVQELWKRDRKAAVNRVLGGGRDLGHHSMREITDFWGPVFEAPSAAWGGDVERASVGWTAAEIFAPVDNVELAGSYPRLGTAAGPDGIMPQVWKNVPMVMKRMLFNCFMLRGELPEEILAAETTLVPKVRRPPGPGDYRPLTVASVIVRHFHKLLVGRLSALCAHVPAQRGFVPGMDGVGDSVVRLNAIMRKAWQSRRALIVVSLDVAKAFDSVSHAAIVGLLSKRGAPPVFVRYVESCLARASLRIRWGGQRSRVIRVMRGVRQGDPLSPFLFNLIMDYVLSGLPERVGFRIGTPGHRVNAMAYADDMLLFASSEVGMRLLLTSAEASLAECGLGVNSAKSWSLSLNPSGRQKLIKVDTSAGFRLGGSELPAIGMADSFGYLGVRFGPSGVLEAVPCLLEKLDCIQRAPLKPQQKMEALRDFVLPGVFQELVLGRLEKTSLSRWDVSVRAHVRRWLHLPRDVPNAYIHALRSGGGLGIPELSRLVPVWRRMRRERIMERWGDEEAEELGAVVREGGGEETRETVRRAQLEDLHGRVDGRDLRDSGAAKASYSWKGSRAETLSGREFVQFVRLHSGCLPSAMRTSRGRRVQGGALRCRAGCSSAETVAHVVQVCPLTKGGRILRHHAVVRLLAGAFERRRCGTYQEVSMVLGETRMRPDLVITKGAKAWVVDVQIVSPGEGLAVVNQAKRDKYSTAAVREAVRELTGKTEIGIVAATLTWKGIWCGRSVRDLRAMGLSNQVMEWATERVLRGSSMNWNRWNVLRLARRA

SEQ ID NO: 8722 - protein, 986 aa, Triatoma infestans
MEVELTHTCEVCGRVFSTVTGLGLHRRRAHPEEFNRGINVERCRRRWSPEELQILAECEVRLVREGGREGLVQRLVHCMQGRTLDGIKGARRREDYRGMVFSLMSADAAEERIGAVERNGESFGVGEGVGWEEALRSALRADMDALQGSRRVSGAGELLVRAVREVLAARDPTLHILEWWRGLGGDNPAIESGDAERVGVVQGGTLSPRRLRRRQYASVQELWKRDRKAAVNRVLGGGRDLGHHSMREITDFWGPVFEAPSAAWGGDVERASVGWTAAEIFAPVDNVELAGSYPRLGTAAGPDGIMPQVWKNVPMVMKRMLFNCFMLRGELPEEILAAETTLVPKVRRPPGPGDYRPLTVASVIVRHFHKLLVGRLSALCAHVPAQRGFVPGMDGVGDSVVRLNAIMRKAWQSRRALIVVSLDVAKAFDSVSYAAIVGLLSRRGAPPVFVRYVESCLARASLRIRWGGQRSRVIRVMRGVRQGDPLSPFLFNLIMDYVLSGLPERVGFRIGTPGHRVNAMAYADDMLLFASSEVGMRLLLTSAEASLAECGLGVNSAKSWSLSLNPSGRQKLIKVDTSAGFRLGGSELPAIGMADSFGYLGVRFGPSGVLEAVPCLLEKLDCIQRAPLKPQQKMEALRDFVLPGVFQELVLGRLEKTSLSRWDVSVRAHVRRWLHLPRDVPNAYIHALRSGGGLGIPELSRLVPVWRRMRRERIMERWGDEEAEELGAVVREGGGEETRETVRRAQLEDLHGRVDGRDLRDSGAAKASYSWKGSRAETLSGREFVQFVRLHSGCLPSAMRTSRGRRVQGGALRCRAGCSSAETVAHVVQVCPLTKGGRILRHHAVVRLLAGAFERRRCGTYQEVSMVLGETRMRPDLVITKGAKAWVVDVQIVSPGEGLAVVNQAKRDKYSTAAVREAVRELTGKTEIGIVAATLTWKGIWCGRSVRDLRAMGLSNQVMEWATERVLRGSSMNWNRWNVLRLARRA

SEQ ID NO: 8723 - protein, 986 aa, Triatoma infestans
MATDSSHVCGECGRAFGTASGLGLHRKRAHPAEFDRAINVERARRRWSIEELQVLAEWEVRLVREGGREGLAQRLVRCMQGRTLDGIKGARKREDYRRMVGTLLSADAAERRIGAEGRSGELLEVGEGVGWEEDLWSALREDVDTLQGTRRGSHAGGLLVRAAQEVLAARDPTAQILEWWRSLGGNSPGMGPSVAERVGVARGCTLSSRRLRRQQYASVQELWRRDRKAAVNRVLGGGRDLGGHAMQDVVDYWGPVFEAPSAPWGGDIGRTEVGWTAAEIFAPVGNEELAASCPRSGTAPGPDGIVPQVWKSVPMITKRVLFNCFMLRGGLPEEILAAETTLVPKVQRPLGPGEYRPLTITSVIVRHFHKLLAGRLSALCAHVPAQRGFVPGMDGVGDSVIRLNAVLRKAWQSRRALVAVSLDVAKAFDSVSHAAITRLLSMRGAPPVFVEYVESCLARSSLRIRWGGQRSRVIRVLRGVRQGDPLSPFLFNLVMDHVLSGLPGRVGFRVGMPGRRINAMAYADDMLLFASSEVGMRLLLEAAAAGLAECGLGVNSAKSWSLCLNPSGRQKLVKVDSSTIFRMGGMEIPALGVTDSFRYLGVRFGSLGVLDAAPRLVEHLDCIRRAPLKPQQKLEALREFVLPGVYQELVLGRVKRTSLSSWDVRVRGHVRQWLHLPHDVPNAYIHAPIKYGGLGVPELAKLVPVWRRTRREAIMAGWGDDDAEELGGEAREPGGLESVEEVRRTQRVELYAKVDGGDLEGTAAVRASYSWRGLRAAELSGREYIQFVRLQAGCLPSASRLARGRREQSGPTRCRAGCGRVETAAHVIQVCPLTKGGRILRHHAVVRLLAGFFERRWFGVYREVAMELGGTRVRPDLVVTKGRKAWIIDVQIVSPGTGLAAINRDKKEKYSTPPIREAAQALTGKQDVSVVAVTVTWKGIWCSRSAADLREIGVTRLVLEWVTERVLRGSHMNWSRWNAIRRATVS

SEQ ID NO: 8724 - protein, 1824 aa, Teleogryllus occipitalis
MVLTRRAASLRNLSVSATSQSSQGHPLRSTTSSPNLHLTPHIPRRSRSAGPATPYTPSLTSPPACLSRSSSLSSLDTLSHSPSARPTDAPSPPHSTPQGSSSPSPSSLSSSISVQDAPLNISSDSHGSSPFIPSDSSQDSSGSGSATGAIGPPPQEPPNPQPTFNCLSPIPEASFNAPRPTSPTQPLSCSGVPFSPILASSPNLPDNQASIAPSPANPHLSASFPPLNYSTPVRDFTSRFSTGTHTSGIPFSPCASTSLAASLSPPRDQDLLRPPLLVSPALDDWPKLQPTLSQTGQLSIFYPTPSNCFCPLCSYSCSPESPKQAKTLISSHLLASHNWSGHSQTICWGCRRSAAKANHSKTCSALSKVPLIHVSSSLSSPIHPPPEAPRDQDILKPPLLVSPILDDWPKLQPALSLTNHLTIFYPTPSNCFCPLCPYSCLPESPQNAKTLISVHLTSSHKWSGPSQIICWGCRRSATKANHSKSCSALKKSPLVHIPSSLSSSSSSSVESAPISRSPSIFLPSLQPLRRGNTISFPVPAASATKCPVCPPNSLPISSANVWTSRLQSLKRHVETTHSDLGLSVSKVCFACDRSFKRWNSHREGCELARTSVVPPEIHFVPQLPCRHAGCTHIFATSHQRGQHERKHNASMKVPPAIKLPTPNTQRAAARTWKELNALRSCGQPSNSSASEGSSSPPRRFRTKIFTNSAVSLKRGGKTPSLAVPSVSSSPERPPKSSSAPTSPPLTSAPTSTTASYVPPSEILKANPVPPAFSSKINDPTPSPPPPPSPPPQLPPPSVELTPDTPVPLSPPQHLSTPTPSEALLANSAPLSSLQKTPPTTPPLAAHSPPKQVPAPPAEADEEPFPHNPPLLGSSQREVPPHTPEMMGRLGEDLEALRSSLIEISLCPATEETWLRAESIISDIFSLLQTQLLPSSRTPYVPNRHAEASSQAAALAKVNAIYKGNPRRALRLVTGESSPKCKLSPEDIVAHLFPSSTGPSVPLDLYPASDRPPLNTELFSPKEVAERLQGCTNSAPGDDRLGYLHWKRADPTGRILAPIFNACRHFQRIPADWKKSKTIVIHKGGDVSDPSSWRPIALSNTAPKLYASLWARRFSSWLEQNEVLCPAQKGFRPHDGVYEHNFLVETLIRSARQQKGNLCLAFLDFSNAFGSITHEALVAAVGASGAGTAFVNIVRDFYSSCSTVLATDAGLSEPISALRGVRQGCPLSPVIFNLTVDPILRAALELSDLEVKGGAYADDLWLAASSPELVQSMVDLVATRASTIGIRVNAAKSDLLHIKGGTAVVETPILVEGVPLRSLNTEDFTTFLGKPVGFSLLKDNSSLSDVSALLEKVRDSQLAPWQKIDAIMSFLLPQLSFPLRMRSITIQAASQFDSWFRGLAKGLLGLPDNASTSFLHSPRSNAGAGLPVFRDEALLSYIEGAFKLLTSKDPTVRKIASDDLRYQVNLKFPGKETTPDVIEEYLNSTSTPRHIGRCSLWSGARHASKLLGVCWAIREEHGLFVPSLIPEADSDQNLAIEPRHRNLLLRRLRRVQQEAHLKVWQSQPDQGRAAHDLARAGTRSSHFLRTGFNLRHSDFFWVNRARLNLLGGLRAGRAFHSKEDAGCRFGCKKFESSDVWPETQAHVLNHCQHNLSAVTARHNQIVDLLKVAASANGWKVLAQDETFLGGTKRPDLVLLDKHSHLVRIVDVAIPFEGGKGALAAKRKAKLTTYAPLRQAALSCFGVSSASVVPLIIGARGAWDPENDKHLKELVHPDYLATLRKQMISSVIRHSNDIYRRHVASTSTYSGTPGSGGSGPGQQATPTILQ

SEQ ID NO: 8725 - protein, 1155 aa, Thisbe lycorias
MKIYYKVTKLETNKSAYRKLMHQEFITKYPDLAYLSEQRIADQRRAMIHNKYISEDTLLALRQEVLIELDENQTQMGSSNIEASHEINITYTSCPIQNVLLTSSIMANDNLTQSSLTTFENQPRETPENQEINTINNTESPKHISKIFQEAWLLFNKSNLTTRPFIPKQKTSKKFAKIVEYINEEILPKYMNTEDSFEQTHTLIYCAAYTASVCNGAKIKQHDNNTSILQEKSTTMPNWQKRLTKKINQLRGDIARMIQYIRGNRSRKLVCHIETIKHTYRIHSSHEEPNFTNEQFLDTLKQKLNTFSNRLKRYLKCTFRKKQNTHFIKNEKHFYRSLAAQSQNNQSIGSSPSYPSPDDLHQFWSNIWSKPVQHNDLAYWIYKELDTSSKLPDMDFEYVDIDTVSNIIKKTHNWKAPGSDHIHNFWYKKLTTLHLTLHKHINDFIHSPHTIPDFITQGTTFMIPKDTDLRNPAKYRPITCLQTFYKILTSCIAEHINHHITINNILAEEQKGCRRGSRGCKEQLLIDSVAMKTSIARNNNVNTAYIDYQKAFDSVPHSWLIHVLRLYKIHPTLIKLLEHLMQKWLTKLKVINNTCNIETATIPIRRGIFQGDALSPLWFCLAINPLSNILNSSNQGLKLHTQQHVTSLTHLMYMDDIKLFSNTTESLNHLIEITQTFSQDIHMRFGIDKCKTFTVNKGNVIQNNFKTLTGDQIEALDYNSSYKYLGFEKSKQILFKKKKIKQTKIDLKKKYKHRLNILFRSQLNSRNMVKAINAYAIPILTYSFGIINWSQSDLLSLQRLINTTLTANRKHHPRSAVQRLTLPRDEGGRGIIDITNLHNRQITALREYFYNRADQQSKIHNTIVELDKHLTPLNMHNRDKQKNEHIVENKEKIATWKQKSLHGRHRHDLEQPHVDKKASNACLRYGDLFPETEGFILAIQDQIIETRNYQKYICHIPNLNTDLCRRCQSSSETIQHITGACKSIVQTDYKHRHDQVAAIVHQHLAYKYKFISQKLPYYKYKPQVILENNNYKVYWDRTIITDKTIHYNRPDITVLNKQDKIVYLIDIAVCNTHNLVSSHREKIAKYTDLSIELKTQWQVNKIQTIPIILSTTGVIPKTLHTSLKTLDIHTSAITLLQKAVILNTCRIVRKVLSLD

SEQ ID NO: 8726 - protein, 1412 aa, Thisbe lycorias
MTNGAIVIEIGNMVVTRNRIQDIPQAGTSAHRDGESRPELLSSGSSMYSGGSTASQSLGQRYNLRVRPMSSRVKSPQIAVDHTLSSASSSKSLFPSIPSTNTPSLISSIGSSSMLEDVAQEADANYPVPTSSKPRTRNKWSPAMNEFIMRTYYQLTLLESDLKGYLSPLHIKFIEKFPQMQHISRQRVGDQRRAIFNKKLLSQELINRIFREVQAEIDVSLGGNSIASITNSNIQSTQTVTQTLTQSVNATQTSQRMSWNNQMNETLMKIYYKVTKQESNTTAYRKLLHQEFVRTYPQLSHLSEQRVADQRRSIICNKYITKERLAVLKCQATQEESEVNLSVVNDYIMEERNETELNGSFINFQNNTLSDSQYTQLTRLTERSLDTYQIIEEPLRNIVMNQPQIDKTFQEAWERFNHTDPTTRPFIPKQKTSRKFAKLVDYINNNVLPNYINQECSFETTHTLVYCAAYTASICNGTRIKNVCCDDINQPLQTNMIPAWQIRLQKKIENLRKNIARMIQYIHGNRSERLINHIQKIKETYKTHSRHEEPNFTNEEFLDTLKQKLKTASSRLRRYTNCTLRKKQNTQFRNNEKQFYRHLAAKSRHTEMTSNIHPSYPSSDELLQFWSKIWAEPIQHNKSAFWINKEIENVSAIPNMEFDHIPLDTFSEIIKKTHNWKAPGSDRIHNYWYKKLTTLHALLHNHINDFLHTPQTLPQFITQGITFMIPKDTDFKNPSKYRPITCLQTFYKILTACLAEQIYQHIDGTNILAEEQKGCRRRSQGCKEQLIIDTVVMKTVHKQKIDINTMYVDYQKAFDSVPHTWLIQVLHIYKIHPTIITFLEHTMQYWNTKLKVINGENNVETTAIPIRRGIFQGDALSPLWFCLALNPLSNMLNLSTHGLSLSTYPKKTLLTHLMYMDDIKLYSHSTQSLHHLADITQNFSKDIHMQFGIDKCKTFSVKNGNIIHNNLTTISGNQIEALDQEGSYRYLGFEQARQIKQKQVKSELKKKFKHRLNILLRSQLNSRNLIKAINTFAIPILTYSFGIISWSQTDLITLQRLINTSLTANRKHHPRTAIQRLTLPREEGGRGVIDITNMHNKQITTLRKYFYEREEHQSSLHSAVIQLDKRLTPLNTHDRCLQKNERIIDNNAKIAMWEAKVLHGRHYHDLQQPHVDKKSSNAWLRYGDLFPETEGFMIAIQDQVIETRNYQKHICRIPNLGTDLCRRCHSSSETIQHITGACKSIVQSDYKHRHDQVAAIIHQYLAYKHKLIPLKVPYYKYKPQTILENTDYRMYWDRTIITDKTIHYNRPDITLLDKQNKTAYLIDIAVCNTHNLLNTHTEKLSKYTDLSIELKTQWQINKVNTIPVILSTTGVIPKTLHNSLKILNIHDSAITLLQKAAILNTCRIVRKFLSLD

SEQ ID NO: 8727 - protein, 1476 aa, Melanis pixe
MSYTGNRYNLRPLPGGRRGAPGAGAGCFSMRDTGGEALSRRASVTQLATAERQELNRRTTDVRDTAEELSSTAISTASSVSSMHQYRTKQRSIRSPTSGDDKSDTNFIFSGKKNVSQPCTTKYYFRSRDLHSKTTQTSIQRAPYTTQTSTQRAPSPVSSSHSLFPSDESTNLFSFNSSITSTKTSLMLEDVAQETNVTNPVPTNSKTRTRDKWSQDMNIFILRTYYQLTLLETDLKGHLSPLHIKFIEKFPQMQHVTRQRVGDQRRAIVNKKLLSQEIIHNIHRDVRLEFESNLIVSQNIHMTDNTNTQKTQIPATPQTQQRMTWNTELNETLMKIYYKVTEIETNMTGYRKLIHQEFVNVYPHLAHLTDQRLADQRRVIIRNKFVSDKRLSEIRQEILRDLNINQLSGDLITNSSEPSSLNLTLTQNNTPPCRIINNTNDTINEITNETLNIDKTELKNRHNNNINNDIETIFEQTWNRFNNTNPTSRPFIPKQKTSRKFSEIVEYINKNILPIYVNKEDSFEKTHTIIYCAAFTASVCNGAKIKEKNIGNTETQHFNRIPSWQRRIINKINLLRKNIARMIQYINGNRSKKLLNHIKIIKNTYKIHSQHEEPNLTNEQFLDTLKQKLNTAARRLKRYLNCTTRKKQNTQFQNNEKQFYRSLVTQPQNHQNRGENQLNMPLPDEMHKFWSNIWANPVMHNESAPWLQKELDTASVIPDMDFEYISVQDFLDIIQKMHNWKAPGTDHIHNYWYKKLTTIHPMLHNHINDFLHNPNTVPEFVTQGITFMIPKDTNFSNPSKYRPITCLQTFYKILTSCTAKQINQHLNKYNILAEEQRGCRKGSQGCKEQLIIDSIVMKAAIRQKKDVNTLFIDYQKAFDSVPHSWLIYVLHLYKIHPTIINFLKYSMQTWQTKLRVINNRCNIETAAIPIRRGIFQGDALSPLWFCLALNPLSNSLNSSNLGLTLLSQAQNTSITHLLYMDDIKLYSRNLQSINKLLEITEIFSQDIHMKFGIEKCKTFSIKNGKIVQNNLKTLLGYQIEGLDHNSSYKYLGFEQTEHIHQKQTKVDLKKKFRHRLNIILRSQLNSRNTVKAINTYAIAILTYSFGIISWSQTDLKGLQRLINTTLTSNRKHHPRSAIQRLTLPRQEGGRGVIDITNLHNQQISKLREYFHNRTDKNSKLHKAIEELDKHLTPLNIYYREPQKNQRIVSKEEKIAAWEQKSLHGRHRHDLQQPHVDKKASNAWLRYGNLFPETEGFMLAIQDQVIETRNYQKHICHIQNIRTDLCRRCQSCSETIQHITGACKSIVQTDYKHRHDQVAAIIHQYLAFKYKLISQKQPYYKYKPQVILENNSHKIYWDRTIITDKTIHYNRPDITVLNKQDKTVYIIDIAVCNTHNLINTHTEKLAKYTDLSIELKTQWQVNRVQTIPIILSTTGVIPKTLNNSLKSLDIHTSVLNLLQKAVILNTCRLVRKFLSQE

SEQ ID NO: 8728 - protein, 1452 aa, Melanis pixe
MIMSQRNKMYNLRSLPGDRRGALGAGAECFRMRDTGGEALNRRVPVTKDTTAGRRKLNRRTTDVKDTAEILNDEPISEPSEGVDINPTLPKGSYASHPTESKYYFRTRYPKTKHINTEHQISPTSSSHSLFSSVFSTNLSYSTPSSAETSITLENVAQETITVTSPVPTSSTNRTRLKWSLDMNKFILRTYYHLTLLETDLKGYLTPLHTKFIDKYPEMQHVTRQRIGDQRRAIVAKKLLSQEIILSIYKDVQLEIQNNSTIFQNTLSTNTDSYSTQSITHKNITCQSQRKSWNTELNETIMKLYYKVTKLQTNLTGYRKQMHQEFVNTYHHTTHLAHLSEQRIADQRRAIIRNKYVKDDRLTAIKREISEQLDRDGTPMDTSVTQVTTERDILSLVTLTQDGATLVDVINNSNSRRVNQLSHDRDQLETSERENRDSNNDIELHSYIDQTFKEAWELFSNTNPTSRPYIPKQKTSKKFAKIVTYVNENILPKYVNKDDRFERTHSLIYCAAYTASVCNGTKIKQNWNDDTTQYRNNLPAWQIRLTKKVDCLRKSIARMIQYINGNRSRKLLKHIENIKNTYMIHSQYEEPNITNEQFLDTLKQKLNTASSRLKRYLNCTLRKKQNAQFRNNEKHFYRLLATQSRNCQNTSDGQQSVPLPEELHRFWSKIWADPIKHNEEATWIQEELDAASILPEMDFDYIPVEDFLDNINKTHNWKATGTDQLHNYWYKKLTTIHPILHSHINDFIHSPHKIPEFITQGITIMIPKDTDLMNPAKYRPITCLQTFYKILTSCISDQITRHITKNNILAKEQKGCRKGSRGCKEQLLIDTVVMKTSLIEKKNINTVYIDYQKAFDSVPHSWLLYVLRLYKIHPTLIAVLEYSMQNWETRLRLKNNSYITETAKIPIRRGIFQGDALSPLWFCLALNPLSNILNSSKQGLTLHVEQHDIPFTHLMYMDDIKLFSYETHSINNLINITEKFSQDIRMQFGIDKCKTFSIKNGTIIQNNFTTILGNKIEGLDQNSSYKYLGFEQSRQILQKQTKKDLKNKFKHRLNIILRSQLNSRNIFKAINTYAIPILTYSFGIINWTRTDLISLQRLISTCLTANRKHHPRSATQRLTLPRQEGGRGLIDITNLHNRQISTLRQYFHSQTDNLSSLHTAIVKMDKHLTPLKMYFRDKQKNEQVISNEEKITAWGQKSLHGRHRYDLQQPHIDKRGSNTWLQSGDLFPETEGFLLAIQDQVIETRNYQKYICHIQNIRDICRRCQSCPETIQHITGACKAIVQSDYKHRHDQVAAIIHQQLALNYKFLTQKQPYYKYKPETILENAGYKIYWDRTIITDKTIHYNRPDITVVHKQQKIVYLIDIAVCNTHNLITTHTEKIAKYTDLSIELKTQWQVNKIRTVPIILSSTGIIPKTLHNSLKTIEIHPSILKVLQKAVILNTCRIVRKFLSQE

SEQ ID NO: 8729 - protein, 1400 aa, Nymphidium onaeum
MTNGAIVKLVRMVVTRKRSKNIPQAGTSAHREGESRPDFHNSGSSMYSGGSTASQSLKSRYNLRSRLPCDNITVTPPSQIPITQPSSPTSSQSLFPSIPSSNASYLTSPVSSLGSSNMIEDVTQEAAAFIPVPTTSITRTRNKWSQEMNEFIMRTYYHLTLLETDLKGYLLPLHTKFMEKFPQMQHLSQQRIGDQRRAIVGKKLLSQEIINKIYREVQTELDVNLRTNTLNTNLNTLNIQTQTRTSTQISQRMTWSNELNETLIKIYYKVTNQEKNTTAYRKLLHQEFLKTYPHLAHLSAQRVADQRRAIVINKYIKDERLEILKQEAMQEDFESNQLHYLTTDERHHTHSSHTSTNLQNDVIFDALTSDTNDILPSNTQTLQTNNLITNRIQIDQNFQEAWQKFNHTDPTTRPFIPKQKTSVKFAKIVDHINNRILPKYISCEDTFQTTHTLVYCAAYTASICNGARIKYNECENFSRPKMDRMPAWKTRLENKIDHLRKNIARMIQFIQGNRSRRLLNHIQKIRDTYKTHSRHEGPNTTNEEYLDTLKQKLKTASSRLKRYNKCTLRKKQNTQFKNNEKQFYRQLSAQSQCTQTPTNIQASFPAAEDLHQFWSNIWAKPVQHNRSASWINEELDKTSALPAMDFDFIPVETFQNIVKKTQNWKALGSDRIHNYWYKKFTSLHPMLHSHLNNFVQNPQTTPQFITQGITFMIPKDSDRKNPAKYRPITCLQTFYKIVTACVADLIYQHLDKNKILAEEQKGCRKGSQGCKEQLVIDSIVMKTAIKQKKDINTMYVDYQKAFDSVPHSWLIHVLHLYKIHPGIISFLEHTMQYWQTKLKIANVENSIETAMIPIRRGIFQGDALSPLWFCLSLNPLSNMLNSSTQGLLLTSYPDPYSLTHLLYMDDIKLYSNTIQSLHQLADITQQFSQDIQMKFGIDKCKTFSVKSGNIVTNNFTTVLGDQIEALEPSGSYKYFGFEQARQINQKQAKTDLRKKFKHRLNVILRSQLNSRNIIKAINTYAIPILTYSFGVIAWSKTDLITLQRLINTSLTSNRKHHPRSCTQRLTLPREEGGRGVIDILNLHNKQISNLRQYFYDREQKQSLLHSTIVKMDKRLTPLNVSDRLIQKNEQIVDNKTKIAIWENKSLHGRHRHDMQQSHVDKRASNAWLRYGDLFPETEGFMIAIQDQIIETLNYQKHICHIRNLQTDRCRRCHSASETIQHITGACKSIVQTDYKHRHDQVASIIHQYLAFKHKLIPHTLPYYKYKPQTILENTEYRIYWDRTIITDKTVHYNRPDITLLDKKNKKVYLIDIAVCNTHNLLTTHTEKLSKYSDLSIELRTQWQVNKVTTIPIILSTTGVIPKTLHTSLNTLDIHTSTVTLLQKAVILNTCRLVRKFLSLE

SEQ ID NO: 8730 - protein, 1389 aa, Theope publius
MEAKRNRSKVPQAGTSTHRDGEPRSELISSGCSMYSGGSNASQPFQSKYNLRPKAVCGRRPQKPLEPLSTASSSQSLFPSISSTNISFHNISSSPSLVSSIGLEDVAQDICVIDPVPTSRKTSTRNKWSKEMNEFILRTYYQLTLLETDLKGYLPPLHTKFIEKFPHMQHISRQRIGDQRRAIINKHLLTKQSIHTIYQSVKSELDNNFTTSQNTHLTNIDTQTTQTPEYTQSRHRLTWNNQLNESIMKLYYKVTKLESDLTAYRKLLHQAFVTTHPHLAHLSEQRIADQRRAIIQNKYINEHRLLAIKQEIAAELESNKITEEASNRTSNYHHDMTCSLEYVTSTNDRINISNSPLNSHTDRIPENEPEEIPESQTNNEEYEHINLTFREAWELFKNVNPSTRPFIPKQKTSKKMTSMVKYINNTILPKYISEEDSFEHTHSLIYSAAYTASICNGTKIRPNDFNMDKTQQSSKKLPAWQQRLTNKINHLRRSIARMIQYIKGNRSRKLINHIEIIKRTYKIHSLHETPNVTNEQFLDTLKQKLNTLSSRLRRYVNCTLRKQQNTFFKNNEKQFYRSLARQSESNQIDTHSSVPSSDDLHQFWSNIWAKSKQHNDTAHWIQELNSTSELSSMDFDHIDVDIFTNILRKTHNWKAPGTDHIHNFWYKKFTTLHPNLHKHINDFIHSPHTIPEFVTQGVTFMIPKDTDFENPAKYRPITCLQTFYKILTACIAEQIGHHIVKNDILAEEQKGCRKGSRGCKEQLLIDSVIMKTALARNNDISTAYIDYQKAFDSVPHSWLIYVLQLYKIHPTLITFLEHVMQKWSTKLKIIKTNCNIETEIIPIRRGIFQGDALSPLWFCLALNPLSDVLNSSKDGLNISTHQSTTTITHLMYMDDIKLFSNSTQSLHNLINITQIFSEDIHMKFGIEKCKTFTVEKRNIIQNNFTTVSGNEIEALDQNSSYKYLGFEQSRQIQQKKSKIDLKKKFRHRLNIILKSQLNSRNTVKAINTYAIPILTYSFGIIKWSQSDLASIQRVINTSLTSNRKHHPRSATQRLTLPREIGGRGIIDITNLHNKQIATLRKYFYNRASQKSPLHHIVVELDKRLTPLNMYSRDEQKNERIISNIEKIAAWERKSLHGRHYHDLKQPHVDEKASNTWLKYGDLFPETEGFIIAIQDQVIETRNYQKYICHMQNLRTDTCRRCQSCSETIQHITGACKSIVQTDYKHRHDQVAAIVHQHLAYKYKFISQKLPYYKYKPQVILENNSYKVYWDRTIMTDKTIHYNRPDITVLNKHEKIVHLIDIAVCNTHNLVKAHTEKMAKYTDLSIELKTQWQVNKVQTVPIVLSTTGVIPNTLHTSLKTLDIHTSASALLQKAVILNTCRIVRKFLSQD

SEQ ID NO: 8731 - protein, 988 aa, Sycophaga agraensis
MGPVGSGTVESSVNPSEAALAASPRTSSTQLVQSSSVHPEPSEGVPHPCSSVIRQLQSSLIADLEGINCLAELEAIMPRVIAFISRRAARRPAQGRARPSARRQPEARTAGAPDRVREATRLQHLFRRNQKRAVQEILADSTGVCQIDSKTVHEHFSALAARRDGEAEWPHVFDRVEPSLESARLLTRPFTPEEVFGALKKRSNTSPGPDGLSYSEVRAGDPGALVICALFNTVLRIEGVPSCWLDSNTVLIHKKGPTDDIRNWRPIALGDTTPKLFSALLAGRIKRWAAANGVFSDSQKGFLQYEGCFEHNFVLQEAIKGAADKGGELVVAWLDMADAFTSLPHSSIQRALVGHGLPLKMRNIISAMYRGAKTKVRTVEGFTDPILIQSGVKQGCPLSPDLFNLTLEVVLRELDRTGEGWTVSGRRFTTLAYADDVAVLATSPDGMRKLLEVAYKATRSVGLSLNPLKCATLHIDGRGMVQPTVFKIGQSDLHPLASAESYKHLGLPTGYQVRQTPVDTLAGLVRDANKIGASLLAPWQKIEATAVFLLPRLDFIMQGAHVEKEFLTAADKVAKRLARQWLSVPQRASPEIIFLPPSQGGAGLIPLGDLYDLLTVAHAYKMLYARDAAVSRVAMDSLRDTVSRRLRKPASFTDMARYLSGDLEMPRSASKSTYWTRVRSAVLRCKTKLGLRWIWSNETECFKIACGGASAPVGPDRRNFITGLLRRSLFRHYAGSLLAKPDQGKAFEVLRRSRHSSYFLRSGRNIRFCDWRFIHRARLGVLPLNATKRWVVGGDKRCRKCGDLETIPHVLNHCGVHSAARQRRHNGVQDRLAKAVRCRGTIRANRVVEGARGGMSALRPDIVVRDDVGRCIHLIDVAIPFENRIAAFEEARRAKVEKYQPLADQLAADSGYEVTVDAFLVGSLGAWDPQNERVLRRLKISRHYAAMMRRLMVGEVIRWSRDIYVEHVSGVRQYAEELLGSGVSSPPP

SEQ ID NO: 8732 - protein, 1161 aa, Sycophaga agraensis
MAHTQECLPGVAPPPNRTAVERREGIRERLGIAGGVRAPQAPGGLRTTRHNIGLTQSTPGPNTSAPQQTGSVGLSNSQDEFINSPPWRPGARVAPSVLGTSGCLANSSATPPTARGGGVHARRRIVSDPHGSLSPPARRATPPCSPSPAVQQPGSDSDEFGSPTASPPADWEGMGPVGSGTVESSVNPSEAALAASPRTSSTQLVQSSSVHPEPSEGVPHPCSSVIRQLQSSLIADLEGINCLAELEAIMPRVIAFISRRAARRPAQGRARPSARRQPEARTAGAPDRVREATRLQHLFRRNQKRAVQEILADSTGVCQIDSKTVHEHFSALAARRDGEAEWPHVFDRVEPSLESARLLTRPFTPEEVFGALKKRSNTSPGPDGLSYSEVRAGDPGALVICALFNTVLRIEGVPSCWLDSNTVLIHKKGPTDDIRNWRPIALGDTTPKLFSALLAGRIKRWAAANGVFSDSQKGFLQYEGCFEHNFVLQEAIKGAADKGGELVVAWLDMADAFTSLPHSSIQRALVGHGLPLKMRNIISAMYRGAKTKVRTVEGFTDPILIQSGVKQGCPLSPDLFNLTLEVVLRELDRTGEGWTVSGRRFTTLAYADDVAVLATSPDGMRKLLEVAYKATRSVGLSLNPLKCATLHIDGRGMVQPTVFKIGQSDLHPLASAESYKHLGLPTGYQVRQTPVDTLAGLVRDANKIGASLLAPWQKIEATAVFLLPRLDFIMQGAHVEKEFLTAADKVAKRLARQWLSVPQRASPEIIFLPPSQGGAGLIPLGDLYDLLTVAHAYKMLYARDAAVSRVAMDSLRDTVSRRLRKPASFTDMARYLSGDLEMPRSASKSTYWTRVRSAVLRCKTKLGLRWIWSNETECFKIACGGASAPVGPDRRNFITGLLRRSLFRHYAGSLLAKPDQGKAFEVLRRSRHSSYFLRSGRNIRFCDWRFIHRARLGVLPLNATKRWVVGGDKRCRKCGDLETIPHVLNHCGVHSAARQRRHNGVQDRLAKAVRCRGTIRANRVVEGARGGMSALRPDIVVRDDVGRCIHLIDVAIPFENRIAAFEEARRAKVEKYQPLADQLAADSGYEVTVDAFLVGSLGAWDPQNERVLRRLKISRHYAAMMRRLMVGEVIRWSRDIYVEHVSGVRQYAEELLGSGSQARRP

SEQ ID NO: 8733 - protein, 937 aa, Sycophaga agraensis
MSRLQTDIVSDLEGVTDIRQLEDLMPRVMSFVGRKATRRVQEARAIKPARQRGERGARVHPDRIIEATRIQTSYRRHKKRTVQRILADSTGICRIAKTTIAEHFSNLAVRRDGEAVWSPVFDREEPIAESAELLTRPFLTGEVRRSLKKRSNTAPGPDGLSYSDIRAGDPGAFIICALFNAVLRIEEVPSCWKERNTILIHKKGPTDDIRNWRPIAMGNTIPKLFAALLAARVKRWAVANKRLSDCQKGFLEFEGCYEHNFVLQEAIRAAANKGGELVVAWLDLADAFTSLPHSSIQRALTGHGLPLKVRSITAALYAGSSTRFITSEGLTDPILISSGVRQGCPLSSDLFNLTLEVVLREMDRTGEGCTVGSRRITSLAYADDMAVLADSPDGMRRLLEAVEQSTRSVGLSFNPAKCATLHIDAGGRVRPTVFRLQQADLRPLESAQAYDHLGLPTGYEVRQTPISTLAGLVRDANKISASLLAPWQKIEATAVFLLPRLDFIMQGAHVEKECLTAADKAVRRLARQWLHLPQRASAEVIALPPSQGGAGLVPLGDLYDLLTVAHAYKMLYACDTTVSQLAMGTLREVVSQRLRKPASCTDMARYLTGDLDMPRSSTRSSYWARVRAATLRCKAKIGLRWIWSDETNCLKVASGAAVVGPARRQYIVGILRRSLFRHYAGSLLAKQDQGKAFEVLRRSRHSSYFLRSGRNIHFCDWRFIHRARLGVLPVNAAMRWVVGGDRRCRKCGDLETIPHVLNHCGVHAGARQLRHNGVQDRLVRAARCSGTITVNHTVRGARGELAALRPDIVVRDDVGRRIHIVDVAVPFENRIAAFEEVRRAKVVKYQPLAEQLAADSGYDVTVDAFLVGALGAWNPQNERVLRRLSISRFYAAMMRRFMVSDTINWSRDIYVEHVSGVRQYGHRERTGGREASRPPDL

SEQ ID NO: 8734 - protein, 1095 aa, Metaphire vulgaris
MAEPINEIMEAVTTASSNSGRTGEGVGVWKCERCEKVCRSKPGLALHIRKAHPEQYHAANIPVETVKARWGEDESYLLARSEAEMISSGVQPRKINSLLYEKFPNRTQEAVKGQRRKAAHKELVIKLVQQFRNQGQDSPLQESVIVGEPLGGRREHPSVLANETEAGGGEVETVSSTDPIAQQHHENNESVDLETYSEPRTCNLRAAWRELAVQDLTRLIDSFDEEPSNCLKEILELLKLNGEDRKTEVANLMETWLGALFHGPTVQNNNVRGNEQVLLKQDEPKRKIDSHKRNSRLVRVKQRRQNPKRIERQAEYRRVQQLYKRNRKRCAEYVINDNCQPRGKDLPLTEQTRFWEKIFTKASIEDDRPINPVQENWNTVSSITLAEVEAALRSSCENAAGPDGISLADMKRVNLKELTALFNIWLITGSVPTRLLKAETVLIPKNPDAAKPGDFRPITVASRVVRVYHRILSKRITSNTLISPRQKAFMPVDGCCENLLLLDAIIRDSKRRLKPLCLIFVDISKAFDSVSHSTILRAMRSHGLPEPLVDYVQYAYSCLETCIRMGRKRSEPILCRQGVRQGDPLSAILFNLVMDCVLEHLDPNIGYKNSDGLRISYLAYADDLILTAASPRGLQEQINRLGEELKLAGLYLNEAKCATMRVQIDGKNQKWIANPEAFIMINEKQVSALSIVSTYKYLGLRTGITGTHTELKGILQTGIERIKRAPLKPQQRLVLLRIFLIPRLNHQLILGEVTASTLESLDRIVRKAVRDWLRLPKDTPKPFFHASQRDGGLGILPFRKVVPVLRKKRLNKLAISNDLAIRWVAGTPGYAKHVMKATRLAQGIAKELESTQECLKEQAVQLYGTCDGKGLKYSNSWPSVNNWVTDGTTLLTGSDFIHAVQVRGNLLPSAERSSRGRRVELPLCEAGCNAVSTLSHISQSCVRTHRLRTARHDSLVDFIRKSLEGEGYSVLVEPIIKTAQGNRKPDLVIVKEAECHIVDVTITSDVFGMASAYEQKVAYYGNEDIRQWAMEKWPGHCIFVGAVVLNWRGALYSKTACLLRRLGIKDFDLKILVVRVLTYTFSMFRHFSRGTTRSC

SEQ ID NO: 8735 - protein, 1006 aa, Hirundichthys speculiger
MQGRKPLVKWPKSNSKEWETIGTDLSLILSQIKGSAEKKLEMMGDLIYSYGKEKFGAKEQVRKKDVVPAPKSRRLQEIQQLVKERRGLRKLWKKATDEEREGLNLLQEELRQRLSKLRRAENLRMRRKKKEKARTDFYKDPFKFVKGIFTKEKSGSLETSKEEIETHLRSIYTDENKDEPIVVPADIPPISPPQHQFDTSPPKLSEVIQAVKKARSASAPGPNGVPYSVYKNAPDVLKFLWKNMRVAWDKQIIPKAWRRAGGVLIPKENNSSTIEQFRQINLLNIEGKIFFSVLARRLTRYLKENQFVDTSIQKAGIAGFSGCLEHNSAVWHQIQTAKKEGKDLHVLFLDLANAYGSVPHSLLWTAFEFFQVPVRITNLVKHYFQDLQFCISTSSMTTAWQPLEVGIMAGCTISPLAFTMAMEIIIRASKWVVGGKRLLCGQRLPPIRAYMDDITTLTTTVPCTKRLLDKLHQNITWAKMKLKPSKCRSISIVKGQIKDHRFHIGGTPVPTVSEMPVKSLGRWYDAKLKDTEQFEHLKNDTITYMNRINKTLLPGKLKLWCFQFGILPRIMWPLTVYEIPITKVEKLERVISTQLKQWLGIPRCLSSIGLYGNSKLELPITGLVEEFKCTKARLVMTLTQSEDAIIRTAAPRVATGRKWTPAEAVQDAKSALHFRDVVGQVQQGRAGLGLIPKNPLWHKATPVQKRRLVVEEVRRQEEAERHAKAVSMAKQGRWTNWESLEKRKLSWRDLWEMEGARLSFVIRATYDLLPSPQNLQLWFGEDPACSLCQAPATLKHILSGCPTSLAQGRYTWRHNQVLRELASTLEQRRTTVNALPHRSTGRAHFTPFVPAGQTQQQQTSQNASILDPARDWTMEVDLEKKLVFPLEIAVTTLRPDIVLWSRTAKLAYVMELTVPWEEGVEEAYERKKNKYSDLAAEASQNGWRTLIFPVEVGTRGYVATSTTSLLKKMGVRGRSLQQAIKAVSNAAEKSSHWLWIRRKDNSWAAR

SEQ ID NO: 8736 - protein, 1083 aa, Labeo rohita
MVLRYIKDGRNALKTTNPGPRIDRILSGKRLSQSDETQRQEETHSPQRISTPGKEEEVSGRTTSPRQQPAHRKKENMQGRKPLVKWPKSNSKEWETINTELSLILSNIIGSAEKKLEMMGDLIYRYGEEKCGVKGQVRKNDMLPTPKSRRLQEIQQLVKERRRLKKLWRKATVEDREGINFLQEDLKHRLSKLRRAESLRIRRKKKEKARTDFYKDPFKFVKGICTKEKSGFLKTSKDQVEEHLRTIYTDEKKDEPIVVPTDIPPISPPQHQFDISPPKLKEVRQAVKKARSASAPGPNGVPYSIYKNAPDVLKILWKNMKVVWDKQIIPKAWRRAGGVFIPKEKNSTTIEQFRQINLLNIEGKIFFSVLAQRLTQYLKQNHFIDTSIQKAGIAGFSGCLEHNSIIWHQIQSAKREGKDLHVLFLDLANAYGSIPHSFLWAAFDFFQVPTKITNLVKHYFQDLQFCLTTSGFTTSWQPLEVGIMAGCTISPLAFTMAMEVIIRASKWVVGGERLQGNQRLPPIQAYMDDLTTLTTTVPCTKRLLEKLYQNIIRVRMKLKPNKCRSISIVKGQVTDQRFYVGGTPVPTVLEMPVKSLGRWYDAKLKDTEQFEQIKIDTSMYMERINKTLLPGKLKVWCFQFGILPRLLWPLTVYDIPITKVEKVERLISIQLKQWLGIPRCLSSVGLYGHGKLELPFTGLVEEFKCTKARLVMTITESDDAVVRTAAPRVVSGRKWNPSEAVQSAKSALYFRDVVGQVQHGRAGFGLIPKTPLWHKATSVQKRQLVEEEVRRQEEGERHAKAVSMAKQGRWTNWEGLEKKRLSWRGIWQMEGARLSFVLRATYDLVPSPQNLKEWYGEDPACSLCKVPASLRHILSGCTTSLTQGRYTWRHNQVLRELAAILEQRRTTTNNLPQTLIGQVNFINFVPAGQRQEHRTISKDASILQSAWDWKLEVDLDKKLVFPPEIVATTLRPDMVLWSPTTKLAYVVELTVPWEEGVEEAYERKKNKYSDLTAEASQNGWKISIFPVEVGCRGFVAISTTSLLRKIGVKGRSLQQAVKSISSIAEKSSNWLWIKCKDPIWAAR

SEQ ID NO: 8737 - protein, 1280 aa, Oxygymnocypris stewartii
MEGGVPGTLGTPLSLLETLWASINETSMKQGAHLMTPMTYLTLLFLTTPTATVKSFLLKGLEHLVLLALLIVWKNPVTVVKVQLATRERPCDSMERQLTGGNRPQRGCYGLATHSSRLRHPIRVQEPPYLATKSSKRRIPLESARAGAQEDSQTDPPVMTLAMDMTSKEGSSKTLEKLAVGHVLQTCVCGWAKVTSTHGLKVHQGRKKCLITTNPGPRIDWILSRRRLNQSDETQRQEETHSPQRISTPGNEEEASGRTTSPRQQPAYRKKESMQGRKPLVKWPKSNSKEWETINTDLSLILSNIKGSAEKKLEKMGDLIYSYGEEKCGMKEQVRKKDMLPAPKSRRLQEIQQLVKERRRLRKLWKKATVEEREGINFLQEDLKHRLSKLRRAESLRMRRKKKEKARTDFYKDPFKFVKGIFTKEKSGFLKTSKDQVEEHLRTIYTDEKKDEPIVVPPDIPPVSPPQHQFDISPPKLSEVKQAVKKARSASAPGPNCVPYSVYKNTPDVLKILWKNMKVAWDKQIIPKAWRRAGGVFIPKEKNSTTIEQFRQINLLNIEGKIFFSVLAQRLTQYLKQNHFIDTSIQKAGIAGFSGCLEHNSIIWHQIQTAKKERKELHVLFLDLANAYGSVPHSFLWAAFDFFQVPTIITNLVKHYFQDLQFCLTTSGFTTSWQPLELGIMAGCTISPLAFTMAMEIIIRASKWVVGGERLQCNQRLPPIRAYMDDLTTLTTTVPCTKRLLEKLHQNITWARMKLKPSKCRSISIVKGQVTDQRFHVGGTPVPTVSEMPVKSLGRCYDAKLKDTEQFEHLKNDTSMYIERVNKTLLPGKLKVWCFQFGILPRLLWPLTVYEIPITKVEKLERLISTQLKQWLGIPRCLSSVGLYGHGKLELPITGLVEEFKCTKVRLVMTLTESEDAVIRTAAPRVVAGRKWTPSDAVQSAKSALHFRDVVGQVQHGRAGFGLIPKSPLWHKATSVQKRQLVVEEVRRQEEGERHAKAVSMAKQGRWTNLEGLEKKKLSWRDIWQMEGARLSFVIRATYDLLPSPQNLKEWYGEDPACSRCQVPASLRHILSGCTTSLTQGRYTWRHNQVLRELALILEQKRTTSNNLPQTLAGQVNFINFVPTGHHQEQRTTSKDASILQSARDWKLEVDLDKKLVFPPEIVATTLRPDMVLWSPTIKLAYVVELTVPWEDGVEEAYERKKNKYSDLAAEASQNGWNTCIFPVEVGCRGFVATSTTSLLRKIGVKGRSLQQAIKSISSAAEKSSNWLWIKRKDAIWAAR

SEQ ID NO: 8738 - protein, 883 aa, Oxygymnocypris stewartii
MRRKKKEKARTDFYKDPFKFVKGIFTKEKSGFLKTSKDQVEEHLRTIYTDEKKDEPIVVPTDIPPVSPPQHQFDISPPKLSEVKQAVKKARSASAPGPNGVPYSVYKNTPDVLKILWKNMKVAWDKQIIPKAWRRAGGVFIPKEKNSTTIEQFRQTNLLNIEGKIFFSVLAQRLTQYLKQNHFIDTSIQKAGIAGFSGCLEHNSIIWHQIQTAKKERKELHVLFLDLANAYGSVPHSFLWAAFDFFQVPTIITNLVKHYFQDLQFFLTTSGFTTSWQPLEVGIMAGCTISPLAFTMAMEIIIRASKWVVGGERLQCNQRLPPIRAYMDDLTTLTTTVPCTKRLLEKLHQNITWARMKLKPSKCRSISIVKGQVTDQRFHVGGTSVPTVSEMPVKSLGRWYDAKLKDTEQFEHLKNDTSMYIERVNKTLLPGKLKVWCFQFGILPRLLWPLTVYEIPITKVEKLERLISTQLKQWLGIPRCLSSVGLYGHGKLELPITGLVEEFKCTKVRLVMTLTESEDAVIRTAAPRVVAGRKWTPSDAVQSAKSALHFRDVVGQVQHGRAGFGLIPKSPLWHKATSVQKRQLVIEEVRRQEEGERHAKAVSMAKQGRWTNWEGLEKKKLSWRDIWQMEGARLSFVIRATYDLLPSPQNLKEWYGEDPACSLCQVPASLRHILSGCTTSLTQGRYTWRHNQVLRELALILEQKRTTSNNLPQTLAGQVNFINFVPTGHHQEQRTTSKDASILQSARDWKLEVDLDKKLVFPPEIVATTLRPDMVLWSPTIKLAYVVELTVPWEDGVEEAYERKKNKYSDLAAEASQNGWNTSIFPVEVGCRGFVATSTTSLLRKIGVKGRSLQQAIKSISSAAEKSSNWLWIKRKDAIWAAR

SEQ ID NO: 8739 - protein, 1122 aa, Labeo rohita
MTLGMDMTSKEGSSKILEKLAAGHVFQTCVCGWAKVTSTHGLKVHQGRKKCLKTTNPGPRIDRILSGKRLSQSDETQQQEETHSPQRISTPGKEEEVSGRTTSPRQQPAHRKKENMQGRKPLVKWPKSNSKEWETINTELSLILSNIIGSAEKKLEMMGDLIYRYGEEKCGVKEQVRKNDMLPTPKSRRLQEIQQLVKERRRLKKLWRKATVEDREGINFLQEDLKHRLSKLRRAESLRIRRKKKEKARTDFYKDPFKFVKGICTKEKSGSLKTSKDQVEEHLRTIYTDEKKDEPIVVPTDIPPISPPQHQFDISPPKLKEVRQAVKKARSASAPGPNGVPYSVYKNAPDVLKILWKNMKVAWDKQIIPKAWRRAGGVFIPKEKNSTTIEQFRQINLLNIEGKIFFSVLAQRLTQYLKQNHFIDTSIQKAGIAGFSGCLEHNSIIWHQIQSAKREGKDLHVLFLDLANAYGSIPHSFLWAAFDFFQVPTKITNLVKHYFQDLQFCLTTSGFTTSWQPLEVGIMAGCTISPLAFTMAMEVIIRASKWVVGGERLQGNQRLPPIRAYMDDLTTLTTTVPCTKRLLEKLYQNITRVRMKLKPNKCRSISIVKGQVTDQRFYVSGTPVPTVLEMPVKSLGRWYDEKLKDTEQFEQIKIDTSMYMERINKTLLPGKLKVWCFQFGILPRLLWPLTVYEIPITKVEKVERLISIQLKQWLGIPRCLSSVGLYGHGKLKLPFTGLLEEFKCTKARLVMTITESDDAVVRTAAPRVVSGRKWNPSEAVQSAKSALYFRDVVGQVQHGRAGFGLFPKIPLWHKATSVQKRQLVVEEVRRQEEGERHAKAVSMAKQGRWTNWEGLEKKRLSWRDIWQMEGARLSFVLRATYDLLPSPQNLKEWYGEDPACSLCKVPASLRHILSGCTTSLTQGRYTWRHNQVLRELAAILEQRRTTTNNLPQTLIGQVNFINFVPAGQRQEHRTISKDASILQSARDWKLEVDLDKKLVFPPEIVATTLRPDMVLWSPTTKLAYVVELTVPWEEGVEEAYERKKNKYTDLAAEASQNGWKISIFPVEVGCRGFVAISTTSLLRKIGVKGRSLQQAIKSISSIAEKSSNWLWIKRKDPIWAAR

SEQ ID NO: 8740 - protein, 1116 aa, Neogobius melanostomus
MDTTTKDKSHYDCEKPKAEYALQTCVCGWSKVTSTRGLKIHQGLKKCLKKPNPGPRIDQILVRGRSSQSVETQWQEEFHSPQSISTQEKDEESTSHDLQSSGAQRKTESLLIQKPMVKWPKSNSQEWKSINADMNLILNSIKGSAEKKLEKMGDLIYNYGKERFGIKEPITKENKAPAPKSRRVQEIQKLVKERRQLRKLWKKATEEDKEGIRQLQEDLKHRLVKLQRAENMRIRRKKKEKVRTTFFKDPFKFVKGVFTKEKSGTLKTTKEEIEEYLKETYSDKLREKPLNIPTDIPPISPPQHRLDISPPKLSEVRDVVRKARSASTPGPNGISYQVYKNAPDILKYLWKNMRVMWEKQIVPKVWRRAGGIFIPKEKNAVTIEQFRQINLLNIEGKIFFSVLAQRLARYLKVNQLIDTSIQKAGISGFSGCLEHTSVIWHQIQSAKEERKDLHVLFLDLANAYGSVPHSLLWSAFDFFQVPEKITQLIKLYFQDLQFCITTPQFTTIWQPLEKGIMAGCTVSPLVFTMAMEVIIRASKWVVGGKRLQGGQPLPPIRAYMDDITTLTSTVPCTRRLLKKLQENITWARMKIKPSKCRSISIVKGRISEQRFHIEGTPIPTVSELPVKSLGRLYDAKLKDVERFEQLKDDTTLYIKRLNKTLLPGKLKLWCLQFGILPRIMWPLTMYEIPMNKVEKLERMISTHVKQWLGVPRCLSSIALYGRGKLELPITGLVEEFKCTKARLVMTLEGSQDEVIRRAAPKVIAGRKWTPAESVQSAKSSLCLRDIVGQVQHGRAGFGFNPGIPKWNKATPIERRQLVVEEIRRQEEEEREAKAVSMAKQGRWTSWNSVEKRKISWRDIWEMEGPRLSFLVRATYDLLPTPQNLKQWFGEESSCSLCQAPASLKHILSACTTCLSQGRYTWRHNQVLRQLAIILEQRRTNTNALPQTAKGHSQLVTFVAAGQNPQSCLTSANTNVLQVARDWKLEVDLDKKLVFPPEIVVTTLRPDMVLWSAATQRALVVELTIPWEEGVEEAYERKKTKYSELAVQAAQNGWKINVFPVEVGCRGFVATSMTYLLKKIGVKGSSLRHAIKSLSAVAEKSSNWLWIKRKDNTWAVR

SEQ ID NO: 8741 - protein, 670 aa, Microvelia longipes
MLLLVTGYYPQKWCLNRTVLIPKAGKDPSVVGNTRPITIGSLLARMYSGLICSRLMPTIGLSQRQKGFKSVNGTFENCFLLDQAIYSAKKHRKELVVLVIDIKRAFDTVPHEAIRNALISYGHHLDVVSRVMSSYSDVRTSFKTKNGDVLISLLRGVKQGDPSSPLLFNTVLDPLIQWLDMESAEGFGPLAYADDLAILCPSVQVANYFLNGVVAYLDRLGMELSADKCLAYKLHRKASGAMSVDGTDLAIGETAVKAPDLKEGFKYLGVVFDPFKGLNNHGVLKLLSEARDRISGLPMKPRQKISLFYEFLMPRSFYRMAIDPPSKSRLKSFDAETRAWVRGVLHLPVGTPKGLIHSQTKNGGLGLPTIASQIWISHLKAASAVLESPDPLISFFSLLNGIEDNIRSQAALWNIAWPQNSPEIALAKSQLRKDIIEKWSEKGATGHGVRSFLDDKIGNRWLREPWLLKESNFLIALRMRANVFGTREAIHRADPAAQTDCRQCGEHPETLKHILSSCSLNRNKIIKRHDEIKNLISERLCAKGWNVLVEPTFELNQNDNLVRLRPDIVCHKDGEVRVVDVAVAYEDGDSLKEVADGKKRKYEVLDRLLMGRFQCQSFRVLPIVIGSRGAMPHRTINAIKSLGISNDDNLTISLIALRCSIGIATRHLDR

SEQ ID NO: 8742 - protein, 1305 aa, Ephestia elutella
MERKRKSKSSTQLPAVVENIETTQNHPQSQVNSNNSSQLNTVRRSNRRTCNRYRSVSPDTTSDRAEPYSPSTASYAPSLSSVDEDPSDRLSPPNLNPASDVAQEVNTFLPASTKAGKPRVRMAWSNDVNIFIMRTYYLITKLETDMTCYRKPLHELFRQKYPDVNVSEQRISDQRRAIIKNKYLREDILNQIKYEVQQELNQANQSNENRPQSSQQPLVYDHNSPPPSSHPIVFSQNLDLSPQPSQAQTQRNTSHNSTQTIHISTQTPLSQHLLLENEIEVIDTTCQDEYIHKLSDQLQSTLLQYSGIDPTKRPKLPKLRYSKYLTKLVSIFNEHILSRFFVSDSSLIDIHTLIYCSAFVISNELGYKIYEEPRPQRRNSNHKPAWQQRLENDIVRLRADIGRLTQYIQGNRSSNIENSVAKIFNNYKIHTRHEQNNNTPEQFLDTLKQKLALKSKRIARYKKALKRKQDNKLFSTNEKMFYRQIKQPHIQNEHISCSNRNSLSKEKLEEFWSNIWERSESHNEEAQWIKEEESRWESIDEMVFKDIEEEDVRLNTAKLHNWKSPGIDQIHNFWYKKFYILHKVLAKKFNEIVLGQQTIPDFIAKGITFMIPKGNNLDDPSQYRPITCLPTIYKILTSIISLKISTHIEKNNIIAEEQKGCRRNHMGCKEQLIIDSTIHRQANLNKRNLNCTFIDYQKAFDSIPHTWLLRVLELYKINPTIISFLRTIIPFWKTNLHVKNIDANIMSREIAIKKGIYQGDSLSPLWFCLALNHLSHLLNKQNKGYRLKPSDPQTAISHLIYMDDIKLYTKNKTDMKQLIDTTAKFSTDINMKFGIEKCKTLNIRKGKIIPGDFIVNEEEVIKAMDHDDLYKYLGYQQSKQLDHTSLKSSLSAEYKNRVNIICKSQLVGKSLIKAINTYAIPVLTYSFGIVKWTKTDINQLEIKTRTILTKNHHLHPKSAIERMTIKRANGGRGLIDIYDLWQKQLISLQSFFLRKAESSNIHKAVTEYDNNHTPLNLANTSTDHTHSITDSEKQKLDKWKSKVLHGRHPHDLEQSAIDLEASNKWLTHSNLYPETEGFIIAIQDQIINTKNYRKHIIKDPSITEDKCRKCHTQSETIQHIIGACSNLTQTDYTHRHNQVANIIHQKLAIKHKLLLEKPTPYYKYTPNPVLETNEYKLYYDRAILTDKTIHYNRPDIVLQDKINKIAYIIDIAVPNTHNITKTITEKINKYTDLKEEIGRIWKIDKVYIVPIVLSSTGVIPKHLHHSLKLLDLPSSSYINMQKAVILNTCRTVRKFMQGDETIDSI

SEQ ID NO: 8743 - protein, 828 aa, Ephestia elutella
MFYRQIKQPHIQKEHISCSNRNSLSKEKLEEFWSNIWERSESHNEEAQWIKEEESRWESIDEMVFKDIEEEDVRLNTAKLHNWKSPGIDQIHNFWYKKFYILHKVLAKNFNEIVLGHQTIPDFIAKGITFMIPKGNNLDDPSQYRPITCLPTIYKILTSIISLKISTHIEKNNIIAEEQKGCRRNHMGCKEQLIIDSTVHRQANLNKRNLNCTFIDYQKAFDSIPHTWLLRVLELYKINPTIISFLRTIIPFWKTNLHVKNIDVNIMSREIAIKKGIYQGDSLSPLWFCLALNPLSQLLNKQNKGYRLKPSDPQTAISHLIYMDDIKLYTKNKTDMKQLIDTTAKFSTDINMKFGIEKCKTLNIRKGKIIPGDFIVNEEEEEVIKAMDHDDLYKYLGYQQSKQLDHTSLKSSLSAEYKNRVNIICKSQLVGKSLIKAINTYAIPVLTYSLGIVKWTKTDINQLEIKTRTILTKNNHLHPKSAIERMTIKRANGGRGLIDIYDLWQKQLISLQSFFLRKAESSNIHKAVAEYDNNHTPLNLANTSTDHTHSITDSEKQKLDRWKSKVLHGRHPHDLEQSAIDLEASNKWLTHSNLYPETEGFIIAIQDQIINTKNYRKHIIKDPSITEDKCRKCHTQSETIQHIIGACSNLTQTDYTHRHNQVANIIHQKLAIKHKLLLEKPTPYYKYTPNPVLETNEYKLYYDRAILTDKTIHYNRPDIVLQDKINKIAYIIDIAVPNTHNITKTITEKINKYTDLKEEIGRIWKIDKVYIVPIVLSSTGVIPKHLHHSLKLLDLPSSSYINMQKAVILNTCRTVRKFMQGDETIDSI

SEQ ID NO: 8744 - protein, 978 aa, Graphium evemon
MASTTRFPRVDTQDATETHETTQTHTATILSADRVNFRAEVLCFYDCPNLLTCHHYRVVTMFVNPKHQGRRPNQWRCIRCNENPGSYIALSKHMDEKHKIAINLTCPQCHQDNFDNLKKAARHMFSCNRTPSITQAEVNHLEISTLPTETLLPLTSNLHSAIENLPESTFKRLALETFHGGDQLNAMADHLTANSLPTTRRPTRRKRKKQKNAEGRVVKEFKRNQYLWRCSKTKLYSVIMKGDTESKLKIGEAERYFSNLFSVTGQCNASMIQTKPLESVNFNYYICNDQIEAYLKAKRHSSPGIDGLTTIDVVPRLTEWTILINTCLLVGRVPLTWHKSRTTLIPKCNSSEPADHRPLSISPLCYRALAAVLAKRLYNNVDLHPSQRGFINEDGIYQAITLVRYLASRKVPLASVDLAKAFDSVPHETLMKACQASGLNQHSLALISNVYTDATTVIQANGRRSVPIMLKRGVRQGDPLSPLLFNMVMDQVLRRLDECNIGTDLGNRRLAAVSYADDLVLCADTRNDLHNLLAIANQSLQQLGLSINLNKSFSYRVDIGLPVKMSFKYLGAHIDSTGHSRMKPEEMMEKVRMLDRAVLRGNQKLFFLRFHLLPSVYHQLVNESATGKVLEKMTGQIREVVRRWCRLPATTCNSFLHLAIRNGGLGIPDLRRTIPEMARDRLTRLKSSHVWYVKHLVRTGWYQNELTRVIKLCTHESAQQWHLDDLHDISTAHDTFLEGGARMLNRHLTGAGCIEGQQFYRFVQLRATNDDANSRKHRHLPICTKCSLGVEASLRHVISTCPGNAEVINRRHNTIRDLIVSFLRRNGHFVRVEHTLPCGLRPDIIVRTPDRRIFALDVTIPFELTAHSLDLAYRTKIEKYSAHIDEIREAGNAGTLHFARPRCTLAYGLVFGARGSMHRQTTTILERHLGLPRWLLERIFAEIVRHSVDLFVHSPAASRDTTIIQTCSSSRVIIFLSR

SEQ ID NO: 8745 - protein, 998 aa, Ophraella communa
MDPTKRPWIPKQKTSKKFSQIIDTINCHTLPRCLEINSFEDLHDGIYCAAVTAAKCNGARIRELTTETWRTQDDHSQPWKKRLKKKIETKRAEIAQLMEYRKGNPSKKLKRKVADILCKYEIHTLRDRRNSKIEEFIDTLQQKLTAISARLRRYTKCDKRKQENRLFRDNEQKFYRNLKAKHNNTNDFKNVTPELDQVKAFWSSLWARRADYNPNASWLKVEQEKADTKQIMEEPIITETNLKAVLANAHNWKSPGSDNIQNFWYKKFTSVHNKILFYINNFICNPEKTPTFLMEGKTYLLPKKEHTNDPSKYRPITCLQTFYKILTACVTNIMNTHINHYDIMTEEQKGCRKGSMGCKEQLIIDSVILKQAQKKNRKLSCGYIDYQKAYDSVPHTWLIRVLELYGIHPTLVNFLKTIMKSWRTIIHMPTANPNHNINRPGPTATTSATAMIPIKRGIYQGDSLSPLWFCLALNPLSKRLNRTGIGYNLKQEEINHVISHQLYMDDLKLYAPSYEKLKELIQLVEQFSTDISMKFGLDKCRVINLNRGKFFVRGVALESGELMEAMQENEVYKYLGYEQARNIKHSDIKEALKKEYMNRVRTACLTELNSKNLFKMINTFAIPVLTFSFGIIQWTETDLDEIMRKTRVELTKHRKHHPKASIIRLTIPRGEGGRGLIDIKNLHHKQIIILRKYFHEKKQTTGLHHSICMADLNYTPVNLAHETQERIAEIKPWEEKVNEWRSKPLHGRHPQDINQIYVDKKASNAWLKNGELFPETEGFMIAIQDQVVNTKNYLKYIIKDPTVQDDCCRKCRQKPETIQHVLSACSRLAQTDYLHRHNQVVAIIHQCLANNLQLTDQREPYYKYNPAPVLQSTRYTLYYDRSIITDRFIPHNRPDIVLRAKESQVAYLVDVAVPNSHNIETTIAEKHQKYQDLADEIKKMWNLEKVAIIPIVLSTTGIIPKSLHQNLEVLKINKNVSTLLQKAVILNTTRIVRKFLNQ

SEQ ID NO: 8746 - protein, 1083 aa, Thalassophryne amazonica
MLVQGRKKCLREVGKGPRIDNYFLRGGANQWSEAQWQDTHHSPQGIRTPVEAQSGTNPPVNLEPIQPWMAVERGMKGRKPQILWPKSCQKKEWETIDADIVCLLGGLKGCAERKLNKMGEIIYSYGKERFGKKSMNLKERKEPGRRLKSRRQQEIERLVKERRALRKQWKKATEVEKKGFEVLQGDIKQRLTALRRAESLRKQHKKKERTRNAFFRDPYRFVKHLFVKEKTGSLNVSKRELEEHLKRTYYDKQRYVPVSIPYDMPPIHPLEHQMEIGPPTWNEVESTVKRAKSASAPGPNGVSYRFYKNSPGVLRYLWRQMKVVWKKGIIPKAWRRAGGILIPKEKNSSTIDQFRQISLLNVEGKVFFRVVARRLSDFLQRNNFVDTSVQKAGISGFPGCLEHVSVIWHQLQMARRERKNLHVVFLDLANAFGSVPHEILWSAFNFFQVPECITRLVKAYFQDLQFCIDTQAGTTAWQQLEIGIMAGCTISPLAFTMAMELIVHASRWVVGGERLESGIRLPPIRAYMDDMTTVTTTGACTKRLLSKLQENIEWARMEVKPSKSRSISIVKGQLVNKKFYINNVPIPTVLEKPIKSLGRWYSAELKDTKQVEQLRQDTINGLKMINNTDLPGKLKLWCYQFGLLPRLMWPLSIYEVTLSQAKRLERLVSAQVRKWLGLPKCLTSIALYGNGVLSLPISSLVEEYKCAKARLEMTLTESRDPAVRGAAPTLVTGRKWKPSVAVAMAKSALRHRDIVGHVQHGRGGLGLELTAATWHKATPAERRHMVVEEVRNQEEAARCATAVSQVQQGRWMKWEGVERKKITWSDLRSMESNRLGFMIRATYDVLPSPSNLHVWYGEDSACVQCAAPATLKHILVWCKASLTQGRYTWRHNQVLKCLAAELENRRVIVNTMPVNPQSTFQRKIFIREGEKRGSKLSSEPGLLNIARDWEMQVDLSQRLTFPLEILATNLRPDLVLWSKSCRRVFIVELTVPWEDAIEEAFERKRLQYLNLAAEAEGRGWSVKVWPVEVGCRGFVARSTTKFLKEVGIRGQAQRKLIKELATVAERSSYWLWLKRKEATWAFK

SEQ ID NO: 8747 - protein, 938 aa, Hypoplectrus puella
MKSRRQQGIERLVKERRCLKKMWKKATEGERKGLEVLQDDIKQRLTTLRRAECLRKQHKKKERTRTAFYRDPYKFAKDLFAKEKTGTLKAPIRELEEHLRKTYSDNQRHVPVSFPDDMPPIHPPEHQMETRPPTWGEVESTVKRARTASAPGPNGIPYRLYKNTPGVLKYLWKLMKLAWEKGTIPKAWRRAGGILIPKEKNSSTIDQFRQISLLNVEGKIFFSVVAQRLSAFLQKNNFVDTSVQKAGISGFSGCLEHANVIWHQIQTAKKEKRDLHVVFLDLANAFGSVPHELLWTAFNYFQVPEDITRFVKAYFQDLQFCVTTQANTTAWQHLETGIMAGCTISPLAFTMAMELVIRASRWVVGGERLKSGLRLPPIRAYMDDMTTITTTSACTKRLLDKLQVNIKWARMEIKSSKSRSISIVKGQLANERFHVNGEPIPTVLEKPIKSLGRWYSAELKDSKQVEQLRQDTITGLKQINNTALPGKLKLWCFQFGLLPRLMWPISIYEVTLSHANRLERLVNSQVRRWLGLPKCLSSIGLYGSGALSLPISSLVEEYKCAKTRLEMTLTESRDPFVRGAAPTLATGRKWKPSAAVAVAKAALRHRDIVGHVQHGKGGLGLEATTPTWQKATSTERRHMVVEEVRHQEEAARCAKAVSQAQQGRWMRWEGVERRRITWNELWSMEPNRLSFIIRATYDVLPSPTNLHLWYGEDPACHQCAASATLKHILVGCKTSLTQGRYTWRHNQVLRCLAAELENKRISANAMPPNAQSTIPQKTFVREGEKRQTRSSPLESGPLSIARDWEMRVDLSQRLTFPPEIAVTNLRPDLVLWSKSCRHAFIVELTVPWEDAIDEAFERKRLRYANLAAEAEGRGWSVKVWPVEVGCRGFVARSTTRLLKEIGIRGQAQRRAIKELATAAERSSHWLWLKRRDATWAAK

SEQ ID NO: 8748 - protein, 1010 aa, Trachurus trachurus
MDGRKPQILWPKSCQKQEWESTDTDLVHLLEGLKGCVERKLDRIGDVIYSYGAERFGVKRQNQRTQKESSAHLKSRRQQEIERLVMERRCLRKQLKKATEGERKGLEALQGDIKQRLATLRRAECLRKQHKKKERTRTAFYRDPYKFAKDLFVKEKTGTFKAPIRELEEHLRKIYSDKDRHVPVSIPDDMPPIHPPEHQMETRPPTWSEVESTVKRARTASAPGPNGIPYRLYKNTPGVLKYLWKLMKVAWEKGSIPKAWRRAGGILIPKEKNSSTIDQFRQISLLNVEGKIFFSVVAQRLSTFLQKNNFVDTSVQKAGISGFSGCLEHANVIWHQVQTAKKEKKDLHVVFLDLANAFGSVPHEFLWTAFNFFQVPEDITRLVKAYFRDLQFCVTAQASSTAWQHLETGIMAGCTISPLAFTMTMELIIHASRWVVGGERLKSGLRLPPIRAYMDDITTITTTSACTKRLLDKLQGNIKWARMEIKPSKSRSISIVKGQLANERFHVNGEPIPTVLEKPIKSLGRWYSAELKDSKQLEQLRQDTIMGLKQINNTALPGKLKLWCFQFGLLPRLMWPISVYEVTLSHANRLERLVNAQVRRWLGLPKCLSSIGLYGNGALSLPISSLVEEYKCAKTRLEMTLTESRDPFVRGAAPTLATGRKWKPSAAVAVAKTALRHRDIVGHVQHSRGGLGLEATTPTWQKATPTERRHMVVEEVRHQEEAARCAKAVSQAQQGRWMKWEGVERRKITWNELWSMESNRLSFIIRATYDVLPSPTNLHLWYGEDPACHQCAASATLKHILVGCKTSLTQGRYTWRHNQVLKCLAAELENKRVSTNAMPLNAQSTVPQKTFVREGEKRRTKSSPLESGPLSAARDWEMRVDLSQRLTFPPEIAATNLRPDLVLWSKSCRHVFIVELTVPWEDAIDEAFERKRLRYANLAAEAEGRGWNVKVWPVEVGCRGFVARSTTRLLREVGIRGQAQRKAIKELATAAERSSHWLWLKRRDATWAAK

SEQ ID NO: 8749 - protein, 1010 aa, Trachurus trachurus
MDGRKPQILWPKSCQKQEWESTDTDLVHLLEGLKGCVERKLDRIGDVIYSYGAERFGVKRQNQRTQKESSAHLKSRRQQEIERLVMERRCLRKQWKKATEGERKGLEALQGDIKQRLATLRRAECLRKQHKKKERTRTAFYRDPYKFAKDLFVKEKTGTFKAPIRELEEHLRKIYSDKDRHVPVSIPDDMPPIHPPEHQMETRPPTWSEVESTVKRARTASAPGPNGIPYRLYKNTPGVLKYLWKLMKVAWEKGSIPKAWRRAGGILIPKEKNSSTIDQFRQISLLNVEGKIFFSVVAQRLSTFLQKNNFVDTSVQKAGISGFSGCLEHANVIWHQVQTAKKEKKDLHVVFLDLANAFGSVPHEFLWTAFNFFQVPEDITRLVKAYFRDLQFCVTAQASSTAWQHLETGIMAGCTISPLAFTMAMELIIRASRWVVGGERLKSGLRLPPIRAYMEDMTTITTTSACTKRLLDKLQGNIKWARMEIKPSKSRSISIVKGQLANERFHVNGEPIPTVLEKPIKSLGRWYSAELKDSKQLEQLRQDTITGLKQINNTALPGKLKLWCFQFGLLPRLMWPISVYEVTLSHANRLERLVNAQVRRWLGLPKCLSSIGLYGNGALSLPISSLVEEYKCAKTRLEMTLTESRDPFVRGAAPTLATGRKWKPSAAVAVAKTALRHRDIVGHVQHGRGGLGLEATTPTWQKATPTERRHMVVEEVRHQEEAARCAKAVSQAQQGRWMKWEGVERRKITWNELWSMESNRLSFIIRATYDVLPSPTNLHLWYGEDPACHQCAASATLKHILVGCKTSLTQGRYTWRHNQVLKCLAAELENKRVSTNAMPLNAQSTVPQKTFVREGEKRRTKSSPLESGPLSAARDWEMRVDLSQRLTFPPEIAATNLRPDLVLWSKSCRHVFIVELTVPWEDAIDEAFERKRLRYANLAAEAEGRGWNVKVWPVEVGCRGFVARSTTRLLREVGIRGQAQRKAIKELATAAERSSHWLWLKRRDATWAAK

SEQ ID NO: 8750 - protein, 1164 aa, Carassius auratus
MATESSKEKIPLESARAGAEDDSSVDHTVTDPGMETTMNQMFSTGVDGVTVLAGHKLQSCICGWKKITSEKGLKIHQGRKKCLREPSEGPRIDHYFLRGRANQSSEAQWQDIHHSPQGIRTPDEVQPSTEPPTDMSPEPIQPQTAVERKMNGRKPQILWPKSCQKKEWETTDTDLVHLLEGLKGGVERKLDKIGEIIYSYGAVRFGVKSTTPNLGTQKNPSDNLKSRRQQEIERLVKERRNLRKQWRKATEVERKGLEPLQGDIKQRIATLRRAECLRKQYKKKERTRTAFYKDPYKFVKYLFVKEKTGTLKVPLRELEKHLRKTYSDNQRFVPARIPDDMPPIQPPEHQLEARPPTWSEVRGTVKQARTASAPGPNGVPYRLYKNAPGVLKYLWKLMKVAWEKGIIPKAWRRAGGILIPKEKNSSTIDQFRQISLLNVEGKIFFSVVTQRLSVFLQKNNFVDTSVQKAGISGFSGCLEHTNVIWHQIQTAKKEKKDLHVVFLDLANAFGSVPHEILWTAFKFFQVPEGVTRLVKAYFQDLQFCVTIQASTTAWQHLEIGIIAGCTISPLAFTMAMELIIRASRWVVGGERLKSGLRLPPIRAYMDDMTTITTTNACTKRLLDKLQGNIKWARMEIKPSKSRSISIVKGQLTNERFQVNNEPIPTVLEKPIKSLGRWYSAELKDSKQIEQLRQDTISGLKKINNTALPGKLKLWCFQFGLLPRLMWPISIYEVTLSHAIRLERLVNAQVRKWLGLPRCLTSIGLYGNGALSLPISSLVEEYKCAKSRLEMTLTESRDPVVRGAAPILATGRKWKPSAAVAAAKAALKHRDIVGQVQHGRGGLGLEAATPTWQKATPTERRHMVVEEVRHQEEAARCAKAVSQAQQGRWMKWDGVERRKITWSEMWGMEANRLSFIIRATYDVLPSPTNLHLWYGEDPACSLCAGAAPATLKHIMVGCKTSLTQGRYTWRHNQVLRCLAAELENKRATTNAAPLNAQTTIPRRTTFMREGEKQWTKPSLPDCGPLNAARDWEMRVDLNQRLTFPPEIAATNLRPDLVLWSKSCRRVFIVEMTVPWEDAIDEAFERKRLRYANLAAEAEGRGWNVKVWPVEGGCRGFVASSTTRLLKEVGIRGQSQRRAIKELATVAERSSHWLWLKRRDSTWAAK

SEQ ID NO: 8751 - protein, 1164 aa, Carassius auratus
MATESSKEKMPLESARAGAEDDSSVDHTVTDPGMETTMNQMFSMGVDGVTVLAGHKLQSCICGWKKITSEKGLKIHQGRKKCLREPSEGPRIDHYFLRGRANQSSEAQWQDIYHSPQGIRTPDEAQPSTEPPTDMSPEPIQPQTAVERKMNGRKPQILWPKSCHKKEWETTDTDLVHLLEGLKGGVERKLDKIGEIIYSYGAVRFGVKSTTPNLGTQKNPSVNLKSRRQQEIERLVKERRNLRKQWRKATEVERKGLEPLQGDIKQRIATLRRAECLRKQYKKKERTRTAFYKDPYKFVKYLFVKEKTGTLKVPLRELEKHLRKTYSDNQRFVPARIPDDMPPIQPPEHQLEARPPTWSEVRGTVKQARTASAPGPNGVPYRLYKNAPGVLKYLWKLMKVAWEKGIIPKAWRRAGGILIPKEKNSSTIDQFRQISLLNVEGKIFFSVVTQRLSVFLQKNNFVDTSVQKAGISGFSGCLEHTNVIWHQIQTAKKEKKDLHVVFLDLANAFGSVPHEILWTAFKFFQVPEGVTRLVKAYFQDLQFCVTIQASTTAWQHLEIGIIAGCTISPLAFTMAMELIIRASRWVVGGERLKSGLRLPPIRAYMDDMTTITTTNACTKRLLDKLQGNIKWARMEIKPSKSRSISIVKGQLTNERFQVNNEPIPTVLEKPIKSLGRWYSAELKDSKQIEQLRQDTISGLKKINNTALPGKLKLWCFQFGLLPRLMWPISIYEVTLSHAIRLERLVNAQVRKWLGLPRCLTSIGLYGNGALSLPISSLVEEYKCAKSRLEMTLTESRDPVVRGAAPILATGRKWKPSAAVAAAKAALKHRDIVGQVQHGRGGLGLEAATPTWQKATPTERRHMVVEEVRHQEEAARCAKAVSQAQQGRWMKWDGVERRKITWSEMWGMEANRLSFIIRATYDVLPSPTNLHLWYGEDPACSLCAGAAPATLKHIMVGCKTSLTQGRYTWRHNQVLRCLAAELENKRATTNAAPLNAQTTIPRRTTFMREGEKQWTKPSLPDCGPLNAARDWEMRVDLNQRLTFPPEIAATNLRPDLVLWSKSCRRVFIVEMTVPWEDAIDEAFERKRLRYANLAAEAEGRGWNVKVWPVEVGCRGFVASSTTRLLKEVGIRGQSQRRAIKELATVAERSSHWLWLKRRDSTWAAK

SEQ ID NO: 8752 - protein, 1164 aa, Carassius auratus
MATESSKEKIPLESARVGAEDDSSVAYTVTDPGMETTMNQMFSMGVDGVTVLAGHKLQSCICGWKKITSEKGLKIHQGRKKCLREPSEGPRIDHYFLRGRANQSSEAQWQDIHHSPQGIRTPDEAQPSTEPPTDMSPEPIQPQTAVERKMNGRKPQILWPKSCQKKEWETTDTDLVHLLEGLKGGVERKLDKIGEIIYSYGAVRFGVKSTTPNLGTQKNPSVNLKSRRQQEIERLVKERRNLRKQWRKATEVERKGLEALQGDIKQRIATLRRAECLRKQYKKKERTRTAFYKDPYKFVKYLFVKEKTGTLKVPLRELEKHLRKTYSDNQRFVPARIPDDMPPIQPPEHQLEARPPTWSEVRSTVKRARTASAPGPNGVPYRFYKNAPGVLKYLWKLMKVAWEKGIIPKAWRRAGGILIPKEKNSSTIDQFRQISLLNVEGKIFFSVVAQRLSVFLQKNNFVDTSVQKAGISGFSGCLEHTNVIWHQIQTAKKEKKDLHVVFLDLANAFGSVPHEILWTAFKFFQVPEGVTRLVKAYFQDLQFCVTIQASTTAWQHLEIGIMAGCTISPLAFTMAMELIIRASRWVVGGERLKSGLRLPPIRAYMDDMTTITTTNACTKRLLDKLQGNIKWARMEIKPSKSRSISIVKGQLTNERFQVNNEPIPTVLEKPIKSLGRWYSAELKDSKQIEQLRQDTISGLKKINNTALPGKLKLWCFQFGLLPRLMWPISIYEVTLSHAIRLERLVNAQVRKWLGLPRCLTSIGLYGNGALSLPISSLVEEYKCAKSRLEMTLTESRDPVVRGAAPILATGRKWKPSAAVAAAKAALKHRDIVGQVQHGRGGLGLEAATPTWQKATPTERRHMVVEEVRHQEEAARCAKAVSQAQQGRWMKWDGVERRKITWSEMWGMEANRLSFIIRATYDVLPSPTNLHLWYGEDPACSLCAGAAPATLKHIMVGCKTSLTQGRYTWRHNQVLRCLAAELENKRATTNAAPLNAQTTIPRRTTFMREGEKQWTKPSLPDCGPLNAARDWEMRVDLNQRLTFPPEIAATNLRPDLVLWSKSCRRVFIVEMTVPWEDAINEAFEWKRLRYANLAAEAEGRGWNVKVWPVEVGCRGFVASSTTRLLKEVGIRGQSQRRAIKELATVAERSSHWLWLKRRDATWAAK

SEQ ID NO: 8753 - protein, 1180 aa, Gobiocypris rarus
MVAGSLHYIVTWIQPTMATKSSKGKIPLESVRAGAEDDSSVDHTVTDPGMETTMNQMFSTGVDGVTVLAGHKLQSCICGWKKITSEKGLKIHQGRKKCLREPSEGPRIDHYFLRGRANQSSEAQWQDIHHSPQGIRTPDEAQPSTEPTTDMSPEPIQPQTAVERKMNGRKPQILWPKSCQKKEWETTDTDLVHLLEGLKGGVERRLDKIGEIIYNYGAERFGVKSTTPKLGAQKNPSVNLKSRRQQEIERLVKERRNLRKQWTKATEVERKGLEALQGDIKQRIATLRRAECLRKQHKKKERTRTAFYRDPYKFVKDLFVKEKTGTLKVPLRELEKHLRKTYSDNQRFVPASIPDDMPPIQPPEHQMEVRPPTWSEVESTVKRARTASAPGPNGVPYRLYKNAPGVLKYLWKLMKVAWEKGIIPKAWRRAGGILIPKENNSSSIDQFRQISLLNVEGKIFFSVAAQRLSVFLQKNNFVDTSVQKAGIRGFSGCLEHTNVIWHQIQTAKKEKKDLHVVFLDLANAFGSVPHEILWAAFKFFQVPEGITRLVKAYFQDLQFCVTVQASTTAWQHLEIGIMAGCTISPLAFTMAMELIIRASRWVVGGERLKSGLRLPPIRAYMDDMTTITTTKACTKRLLDKLQGNINWARMEIKPSKSRSISIVKGQLTNERFQVNNEPIPTVLEKPIKSLGRWYSAELKDSKQVEQLRQDTISGLKKINNTALPGKLKLWCFQFGLLPRLMWPISIYEVTLSHAIRLERLVNAQVRKWLGLPRCLTSIGLYGNGALSLPISSLVEEYKCAKSRLEITLSESRDPVVRGAAPTLATGRKWKPSAAVAAAKAALKHRDIVGQVQHGRGGLGLEAATPLWQKATPTERRYMVVEEVRHQEEAARCAKAVSQAQQGRWMKWDGVERRKITWSEMWGMEANRLRFIIRATYDVLPSPTNLHLWYGEDPACPLCAGASPATLKHILVGCKTSLTQGRYTWRHNQVLGCLAAELENKRITTNAAPLNAQTTIPRRTTFMREGEKQWIKPSLPESGTLNAARDWEMRVDLYQRLTFPPEIAATNLRPDLVLWSKSCRRVFIVEMTVPWEDAIDEAFERKRLRYANLAAEAEGRGWNVKVWPVEVGCRGFVASSTTRLLKEVGIRGQSQRRAIKELANAAERSSNWLWLKRTDATWAAK

SEQ ID NO: 8754 - protein, 1079 aa, Takifugu bimaculatus
MDPPVDVITEPIQPQPAVERKLEGRKPQILWPKSCQKEEWETINIDLVHLLEGLKGGVEKKLDKIGEIIYSYGAERFGVKSGNLKLQKEPAHLKSRRQREIERLVKERRCLRKQWKKATEAERKGLEALQGDLKQRLATLRRAECLRKQHKKKERARTSFYRDPYKFVKALFVKEKFGTLKAPIRELEEHLRNTYSDHQRHVPACIPDDMPPIQPVEHQMETRPPTWSEIEGTVKRARAASAPGPNGVPYRLYKNTPDVLRHLWKLMKIAWEKGIIPKAWRRAGGILIPKEKNSSTIDQFRQINLLNVEGKIFFSVVAQRLSAFLQQNNFVDTSVQKAGISGFSGCLEHTNIIWHQIQMAKKDKKDLHVVFLDLANAFGSVPHEVLWTAFTFFQVPEGITRLVKAYFQDLQFCLTAQASTTAWQHLEVGIMVGCTISPLAFTMAMELIIRASRWVVGGERLKNGLRLPPIRAYMDDMTTITTTRACTKRLLEKLQKNIQWARMEIKPSKSGSISIVKGQLANERFHINNEPVPTILEKPIKSLGRWYSAELKDSKQVEQLKQDTISGLRQINSTALPGKLKLWCFQFGLLPRLMWPISIYEVTLSHANRLERLVNAQVRKWLGLPRCLSSVGLYGNGVLSLPISSLVEEYKCAKARLEITLTESRDPFVRGAAPTLATGRKWKPSAAVAEAKTSLRHRDIVGHVQHGRNGLGMEATTPTWQKATPAERRHMVVEEVRHQEEAARCAKAVSQAQQGRWMKWEGVERRRITWSELWSMEASRLSFTIRAVYDVLPSPTNLHLWYGEEPACPQCAAPASLKHILVGCKISLTQGRYTWRHNQVLKCLAAELEKRRVKINSMPPNSQPVAPWKMSFVRGGEKRGSKPAPPEAGALTVARDWEMRVDLSQRLIFPSEVAVTNLRPDLVLWSKSCRRVFIVELTVPWEEAIGEAYERKRLRYANLAAEAEGRGWSVKVWPVEVGCRGFVSRTTYKAPEGNGHQRAGPTEGSKRARCHSRAKQSLAVVETEGHIVGGQVIMWCHCATHTPRFDQPVVGQPWWRVSCVKWLKHLMMPRHTTDDVSSW

SEQ ID NO: 8755 - protein, 1176 aa, Myripristis murdjan
MLARVFHYTVTWIHPTIATKISKGKTPLESARAGAEEDSLADHTVTNLATETTTNQTISTAVAGVTAPAGHKLQSCICGWKKITSEKGLKIHQGRKKCLRELSEGPRIDHYFLRGRANQSTEAQRQDTHHSPQGIRTPDEAQSSTDPPTDMSPEPIQPQFAPERRMNERKLQILWPKSCQKKEWETTDTDIVHLLAGLKGCVDRKLDKIGEIIYNYGAERFGVKSKNPGTQKEPATHPKSRRQQEIERLVKERRSLRKHWKKATEVERKGFEALQGDIKQRLATLRRAECLRKQHKKKERTRAAFYRDPYKFVKDLFTKGKTGTLKTPIRELEEHMRKTYSDNQRHVPASIPEDMPPIHPPEHQMETRPPTWSEVESTVKRARTASAPGPNGVPYRVYKNTPGVLKYLWRLMKVAWEKGIIPKAWRRAGGILIPKEENSSTIDQFRQISLLNVEGKIFFSVVAQRLSAFLQKNNFVDTSVQKAGISGFSGCLEHTNVIWHQVQMAKKEKKDLHVVFLDLANAFGSVPHEILWTAFNFFQVPEGITRLVKAYFQDLQFCITTQATTTAWQHLEIGIMAGCTISPLAFTMAMELIIRASRWVIGGERLKSGLRLPPIRAYMDDMTTITTTSACTKRLLDKLQGNIKWARMEIKPSKSRSISIVKGQLTNVRFHVNNEPIPTVLEKPVKSLGRWYSAELKDSKQLEQLKQDTISGLKQINSTALPGKLKLWCFQFGLLPRLMWPMSIYEVTLSHANRLERLVSAQVRKWLGLPKCLSSIGLYGNGVLSLPISSLVEEYKCAKSRLEMTLTESRDPCVRGAAPTLATGRKWKPSAAVAVAKTALRHRDIVGHVQHGRGGLGLEATTPTWKKATPAERRHMVVEEVRHQEEAARCATAVSQAQQGRWMKWEGVERRNITWSDLWSMESNRISFIIRATYDVLPSPTNLHVWYGEDPACPQCAAPATLKHILVGCKASLTQGRYTWRHNQVLKCLAAELESRRVTTNAMPLNPQPTILQKTSFIREGEKRGIKSSPPDPGPLSAARDWEMRVDLNQRLTFPPEIAATNLRPDLVLWSKSCRRVFIVELTVPWEDTIDEAFERKRLRYANLAAEAEGRGWNVKVWPVEVGCRGFVARSTTRFLKEVGIRGQAQRRAIKELATAAERSSHWLWLKRKDAVWASK

SEQ ID NO: 8756 - protein, 822 aa, Onychostoma macrolepis
MPPIQPPEHQLDTRPLTWSEVENTVKRARTASAPGPNGVPYRLYKNTPGVLKFLWKLMKVTWEKGIIPKAWRRAGWILIPKEKNSSTIHQFRQISLLNVEGKIFFSVVAQRLSAFLQKNNYVDVAVQKAGISGFSGCLEHANVIWHQVQTAKKEKKDLHVVFLDLANAFGSVPHEVLWAAFNFFQVPEGITRLVKAYFQDLQFCITTQDSTTAWQHLEIGIMAGCTISPLAFTMAMELIIRASRWVVGGERLKSGLRLTPIRAYMDDMTTITTTNACTKRLLYKLQGNIKWARMEIKPSKSRSISIVKGQIINDRFLINGEPIPTILEKPIKSLGRWYNTDLKDADQVEQLKQDTISGLKQINSTALTGKLKLWCLQFGLLPRLMWPISIYEVTLSHANRLERLVNVQVRKWLGLPRCLSSIGLYGNGALSLPISSLVEEYKCSKARLEMTLTESRDPFVRGATPALATGRRWRPGVAVAQAKSALRHRDIVGQVQQGRGGLGLGAKTPTWQKATPAERRRLVVEEVRHQEEADRCARAVSQAKQGRWMRWEGVERRKITWSELWNTESNMLSFTIRATYDVLPSPTNLHLWFGEDPACPQCLAPATLKHILVGCKTSLTQGRYTWRHNQVLKCLAATLENKRVTVNGMPLEAQTTFRQPTSFVREGEKCSTNRLPLDSCPLNAARDWEMRVDLSQRLIFPPEIAVTNLRPDLVLWSKSCQHVFIVELTVPWEEDIDEAFERKRVRYADLAAEAVDRGWKVNVHPVEVGCRGYVASSIIRLLKELGIRGQAQRKTIKDLAAATERSSHWLWLKRKETVWAPK

SEQ ID NO: 8757 - protein, 1190 aa, Symphodus melops
MSAGTNRYAVNWIYPTLATKTSRGITPLESARAGAQDDSSVDHTVTDHGTEMTTTLMTSTVTNEETALAGHKLQSCTCGWKKITSEKGLKIHQGRKRCLKQLQKGPRIDHYFLRGRSNQSIETQWQDAHHSPQGIRTPEEAQPVTNPLMESCTEQSSEPTQPQLAIERKMEGRKPLIMWPKSCQNKEWENTDIDLVHLLEGLKGGVERKLDKMGEIIYTYGAERFGVKSSTQKEPSTKPMSRRQQEIERLVKERRGLKKQWKKATRTERNGLEELQADIKQRLATLRRAECLRRQRKKKERVRTAFYRDPYRFVKDIFAKEKTGTLKVPVRELEEHLKKIYSDNQRHEPVIIPDDMPPIQPPMHQMDSKPPTWSEVESAIKRARTSSAPRPNGIPYRLYKNTPGVRKYLWKLMKVAWEKCIIPKAWRRAGGTLIPKEKNSSTIDQFRQINLLNVEGKIFFSVVAKRLSVFLQRNNFVDTSVQKAGIGGFSGCLEHANTIWHQVQTAKKEKRDLHVVFLDLANAFGSVPHEVLWAAFDFFQIPEDITRLVRTYFQDLQFCVTAQSVTTTWQRLEVGIMAGCTISPLAFTMAMELIIRASRWVVGGERLKSGLRLPPIRAYMDDMTTITTTKACTRRLLDKLQTNIRWARMEIKPSKSRSISLVKGQLSNERFHINDEPIPTIQEKPIKSLGRWYNANLKDTNQVEQLKQDTICGLKQINNTALPGKLKLWCFQFGLLPRLMWPLSMYEITLSHVNRLEQLVNAQVRKWLGLPKCLSTIGLYGNGALSLPISSLVEEYKCAKTRLEMTLTDSRDPFVRGATITLATGRKWRPVTAVAQAKAALRHRDIVGKVQQGRQGLGLGTTTPTWQKATPSERRQLVVEEVRHQEEAARRATAVSQVKQGRWMKWEGVERRKITWSEMWSMEANRVSFIIRATYDTLPSPTNLHLWFGEDPACPQCAAPATLKHILVGCKTSLNQGRYTWRHNQVLKCLAAELEKKRVTTNTMPRKHLPLTTFSKTAFVREGEKQLIKSLNHSSPLDAARDWEMSVDLGQRLTFPPEIAMTNLRPDLVLWSTSCRRVFIIELTVPWEEAIDEAYERKSLRYANLAADAEDRGWSVKVRPVEVGCRGFVASSTTRLLKEVGIRGQTQRKAIKELASVAERSSHWLWMKRKETVWAAKRLQGAPSVTHARV

SEQ ID NO: 8758 - protein, 1190 aa, Symphodus melops
MSAGTNRYAVNWIYPTLATKTSRGITPLESARAGAQDDSSVDHTVTDHGTEMTTTLMTSTVTNEETALAGHKLQSCTCGWKKITSEKGLKIHQGRKRCLKQLQKGPRIDHYFLRGRSNQSIETQWQDAHHSPQGIRTPEEAQPVTNPLMESCTEQSSEPTQPQLAIERKMEGRKPLIMWPKSCQNKEWENTDIDLVHLLEGLKGGVERKLDKMGEIIYTYGAERFGVKSSTQKEPSTKPMSRRQQEIERLVKERRGLKKQWKKATRTERNGLEELQADIKQRLATLRRAECLRRQRKKKERVRTAFYRDPYRFVKDIFAKEKTGTLKVPVRELEEHLKKIYSDNQRHEPVIIPDDMPPIQPPMHQMDSKPPTWSEVESAIKRARTSSAPGPNGVPYRLYKNTPGVRKYLWKLMKVAWEKCIIPKAWRRAGGTLIPKEKNSSTIDQFRQINLLNVEGKIFFSVVAKRLSVFLQRNNFVDTSVQKAGIGGFSGCLEHANTIWHQVQTAKKEKRDLHVVFLDLANAFGSVPHEVLWAAFDFFQIPEDITRLVRTYFQDLQFCVTAQSVTTTWQRLEVGIMAGCTISPLAFTMAMELIIRASRWVVGGERLKSGLRLPPIRAYMDDMTTITTTKACTRRLLDKLQTNIRWARMEIKPSKSRSISLVKGQLSNERFHINDEPIPTIQEKPIKSLGRWYNANLKDTNQVEQLKQDTICGLKQINNTALPGKLKLWCFQFGLLPRLMWPLSMYEITLSHVNRLEQLVNAQVRKWLGLPKCLSTIGLYGNGALSLPISSLVEEYKCAKTRLEMTLTDSRDPFVRGATITLATGRKWRPVTAVAQAKAALRHRDIVGKVQQGRQGLGLGTTTPTWQKATPSERRQLVVEEVRHQEEAARRATAVSQVKQGRWMKWEGVERRKITWSEMWSMEANRVSFIIRATYDTLPSPTNLHLWFGEDPACPQCAAPATLKHILVGCKTSLNQGRYTWRHNQVLKCLAAELEKKRVTTNTMPRKHLPLTTFSKTAFVREGEKQLIKSLNHSSPLDAARDWEMSVDLGQRLTFPPEIAMTNLRPDLVLWSTSCRRVFIIELTVPWEEAIDEAYERKSLRYANLAADAEDRGWSVKVRPVEVGCRGFVASSTTRLLKEVGIRGQTQRKAIKELASVAERSSHWLWMKRKETVWAAKRLQGAPSVTHARV
